United States Patent Application Publication US 2006/0134663 A1 - sequence listing, part 111

SEQ ID NO: 345690 - DNA, 1000 bp, Homo Sapiens
tttttttttttttttttttttttttttttttttttttttttttttttttttttttttttttttttttattttacaatttataaaacatcagccgcctgcccccgctcgcccccagctcagccccgagtggcccggcgcccgctcgttccctcctctcgcccctttgccgagtctttgtctggccccagccccgcggggccccgggtccctgtgccctcgggggtccctagaaggcgacaatggctcgagtccaggcgccgaggctggcgagcgcctgcttggcgcacagctgcccgttgagcggcggcggctgctccgaggagtccggctgtcggctcaccagccccgagaagccggagccaaagatggagatcaagtttgagatgttggacgcgtccggggacgagtccgggcagaagtcctcgaagcgggcgcgcttgcagggggcgaacggggcgcggagcaggcggccggggcgcgagggtcccgcgggcagagcgcagcgggcgcgggcggcggcagcggcagcggcagcggcgcaggacccggctgcagaggctccaagggctgcccgcggtggggcgcgccgtgcggcggctggagcgcggcgcacccgggcagctccgagagcgcccccgcgccgcccgcgggcgctccggccgccgccgccgccgcgcagcccctgggcgccgggtgctggtgctggtgcagctgctgctggaggtgcagctggtggagctggtggagctggtgcagctggtgccgggcggccgactcgcgcgcctccgcgtccccgccgccgccaagttggagcgggccgaagtcggccgcgctggccggcatgcccggcgccgcgtacgctaggtgctggtgctggtggtggggcggctgctgctgttgctgctgctgctggcgccggtagagctcggcgtagcgctcgctcaggtagagctggcgcgcgttgcggagcacgtaggacaccaggaggttcttgtgcagc

SEQ ID NO: 345691 - DNA, 1000 bp, Homo Sapiens; identical to SEQ ID NO: 159628

SEQ ID NO: 345692 - DNA, 1000 bp, Homo Sapiens
ggggaagaaaaagaggtttaattggacttacagttccacatggctgggaaagcctcagaatcatggtgggaggcaaaaggcacttcttacatggcagcagcaaaagaaaatgagaaggatgcaaaagcagaagcccctgataaaaccatcagatcttgtgagacttattcactaccacaagaacaatatgggggaaaccgcccccttgattcaaattatctctcactggatccctcctataaaatgtgggaattatgggagtacacattcaagatgagatttgggtggggacacagagccaaaccatatcagaggtatattcatatttgcatgagtatatctgaggcaagatacatgcacatagtattattcagttaaattatcttactgcataatctctgccggggaggcaatttttgtgaacacatgaactgttttagactactgggacctcactggctccctgtggtaataatttacttaatagtaaattatccacaggctaggaagtcaaatttgattataacaaactctcttaagtggtagaggttaagaaggaagcaagagacaggcaagcaaaaaacctcaaaaagcagctggaaataggtggtaatgggagagcaggtacttaaaagaagggtgccagtttatcaatgggaaagaaagaagttaaagacatacataatatactttaatcctagtaatttaaaataattggcagagcatggtggctcacacctgtaatcccagcactctgggaggccagggtgggaggaatgcataaggccaggagtttgaataccagcctgggcaacacaggaggactccgtttctacaaaagaaaaaaatgaaaaacaaacaaatccagtattggtggctctaaaaaagagaaaaagaagaaataataaaataaaataatgaaggcaagagaagatacataatgaaggcagtgaaaaaaaacctacaaaatgtaggaacaatggaatctgtccagctctat

SEQ ID NO: 345693 - DNA, 1000 bp, Homo Sapiens
tttttttttttttttttttttttttttttttttttttttttttttttttttttttttttttttttttttttttttttttttaagaggtagtacactttattgaccgggttctctcaacatgttgcaacctctggcaaagccagatcctgggctttgccaccatcccatccaccaaagacagaagagaatgcatctcatgaacatccacgtggcctccagacagcagagcacaggggcgggtgtggggagggaggctgccagccaggggtgggtggacgaggggcgaaagcgctgggtgccgggctgggggcacccctgaggcccctccagacctggccagcccctcactcccccagttgaggtttcgtgtggttcacagtgagactggcttagattggcagcgggcgatggcagacagatgccctccacgctccctacccgccctggccagactcacagagctggcaagagggagagacggaaaatcccgttccccgtgtctccctccgggacagggaagccccttctctggaggggtaaaggggagaggcctagtctctggacatcccccaggctactaaggaagggccattcactcctggctcagaagtttctagaacatcttggtgaaagtgcccgccattactcccaattagaaaaaggtttttgaaatctaggagttgactggggtgcctcaaaccaaacagtaaaaaccctggtaagacctaggtttaaaaaggcagctctacctttgcttaggaggctagggaggtccgtgaaggcgttggctcagggcagcaggggtaaggagtgccctgggaatggggcagggaccaggggcaagatgcaggaagcggtgatccatgggacatggcaggtcgtctttcagtgctgcaggcctgggctcggagggcagctgggggcctccgtgggcacatctgccaggcaggcaccgggtcctctgccccaccgggagaagcaggggccccccatcaggcct

SEQ ID NO: 345694 - DNA, 1000 bp, Homo Sapiens
ttttttttaagaggtagtacactttattgaccgggttctctcaacatgttgcaacctctggcaaagccagatcctgggctttgccaccatcccatccaccaaagacagaagagaatgcatctcatgaacatccacgtggcctccagacagcagagcacaggggcgggtgtggggagggaggctgccagccaggggtgggtggacgaggggcgaaagcgctgggtgccgggctgggggcacccctgaggcccctccagacctggccagcccctcactcccccagttgaggtttcgtgtggttcacagtgagactggcttagattggcagcgggcgatggcagacagatgccctccacgctccctacccgccctggccagactcacagagctggcaagagggagagacggaaaatcccgttccccgtgtctccctccgggacagggaagccccttctctggaggggtaaaggggagaggcctagtctctggacatcccccaggctactaaggaagggccattcactcctggctcagaagtttctagaacatcttggtgaaagtgcccgccattactcccaattagaaaaaggtttttgaaatctaggagttgactggggtgcctcaaaccaaacagtaaaaaccctggtaagacctaggtttaaaaaggcagctctacctttgcttaggaggctagggaggtccgtgaaggcgttggctcagggcagcaggggtaaggagtgccctgggaatggggcagggaccaggggcaagatgcaggaagcggtgatccatgggacatggcaggtcgtctttcagtgctgcaggcctgggctcggagggcagctgggggcctccgtgggcacatctgccaggcaggcaccgggtcctctgccccaccgggagaagcaggggccccccatcaggccttgtgactgccgttggctacaggctcgttgtggccagctgtgaagtctgcggcgggctgaagccccagcatctg

SEQ ID NO: 345695 - DNA, 1000 bp, Homo Sapiens
gtaaagacagatatatttatttcatatgacagcacgtttcacaggatatgtacagaatgtctgtgtaccactgactttaatactgtacttctataaagtttatagttataaatattgtatgccacataagcaataaaattcttacatataaacagcaatctaatatagagaacacagagttcacaaagagatccttagtgtctaacttctgctctgcttttaacagaactagtaaatatttaataatacatagaataatggctagttatttgcagcatacctttaactttcataactttgtgcattttcagcaacttgccaagtataattttcctgataaaggctgggctgctgatatgtatattttagacagtagtttatattcaataggaaacattgctcacagatctgcaatttgcactaatgaagtttacctaacaatgaattattttgctaatggagagcaaataccatatacactagtcacatggatgttaaagccacagtttcaacaagttaattcacattttgaagcaactgcttatagtaatactgctgtttaagacgctactgctgaaatgattagaacctccaaaaagcacaatataaaactcacaagagttatttctaacagcaaatcttggctgttaacagagaagattacttctataaatatagtattttgataacatttgagcatttagaaaaatgctttttttctaatagatttgctttataagtgcagtgcagtttgctgtgcttttaacattctacatattcgtagccatgaacgctattttttgatattccctcaatgtacatctttaaaggttaagtgtggacataggaatttaggtggacatatacaactctttatataaaaggaatgttaatgtaagtcttaatgggtaaagatgattgtaactgaaactgacaaagaaacaactattgctcaaggagttttctgattggtttacttaatgatatcaaaatactacat

SEQ ID NO: 345696 - DNA, 1000 bp, Homo Sapiens
tttttttttttttttttttttttttttagcttgcaattcttattacatctttattatcagtcaaggtcacagtcatattaaaaatatataatttaattctcaaataatgtctttgttcctctttttcctaaagtcctttgtcaaaagaagtcaaagttgaatatattttgtagctgatatacatatgctgacagacagcacaatgttctgaaatgaaaacagagatattattgctttataaaaagaaacttggtcccagagaggagaaaaatagatagtacacaagagtgacataagaaaaaaagcaaagcattatcggagaattgtttccatttaagtgaaagcagtatctgtgatttctggctgactgctccaagtaccgtgtatctcctacatcagtgctttgaatgtattcttctataaatgcatgttaaattaatgtaacagtaataataaaacaaaaataactatacagcaattagtccaccattaccaaaagggtaacaagttcacaaataatctcctcccaaatttccaaccatgatgatttttggaattgtagtaaggcttccctttgtagatttattgaaaatgtttcgtactcctacaagtttgccctgccttcctataaagagtgaaattcagtttgaatcgactggtggataatttttccatttttcctcaggcaatttgagttactccaataaattcaaatatgggccagaggaaatcatctctcagatgggcagtgattggccagtcagcaggagaagctgcttatgccttgtttggtacattgtggaaaaacacactttaataaatacgcagtcatgcctgagtacccatcctccatcccgccaccccccagtatggcaaaaatctggtcagagtccatttgggaataattccatggttcctgggatcccaaagcttccagagtgctggctgatcagggagtgtacagtcagtcctgggtggcaaatgtcccattttttaagta

SEQ ID NO: 345697 - DNA, 1000 bp, Homo Sapiens
tttttttttttttttttttaaagattattacaaagattatgtaattaaaacaatacagaacagaccagggttgactacaagatcaatgggacagaataaagttacatatccaatgcctgctgctgaccacagggatttgtcacagatctcatcacttagaaaccctacagtggtttccctggtcaccttccagtcaccactacaccttggctccttttagcactcctccctagcttatcactatatgaaattgctttatctctttgtattgtctgtcacctgccaccataatgtgaatttctagacctccatagcatgcaaagctctagaacagttctttgaacacagaaggtgcttgacaaatattttctgaaagaaaaagaagatacttcaatacctcagtttactaaggacgtggggctaccatatggctgcctgaacaaatacagcttgacattcactttcttgctactgattgaagtgtattaacttgtgtaatcacacaactaccctatggggtaggtgcccttatttctccatttggcagagagggactaagtatcttaaccaaggtcacacggctttcaagtgccagagccaggactcagatctacacaggtctggctccagagcccccaatctaacctcttaacctctctgctttactgggctaaaccttcaccacctatcatatggaaaaagaaattcaatagaaagttatatggaaaaaatacaaccctgtgttaatattagaaaatccatagtaacatgtagaatgaggaagcttcctcaagcccaactatacaggtcagatcggttgaaaaaataaaactaacaaattttacatgtcaaaatatgcaatatttgaaaatccaaggctaatatctttaaataggcaaagatttattaataccccttgacacacaaacaggaagtgagaaaatgggcaactgacacaaatcgataattaactgtgaggacataggtggtggagtctctc

SEQ ID NO: 345698 - DNA, 1000 bp, Homo Sapiens; identical to SEQ ID NO: 161259

SEQ ID NO: 345699 - DNA, 1000 bp, Homo Sapiens
tttttttttttttttgttttttttttttttttttttttttttttttttttttttttttttttttcaccattatttgttaattttattttgatttttaaaaggcattattcagtgtacaattaacaaagaaatcagttttctactctactgtacttaggatgcttcaaaaacatcaggtgaaatgatctatgctttaagagccagaaaactcaggcctcagcaactaaaacagagaattccaaaattgtaattacaaatcagatggtaagcctaatttcatgcccctaatattcagatttgtggacactgcaagaggaaatatcatttgcttccaaatatctggcttgaatattgctgcagttaaaggatctcgctaaggttaaacaacaaacccaaaccacttagagcttcacagtttagctgctttagcaagtgaagaggtagtcggtattcaggatgctgtgggaatgcaaatgatttgattttgaggcatggctgttcctttttcactatgcccctcactctgaacaagctcatgctttcactcaatcaaaacctacttatcacagccgttctccaggttccgaacctccgtatggcagatcaaagtccataatcatttctatttataaatgccaaaatagtcattaagattatctgaggacatcacttccataggtaatttaaaggatttcttttcaggtagagcagcacttaaagcacataccttctccagtctttctgggtcaaagaataatgagcagagtccaccctgcgtttggtggtctttggtcttatgatttggggaggcaccatggatgaacagctttaaatgtaaaggtcaatgtaaacagaaattttggagttttatcttgtgcctggtatagcagcagactcccatgatgaatttcaagttaaatactgttacctaaaatgtgctgtacctcagaaaacggaattccatgtgaaaaactgtagcatacaggtatatacgagaaag

SEQ ID NO: 345700 - DNA, 1000 bp, Homo Sapiens
ttttttttttttttttggcttaggattactttatatatatatataaagaaaaaaattaatagcaagttacgagaaaatgtacatttttcttgtaatgtatctttacatatttcaaagaggcaagtggcagcaaatgtgaaataagcataagcaaagtgctttcatttaagtgcttagaggattaatcaaggagcacttcctagaagtgtgttttgaagattttaagagaaggtacaaatattcactggtgacgaggatggagtcagaaagagggaagtaaaacacacattatgcattgggagctgcattagaaaggggaatggatgctaacaaaaagaaaaaacatctcttgcaggatggtgaagcaggctttcagctgggatggagaagggatgctgagttacaatcattggtgaagttattgagatgtcatttcagccttgctactcacattttgctgggtaatgtgctagatcctaagggaaaagctaaagagaagggagagacagtgcttgacctgtaggtacttatgatcttgctgatgagacaaggcaacaggaagttaaaggaggatccttgaaagccagtaagaggaacttggattttatacagtatgtgatgacaggagccattggaggttctcatgtatcatcttacctctatcatctgctcagaagggagaggtctgagctggggaagatcaaactgagcaggtggctaggttttaatctttatagctatatgtaatcagcagaagagctttttcccacacaaaactattttgaatcactttagaaaaaaatgagctgcctaaaatcttctgtccatgattaacaattaatagaaaatcactggtttgctcctgcaaacagcacttaatgtcagtagcttcaggctgtttttcaattttacagtaaattttttaccgaaacaaatttaggtagctattttgtccatgggcttttgtagtggaaagatgatgtgagtaaaatagaataat

SEQ ID NO: 345701 - DNA, 1000 bp, Homo Sapiens
ttttttttttggtgccatgcttttattcaaatgaaaggggaaaaactacactgtaccaggaaatagcaagtatgacagtattttacagcacagcatcttaaaaaacaaaaaacctgtaagcaatgctctagagtggacaggtaagcacaccatacactgtacattgctcaacagtgtccatgaaaccataattaaatagctgaatttggctttaaacagccaaataaaactgtaacagtcattctaatacaaaacggaaaaaccaagaactaaatctttccaaagctgtgtcaaatagcagaatttgacaggctgcactggtaaccacgacaaatgtttggcaaacttaatggaatagttatcataataatttgacctctgatgatgaaagcaccagtgtgtttcagtaaggttgacgaaaatcctcagactttatgaaatggcatatttttcaactgtataattttaaaaacataattaaaaaaaagctgcaccataataaaaaaatctgcagacttaaagaaatatatccatattccttctgcattaataaagtaaaatcttatactgagagcaatgaactctgtggcaatattcacattctacctttagaccttatagacattcaattcaactgttggacacacacaaatttaagaataaagggtggtcctgtttagttttaaagtttctccattgtcttgcatccaattttctttatttaatagcgaagtaatatcacaaagattgctttgatgagggaaatttagttaatattgaaatgaacaaatttagtaacgtaaaatgcttattaaattatccttttgactactattcacattttgattagattcatttataattttttaaactagttttaatctaaacgtgtatttgactatcatttccttctaactgtgatagaaattactgtccaaaaggtaaaatgtgcaattccccatttttaatatccatatgttatatacacaatatgtataca

SEQ ID NO: 345702 - DNA, 1000 bp, Homo Sapiens; identical to SEQ ID NO: 161260

SEQ ID NO: 345703 - DNA, 1000 bp, Homo Sapiens
tttttttttaacaaatggtttattgatatgttataatgaatgacaaaatattagtatctaattctagactttatggccaccccataggatgaatctttggaacagaaaaaaaaaataaagaatttgttttctcataatcataaagctgttatactcagtccaggcacagctagtacaacattctgctcaaccccacaggctccattccctttaccacatatttataatatgtttgggtcactcataggagtgaaacactgtcagcatcaatagttagcagcactttcaaaatacattttattgtcccgaatagaaaccttaactattcaattagtccagtaattccaaatggtcttattacttctatacataagatatgatcttacaacatttatgtagctaaatacttaacttcccatgctttttgaggattcccaaaagactttagggggttcccaagactttcagggttttttttttttttcacaataaaagaaaggaacagtgtcaatccataaagtcagaccagcagtttaataagatcctcttcatagctcagttctcagtgcatacagagattcaatatagccccatcgctctcagttattagaatctgagagggataaaagcaataactattgtttaaaagcctaagagtgaaaacagatgtccaaaaaaaaaaagaaaaaaaaaagccaaattctttcatcccaggatgtctgaaaaggagagactctatggagcgtggatgtagaaaaggagttattcctaccggaaaaaaatgaactgtggacacagtcactcaagaccagagaaacaaccactatgagtaagtagcttcaatttcactgttaccaggagggcacacaccagaaagcctgggacaaagcctgggctagagccctcaggattcattctcaggcttcctggtgctgtggttcaacagcctttgtggggatggggagaaccagagactatcaccatcacatgtcaaaaatat

SEQ ID NO: 345704 - DNA, 1000 bp, Homo Sapiens
cacgtctctaggaaaaactttttattacaaaatttttacaagtaggtgctgggctggctgccagcccgtgggctgtgaccctccccagtacagacccagactacacagaaggagcctctaagggctgattctcaggaccaaggccccactctctggagacccagccctgaggaggaggaggaggagcacggggcctgcagtgatgcccaggctgaagcgggctggaggggttcaaggagctggattgagcgctctttgcccacccaggctcctgtgggtaccagagtctcagttcctatttcctgggctgccttaggggcagagacgctgagggtggggtggaaggatggagaagacagtggtggggtggagcggtgggggatagagggtgggtggaggaatgcaggatacaggggcggggagagaggttgggagaggggtgggtggaggggtggggatacaggggtgggaggtacaggggttgtgggaggggtgggagtacggggtggggatacaggggttgggggagggatggggcagctgcccccgtcggcccctaaatggtgcttggcagcttggcggagtgcacctgacgcagcagcaggacaagcgcagccaggagcgcggaggcgaagagcagcaggaggacgacccaggagctgaagtctgtgcccttgcgcagccccggcgggtcggcggggatcaggttggtcaggttcagcatgtagccgagcgcccagcccactgcagtgtccgcggccttcttctggaagatcacgccgccgaaggcgcgctcgtcgaagccgtagccgcgactcagcagctgctgcacgaacatggccccggcgcagtagtcggccaggcgggcccgttgccctggcacccgagcttgcagctgagcccaggtctggttgcagacattcactgcggctgcctccagctgctgcagggtggccacgggcagccccatcgaagtccgcaaaaagtccacagtgtagaa

SEQ ID NO: 345705 - DNA, 1000 bp, Homo Sapiens
tttttttttttttttttgaagtttggtgctgttttaatgatcaagtgtaggggaaggggtgaggagggattattctgttagtaggctctgggaatcccatggtcaggtagaaagagggattcctcaacaatgaggagtctgatcatctccctcaatcgctgataagcactctggtcagggagatatctctgaagacttgcagcatcttcacagatgctggcgggaatcgatgggcaaagttgtaaatgcgttggccatttaccattaccttgtattccttgtgacgcacatagatgcacagctcaaatggtttgccatcttcaaagggtaaatagtagcatttctcctcatatctccatatgccaaacacacaactgttcatgattgcaggatgaccaaagtgcagtcggaattggaaagcaatatctgagtcctcatccatcccagtgtagaaattcacctccagctgtgggtccttgacaaaagtgaggatcggtgtccctgtgattatcacgcacgaaccaacaggcaaggaaacaggcagtgtgtatggtaccacaatcatcaagggcaatggacgtccttcccagaagcggcacacattactgacagcacagccccagtacttgcacaaatgaagcctgtgggtcagggacataactggagggaatgattgatttctacgacgactgcaagtggttgatgatttttctgtatttttgagatagggtcttgctctgtcacccaggctgatatgcagtggtgcaatcacagctcactgaaacatcgaactcctggactgcagtgatcctcacacatctgccccctcttgtgtagctggggtgaaaggtgtctgccactgggtagtgatgacattgttctctccttctgggcagctcttcggaattgtgtccagtcttctgtgtgaatctctgagtgggatcatttaaatgctgcaactcagagatgccctttggcttcatgccagattccaagcccc

SEQ ID NO: 345706 - DNA, 1000 bp, Homo Sapiens
agcctattgaatatttcctacttttatttgacaataacaaattgtatataaaaaggaagaaggaaggcggggaggccctggatctccccttctctgtttccccaagcatccccctctaggccccagcaggcaccacccccttcctgccttgtggtggggtggggattgacaggcatgaaaatggtgtgattttgtgtgtgtgtgtgtgtgtgtgtgttgaggtgttgggggtcaaggatggagggggtcaaggagtagagagagggccttccctcatcccccatcagtggcaccctgagaggggtcttaagagggttatgagggtccacagatgtgcctcagcctatgagacggtagaagatccagcatccaaaagtgacccagtgactggcccagctgagctctgaccacttgtggacagtgtatgccatgccgtagccctgctcctctgtggtgtcatccacatcgacatcaaacagggagcccaggtaggccaggtggaagatggccagagctccaaagagcaagtttaaggctcgcacccccaggcccaagcgatgctggtgcgaacagtctggcgggcaccgctttgacaagacacaggcactgaggatccgagccaggcgcttccggaggacatgctccacgtaagtgataaaagccagggacagcaggaccgcagccaggtggaaactgaagccatgtaggagggcgctggctgcataggtgaccagcacagccgagaaggtccccaggcggagagcattcttgaaaacatagttatttagccaataagacatgggcaggttccagcttgtgacaacttccaccattgaccgaggcagctccacattcagtggcttggacaccgtcaggtcccattccaggtgatccttctcctcggtaaagccagcccccgccaacgtggccgtggcctcggaaagaaagcccacaaaatagttgctgaagtggaaggagacagcactctcgtaggctcgca

SEQ ID NO: 345707 - DNA, 1000 bp, Homo Sapiens
tttttttttttttttttttgatcacaataatagcctttataggtgtttctagagagatggggtgagaaaaaataggatataaataaccattatttacaacttgcaacagtaaagttcccccagacaccccttcaagattgaactccaaagcctctggggcagagactgggcaccaccgagcaaatacaaaaatccacgctctgactccaggtgcggatggaggagacgcgtcaggcctcccgagcgtagatggaaggagcagatatgacataaatcccttgagggtctacatcttcagggcgattccaatctacggacgagctcggaccatccccggaaccctcctgcgtccttaggttgttgagtgcatccgggagtgcgtggactgacggctccggggtcccagccagcaagcgagacccagcatcctgggagtggccacggcggcgcacgtggaccagcaagagcgcagcgccggccacgcccgcggccacgagcagtcccagagccggaggcaaaaggtagcgctgagggtccccgggcctgaggcccggcggggccgcgggcaaggcgcttgcgccgtcggggtgcactgggaactcacaccgcgctcccatgtagccgggagcgcaagcgcagacgaggccggagaagtgggcgtagcagcggccgccgtgagcacaggggcgcgcggcgcacgggtccgcgcgctcgcggcagtcgcggccgccgaagcccagcgcgcaggagcagcggtgcgcgccgccgccctccacacacgtgccgccgttagcgcaggcgcggcccgcgcagtcgtccaggtcgtgctcgcagcgaggacccgcgaagccggcgcggcagcggcagcgcagggcgtggcccaggtccaggcagagtccgccattgcggcatggctgcaggctgcaccggtccaccctcttctcacagttggagccttggaaaccgggtgggcagtggcagatgtaggcagagtcagggt

SEQ ID NO: 345708 - DNA, 1000 bp, Homo Sapiens
ttttttttcaggaattcagaacatttattgcaagagctgaataattgtaaataacgtagaactggcaaagcagtaacaaggataattgtttagatatttattctgtcaaagtcatcaaacacccctcacaaaccgacaaaaatgtacttcaataagcaatgcacccctacccattattttccattatactgtggaaaaatgtgaactgctatttacaaagtaattttattttttggtaagaacaaattaactatcagattagcaaaccttttttttaaattttttgttttttttttgttttttttacttttaaattgatggtgaaccgtggcattaagataacttccacttctttcaataaagacattttgttgcatgctatttatttgtttaaatcatctgtcatgccttaacaaaaacctcctaagaatgttcgaatttggatttgtttgcacgtgcaactgagatcttattaacattagttgtcactttattggtttgacctaagtgacaatatgctggtacctgccaggcattgaccaactatgataacaaacagttaaacagcaataattagagatttatccctttatttcccccaactaccctacctggagaatgttctgttacatcatgaaggcacaacacattaaatattttgtggctatggtctaataacacttgtgttacaacaacattattgtatatgaggatcaacacagactctgccatttcaacaaagttgtagacacacatttgcccaattgaaactatttttgaatagtgatttttcttccatatatgctaattttgatacattagttttacatgagtgacaagtacaggatattatatcacttttgatggataacagttttccattactctctcacttaatggtactaattaagtgattttgcttttgcctactttgaaaataagatgataaaaaataggttctgaatttccaagcttttgcagaagtccttttttgtataaa

SEQ ID NO: 345709 - DNA, 1000 bp, Homo Sapiens
tcaggcctgggtgactgaattcttgcagaaagcagtgtagtggccaccatccaaatcaccaaaatggttcaccactgcacagaggttgtatttaggatatttccggaaaattgagcaaatataaggagtgaggtccaagttagtgagtgggtaatgaatatccgttctcagcttcctttttgttgtaccctgaatgtcaaacctttttaggtggaaaataattatttttggtgctttggaaatactggccctcacagcagtttcttgcttggtttcacaaaaggagcagtgaatttcgttgttccaggtcagtgcgtcttgttgaaaaaaacattggagacagtcccgaagggagcattcatatttggatggaatggggagtgagaagacagtgaagacttcgttcttgtaggtgcatttctcacactttaaacatacgatgctataattgagctgctcttcaaacagctgggtgatgatggatgtctcagtggtaatccacttcctgcagcatctctgagtagatcctttctcatatgatcttctccgggagtagtggtacttttttagagcttcatgaagttcatttaggacacaaatcaagaattcctgagcatcttgttgcatctttttcgtaaatgctgggtagaggttgccaagagctgaccagaatatttctggtgagacacagtctgagtctcccagccacatgtctgtcatcagataggcaaaagcagtggcaacttcactgcaatcgcttggaagaagaaacttttgcagagcggtgatatacttcccggtgagaaagtattccaccagcggcaagatgctgcagagacactgtgagatggcattcacgcagcatgtgttgcccaagttccacaagccagtgacaccctgaaaatggggctggttcccatcagcctccttaactggaagggtatcatagtaatctgtgcactctgccaggacgtggtagatatcgaagtcatctgcaggg

SEQ ID NO: 345710 - DNA, 1000 bp, Homo Sapiens
ttttttttttttttcagggtgaaagacactagttagtctgttctttattttccttggaaaattacagggttacttatcaacaaaataactgtccatccggtggggaagtgccatccggtggcttctatgtacaggcccatccctgggaaccacatttccagagggggcctccccctgaggcccccattggccccctcccaggtatccaagaataaatcacatggtgacagctgccggcatgggtgagtgggacccaggcctattacccggccagagggtttgggggcctctctcctggaagcctgctctttccacaccccctttcccagccaggctgtcttggacactcccggggctccgctgaggggcacatgattcccgctttggacttcttttgagatgtcattttaacactgaggcatcctggcctcccttcccggaagatgggttatttgcagtgctgtcttttcttttagtcccggtttttgtacaaaaacaatgatactccccattggactgtatttttgcccaagaaacaaaagtgcctcaacaggtacagttctgctggtcaatctgcttccggcagggctccatggtgacagccacgcccaccccactccggcccgatgtcattcgggtcacctcgctccaggtgtctgtatctgggtcgtaacactccacactgtccaggaacgtgtgaccatcatagcctccaaggacgtagattctcccctggtggacagtgatccccagggcacttcgccggtgcttcatgggggctacgaaagtccacgtctctgtttccacatcgtagcgctccacgctgttcagctggtcctgaccatcatagcccccagcagcatagatacagttgtgcaggacgcagacgcctgccccgcttcggatggtgttcattgctgtgatcattcgccactcgttcctctctgggtagtaacactcagctgaattaaggcggtttgtcccgtcaaagccccccacg

SEQ ID NO: 345711 - DNA, 1000 bp, Homo Sapiens
tttttttttttttttttttttaaatgctgcagacatcagtagtttattgtttgtttagtccaaacacattcaatatggaaactcaaagaatactttccacctgaaacaattaaactagattctactagcatataatgcttaacacattacagcaataaagatggtaatccattgtcttctatacctactaaagccaagatggtaaagccaatttggttgcaatagtgtcataaggatagaatattaccatcaaaaaataaaacaaaatcagcaaataacagtaatggtagatgaatatttttactctgtttcactgaaaagaggacaaaatgttaaaactccacagtactgcaggtgaacaatcaccatgtaaacttctccatatgatgttttaatgttttattcatggtatgtaaagactgaagctgaatggctctttgctctacttttctattattacacttaacatttgtcattacttttggtgccagaacagttttcatggatggcagggcaatatcctgaattggaaattatatatatatatatatatggaaacagaaatacaagaaaatatgcttgggggaaaaaaaacattgacaataaaacaactgcttctttaaaagtagtattaataaaggcttcaaaactccaaagtaattttctggtaagaatttcaagtactatatcagaaagtataaaactgtttcaaacagaaaaaaaaaaaatccttaagccccccaaaaatggaaactatgaaaatctgtgtccccaaaatatatgcaatagtgcaagactttccctcaaacatggaagacctcattcaaagggggaaaaagggacagattttactcatattgcccagtacatgaaaaacaaaatacatgcatcatttgctagtttactaaatagcaaacagttgcataattcagaaccaatttgctactatgtcaagtgcatatcttgtctgttttacaaagatagaatggagaagtcttcc

SEQ ID NO: 345712 - DNA, 1000 bp, Homo Sapiens
tttttttttttttttgaagaattcattgtgtatttattattcacagttaatcactacctaccaaatgctatccgcagagttaaaggattaagtacataggtctttatttaaacactgattttttttttaaatatatacacacaaaacttagttcagcaaggcttcatgatatacaccaattccaaaataaaacaatcaaatggtccaggtgtagaatgccagattccttttatcatctgcgaggaaaagagaagcaggatgaggaagagtgagggaaggcggggacaggctctgcccagaagagctgccgcctcctggcacagcaaacgctccaggcctgggccctgttcatatctggagtcggagggagactcccatcggccgctttgggactgaaaggcccaaggctgtcaccagctcccggaagagagggaggcagtcttgtttttgtcgtgggaaggggtttgggtggagaaaaagattacaggcacatcaccacaggggaccagaagtggagagaagacagagagttctgccgaggccttggtcttcctgtctttccaatcttgccttccccaactctccctgcttcctgggaccatcggtaggggtggggagcagcagtcaacacagcccactgggaagggaggcacaagcagcactccagcttcccagtgctgccctcacactcacctggacaggtcaggggacacaggatgaaagccatggcccaatctaagagcaagacaagtgaaaagtgagtactctcactgtgtaccccagcataggaatagtgaaacctgctacaactggaggctgcgttcccatgacttcctcctccgctctccttgtctgggacttgctggttccaggggtgcatatagggagggggcgggggccacaacccccgagacggtgaggacaggcttccgacccccctgtaagccagatccagtgggatgtgggagagctgggcggtcaccttccctcttgccccggt

SEQ ID NO: 345713 - DNA, 1000 bp, Homo Sapiens
gatgttcatggaaactttattcataatagcctagaactattaatgtccatcatcaaaagaataaacaaattgatatattcataaaatgcagttctacccagcagcagataaatgatttattcataaatgcaacaatatagacaaatcacaaaattactatgctaagtgacaaaagctagaccaaaaaaggttcatattatgtgatttcatttgtagcaaactgatcataaagaaagcagatcagtggtctggtgatggtggggtggcaaggaggattaagtaagaagggatcacaaagaggtactatgaaactttgagagtgatgaatatgttcattaccttgcttatggtgatgatttcatggctgtatgcatatgacaaaacttatcagattgggtactttaaatatgtacagtttattgtatttcaattatacctcaataaagatatttaaaaataaaatccctcctggtacacgattcacaccctgtactctggttttagtattcttatacccaaatcacattaccaaaggttttccatattaaccatacacattatttttctcaggaatcactttagcatccattaataaatgtgttttttctattcccaaagttttaagaattcagtcagcaatgaatacttgtattattcaacagtaaaatttatacataacatgtatgtggcaaaaatatactaaggctttgtccttatgactaagttaattaagtagaatgacagatttttagatattaaaacagtgtatcatttaagatgtttgatgtctaagccagctgatggagaagaaccaatgcagtatcccttctggagagattaagattttcaaggtcatgaaaatattgatagctccagtttctaccctgaaattctatgtctccaattccgatatggatcatataagctttcacaaaatgccaatgcgtggatcacaaattcttcaatacatgtctgatctgccatttccttctcttttttt

SEQ ID NO: 345714 - DNA, 943 bp, Homo Sapiens
tttttttttttttttttttttttttttttttttttttttttttcacttctgaagtcctttattgggccggcaaggccgggagctgccctcggagtggggtcccagtccggagtcttcaggtcagtggcagccctgcccgttctggccggggcaggcggcccctgctgactcgctacttggtgcgcgccttcacatactcccagccctccttggagtactcgcgggccttggagggggccaccgacagagctgacatcaccgtcatgatgcctgcattccaggagtcacggatgggaaagtaaatctttggaggggctgggagctggggtatctgcaggcctgtctgctgacacacgtactggctgaactggtacatggcgggggggaccacctccccagccttctgtagggctgcctggctcttgtcgctgggccccagcagctcctggtcgtacaccaggtagacggcgcccccagccacacttcccttgatgaggaacctcatcagcgaccacacccgggccaccatggtcgctcggatccacgcgcaaggacactcggctcgcccgccgcttcctgtcgcggcgccgcagaggcctctggaaggtgtagtctttcttgcccgacgcaaggtcctctgggagtcgtggtgtcttgcggctctgagactccagagaagggctgcggtctcgcagcggagggccgctgggaaatggacgctttaaggcccgggccgccgcaaggctgtctgggaaatgtagtcagcacggcgctgtttgcacctggccgcggagcctcctgggaaatgtagttcggcccggccctggcaccgtgaggggaaagaggcgtcaggtgcctggctgaagcctgaaggtgacccgaaaacaagtcagagcccgagagatccacccgcgcccgcgcgggggaccaagggcccggattt

SEQ ID NO: 345715 - DNA, 1000 bp, Homo Sapiens
aatatctaccatttattgagaacttatatgccaggcactgtacatatatatttaggcaaatcctcacaacaaccctgtgaggtaggcattattattaaaccaattttgcagatcaggaagctgaggcacagagagaagcattacacagtagatcagatagatactgttatcccatttttagagtagaggaagccaaagcacagaaaagtgaagtgacttgctcaagaccacacagggaggcagtgtcagaaatagaactagaaaccagtattactgcttctaagtctagggtactttctgtagcaccacagctttccccaagcctatttagctggatagagagactaaagcaaatgtggccaattccatctagaaacctccaggccatggggtgggggagttcgggctgggacatgtctggcattttacattttggggaaatttcttctatatttagagattggtgctgccttactagctctactgatagggaaccaaggtgatttataaagccatttctaaaatatgagctatcacattctttgtcatttgtttttttttgtttttactcaccaacactagcaatccattctgttttccacacataaaaataacaattacaaataaaatacatttgcaaatttaaaactccatttataagattgcagtggcagtgcctggcacatattaggtgctcaataaatactggttgaattaatgaatgaatgcatgatattcaacaagttgagaacaacaaagctgtgatgagctgaagctgctggccagttggctgggctcctttactagccaaatgattggctcccatacatctgccttgcagcacatgccattctaatttatatctcagtaaaacttcaaacgactgtagctcatggggccttgcagggcctagaaactggctgaggaaagtaaaatcagaaaccctagctcagccagccatgatacctgggacaacaattgccagatgccagcagccata

SEQ ID NO: 345716 - DNA, 1000 bp, Homo Sapiens
tttttttttttttttttttttttttttttttttttttaaagtttttaataaacttttattttatattcaagataaagcatatacacaattcaatgtggaaataaattactagaaatactctggaaacttttccatttccctctcaaactcacttttttttaagctcataagtctttttacttgattttaagaaacatggcaactataatactaagaaagaactacagctttgtacagaaacatagagccttgtcttgactataaggtttagttggtgttttaataacaacaaaaaagcacaaaagacacaaacactcttcaacaggtttactcaaacagcttcgctcaagaagaaaaaggcacagatttaaagggatgacaataatcattaagaatgaagtaaatggagactcagtcaaaaaatgatacttcatgaattaagtcaagaaaaacaaaagtctttcaaattatctgtcttccttaaaatgaatttttaaattaaattgtataaacatatgatataaagttggtactttaggaagcgtctttgtatattttttatgtacaaatctttgtatacaatttcgatgttccttatatattccctatatagcaaaccgagccaggacctcccaactgcatgcctcaagtccctgtggagcactctggcagctggatggccctacttgctttctgacaaaatagctggaaaggaggagggaccaattaaatgtagtcatcttcaactggctctccattgacatcacaatagtggataaaaattgccactactcgctgaaatacacccttcttcatctgacgcatctctgaaatttcctctcctattgtttccatacagatgtctgcagacagctgtcctttccttctaggagcatagatagtgctttcttcatcgtcttcaaagtcgtatcgagcgaagctgttgggctctgcagctcgtaatgacctcagccaagggaagtcagaaatcatggaatat

SEQ ID NO: 345717 - DNA, 690 bp, Homo Sapiens
tttttgcttttgcagaatgtactttattgacaagtgaatcaagagaaatagacatacattgaactcctcaagacccaggcagagtaggtatgtctttatgaattaaaggaatccaccagcaaaagtataagcagaagtgagaaaagaaggctgcaaaagctggcaagtcaccaagaaacattggctttaactcagcattttccaggatgctttaggctaatctttccaccacttttcactatggccttacagaaggcacatttattgccatatgtctggccatcagagccacagtgtgggttagattcccgagtgcagtagaccttggggtcctggaactcaccacagtcaacctgtcctccctgactgaagacacctgttaaaaagcagaaaagagccagagagaggagcagaaacatgcctgacagtttcattgtgtcagttagctcactcagatcaaggctgctttgtccagctgaggttctctgtcaagacaattcccagaaagccctaaaatacattcagaccacatgagtcctatgcagtttatgcatttaatggggcctgccaacacattaaaaaaatgcttcatgctccccatcaatcttaaaaattgggacaattatgtgtgtcgcacctcagatcttattaatagagaatgtcattttctactggtagcctacattttcc

SEQ ID NO: 345718 - DNA, 1000 bp, Homo Sapiens; identical to SEQ ID NO: 161261

SEQ ID NO: 345719 - DNA, 1000 bp, Homo Sapiens
gttgtaaaaagttatcacattttattatgcacaaatataatttttcacatagttatacatatgtggtgggtaaaaagagaacaagacagacgttaaaagaggaaatgattgactatatagatatggttctgacaatagtattcatttcctctgctaagaaattgatgttaatcctgaaataatgtctttagaaaattatacttgtcagatctaaattttctttgtgcccaacattgtttttttctaaatgacctgcattacactgccatattctttgcttgcttcagggctaggcttactaaatcttagccttggcctttactcagtagtcaaggaaatggctatgcaatctggaagctcagtctctctaacctgtgtttgacatgctggcttgtctgacagctgcatgtctcaggggccagggtctgtaggttccaaaccctgctgtgggggccacctcctccacactttgattaagagtgagtagagaggccaagaatgattaaaatccctttgggagaagggacacatcttagattccaacatgaaaactgaatgtgtttacatgatgtcatagtactactcctggaaaccctcagtctagtagcaacacctcagattaatattaatcagttcatacccaatattgctcttgtcacaaaaaagtaactgtcactttttttgtttgtgtattactctgcatgtgctttttgtcattattattagtgtgaaaccaaactaattgacttgatatgattaataatggtgattagaaaatgggggattagtgtttgagtagaaatagccatgacaaaacattgggaaatggatgaagataaagtgtatccagggagaaaataatagacctaccattgtttgtgatttaaggaactgctgagtcacagctgaagcatggcatctttgacagaagatgagtgattattattcagtttaagaaaacgttgacaacatgctttaaagagtgaaacaggagggaggg

SEQ ID NO: 345720 - DNA, 422 bp, Homo Sapiens
cagcataccgaattttatttattgccactcaggagggtgggggcctgctgaaagacagggtcggggcctgcctcctgcatccccggcccaaaagcccgggccaagaaggacacaggcttcaatggctgtcatgtgttgcagacaacatggtgttgagatcttgcatggtggagggtgacgctggtccctgaagggagatggaggaggaggcagagcttttcaagcaattccaggaagctggactcataggaggaatttgtcagaaaagactccttcagcttcagttgcaaagtcatacccggccctgttccatgtgagctgccaaggagggtcaagaggaggacaaggggcagcccagaccccatagtggccactgcgctcctgggatggaggagacactgaagtcccggtggcctctcctt

SEQ ID NO: 345721 - DNA, 732 bp, Homo Sapiens
gcattgtttatagataccatcctttattaaatgcacaagagaaagaaatgaaaggaagataaaatctgtctcttcgaatctgagtcatggatgaatttttggatcaattttcacatgcatatcacaccccttgagccattcagataaatcatggccagaacagtgtagcctccaagaagtccaggcagaaagcccattctgtgaggacacaatctgcttggcacacctgatgtcatccagaatatggcgattgagcaggtcatgacaatccatgtggcagaggttcttggtgggtgtaatgccattgtcacaccaccaggcagaattcagttggaaaatgccatattcactgctgccatcaggattgtggtccacgaaggcggtgtcaaagccactctcataatgagccatgcacagccagtctccaacgccgtagcccttgtagccgttcagccctgctctctccagtcttgccgccagctcgcagagttcatagatcttggcatccacagtgacaaccatcagcgtggccaaggtcactaccacagtgccccaggccttcattatggcacctgtaagccctcccaggtgacttgctccagactcaccctgtggtgttcggaattaggggcattctggaactctgggctctcctactctttgtgcacgcagagcaatttagccacgcatcccgccttcccgttattttacacctgcaactctgttgctgcc

SEQ ID NO: 345722 - DNA, 1000 bp, Homo Sapiens
cagcactcgggattctctgtcacttggagggagctggagactccccaggtcaggacacaagaaaggagaatactggacaaggggaccgaggccagaagactgtgagaggagagcaaatcgtgaatgaaggtaagaacgggtcttaaaggaaggctttgatttatgtagaacatagaagcatgtgcaattaattaaagtagagacactagtcttccaattttatactgctttaggatatttatctgaatgttctgttatttaaaacaacaacaacaacaacaacaaactgccttaccctagatcacagcactatggtgacggcaaaggtggcattcaagaaaagaacagcatggcttcctgtttttccgttaggggattatcaccttgccctttggcattagtgggtttataaagttttctgtctacggagggtattgtggaataatcttcatatttctatcatgggacaaaggagaatgactgtcagttttgggaatgaaagtatggtttttgtagatactcagttaactactaataactaatcagactaaagttagtgttttccaaagttcatttgaattatagcttagatttaattaaagaaattaatgcactcaactttttattcaactgtcgcacaccttgtcttaaaataataataatttgtgatttttttccccagagattaaagtaaaagaacgtggctttacattatgacaagaataatattctcaacatttacattaaatttacaaactaatgaactgtaagaaattttgatgatacattatttctgaacattagtcacattattaaaagtattagttatttacattgagcaatttttctatagctacatttttttgctccttgagagcagaaaagatgtattctcttccattccccagccagtgccatgcaaatagtagatatttaataatgctggaataaattagagataatgctgtattttaaatatgaatggtagaaacaaagaaaa

SEQ ID NO: 345723 - DNA, 1000 bp, Homo Sapiens
ttttttttttttaaaaattatcaggctgggcatatcaatatttattgaaatactgaaaaaaaaaattccattttgttgagaagttcctggcaagaactgacatgacaatatgtatttcattgatacagtaagaaaacatcaacaagtaactgacttcacactctaaacattgcatggattcaagtccaaggcagctgcagatctgtgatacaaataatcagacattagagattgtctgtttacaaacatagagcaactataataaaccaagttaagccaaaaacctttatatttgagtctgcttttaccggcaaatcctgtaattgataaggcagttgctaagtaaatgccaggttacaaatcggctaacaatcaacattagagaaacttcacttgtcaaccttgggtgaacagacgctggctgtgacgctttcttgcttatcagctcctgtcgttggtgtgatcagcagtgtggatgtaacccgctgtgttgcccgtctttctaatcattctcatgatttaatctaccaggttaacaacataccaatatgtgacattttttaggtttaattttcagtggggagcactgtatctttaaaataagagaacatagattttaagagtcaacgtagccaggtatgctggcatgcacccctagtcccagctatgggggaggctgaggcaggaggaatgcttgagcccaggagttcaaggccagcctgggcaacatgtgagatcaagatcccgcctcttaaaataaaaaataaaataaaataaaaatcaacatatttgtttttttggcaatgttaaagaccctccaaatagttatagtcaaatcttataattgtctccatccacattacacatgcatgatagaaccgtttcattaactgttgaccacaccattcctctccatgtatcttctagccaacttgtttttcagctggggagggcaatgatgctgctgttctctgtaatgctttgggtatgagctctgatc

SEQ ID NO: 345724 - DNA, 1000 bp, Homo Sapiens; identical to SEQ ID NO: 161264

SEQ ID NO: 345725 - DNA, 1000 bp, Homo Sapiens
ttttttttttttagaagtgtgcttatgaaaacttgtattattattttttatttatttatttatttatttatttatttatttatttatttatttttgagacagagtcttactctgtcactccggctagagtgcagtggcacgatctcagctcactgcaacctctgcctcctgggttcaagcgattctcctgcctcagcctccggagtagctggtattataggtgcccaccactatgctcagttaattgtttgtatttttagtagagatggggtttcaccatgttggccaggctggtcttgaactcctgacctcgtgattcgcccgcctcggcctcccaaagtgctgggattacaggcgtgagccaccgcacccggccaaaactcgtatctttattaattagcacctagcttgtttgtttgtgtctgaccatcaagtagtagttgttgaataaacagtggatactctgatagatatgaagataggagaaaaggatgagaggaaggaaagattctgagacctgtggaagatgtgtaagtagaaggaaaacattctaaagcaggcatgttgcccagctttcgtttttgcttccccaggtccctagtaggctgccaagacaaggaggagctctggctagtattctgtaggtttctccccatctccaggtttgggttggggctactcatatcctcactcttcagctcactcagctctctcttcaatgttttgcactcttcctcttccttcccttcacatgcctttcagttttgcgcaatcagggctggagtcttggaagaaacaaccaccatttgcaaagttaccatactgtaattttcagtgaggagattcctggcctccagttcatggcagagaccatcctgtgttgctctccagtacaggtgtcctctgatggagagaggggcacctgcctgtccttagccagagagggcttccaggtggaagagtagctcttcaaggaattgccctgctagtcttcgatgta

SEQ ID NO: 345726 - DNA, 1000 bp, Homo Sapiens; identical to SEQ ID NO: 161266

SEQ ID NO: 345727 - DNA, 1000 bp, Homo Sapiens; identical to SEQ ID NO: 161266

SEQ ID NO: 345728 - DNA, 1000 bp, Homo Sapiens
ttttttttttttttttttttttcaataggtatcttctttttttattccagataactacttccactcacaatgagatgaattgtctttttacagaatttagggattccaagttgcctggttttaatataatacatattcacaaaatttacacagctcatgcataccataacttatacagagaacagtttagcagtctgcttaaaatgttaaaaaaaaaatcataaaaagccattgttctgttacacataatctgtactgaagtcataagcatcatcctcttcaatgattttatccaagataaaagaccttgtagactgttcacctgctgtagtctcctcagacagtgcctcccctgtctcttctgcagcaaacatgcctgagctgttttcatcaacttcttcatcaacagtttcctggtcactgtctttgtcatcctccctctcctcctgcttcctttctttccgttttggcaattcttcatgtatgtccttttcttctattattccatttgtcagaccggaagactggaaaaggatgctattggccaaatgagggcccttgatggctcttatgctctgtgcattgttcttttccagttcttccagattgaagccgcttttcatgtctaccacaatactctcattaaaatatggaggaggagtccaagatgtagggggatggcaatagtaagctaatgaggcacctgtccactcagaccacagcagtttggcagcaccttcaacatttgggattccacctttttggtgcatacctcttctctgagcaagcacagtaaaaaattccagagaattcctgtagcctgggacagtatatttcagtactacctgtcgagcatcagcctgggaaaggatggcactggcagcctccatcggttttactacttcaatacttgctggacttcgcagagcaagcgcagaggaggaattaagtggagatacgatgaagctcggactatctatgattgtgatctgtttgtcca

SEQ ID NO: 345729 - DNA, 1000 bp, Homo Sapiens; identical to SEQ ID NO: 345728

SEQ ID NO: 345730 - DNA, 1000 bp, Homo Sapiens
gttcttttaataaaacaaaacaaaattttatccagcttctaggcaatcactgtttgaattttcagaaatacacatgtacttgaaaatcaatttttttataaaaataaactctgaatgtgtgattaaaaagcgagaagcccagtcttttagctgcacaaatgcgtattaaaaaggagaggcatctgtctgagatagttcaccccagtgcagagggggctttgactttgggagacagagcctgcttgaagcgtctcttcaggtcctgcatgttgggagagcggggccgagggatgatggaggctcttcttctttccccactgaggccgtgcatcttgctcacttctttgcagagatgctgaaacacatcacagacatcttcgtagttttcgctagtggaaatttcaaggaacaggctgcccagctcattggctagctgaataccgtcctgtgtctgcacctgccgggcatgcaaaaggtcccccttgttgcccacgatgatgacaggggctttagagtcagggtggaccttccggatgtgctgataaaggggtcggatggacaagtagctgtcatagtctgtgatggaatagaccagcagaaaaccctcggcccactgcacgcatttggacagggaatcgacgacctgggggaggctgtcttggatctggacgcccccgggagtatcctggatctgcagggagagctggtccccctcgacatagaccagccgtgaatacagcttgcctgtattcggttcatagtctccaatgaatctcttggtcaggaagcgcacgatcattgcgctcttgcccacgcggccggcgcccagcaccgccagtttgatgtccttgggcagtaggtagtccgaggaggactcggggatgggtgcgagcagaaagtgcccggacatgctgagcggccgcatggagcgcgtcccggggtccggcgcgcaatccgagagggctgggcctcgccgcacccggagccggctcgccagctg

SEQ ID NO: 345731 - DNA, 1000 bp, Homo Sapiens
ttttttttttttttttgggtttactagttactgtgcttttatttgctgtacttctaaagaagtttgtgcttctcattaagccattgtaaatggagtcttcaagatcttgatgtgcttctattctttcttcattgcaaggtgttagttattagtatagtaactttctcaaagtgcttattcattgaccatgggctgaggttgtttgtcatcgtccgttcaggaagctgccaggcagaactatgtggatttggtgtccagtttgagtccttcattggaatcctctagtcaggtggagcctgcccacggagtttgtcctgttttactttcttcttctatgtgtttcacacaaaagctgtagagtttcagcatcattcctattttaagatatctcttgtttgatttgtgcaggaaggttggtaattgtggctacttcatacaacagagttgagcattcattgtttagagtttgtgaatttcaggtaggttctgatatacccagaaggcactgtgattttcctttgtctgatcccagagggcccgttcttagtcatcaaagtggtatttagttgagcaaaagtgcaatatctgcttctctgtgtcagtgcagttaattgtgactttggacaagcatatttctctaaactgcctccatccataggtgggcattcattctttctctttgacctctgttacctgttcatcctgctggtctcatgagatttgactggaaaacataaaagtgagctatagttgtaaacaaaattatcttgcactgaggcagaggaatttagcaaattctcatccagccagaggaatgggagatttccatgaacgctgaaggtaggagactcggaggagtcttgtaaacacaggaggaggtcatgaaggcttttctctttattcctgccaaatctgtaattcccacttgttgtgatattgcagcatgtgctcagtcacccaacctaatctctaagactgcggctggtttacagccctgaac

SEQ ID NO: 345732 - DNA, 1000 bp, Homo Sapiens
ttttttttttaagctatcaagagtattaatttattgggaatgagctgaggcggatttccccagagaaacaaaaaggtataactttaacaaatatatatttaaagaaagaaatattattgattctatagaaaaccatttaccaactgaaaggacacgaagtctagctccggacaaaagctgttagaggcccaggctgtctgcctgcggtccttcctccggccagagtggaggccccaggctgctagcacaggtggaaggctggggcccgggggcgggtgctctgccgggggctcctccgtgcttctctcctaagttctctgcgccccaagaactcgaggttgtgccttgctctcggcggccgtgtcctcctcctggcgtggctgcgtcccagggcgcgggtgggtttggtgaatgtgggtgtgtcagcgtggcagccacgtggaagcagggcatgtagcaggccaggccacgggcttgcagctcctctgagggtgtgcctggccccctctccaggggctgtgcaggcagcccatccaccccagtggagttcccacggacgcttctgctcatggtccaaggctgtgttgtgtggtcattctcgccctcccttttcctctctcctcctgccccctccaagaagtactgactggtctcctctatcgtgtttgctgatccacagtgttgggcacaactttgacgtttcttaaaaaaaaaatttaaaaaatgccgaaaaccagcgattgtggtgtggggcgggtggaggcggctggcggaggtggcgtcccggcgtgcagggccccttcctgctgtctcaccccgtgtttccctgcgagtggacgtgcccagctgtccccccaggcctctcctcagagggcggcacaggctgggctccagcaggtgggcaggggaggtctgggcaaggcgctgccgtcggctgtcaataaacagcaggaaacagaggtgcctggctcactttttgggggcacatgtgttgggggag

SEQ ID NO: 345733 - DNA, 1000 bp, Homo Sapiens
ttttttttttttttttatagtcaaaatagttcaaagtaaaagttttatttgaaaaatgtaacagtcattttatttcagcagtttaaaaattgtcctttttcttaaagaggaagaaggcattttcacacaaggctggccagatgggaagaatcttcagcttcagcttcagcttggcctcattcatttgaaaataaaatgtttacatgaggccgcgcctgtgtccagctgaaagtgggtccttcagagcgtgtgggggattctctgccggcttgatgggctagctcctctaagccggctgctggagacatcaccggctgagggactcctgcaaacgttcatacatgatttgatccttttttgatatagatgatcttactttcttgaaagcttcttcaaaatgcttatgactaaccttgagttcacctttttcatttccactcttctgtcttgccatttcctgtctcagggcacagatagaagcttctcgtaccaaagcagagagatctgcgcccgtatagcaatcacagcgaaggtcaccagcaattgcttccaaatttacatctgcatccagtggtggtttggtaccattttttgtgatagtttttaagatggcaaggcgatctgcagggggcggtaaacccacaaacagtgttttgtccaggcggcccgggcgcaggattgcagggtcaattatatctggcctgttagtggctgccataataaaaacctgctggcgtgcttccagaccatccatctctgtaagtagctgattcaccactcggacacttgcccctgtctctcggtctgatcttcgaggacataaagcatccacttcatcaaagaatatcacacagggtgctgagttcttggctcgttgaaaaacttgtcgcacagcacgttcactctcaccaacatacatgtttagtaattcggggcccttgacagatataaaatttagtccggactcatttgcaacagccttcgccagcagagtcttccc

SEQ ID NO: 345734 - DNA, 1000 bp, Homo Sapiens
ttttttttttcacctcaaaatagcatttaatgtggcaccatctttacttcccaagcaaaatagttagtttgaaaagagagcaagtccaggcaacaaaatgcccccttcaaaagaagctgatggacatttcataaaagttttctcagatatcttccgtaagtacaatgaccatattttctagaccaaaaatatggatatgtgctttgacaagtacaagtattaacatactttgaagataaaagaccatactaatataactcagaactctcttagaaaatgctaagcataccacagtacctgtagaaggacactatatttgaaagtgtgggtctctaaagctgtctccctgccctggtgccagcccctttccaccactgacccttaagagtgcagagggttctttacattttattttcccaaggcagagggtatttcattctgagatttatctttcccctcccctgtgtctctctctcggtagagcaagcctgtgtagttgctcaaatgagaataaatacagcatcaaggaacacatttctttgatgttacaattaaataaataaatgcagtaaaataagaaaaggcaaatatgcatatagaaccaaacacaatttcagagaaacatagacatatgtaagttttcatttatatatgagactggcaaagcatctctgaccttcacaaactgtttttcacaccgaacaaataaattcaatcctgaaatggaaatttagatttctaactcaagccttccccaaatgccaaccttaattctacaagattcctgaaggctatattttaagaacgaccttcaattttgaaggtcaaatccaatcttctttgcttttgagtccctataaagaaagctctctaatggtgtgaaatattgtggtcaagggctcaacctttccaacttccaaagtctttacctcaatggtgatattgatgctgtgaatttctgaacgactggttccatcactcacataaaaactaaaaatat

SEQ ID NO: 345735 - DNA, 1000 bp, Homo Sapiens
tttttttttttcttttgttcaataaatgtttattgctttttcaattattctatttacaaacaacatggaatttcttggcctcatgatacaaagcgatactaaactgtagtctagcagtgtaggcaacatcatgggaaccagaaaatggccaggccttttgcactagccaacactttccagttgaaaatactattttacacatatagaacacttataaaatgcacttgcatgtaaacactgtaaaatcctgccatttaaaattctacactcaaaaagctctaagtacatcaaaaaatagaagaaatttctaattgataccaataaggcattttaaaactacaaacagctttctttattcaatttcaaagctaatactctgcaaatacaataaaatctgacatttcatatacattcctgctttatatttttatattttaaaagaagccacctgtaaatactattttcttttgcaaaataacaaaaaggacaaaaaaactttaaaaattacagtaaaacataaagtagttctcaagtggaaaagttatcattcccaatgtccttgagttgttccttccttaatcaacctttgtcacattctgcttcaccaaacttggtccacttaacagtagtataatttttaagactcattcaacagcttaattatttctactatattctgaggtttgatagaattttctgtactgttgccattgtgactaaggcagaggagatgtgaatgaaaagatattcagtgcaaagttagattctgtgccacttcataaatcaaagcccagaaggtgtaatgttcagtttaaatgatccaaaataatggactgatttaccttcatatgacaaaaatgttttctatagtctatcatttagaacagtttataaatactacaaaaatactgtatcttcaatgtgaccaaatcttccctgaatttcttaaaagtggaattttatttaaaataaaaattgctgctccaaaatcatagaagaa

SEQ ID NO: 345736 - DNA, 1000 bp, Homo Sapiens; identical to SEQ ID NO: 161267

SEQ ID NO: 345737 - DNA, 1000 bp, Homo Sapiens
tttcaattagaagcaattttagagaattttatttaactgtcaacttatcaccaacatctaacattttttagttcaggtacatttgggtaagaacattagggagaaatgtaaattaaatactatgaaactatgcttttaatgaaacatggtctcagtaaaatatggacacaaaagtttagtggttttattgcattgttagaaaattatattatgaaagatataaaaaaatcaatgtttttctgcttcttttataatcagtatgccatcttctaccattatggctttaattttcattctacccaacaagtttcaaagaatagtttattacatgccttaataaaacatttaaaatatttacagattcaaaatagatgttttataactgaaaaaagttcacctgagaattcaccgtaacattgccatttttttcccaagttgttaatgtgactgagtgtccacatgcaacctgtatcgtctactgcatctaacatacttatttccttatttaaaattagttaagcagtaagctatagcaaactgttaaaaaaaattacagatggagaaccaagactgtatccacatttgttttgaatatgacaatttaacgaattatttgctatagttccagaatttgaataagaaaaaaaataaggtaatgttattttactgaattcaacataacagcttttaaaaaatcatcaaacattgagaaggccagttcataaaatagtgaacaatgatcatgtgaatatgcaatatacaaactgaaaacatttcaaaattctgcatgaaggaaaaggcatacactgtatactcataatcctgtcatttgtcttcggcagcctcaaaaaaaatattgccttgaaacattttcttagaaaaaacttctttagaagttaatgttaaaataggcataaatgtgtaatgctatgcaatatacagaaaactttcccacttatggccaaaagacaaacgtaaaatcttttttatctgtccatct

SEQ ID NO: 345738 - DNA, 1000 bp, Homo Sapiens
ttttttttttttttttttgcgagaatccagctttgacctttattcaagagaccagatgggttgccccaggatccggctgccagccctgaggccaagcacggctggagacccacgacctggcctgccgttgccctgagctgcagcctcggccccaggatcctgctcacagtcaccgcaggtgcaggcaggaagcagccctgggggactggacgctgctattgattcattaaaaaaagaaaagaaaaatacaccaaggctccatgttccccgtgacaggtgggcctgaggggtcggggtgacccccccccagcatggcagcatgatttctgtacaatcaatccatcatctggggcacagggtggtgtgcgggggctatttcttggctttggcggaattgcggggtggggtgatgggtcggcctccagggttcaggccactgaactgcccgtacttccccttgttcttgtcggcgggcttgaggatctggaaagagcacatgagggtctcgtccacactcatcatggcgccagcattgtcaaactcgccacagtagttgggagctgagaaaagtgtcaccagctgccgcttggcaaagaactcgtagccgtcttctaccacctggtgtgctcggcagatgaggtccaagtcgtgcttgtggaggaacttggccaccacctcggctccaaaggtaaaagagacgccacggtcgttctcgccccagccctgcacgtccttgtcagggtcagaccacagcaggtcacacagcaggccctggtcaggcacatctgtgggccgcatgatccgccgaatctgctccatagactgcaggtccggggacaggcctccgtggcagcagaagatcttttcgtccactatggccgcgatgggcaggcagttgaagcagtcagtgaaggttttccacagtttgatgttgtagcgtctcttgcactcatcgtagaaaccatagatgcggttgatgctggcacactcgtggttccca

SEQ ID NO: 345739 - DNA, 1000 bp, Homo Sapiens
ttttttttcatttttgtaaaaataaggtttaataaaacatcagcaatctgcatgagaaggtaaattacaatgagaaacttaaaaagcttacggtctaagtcaaccaatgtagaaggtagtggttgaagaaaacaagctttgacttttaaaatttcctaaccaggggatttatttagaaattctggcattcaaatgtacatgtaaaatccaatttaacagatcaaaattgttacactaagtttcacttagtatctaagtatccaatcacaattgtatctaagtttcacttttaagaaacattataaaggtaattaaaactctaggtgtatacttatatggaactagtttatttcctatttaactactgttcattgcgtaaagtatgttgtcccaattttcagctgttttaaggaattataaaacattgagatctactaggaagagggaaagcctacttctaagtgatgccactagtacaatcaggcttggattaagtctcttctcaggggcagctttgatttagccatggactcacaaggaaaacaagaggtggatttggttagggagcaacagcaaattcagcccgaccatattcctaatctaaacacattttcagcataaagatgtaaaaacaattttttttggttcaaaagttatggttgccatggagacaaaaagaatatacctgaatttataaactgagatatatttcagctccttggcttaaaataatacatctttatattcttgagacatatctcaagatgttccttgctttgccttgaataaaaatttttttgaaaagcctatgtttctcgtgaacacactcatacttcaaatttaccacctattttaagctttaaaattcttcttgccagcatttttcagctaaaaaaaatcatttcacgaatgtttaggtactttttacaatgaagggatatggcagcatggatactgggtagctggctaggctctaaatacctgatgactcaacgctttg

SEQ ID NO: 345740 - DNA, 1000 bp, Homo Sapiens
ttttatataaaaagcaaaagaaagcagcaagtttaagccaaaaaacaataaataaaataataaattttctttaaaaatataattaagttttagaagggctttcttttaaaatattgaaatataaaatttattcaaaagcaaaataacagcttctatgaagtatgagctacatataataagtaaacagcacagtaccaaaaattccattttttcaacacatcagtatcttctttgaattacacattttctcctttagtaagtaatgcttcatttgcagcttcaattacttcattcctatcttggacttgttgatgcaaattgcttacagtatcctgagcttcttctaattccaattttgccttctctaactgttcgtttagttgctgaacagaagacttttgagagtcagcagaaatcttccactttgcatggttctcttgatgtgaaatcatctccatatgataagcttctttgagagattctacttctgctgacaatttcttgatttctgcttgcattcttgcttctaaatgagcttcacgtactttagaagcccccagttcttcagctaaatggtttccatgagcatctttctctttagagagttgcttcatatcctccagttcactagagagcctttctatttctctctgtgcttggacttgctgatgacgagcctctgccaattctgtatgagagttctgcacctgctcccgggtcagcctcaattcttgccccaaatctatggcctccttgtactgagtggcaatgtactgttcttgctctttcataacactctccatttctttcatcctttgttgtgttctttcaatttcttttttcagttgacttatctcctgttcattttgtagcattataaactctttttctcgaagctgttctttagcattttgtaatttgtcattcagactttctatctgtttgttacattctttaagttccaattctgatttctccagagtaccttctaatttaatta

SEQ ID NO: 345741 - DNA, 1000 bp, Homo Sapiens
taggcagacaaccttttcttttttatttcgcttagacaaaatgcaaagagtgtctcattaaattaaaaaagaaacaagagagaaaaccaaattgattccccccaccccttcactgacggcactcatcctaattaacaacaaaagaagaccaaattgagaacccggtttctaatgggaaagaaaggtgtgcaaacgtgactgaagttttcccctgcccgcaaatcggtgttccttttaaattcacaaataggctgatttcccacccaccctgttttctttcttgcctcttgtgtgatagaacttccagtcagaaggtttaattaatcccccccatgcacttttgtagaaaatcagtaaaaatgcaatagcctgtgaagatcataaaactggacttctttcccaaaaaatcagatgcccaggcggatggagctcacactcagacagaaaaaaagcaggagagtctttgcactgtctgtggtttcagtattttctcttttttttttttaatatattttggcaattttctttaattataaatattggaattccgtaaaaaaaaggtagctttgattgaattgtttgaattgtatttacaaccgctgtccagtcatgctgtctgttataccagggtgtaagattttgcgtaaggattgtttcctttcaaatggccccgggagtcgagcagtgattcttgggagctgctcattttagctgcctgtcccagctctgctccctcccgctgaggtaatgtggccacggcccccggctgccacgactgtccttctctcgtggaggaggcggaggaggcggcttccatcgggatgggctccaggaccgtggggcgcttcagggtccggcttttctgaggttccaagcatgcttgtcctaagctcaggtccctgctggtgcctggaccacctcggtttaacaaaaagtccattctaaggtatggaggcaaatgtatgaggtcacctggccgatgtgcctttggaactgccat

SEQ ID NO: 345742 - DNA, 1000 bp, Homo Sapiens; identical to SEQ ID NO: 161269

SEQ ID NO: 345743 - DNA, 1000 bp, Homo Sapiens
gccgtttcaaactttattgatgtaaaccatcaatgtagcacaattgcttgttttacaaatggagaaactgggacctaatgaggggaagggactgagtcaaacccgcacagtaagtgattggcagagctagcctagagtttgcacccatgtctttagacaaccaagctaaggttttctccatcaccccctttcatgttttgaaagattgggtttcagccaggggtggtggctcatgcctgtaatcctagcactttgggaggccaaggtgggcggattatgaggtcagaagtttgagaccatcatggctaacgtggtgaaaccctgtctctactaaaaatacaaaaagtagccaggcgtggtggtggtcgcctgtaatcccagctactcgggaggctgaggcaggagaattgcttgaactcgggaggcagaggttgcagtgagccgagattgcaccactgcactccagcctgggtgacagagtgagactccgtctcaaaaaaaaaaaaaaaaaaaaaagaaagactgggttgtcctaaacatttgcatggctctctctgccgctgtctcagaaccgaatgccttacactttacaatctattttaaagccagctgcaatctatagaaggttagaagcagcagatcagaagtggagaagagaggtgctatggccaagctagtgaccacagccagaagtggcagcgaaagagatgacaaagagggagaattcaaagaacctcaaaccccagggatattctgtgcaagggcaaatgatactgagagcatcccttcacacagggattttataaggcagtagagagcagactgctatctcggacaacttcaaaacctgggctgggcacagtggctcacgcctgtaatcccagcactttgggaggctgaggcaggcggatcacctgaggtcaggagtttgagaccaggctgaccaatatggtgcaatcctgtctctactaaaaatataaaaattagctgggcgtggtgg

SEQ ID NO: 345744 - DNA, 1000 bp, Homo Sapiens; identical to SEQ ID NO: 161271

SEQ ID NO: 345745 - DNA, 1000 bp, Homo Sapiens; identical to SEQ ID NO: 159348

SEQ ID NO: 345746 - DNA, 1000 bp, Homo Sapiens; identical to SEQ ID NO: 340180

SEQ ID NO: 345747 - DNA, 836 bp, Homo Sapiens
gtgggctgagtcctggtcactgcacatctgcagccagctgtgcaatcaagtctttggcatcttgcatggtggagggtatctctgagccattcttagtcaggtaggttccaaacaagaacatcttcctgtcatttcccacttcagataatgccaaagcttcatggatatctgtaatgtgataggctgcttcaagatcctgtttgtttgcaaacacaaccagaggaagtactgggtttgctgcaattagctgatgaaggtatttcttggcttcaggtaatcggctgtgatctgctgaatccaccacaaagatcagcagcaatcccttggataggtacatttcccagtaggaccgaaaaggtttactgccaccaatctccaggaactccatctggctgtcttcagtgttgatgcaaactgcatggaaaccttgggtgggtgccacactgtgctggactctgtttgaagctagagagtgcaggacactggtttttcctgctccatccaggcccagcactaggatttgcttgtttttctcctcgggccaggcagggtggctaagagccttccacgtgggccgcagtctaagcaaccttagcgtctgacgtctccggcttcaatcccgagaccggccagcctgtgtgaagaacccctggggcgtcagaatccagaggttccgggaggattctcagccttccctcagctcccaaccatgagcctgtactgctcatgtcatgtatttctccgccctctcccgagtaaactccgctaggagtgtctccagactactacccaggattattagttgactattacccaggattattaaagacaaatag

SEQ ID NO: 345748 - DNA, 1000 bp, Homo Sapiens
tttttttttttttttttttttttttttttttggggcggccctcatgggccagggtgtttattcacagagcaacagagtcagcacagggcagggaacgcccaggcctcagcatatcctgagacctgcagcctgtcccagcctgggcggggcaggtgtccggtccctggctagggtctgaccaagtgctggatgtcacgtgaggaagcggggccttgtctggggtggtctacggatcactggtgacagatgccgggagggtgacaccatccgcattgaaaaggatgttgtcaaagccaggggctgtggcctctgtgttgctctggaaggggcagctccccttcttctgcagccagcgccgtcccccaagtcccagcagcaccaggagcatgagcaataggagggcactgccaaccacagctggcacagacccgggtgcggctgtgttccccgggctgggggcaggctgctggcaatgctgcccagccagatactccacgtcatccagggcaatgggccccagggctggctggccgcccagagtggcttcaaacacgatctggaactccttggcactggctacctccacctgggcctccagccactggtgccgccgatgcccgcctgcgccccacacagccagctggccctgagcactgtgcagcagtaccttcagctcccccttgtagaagtgctcaggaaaacccatgtggtaccagaagcggaggcaggaggctggggtggccggcagaggctcgctgcgcagccaggcggcccggcccccggggcccagcacgccagtttcaaagaaggcaaagtggcctgcctctgtgcccagggtgtggtccacagggggctgggggtaacgagagggggtggctcccccgccccagtcccagctgtatccgcccaggccgggcccggccaggtggctccagccacacaggccagactcaaaatcacaggaacctggctgagggcagggcccgtcctggaggagcag

SEQ ID NO: 345749 - DNA, 654 bp, Homo Sapiens; identical to SEQ ID NO: 161274

SEQ ID NO: 345750 - DNA, 1000 bp, Homo Sapiens; identical to SEQ ID NO: 161275

SEQ ID NO: 345751 - DNA, 1000 bp, Homo Sapiens; identical to SEQ ID NO: 160006

SEQ ID NO: 345752 - DNA, 1000 bp, Homo Sapiens; identical to SEQ ID NO: 335283

SEQ ID NO: 345753 - DNA, 698 bp, Homo Sapiens
tttttgaagataaccagcatctttattttttcatgcttccttaaatagttttgggagtaggagacttgtcctttggaagattgtcatccagaggcccaggaaagtcatctccaccaagagagccaactccctgcctcagtgtggtgttcagctggaagggggtgaacccagccaggccccaagagctgtcccagcaaagcccccgataactttagatgtcacagagagtccagctgcccccactgactgcagaatagccaccagactgccagcagcaactccgcccccgttggcaatggctgctgtagacatcatcttggctgctatggaggatgcggcgattcctactgaggtgaagcccatggcactgagcgccacgagcacagtccccacagccacaactcctccgaccacagctgctacagcagccctgcctgagtcccatccactctcctttcccatggttggccccttcgcctcggtgagcctccactcggattcttggacttccacgttactgtgcgggagctgacaaagtctctcgccggagggagcacacagaatttcaccttctccggccttttcccaagctggcaggagtaaagctgtaagaggaggtgccagcgccccaagccagctctcccgccggcactggtgcggtccgcgaggccccataatcggggcgacgcgtggtaaga

SEQ ID NO: 345754 - DNA, 1000 bp, Homo Sapiens; identical to SEQ ID NO: 161277

SEQ ID NO: 345755 - DNA, 1000 bp, Homo Sapiens
gggattataacctgtttccttctcttgtaaccaaagatgggagtagtcctgaatctctttgatcaatatgtgctcctttcaggtgttcctgggacctgccctattcagagtgtctagatatcatcccacctgagtccatgacactcagtctcttccctgtacattaaaaaataagaaaaccaaaaatgtctttaaatgctttttggcactctattcgcacgtctttattaaacagattgaagctatttcatttggcaaatttctggtcagttcttccagtttcagtgtcctgggatgatggagtatgttgtgatgacttctttcctttctcatcctctgtaggctgagaggattatggaggctattgagttgtaccgagaagaaactaatgtggagaaactttacgagacatgaagactccaagtgtggaggaataaattgtagaagttctctggaccattggattttcttttccctggggaaagtcttttggtcgtttatcataattgctgcttgttaaaacagttgcttccacaggtaggaacagaacctcatgctctgtcataatctcgatattgtgagagatgtgtgctgatcccttggccccatcctctccaacagctgtggcaaataactctatattcagttctgtctgcataccagctgccacaggtccaggtttgtaagtcactttcagtcctgtgctgggtgggggctgctttactttaaacctgcagaagtccactccaacattcttgagctttacaactgtggcataggtatgtccttccttaagcactccaaacttgactgatgatgggagaagatggaacccaaaaagggatgactttgcattattaatggcagcagatgcaacagaggatgtgttcacttttcctccaacagaatcttgcacctttgcaagaggttgagacttaggcttggaactcagcaaataatgaggcaacttcactttttcttttcttgtttgtcccgcaac

SEQ ID NO: 345756 - DNA, 1000 bp, Homo Sapiens
ttcctggaccctcacgtggggcctgcgcccggggccgcctctggcggggtgctgctggggctttctccttcagaggcaggaggtgtggctgggtcctcaagggcccctggggtaggatgcgaggatggggttggggaagcttcatcacagggactgggcacagaactggcagcaggtgcaggggtctggacgttagtgtctgcctgtggctgggccacagaatctgactgtggctgggccatgaggttcagctgtggctgggctgtgggatccgactgtggctgggccgtagggttcagctgtggctgagctgtgggatccgatcgtggctggagtgtggggttcacctgaggctgggccacaggatccatctgtgactgggcctctgccatcggctctggcagagttggaccctcagaatctagctgggtctgtggctcagtgggcgtgaagctgcccggccgctcctcgcagagagctgccgcgaaggacgagagcacggagcgcagcagggtccggaggtcggcactggccatgaggcagaggaaggggctgaggcagctgttgagtaggatcaggtagtcggagtagaccagggcctcccagagcaggtagccagagtagacgtcccacaggaaggccaggtagagcagctgggccagctggtagggcagcctcaggaccacataggctgacagaatggtcctggccacacgggcgaagccccggcaggctgcgggctgctgttggcggtggcaggtgcgacaggctgtggcctgggtgagcacgtggcagacgagcagcaggaggaaaggcaggaagccccccaggacctccagcatcctcagcgacagctcctcgctgtcccagaagtccaggcagatgaccaggtcgtaccaccagacggcagcctcggggaagaccagccagggcacgctgaagagtgtggccagcacccagacaccggcgcagacccagaggggcaggcggactgggcggt

SEQ ID NO: 345757 - DNA, 1000 bp, Homo Sapiens
tttttttttttgttttttgcaaacatgtttccaggtaagatttccaaggacatcagtactgagtgaaaaataatcctttacagtcaatatgaatgaatacactaacaagtacatcatttagatctccatgcttatttggcaattccagttatgaaaaaggtacataaatagtacaaacaattggcttgacatgtggccaaactactttcatcgaagttgctggaagcctttctctggttttggcccctgtaggaagttaatctcatattcccttagcaataatataaggtcactgtttcagtcctacacacttttatattcaatgggcttcttagtttatcacataaggactggcacttttttcaaaagaatattgctaacagggttaaatgagtgctaatggctgaacgtttgccaaatgcttacttctgcgatagtataaatatggattattaaagttgtctactcaagtataaaatatatgcaaaactctcataggcaaaatgttcaaaggccgggaaaaaccttttttttttttttttttttttaacttttacgagaaagtgcaactgcagggtctcttgaatgatcttctagacagttccgcagaaaattagcagtttggctcagaaagtagagttcctcaggaggaattaaagttcttcctagaagaatacaaagcaacgtttcaggcagctttctgaaaataaaccattagcttatgcctacacagcgagacaaactggaacgtgtaataatgaaggctttcacatttgttgtgatgtgctttttttctcttaccccaggacctctagctgttctgtaatgttacataaagtagttatagcacttcgtccagcactgacagcaggcaggaagctaatcagcgaggagaaaatcggaagtgtgttcatgtgtttcattgtttttcaggtcaaatctcaatacttgcaaataaatcattaaaaagatataacagtttctctgttattttcaggac

SEQ ID NO: 345758 - DNA, 1000 bp, Homo Sapiens
ttttttttttttttttttaatttgctcaggattttatttatttgaatctattgggggtggggaggggaggggagtgaaatgatatacatttggaggcaccctcaggtaatcacactatagaaataatgctgctagttaagaggtttgttgcaaagatgtaaagcagcatgtacagaatttgttggacgtctgctttaggtataatttaatatctccacgtatcttttaatagactaataaaaaaccatagttaactacagttttcaaatagcaaataacatataatttagaggtgaggaatacagaagaaggtttttatctatacagtgtgacttacctaggtacgcaatctttaaacaaaatgaagaagaaacatgttttctgttctcagtgctattgtaggttatgggaataaattcatttagaaatttgttctaaaataacgaactaccaaactgataatagcttgcctttatttgttttagtttcatctgtaagtgaataactggaatgaacacatcaacctttggttaaatataaggctttctagcttttgggcttacatgcacctgcttgtgtattcccacctcttttctgatgatctctgaagaggaagaaagagcatgaatgcctaggtatgcacaagcctatttatttctagacctttcctatacacactcttcaacatggcaaatgtttgcaaacaaatacattgattaaaaaaataatattgtaaggtagtttcatttttcatctaaaaatatgtgcacacaggcaatttcgatgaaaatggatttctgcttgaattatctagctaattgcctctattccctgctttgccttgagcatataaaaattatttagggtagacagtgttgaaccttataaatcaattaatcagtattgattaattatttcccctcaactttagtttgcctttaaactaagactaggtttatgctcatccataaaaagtgaaaatttaaacatacacagactg

SEQ ID NO: 345759 - DNA, 1000 bp, Homo Sapiens; identical to SEQ ID NO: 335018

SEQ ID NO: 345760 - DNA, 1000 bp, Homo Sapiens
tttttttttttttttttttttttttttttttttttttttaagaatgaaaacaagaaatttattaaatatacaaaacaggaatacagttcaattactgtgtctaaaaaatttcatttttacataaccaagacaatatttacaactatatacaaaagactcccacctgtgcataacctttggtccatctgtgctatctctcatatctgcaagagaaacctaaaatgttaatatttgagtgttaagtatttacatctttttgtgttggtttttaaatgcacaagtacccctgaatggctcaaagggatgggataatgctagaaacactaacttgcaataaagtgcagttttcatgcaaacttagccatcagttttcttcttttagataggtatccacagtccatatggactttttttctgatctatttttggtgatcttgaagatgcctcttctgtggcagctttagctgatttttgtattggctttgctacagaattattagagctaaaagctatgcttctttgctgggtaggtttttcattgggatttcgagttccatcttctgttaccttttccgacagctagacaggttaagaaaaagtgtaattttaaaacacatacccttggtttctaaatcctatattaaaaaatagcctaattgtaaacaaaatttagctgtagacacaaaaatcaacttggatctaacagcctaagtaacagaactattgagttttccccttaacaaaactgatttaatattaggcttaagacactcttcccataattattttacttccctgctggcaaatttaaactaattttttaatcagttttctcaggttgaatcaagttcacttttgaaatgtaaagccacatcagaaaatacgttttaagaaactaaggcatttgccagttaggcacctaatcgtctgaacaaagaccttgtctactaatactgagcaaacccacatctgggcccaattacacagattcatttagata

SEQ ID NO: 345761 - DNA, 1000 bp, Homo Sapiens
ttttttttttttttttttgctgttctgaatggatttaataatctaggtttaatcaaagcaatttgcatttggattttggaatgaccactccttgctaaggaagctatgtacttcatgctgtggaaactggcaaatacagaatgtagcttgtttgttttcttagccttgaagatgaccaggtagagagacagagtgagaccaacagtttttctgatttccctgctcctcctattccttcctaaaaatcagactcattgtgaccagtagtcttgaggactcaagctgaatgatagagaaggcagctcagacagaaaagaaaaaaagtacagaatttgagaagatcggagatgaagaaaacgtacaaaattatatatatatttatatatataataacatgacatatctatgtacaacatggctgggacagttgaagaaactatacaatggtgttcagcattttccccttcccagatggactttaaggatgacagcatgaggaaatggagcaagaaacacaaaaattatatacaattacaagtgacagtcaaggagtttggggaccagggagtccagggatcctgctctctccattccttcctcaccaactttctcctatccaatttgaatgacagcctgaacactgaatggccagtcaggagaaaggcatatacacacctcatccccccacatgcacatcagcaagtctatcagtcattctcattgggccaaatgtttggcatatcagaatttgtgatgtgagagggcaagaggattacagaatcttgctctcttgagcattagttctcaccctggtcctctctgtcataactagcaagttgcgttcaataaaattctagccaagctggtggtaactagattgaagatgctggtcacctgcaacccctttcctccacctgttcatgagtcagcatggctacctctcctcatgataaaagagctgggttgctgagttctggggatgcagagatttctcagtctt

SEQ ID NO: 345762 - DNA, 1000 bp, Homo Sapiens
ttttttttttttttatttctgggttgggttttttcatgggtttttgttttgtttatttcgaatactgaaaaagtcctttgggctctgtggggttccccacgctcacggctcctttctcccacactcactgcccttcttcccacagcaaatctatttcaaggacagtactttttaaaatgattaatgttgagttctcaactagctctgcagaactagaggagctgtttgcatctgtctgtgcggatggagtttcttttatctgacaccaggtctccaaccacactgaaacaaggcatttatctacagagctcaactagaaccccttttcattaggctactccacttccttcccctcatacctaccccacatcagccacgtggttaagaaggatagtcaggaatgtttttaccaactccaagccctaattcatactcctccatatctcccaccccaccctttcaaccccacccccacccccagaatttcattgatatttctcccaactgttatttggaaaaaaggtaaaacaaaaaaggttcaaggtcttggtgctcagcccaaggggctccatgtgctgggacaccaacaggaaagggcttctgcctctccagcccacacccgagccacctcctgacccctggctgcaaaagcaggaaggggcaggagccagcacaggacccgggtggggcagggaggggaagcgtctcaggatctggcagagccccgggcagcatcattcaacttggccacccgcaagcttgctggtgacgagcgaggactttctctggggcagatcctgtggggtggggatgtgatcaccagtcaccaggttcttgtctggtcctgcacttggcagctgcttattcttcatcttggctttggccatgttgtagtctcctgagtcaaagtacttttgccctttctggagtctcttcatgaggaagtcggagcctccaggcttttgtcctaggcttgggtatttggcctttagctttgcct

SEQ ID NO: 345763 - DNA, 925 bp, Homo Sapiens
ttttttttttgcacaaccaaatgctgagatttaatatcactcagaaccatgcaaaccaaagggaatgaagggggaaagaatgccaagaaatgagtagtttcccacaggtgggagccatggagccccgtggtccttcccatggaaagtttcctcaacagcacaaggctgacccctctaagtcctcagagccgagcacccatgtgtctcctctggctgcagtcatccgatcgcaggggtgtcttcatctaaggtttgggaagtgctttatcttatagagcttcataaaatcaccactggctttcagggcccagagacctactgaagttcaaccattcttgattgttttaaaataagttgtgtgaaccctcttcagttttgccaaaaagaagaaatggctgtttcaaaatgatgctttttcagtatttgcagggatttcaacatcgtcatagtcatcttcaggctcaatgtagcttgggatggaaacagtcttcttatttttaactttatttaccagtgagtatgtagcgggcggctgacttggggcttcctgtggggaagagtcttctagagaaggccaattcctcggtggcagaggcggtaattgaactggcgactcattaagaacattctcatacatcttttcttcatctacttgcttgtgtttcaggggcttggcaatttcccatttcttgcctcgtctaagctgccacttacagacacagtacaggatgaggcccaggcccacagagacaacaatgatggccacagctaagatgatccagaaattattcctccaccagctcattgcagtggaatcctgaactgtgaaagtatccatatgtgagcagctaaggagacagcagtggctggagtgctgcagctcaggcacagctggtgagaggcattcctcactcacaggccttca

SEQ ID NO: 345764 - DNA, 1000 bp, Homo Sapiens
ttttttttttttttttttttttttttcattataaaagtcagtttattttccctttctgtgtttcgtattttccctttttgtcagtaaatgagcaatacactgattggaaatctgcatgattaaataacattaacaagttcataaacacaccccatatcagagtataaagcaagaggttgaaaaatatcccctaaccgaatgcaaattaggtatccctcaaaattgcacattctcctcctagtttgcttgcataatttaaaatatgtatatacagaatgatcttaaaatattgataactagtatggaattcacagccctgaagatatatatactctacatttttctaaagaacggacacccctcaggccctagtaatccattcatgtgattcaatgtcatgtacagacagtcctcagcttctgatttttggactttacaatggtgtgaaatggttgcaatttcaacataatgtacaatattcaataaattacatgatatattcaacactcgattataaaatagagtttgtgttagatgattctgcccaactgtgggcaattctaagtgttctgagtacatttagggtggacgaggctaagctgtggtgtccagtcaggggtattaaatgcatttgacttccaatgggtttactgggacataaccccatcataagtcaaagagcatctgtacttgacacttactagaagaaaaggtctttcccttttctctaattctagtcttctgctgaggtaactccaggaagctgcttgtgccagagatcaatcctctaaaaatagactaagcagattagcttcctagaggatcctaagttcccagacaacaaatctgggatggagtgcttcggctgtgagttacacgtcggaatgttcaagataaatgatgtaccttatggtcctttacacgtcagaatgttcaagataactgatgtaccttatggtccttgaaaggaagactcaatacttccaggagtcaaagttaa

SEQ ID NO: 345765 - DNA, 1000 bp, Homo Sapiens; identical to SEQ ID NO: 161282

SEQ ID NO: 345766 - DNA, 451 bp, Homo Sapiens; identical to SEQ ID NO: 161283

SEQ ID NO: 345767 - DNA, 1000 bp, Homo Sapiens; identical to SEQ ID NO: 159746

SEQ ID NO: 345768 - DNA, 1000 bp, Homo Sapiens
ttttttttttttttttttttttttttttttttttttttttttttttttttttttttccttgagaaacaagcatttgtgtttattaaccaaggagagggaagtcaaagcaatgcagactcctaaccagtccctcctatagtctgcccacctaggccagctgccaaggactaggaagagcagtggataggcccctccccactgccccgaccccagggtgagttctgctgggtaaggaagaggaagtcagcaaaggacagaggccaaggaaggaaggaggaaacagagccgctggggagacaggattgaggagatcccttggcccctcactcacagtggggagggcaaagcaccgcaaatgcagccccacaagaggaactaagcaggagtacactcatgtcaaaaaccttgtattgggggaggggaggagggggttctcaggtgtccaaagccaagaacaaaacccttcgagagtcagtccttgcccaacaatgctggtccagcctctaagcctttgcctccataccaagttcacaacagggtggagcctctgacacggccgtctagagaatggatgcaagagaggtccagggaccacttgcctctgtaagatccgtcctgtggcgaattccaggcccagtggcgcctagccttcagctgctgggctctcccgagcctgccttagcccatacaaccacttgatcacgcgggcattgcgctccaccaccgacacgccatagggaacgcgctcccgggcccgctcctcaacagtcaccgagctgcggcgggagcagcccccttcagagctgcccggcccagcactgggccctgccagggacacgatatccgagctggcccgtgccaggtgggccacacccaaccctctcgcctcctccgggtccaggccgcagaagttaaaaaagcgctcgagatcagcggctgccctagaaaagcgctcgctcaagtccgacttggagcgttgcaaacccggcggccgggctgg

SEQ ID NO: 345769 - DNA, 1000 bp, Homo Sapiens
tttttttttttttttttttttttttttttttttttttttttttttttttttttttttttttttttttttttttttttttgaatgtcaactgctttattaattccaaactgaaaaccaatattaggactaacaagaacacaaccaaagctcattgtctaaacctgatcagtgtattagcacatcactgcctggtacgtacctgattggttacataatctaccttttgcaaataacacttaatacatgttaacaagtgtaagagcacatcatcactgcatgccatcaatgatttgcaggcttacttggtagtgtaattattcagtctttcaaaggtgcaagatcccacccggcagaatcttcactcaatgaaccaaaaacactgtaattaacaaaatataacaaagttccaccattaaaaactaaatgtacattaaccagagaactaggtcctgacaccagtacatacattatcctcagcattttggaaggcaacaaatgatgagtccaagtataagctaatggttatcacctgaagcttcaggtagaaagctaacttgtgaatctacctctcattttaatgttgttagactgtaaacagcaatttccaaatctaaaagtagcttagttgacttagtattgttatataaagtagtgtgacaaaaaacaagaactcccaaaggaattatggtaaggtacattgggaaaacccagaacaatgttttagatgaaaaagtgcataaatacagtaatactacgagtgtgttaactgtggaacaaatgtttctctgggagctaaacaatactattttcccacattatttacatgttatgaattgttcagataccacaaagcaccacttaagtctaaattgcttgattatgtcagaaaggtcctttgacttcaactctactcatttgaggatctacctagagtggaagtgtcaagtcattcttcaaaagggatttatctttacaattcagttttcttttgttcagaaat

SEQ ID NO: 345770 - DNA, 710 bp, Homo Sapiens
agtaacaacgatataatgaagaaatgaccatgtgttaattgtgtcttcacttctaaagatgacactaccaggttcagcagagaaggattgctcaggtcattaggtacagaagaaataaatgtcttgcacttgggattaatttgttaaagaagcccagcgtcacatggcagaggatgagagacggaatgctctaggtggaagagtgtcacacctgggatgcctcagtgctcctgcacatgacttctctttctagcagagcagcccggacttcctacttgacagctcagaggaggaagcaggcgttgccagtcctgaacgcagagaaacttgagacgttcagcaagggaggtaaggccaggagtgttgaggcgtccaggtccgtctgtggagttcactgccaccttcctgtgtggatttcagtccttgttttcttgttttcttctcacaagaaactgatgggcatgaagattgcagtgactgaactgtctccctgcgtttcttctcacataagcaggtctatgcttcagtttcttcatctgtaaaatggaggttgtaaaaatatcatctaccccatagggttatggtgatgattaaattagttcttctatagaaagtgcctgcagcagtggttagcatgtggtaggcactttgtatgtgttatctgttatgtctgtttgctcttactaacatctatatttctgagtcctaga

SEQ ID NO: 345771 - DNA, 834 bp, Homo Sapiens
taattagaaatatcagtttgtagaactgttgcacacaattgtcctggtgtgtattgttcagatccaagggtgtcatttacacgaacaataaagagggctgtgcaaccctgtcgatgagaaatcatatatctggaaaaaaagcctttttcagttctgctgccaaagtagcctggaagcaggtttcatcttgtccccaatacgcatgtgggacagcgaggcttatatttggtgtttaatgttattttccattaaaaggaaatcgagatccttggagaatggctgactcaacatcttggggcttgaaaaagtcaacctgggagtagaacatcttgtttttgccagtaggtgaggactttatgagacaattcctgagtatttcttttaggagcaggcatgcaccaagttgtagcaattccatcaaaaagcctgaggctcagctagggaagcatctgcttctccacttgtatggttgttgatagcattcaatcccttgcagctgaaggatgcatagcagtttgctacatggcagaggatgagagacggaatgctctaggtggaagagtgtcacacctgggatgcctcagtgctcctgcacatgacttctctttctagcagagcagcccggacttcctacttgacagctcagaggaggaagcaggcgttgccagtcttgttttcttctcacaagaaactgatgggcatgaagattgcagtgactgaactgtctccctgcgtttcttctcacataagctttccagtagtcccccaaagtcttaagtctttccagcatcaagtccaaaggcatcagagactcattctccttccaccatcagc

SEQ ID NO: 345772 - DNA, 1000 bp, Homo Sapiens
acttaagaaagagaagttttattagggcaatttcactttatttttccatacagcaaagtcaactactgcagtaataataaaataagcataaaacaaattgcagcccaagacaaaatacataattttaagcaactacaagcagaaagtaagttgtgattacataatagtaaaaccaagcacatttgtcctttcagcagatgaaagtggtagggttgctgataagtgcaacatttttaaccagctggagtgaaggctggatacactaattcttttaaacaagtgcccattatcacattttgcatttttgagtgcttctgagttgaaaattaaaaccatgaaatttgaactgcgttttatttttcacctgctgaaagaacaggatcctacagcaattaaaaaacaatcacataacaactatagctacagtgtgctgtttggtttgcctgtttatgatttaaattttgtgaaagtcaatacttgttttgaagatttttttgtgaacaataaaccactgaaattggcagaaactgatctgaataatatatgttcttagtatagttctttctctctttttttgttgaagttttaaacatgcagtagttttgaaaaatgtaaggaatatctgatccatgatttcaccttaatggtagaagtacctgctatttttggtaatgatcttcaggcagatttggccccatggagtttttgtcagtcatgagggtttgaaaggatggcgtatctttccagctgaaaaaatcctggcaaactacaagctgtccacaagaaagcaaagcaacatgtttgaaggggtatggagtgctaactctgtgccacttttgcaagcaattttgctcagtctgtcattgtattagccttaacaaaactccttgtaattatagacgtttttattcaaaataagatcttactattatacaggtttctctcttttgactatatacagaagtgcaaaaagtcaaccttctccctagacgttccaaca

SEQ ID NO: 345773 - DNA, 1000 bp, Homo Sapiens
tttttttttttttttttttttacttaagaaagagaagttttattagggcaatttcactttatttttccatacagcaaagtcaactactgcagtaataataaaataagcataaaacaaattgcagcccaagacaaaatacataattttaagcaactacaagcagaaagtaagttgtgattacataatagtaaaaccaagcacatttgtcctttcagcagatgaaagtggtagggttgctgataagtgcaacatttttaaccagctggagtgaaggctggatacactaattcttttaaacaagtgcccattatcacattttgcatttttgagtgcttctgagttgaaaattaaaaccatgaaatttgaactgcgttttatttttcacctgctgaaagaacaggatcctacagcaattaaaaaacaatcacataacaactatagctacagtgtgctgtttggtttgcctgtttatgatttaaattttgtgaaagtcaatacttgttttgaagatttttttgtgaacaataaaccactgaaattggcagaaactgatctgaataatatatgttcttagtatagttctttctctctttttttgttgaagttttaaacatgcagtagttttgaaaaatgtaaggaatatctgatccatgatttcaccttaatggtagaagtacctgctatttttggtaatgatcttcaggcagatttggccccatggagtttttgtcagtcatgagggtttgaaaggatggcgtatctttccagctgaaaaaatcctggcaaactacaagctgtccacaagaaagcaaagcaacatgtttgaaggggtatggagtgctaactctgtgccacttttgcaagcaattttgctcagtctgtcattgtattagccttaacaaaactccttgtaattatagacgtttttattcaaaataagatcttactattatacaggtttctctcttttgactatatacagaagtgcaaaaagtcaacc

SEQ ID NO: 345774 - DNA, 1000 bp, Homo Sapiens
tttttttacattttgtgataactttttcttctctttagaaaaaaaaaatatgtacaaaaaaagctgagaagagccaacatggaagtgtcaagaaaacattctgataggtacggacaaaagagctccttcaatcaaaggagttacatattagttctcaccatgctagaaaaatgagatgcagttaaaattctagaataattaaaagccacaaagtgaaactgttgttctggggccctatgttgtagattctctgattccttttctgtaaaataatactgtgcaaactgtaaaatattcattttcatataaagtccatataatatgagatacaaaactgttgagttgacaggggaggctgatgttggctgctttttggagaaaagctgacagtggcacctgcctgccagaagacattccagaaagatcttgagttatttagtagaggccattatctaagaaagaatcatataaccccaataccctccaaatccagaattctctgacaattgtttgtataactaggtgactttgttaatatatcactttaaactttgaacgtaacaatttgttaagagatcagagtgcaacattctttttgaagacaattttttttctacaattgactttgagatttattattaaccaacattgtccttcctgcagctcaaaagtttgccttttattaaaattcaaaaattctggaggaggcagcaactgtggtaataaaagtttaaagtgaattgttatattctgtgtttataaaactgagaaaagaaaatttgtgtacaaatatcacaaaacaacgtcaaccattgaataaatgtggttcttcaatgcacgcttgaacaagaaaattttgttggttttaaaattctggcataaatatattaaagctgaccaaaaaaaaaaaaaaaaaatcagggcaagctacatcacttcctcatacaaaaaatgtacaaaacattagcttctaactagataaacgtaatatttgtcatca

SEQ ID NO: 345775 - DNA, 1000 bp, Homo Sapiens; identical to SEQ ID NO: 161285

SEQ ID NO: 345776 - DNA, 1000 bp, Homo Sapiens
ttttttttttttttttttttttttttttccttttaaatgcttcttttatttcattggttgtacattgggtgagtgaactgaatattacaaccaaaacatagtattgatacaaattagactcctgtttacactgtaaggtaatgaatgagggaattctttaagtgttacagaaagatttagtagaaatgttaccagtggtatggctgaaagaatatttcggtgaagtgctgttatatcctgaaaaccaagagtgaaatgtagttcccatacaagtggagagttagtctcttaactacagtatttgttgaactgatatcttcatgtcttggatattggtgatttttgttttttaattaaacaaagcatttaagatttattcatcatagtcagacttctgaatataaacaaacttttggcaaataatatttatacagaaaaatagttttagatcctctcaaatcccagaattattctataaaattacattataaataaataaaaagcaaaatctgttgtacatatatttgtacatctatgcatttgccttgcctcctccttattgtaaatggcatatttatgactctttgcatattgtaatcacaattctggaaaatggatatcatagtaaaaaatacagtcttctatatttgcttggggttacaggtgatgtttttgatgctccattattaaagggctgaaaatagttgtgtgctaataattttaaaaatcaaaatcatgaaacaaaagaaaaaaaagaaagacaatgttacaacaattaatctacaaaaatatttcagtgattcccataatttaccttttagtaatgtatactatgttttcaatgagtttaaatgaattaacaaagaaaaaaacagaaaaaagaaaacaagtttgaatgttttaggcaagttgtagcgtaactacattgttatagttgagaaaattacaaatatcaataatacataaagatgaaactaccaaagtaatacaagttagatac

SEQ ID NO: 345777 - DNA, 1000 bp, Homo Sapiens
ttttttttttgagtttgaatatctttgtttaaaaggttagttattttttttaagtatagcgtgagaaatacaggccattattttcaaatatataaaaacatctccagtaagttccacacagaattttggaaagctaagctggactcagagcaggtctgctgctccccaaggcactacccttcgaaggaaggtttccacccgcccccggctgcaaaatggaaaggagaaagcccgtttccaaaaggtctccacgcccctttgggtggaaaacagccactgttcattcccgcgttcacatccaaagaggaagcctagattcaggtgacaagaacagaatatgggcttttcataccacacacatatatttcctatttctcaggaatggtgctgtgtcattactatgcacaaaatcggattcttcaagaaaattgttttttaggccgagcatggtggctcacgcctgtaatcccagcactttgggaggccgtggcaggtggatcacgaggtcagtagttcgagaccagcctggccaacatggtgaaatcccatctctactaaaaatacaaaaattagccgagcgtggtggcacacgcgtgtaatcccagctactcagaaggctgaggcagaagaatcgcttgaacctgggagacggaggttgcagtgagccgagatcgcaccattgcactccagcctgggtgacagggcaagactccatctcaaaacaaacaaaaaaaaatgtttttaaatactggtgtaattaccccaaaaaaggcctaaggaggcctgcagcccgcctcatgcatgcgacatttagccttaacagcttcaccagccctcggccctgtttgccacagaaaagctgaaaccgcaggtttctgagtcaatttacaccgcccaatccctgacctgccctcttcctgagagagccaaccagaggcctccaaggccctgccaagggaactctgaccggaagagcatctctgaggcctgcgcacaacac

SEQ ID NO: 345778 - DNA, 1000 bp, Homo Sapiens
accagttttaagaagcagcttaggatgctttatttatagttctcagaagccttatctggaaacttaatgtagaagttgctgttaggcttcttgtcgaggactagaaatcttcattcccctgcagttaagagaaacttgtccaagcagaggttagtgccttatactccataaccaatgttgcagccgactttgggccaatggaggttgtagactcatgaagtgagggggagaacttgtggagttaaaaaacctggctgtggtgttcctagagttggtacatacacaactggaactgtttgtatcttgtttaggaaggcactgtatgctaggaagatggaagctgttgatgccagcactgcaaagagggtcaagagcaggatctggtaagagccagtgaaccgcttgaggatggcggaatcttcacagtgatctgcacccaacttatctttcatagccctcactaccactgcctcactttgactggtgagtacacaggaaatattgatgaaaacaggtgatgccatttgctggaaggaagtgaagttgaccactcttacagagtaaatggccaggccaggagtgaggggagagtggctatggccagcgaccactagaactggggagctggagatgacctctagcttcctaagaactctgtccactcccagtactcttatctccccgatatcttgtttgtggctaagaaccaattctgactggttaatataaaaggctgggatgaaaggaatgaggattcgttgcattccattcttgctacgttcactgaccagtgtagcccacccatagactgaggtgtcagccacactgagggcctgtagcagctcctctgactgcggtcgaaccttgattatgcagacataaacccctttctccatactgaaatctgaatggacctgaaagactttacttgctggaatgtctagcaaagtattactgaactgtacatggcacagcatgagggtcgctggaagaagtactt

SEQ ID NO: 345779 - DNA, 1000 bp, Homo Sapiens; identical to SEQ ID NO: 161286

SEQ ID NO: 345780 - DNA, 1000 bp, Homo Sapiens
tactctctgttcatgggagctgctgcccccacctccagtctgaccgcttccatttatttaagaaaaatccgacacagtggtgggtagaacccgagagaaaaatggctgtgggatggggtaggggcgacactggctcccttctgcatttgcccaccctgaagtccctcacagcattccctggtgccctctactcccctcccgggttccgtcttgtgggggataggtggctgcctgccctgtgctgcagagggaagtcgcagtcagcagggtgaggggtggctaaggcgtagtagtgttgaccttgctgtgggggacggggaaggcaaggaggtccccaggcctctggctctggggtgtgatttggctagagatggatccaggactctttcccctttaggtccctgcccaaagcccttggggcagaggtgggagtcctgagaactcaggaaggtgcctggcttggcaccagacctctctgtagagtcagctcccaggtcctgggaggcacccgaatgccagcagatgctacaactgtccccctaacccccagatatttcgtccacagcaagatccttggcagggcaggcagctgccacctccccaccctgcaggacagaaatccctgaatattagtttgaggaaagtctttgtgcagcctgtgacacaagacccccacagaaccccctgcacagggggacgacacgggggacgggaggcggggccgggacacagcgtgggcccacctgaccccaagctggacctccttgcctcactcttggggcagggggttgcttaagatgggaggaggtttggaaagggcagaacagaggctggggttgctttcctccttacgagccactggaggaagagccctccacctgcagggggcagaagagggtaatggcgtgaggcgagggaaggcccagacactgaggcggcccgctccgcacggagccaagctgcaggggcagggagtacaaaatcaattcagccgcccaga

SEQ ID NO: 345781 - DNA, 1000 bp, Homo Sapiens
atgtgacaaagagaagttctaatatctaacagcaaatctcaagaggaaaggtagaaatgactttagtatctggtaaggaagggtgggattgaactgaacagagagttcccactcatttacttatcttttggattttcagtttgaaatccccagacttttcacactgatatctgagatgttcttctgggatgtcaggggtcattccaggccttgactcgagtgtgatgaatccaagattccagtcccacaaacttcactgccgagcaggtggagagaaggatggtataaggttcctcccagctgggaccgtctgcaggaccttttctctggaggggctggcatcaaccacatggcagccaggattctccatccgctggtaggacatttctaccttttgacgaaacacactgttggcctcaagttctgcttcttccctggtcttctccatgccccggccctgcagcctctgcaacctctcctcaggactcacagtgagcagcaggataaggtcaggtttgagcaggtcctctggccactggtacacagggtgatgggctgggggacagccttaagtgaatctgccactgactgggtcaccgtggttttacccgtggcatccagtccttcgatggcaacaacctggaactttcctttctggatctgttttgggcactggtcgaccaggtcaagcactgcccgggcttcaggaataaaggaggtacactcctccaaaacggcccgggcggcttcccggtccgggaagaccacggaactgggcaagtctggcaccaccgggtgcagcgggggctccgggacgggcacgacctgtgcgcagcccacctgcagccgcctgccgtcttgcacctcccagaggcgctgccacagctggccgcgcgggtcggcctcgaactcgcccaagtgcgggcgtggtgcctcctggcaggcgcccagcagctcgagcagcgcttgccgggtgtcagggtcatccagggggtcgcgc

SEQ ID NO: 345782 - DNA, 1000 bp, Homo Sapiens
ttttttttttttttttttttttttttttttgaaaaccatagacacatatgttttattttagtaaaaatttcaaattatgactttagtagtctttaaaaggttacaaccatatcacagaccttggcaaagctgcagtgtattaatttttatccccagtttccattctttaaccttcaaggaacgaaaatgaaatcaaaattttaaaacacatgattataagcctttgtatcaactgagaattaagagtttaagtcatgaatctttttcttaataagctacttgacgtaacaaaaagtaaaaaaaaagaaatcttactaacctctgtactcttagagtttgaaaaatattgattacagctcttcctacagaatcacggtcaccttcaaaatgctatccacaatataaagaaaattatgaaagtcagaaagcagcttgattgtcagtagtatcagtttccatcttctttaacccatgtgaatgttcaagacatgtggtagaagaaaaggaataatgctatttctaatgttcatgataacgaacactctaggaaaacatttaaagaaactccatgatttcacagttaaaattagagctctattaataaccaacaagctaaggtgttttctatatctcattgctctgtatatttctagcaatttatagagaagtttagcagatctacaagggttttcatcagttaattttcaacattaactaggtcacatgccagaagctgttataccaaatatttaaaaattagagctgtgctgaaaaaaaaatgacctacaataagaacttgagagagatatagactgacttcctgcctgagacaattttacagcctaaaaattctgaaagcaacagaaaagcagaattgcttattttgcctaattactttcaccatttaaatattaatcaacatagcatcaagtctaaaattcagctactagtaacattatttcatcagtagtcatcacttaaaaaaggattctgaacttac

SEQ ID NO: 345783 - DNA, 1000 bp, Homo Sapiens
ggagacggagtctcgctgtcttccatgctggagtgcagtagtatgatcccggcccactgcagcctccgcctcccgggttcagttgattctcctgcctcagcaccccaagtagctaggattacaggcccccgccaacctgcctggctaatttttcatttttttgagacggagtctcactgtcttccacgctggagtgcaaaggcacgatctcggctcactgcaacctccgcttcccgtcaagcgattctcctgccttagcctcccgagtatctgggactacaggtgcctgccaccacgcccggctaatttttgtattttttgtagaggtggggtttcaccatgttggccaggctggtctcgaactcctgacctcgtgatccgcccgcctcggcctcccaaagtgctgggattacaggcgtgagccaccgcgcccggccaatatttccatttttgtggtgaagttatacgcaacatgaccaaatcttagttggtgagggaggtaaaagacccttaagggcaagaagaggttagaactttcaaatttatgcccctctggtggtgcaatgcagagatttccctcatatttccggggaatttccctcgaatttcgtttcccaccctgtgaaagcagcaaggttaggaaagcgggggcggggcgggggcgggtagttttgattaaaaggaaggaaaagaaaaacagagaaaagcaaaaggggaaaataaactgagcctactgaggagatgcggcgacggcgacagtttcccggggctgctcagcgccttggggcctacaggagacgcgggagcacgcccccggcggcgccggcctcgagcggtgtcacggagttgtagtgctcgccgaggctgtaggcatagcgcaggtagaccaggatgatcggcttcttgacgtactcctccccgatgatcaaggtgggcgagtcggcctggatcacctcgatgggggtcttcaggacgtgcgacagggccctcagctccagct

SEQ ID NO: 345784 - DNA, 1000 bp, Homo Sapiens
gtagagatggagttttgccatgttgcccaggctagtcttgaacccctgggctcaagtgatctgtccatcttagcttcccaaagtgttgagattacaggcatgagccactgtgcccagccactctttattttaataattgtttccaaaaagaaaagaatcatctatggatgctaaaatgattgggtgaaagttaattggagaataggatatttacagagtctcaaattgttacacggcagattattactaattacaaagaggaaaatgtacctttacaatggaaatggcactcacctccttaatcaaaagatcaaaatgatcagcatccaaaatgagacaacctaatgtttccccccataagcaaataagaaatatacatcatctacataatagtcttgagaaagatgtttatcctggatctcattataaagaaacaatatgtaagcctagaaagtgaggcattttttaacacaaccgtcctctattcttcaaaatgtccacgtcacgaaaaacatggtggtggaacagttatagataaaaacaactaaagagatatgagaaccaaataaatgcatgaactttgattgaattctggatttacaaaaggtataaaacacatctgagtacaattgagaaagtctaagtattggctagatattagatagtattaaataattatttttaattttcatagatgtgatggtgctgatgtttaagaagaaagtccttattaggaggatgctgctgaaatatttaaggacaaagtgtcataatgtctgcatttactcccaaatgcctcatcaaaaatgtgcaaatatgaagtaaatggggcaaaatcttaataagaagtgaatgtaggtgagtgctactatttaacatttttggagactcaaaaatttgcaaaattaaaaattgggacaaaagtatttggcaaatcataaagtactcaacaataatggcactacgattagtagcaacaatgaaagtatttaggaaagaa

SEQ ID NO: 345785 - DNA, 1000 bp, Homo Sapiens; identical to SEQ ID NO: 161288

SEQ ID NO: 345786 - DNA, 1000 bp, Homo Sapiens
gatgagtgctaaaaatatttattaataacatgattcgttgagagatttggtcatcaggaaatagctactgtacatggtcacagtgtcttggaaagagtgttaagtatggattctgtcttgcaagatttttttggcactttatatttttcactgaagactgagcactaaaggtgctggcaacaatgacacctaaactatgaaaaaaaaaatcactgtttgccatcattgcggtgataagcataaaaatttaagtacgtgtttcttgtatattaagactccaaatgcccaaatgcttagatgaatacatacaggaatatttaaaataaatttaaatatagccataacagaggattttgaaaacaaaatcacagagtctaacatattgtaccttacgtgtgcttggtttcaattagagtaaggcactcgccgaaggatgtactgacccatgctgtcagctacaacaggcatgcatcattattggcttaattaaagttttagtactgattaaaacgttttattattgtattatcctaaacggcagtggtctccaatcttattaagggatacagaaaagatataattcaggagtttcagttgcataatttaataacccagctactgtcaattttttatttaaacaagttttgataaaagctgagtctgcttgtgtccaacatgacagtgtaaaagactttttgaatgctgctttataagtagcaactgaatataaaatcatttgaaaatgtgatgcagccatcttgatgcctatggtaatttacttcaatacaactgcaaggagaaatgcttaaatcatttccacctggcaagaacaggggagaaagttaattccattagccatcttgatttaattaaatgcatactatgttcttactggcaacttttacatgtcctcatcattagaaattaattatataagcgattatcaaaaaaattttgagcaggtacatatactcttctttgttgtttacaaataagcatg

SEQ ID NO: 345787 - DNA, 1000 bp, Homo Sapiens
tttttttttttgcacaagtcagtaaaaactctttattcattccttcatgtgacagttggccttgagtagttacaaagacagagcagttcctgcctctcagaattctaagcagacattccagagctcacagatcagtgtcccaccagctgctaccctggaagcttcagggagatggggagcctggagtaggggggtgctgcaggaacccccggcaggcagtggggccaggcttcacaggcacccagggctgagtgcgagatggcagggggcaagcaggcaagcagtgggatggtcttgaggtgtggggtgagggcaggaagcccacggtattcctgacttggagtcgagggagacagaacggaggggcccgagctgaagacagagtctgagggaactggagaggctagaagccagcactcagcttcccaggagaccccaactattgccgggccaagtgtccagggagaacgtcgggtatccaaatgtttcagtggaagattccttttccaaacatgagctggttctttgggtttttaattataaacataatacatggtcaaggttaaaaacattttccaagcaccacataaggatatgaaataaaaattctatccccctctagaccttccagactgggtccagaaggagctgctgtcagtgattttccttacagagagaccattgcagccacctacagtgcaccatggccccgacacagtgtggcatctccccccacacgcacctgcacgcagcctcttaggagctgccctgctgaaggaggtcatccctctcagtcacatctgagcagcactcactcaggcctgggccctgaggggcatgtggggggacctggccgggttcctggctgtgtcttgtctggcatctgcctttggactaccctcttgctacagctccctgggcctgtggctgctccaagctggactccagctcccctgggctgcagtgctgctcccagtggtccagaaacaaggccaggcat

SEQ ID NO: 345788 - DNA, 1000 bp, Homo Sapiens
ttttttttttttttttttttttttttcaagcctcaatgattatatttatagagcagctaagggtttgcagcctcctctccatcttctggctctaggacacagctgtgttctggggctgagaagtctcagcacaggctcctcctcacagttctagctacaaatgaactgccggatgaactgttctagtttttcctgattgtccaggctggcaaaagtaggggacaggtggagcctggggcctgcagggctcggcgtctgctgcagaacccctaggtctctgaaggtccagacagcactgatggcgagctttgggtccgcacactcgaagatcccttcttcctgggcggtggcctgcaggaactggaacagctgctctgtgtagcccaactctgcagaagagagaagacctagacctggcacccagcacagacacagcctgcctcgaggactgcaagggaacaagggcctcaccagtatcgggcagctggccctggcggaggaaggcggcagcctgtgcaaaggccttgagcagcgggctgagcaggcggcagaggaaaagaaagaaatctgggcagtgtgactgctggctgagctggaggggacaggccggggtgagtgcagctccccaccgcctccctaccacctccctccaggggcagcttttgaaacacaccctgaagtaccggccgtcagcctctccgaagtcatcactgtcactatcagtaaagtccccactcggtttccacagcagctttctgctcaatcgctgtcgccctgtgtcacaggctggccgggagcctggggtctcctcagcaaccaggagcccgcattggatgagccggtccagcacctcctgacagtagcagtaggaagactggcagggctttagcagcagcaggtcttgcggcagcaggtgcatcagcagcaggatctggcggtacagctcattctggctcagcagcaatatgccctgcagctcccagggcccctggggcggcac

SEQ ID NO: 345789 - DNA, 1000 bp, Homo Sapiens
ttttttttttttttttcttaaaataactaattagctatctagtttaagaaggaggtgcagaaggaagaacaaagcacccgtggtttcacttctgttttaaaaaaagttttttaaagcaaaagcccctggccctttctcttcttcttttttgagacagggccttgctttgtcacccaggctggagcacaatggcgcaatctgggctcacggcagccccaacctcgcagactcaagcaatcctcccacctcaggctcccgggtggctggaactacaggcatgtgccaccacgcctggctaatttttgtattttttgtagagacagggtctcgccttgtggcccaaggtggtctcgaactcctgagctcaagtgatctgtccgccttggcctcccaaactgctaggattacaggtgtgaaccaccatgcctggcctctcttctcagttttaatatgagaaattacatgattatacctttctgaaatcttgttgagtttgaaattatgactcaacggagaatatgactgatactgtgtctatcggaacactgctaactgtatattggtgaatgactgtaagtctaaaaatagctaccaaagaaatgaagagccacctggcagagacaaagatactgtgaccagaagaaggagattattctgagacacacatagctctttgacttctttgatccttagagagtatttcaaagtttgtagaaattctggaggataatcaatttgattttcaaattcaatggccaaaaaaatggcatttttacttggcctcacatctaaattagttagaactgcaaaaatgctaactttcctagcagttcttccaagaagcaagcattcattttcctcttcgtgtgtctcatattggttaaaactcagtgtttctagagacttcagtcatcagttctactaaacaaggtaacgtcatcattgtatcctggggctgaacactccaagttctctagtaaaacataattgttttcattga

SEQ ID NO: 345790 - DNA, 1000 bp, Homo Sapiens
ttttttttttttttttctttttttttttttttgagacagagtctcgctctgtcgtccaggctggagcacagtggcacttggctcactacaagctctgcctcccaggttcacgccattctcctgcctcagcctcccgagtagctgggaccacaggcgcctgccaccatgccgggctaatttttttttttttttgtatttttagtagagatggggtttcaccatgttagccaggatggtctctatctcctgacctcatcatccgtccgtctcggcctcccaaagtgctgggattacagacgtgagccactgcacccggcccatgttggaggtcttgaggctggtctcgaacacctgatctcaagtgatctgcccagctcggcctcccaaagggctgggattacaggcatgagctactgcgcccagcctgattgtttgacttatgaagtatatacctatctatgaacaagaactgaaggaactttaccccagaatgaagagtttcactggatggaacggcagagtcggaggagaattattcctttaatttttatttctgttgatgttgcaattgtttttatgcagtgcaagcaaacatacacacacacacacacacacacacacacacgcatgcaagctgtgaatgtttatgcatactcaggaggaagccttctcagggtcactgtttccggaaactgaccttgaaaacagacctgcatttaaatatcacagatgtactttgacgaatgaggaagtaagagacatagaatggtaactaaattcatcagggtattatatattgagcaactgattcttctgggaaagctgcacccagtttctttttgaggaaacacctctcttcccccactgtcaggccatgttctctatagagttctggtctcctgagtcatgttaatcaataaattctcatttttgtttaagccagtttggattcgatttcccatcactctccactaggaaatttttactgattcaggatagt

SEQ ID NO: 345791 - DNA, 1000 bp, Homo Sapiens
tttttttttttttttttttttttttttttttttttttacttaaactagaacattttaatacccagaaagcattcttaaagcagagactttcagatacaaggtgattcaaaacttcataaaaatatatgagcttcaaactatacatttaacttaacagaatgtccattttcaatttttacaataagtagagaaacagaatcaagttttatgtagtaattcaagatatatataattgcaaataagtgaaaaatttccattttaccccaatttctcatctgaagcctcagatggcatcttgcccaccaggaacaaacacgtgaataaataatatggcataaatgtctttcaagttcccagagaactaactctaagcccatctcacatttgtcttttaagtttttttgttaaagaggagctgttcttaaagagatattccattttagtcactgctcttctcaggaaggatatgtgtgatccagtaactaaagaaagctgagattactctggcatggtcaggaggcatcgtgcaatgttctgggaacatttccagagcatgcttcaatctctcagtatcttgcaggagcagcagcgttttcatgtggtacaggatggacacgtctgagggcagcatgctgtgtgacgcgaggcggtccagcagctcctcagcggcatctgcgagggcagctgaagctgcatctctggagacaccgtcataaaaatacatttcctgtgttgacttcaaaaaatttagaatactgtgtgccttttcattggtaattgtatcatcttcctcgctggcgtctgcaccgtcctcctccccggagtctgcaccctcttcctccccagcccatgtcgggtcttcctcgctggcgtccgcaccgtcctcctccctggtgtctttaccgtcttcctccccggcccgtgtcaggtcttcctcaatggtgtccacaccgtcctcctccctggcgtctttaacgtcttcctccccggccggtgtcgg

SEQ ID NO: 345792 - DNA, 1000 bp, Homo Sapiens; identical to SEQ ID NO: 161289

SEQ ID NO: 345793 - DNA, 1000 bp, Homo Sapiens
ttttttttttttttttttccgattttaactttaatgaaactttaagtacataaataaccactctttcctgccctggttgaggccgcgctgggtccgggaaatatctgctttccaacggggcacctgggtgggagccttccaagaacttcagctcagcggttcccagcaagggttcgctgagtctctgtcctaggaggtccgagctgggtatgctgtgcggacgcagacactgcgggaaggaaacaggtgtcccgcggcggccaaaccttcgggcagcagcccaggtcgccttgctcaccccaggcggtctcatggcacgggcctctcgaaactgtgggcaagaaagggtcctcgtgagaactaggctcagaagaagagcgggggcggcgccacctcggggggagcggaccaggctggggccgcaagggcggcgtccggggccgcgtgggcggcttcgccgtgaatgagctggtgccgcaccaggtgggtcttgcggctgaagctctttccgcactgcgggcaggagaaggggcgggagcctgtgtggatcgcctggtggcggactaggttggttttggagctgaagctgcgggcgcagacggcgcaggcgtgggggcggctgccagtgtgcaccgcctggtggcggcccaggtgcgacttgcggctgaagcggcggccgcactgagcgcaggcgaaaggcctggcgccgctgtgggccctggagtgggcgaccagattaggccgcgagccgaagcggcggtcacactgcgtgcaggcgaagggccgttcgcccgtgtgcacgcgcgggtgccgcgccaggtgctgcccatgggagaagccgcgcccgcagtccgggcagaagaaggaccgctcgcccgagggggcgcgctggggcaccacgggatcggatcctgggccgcagcccggtccgccaggcgcgctggccaggggcttggcggcgggggcatccacggtggcgcccagtgcgcactcatcgcac

SEQ ID NO: 345794 - DNA, 1000 bp, Homo Sapiens
ttttttttttttttttgacttggttaaatattcagtattaaattttattgaatttgtctttagaaaaatttcatagttagaacaggccttacccattttgcacatatatacatatgcaccacctttgcagtggcaacatatatatccacactataaacataccacatttataaatcttgtaaggacaagaaatggagttgaataagtaccccccaacatatacaagaaagttagcatacttaccccgtttttcactacatcagaggcaaaataagaaatcttttaagaaaatctcaagactggctcatggcaaaatgaatatgctaaatttgggggttggtttaagcgtggtatgtgtcaggtaattttgtgattaccaaaaagttttcacttgaaaactaagacctttgctgtttatttcacaatgtgaaatcaataaacctgaggatacaagtctctgtagtgatattctgtatttactcatttttacacatttttgaatgcaattttgctaaggaaggaaagcttacagatgcataaaatgtaactgggaagagtagccataaaaatcaatgaatggatgtggctgagcaagagcctctgtaatactaatacgctgaatggctaataagtcacttcatttcggtgaaacaaatacctaaattctttgaagaattaacaggcttgatgttcaggtctgcttttggcaaatgggcatttaaatactccaagaaggtaagagccagaaaataggaaggtaactatgcttttagaaatatgtttacttagattctcccaaggtttatacttacaggtaaacttagaacaatagctcaaatacctacataggagaaggaaatctcaagggaaaacagttaattttaaagttatttaagaaacagaatccaacaccatagatcagagttcatgctaggattatcatttcaaaaataatgactcatccaacagatatagaataatagcactttaaagatgttta

SEQ ID NO: 345795 - DNA, 1000 bp, Homo Sapiens
taatttctgcttatttttattttctaattcttaaatcccagcacaagccaaaaagagaaagagaaaaaaaggtaattattgtagaacctgaaaacagcaatgtatggaaaccctcaaagcagaaaagggaggaagatcctgaagattctcttatgaagctccaaaattgataatcctgtctcagctctgcctcctcaggaggagcattagtagaacagcagtgatgaggacacagagggagcagacagtgggtaccacgatctccgtaaccatttgcatgtgacttagcaaaggctctgcagcaagcatctgattgttgatagagcaagtttccaaagctttgaggtaccaactttccacctctcttggattgggaaacccattggcaatgataatcttcttgtaatattgaactgaagcctttggatagcgaggcttatttctgtcgttaaattcaacatagtagaatccatatctatctgagtatcctttctcccattcaaacttatccaacagagaccaggaagtatacccctttatattagcaccatcttttatagcttttagcatttcatttatgtatcctttaaggtattgaattctccactcatcacataattgagtacagtggaatttttgagatgctccattttccatcacatatatgggaggatcaccgtattgagtctgagcaaagttaaggagcctcctaaatccccatggcacagaatatagccatttagaccccagatctggccagtttgggtcaaccagctctatcaagtcacgatcgttctggtagctgggcccctggcgggaggggtagttcctttccgtgatgtaccgagtagtaaaatgacctaatcccaagaaatcggatgtgcctttaatgtagctcttctcctggagtgagaacaccggtaacctcgacatctccaggccttgctctgcactctttcttccaatgtagtccttcatgacttgggggtagtcaccggca

SEQ ID NO: 345796 - DNA, 500 bp, Homo Sapiens
tttttttttttttcgaaaacttaaaactttattaagagaatattatcagtcaaatttccagattaagaataacgttcttggtttcagtcttcatttgtcttgcttgaaacctatggttgcgcatcacctgcttccagcactttagtgagatcaaaagtgggcataatcccctccctgacatcaggaccatctccaggctcatcctctatcttaagcagagccagttcctgttgaaaagcttccatgtcaggcccttgaaaagcaggcactgcttgattttcaatctccccactaggtgcaataccctgattatcagttggtggttcctcttcttgacgtttttcctcagtgggctcctggacaatcacagatccaaccggctgggaagactcttggtcatttcctctttctgaggattgggatcttgctcttagaagctcactcatatttcccacggctgagtcttggtcagtgagaaagaatcaagatggcgggccccc

SEQ ID NO: 345797 - DNA, 1000 bp, Homo Sapiens
tcagtaggtttgaaatgattgtttattgggcccattcactgtctgttgctttcccagagcttctgggcccaggtctggctcaggcccacaaagacaccaaacccaaggaccagggcaacagctggcagcaaaaggaccgcccaaaggagaggtctcaggctggagttcccattggagtctgtgggcccaagtgtgggctcctgcccataagaatcctcaaagcccactggccccggagagctcacgatgtcctggggcctggcagtgtcattacggtgacctgaggatcgtcgctgtcttgtagtgccagtgctacatgcagtggagcaagtctccagccctgaggtgtggcaggcagaggtgctgcagaacaagtaaaccagtcctctgagggctctctgggagcctgagtccaggagggcgaaggtagcaacagtgaatcgctggtagtgcgactggaaaggtgtggccccgtccaaggctaccatttgggttctgtagctgtcgcccttgaaagggcatccgtctgacaggatgggccactggggctgctggaaggggttggcactgggagcgccccagcactggtgcagcagcaggaccaggttggggtctgtcctctgcagaagccggacctccacatggactggttctcggagcagcctcacgatgggatagtcatcctccccatagtacgagctgaaggtctcgtctttggcaatccgcagctcaagccgcagggggccgggctgggtcataggagcaggcgatgggggtgggaaaatggatgcctgaatgggcaggaagtcactggcgttgaagacacagcgcacatgaagctggaaggtgctgtcccgcgtgatggaaccctgtggccccttttggatgtggatgccagacaccagccagttctcatagatgagctggtcgccagccacctgcattgtggttccacagtgggtgagagggaagtagaagaccacgaaagcttccgtgtgct

SEQ ID NO: 345798 - DNA, 1000 bp, Homo Sapiens
ttttttttttttttttttttttttttttttttttttttttttttttttttttgcataatatacatagtttcatttacgaacattggaatacagactttctatacacacattacctatataataaaaatgtacatggcatgagtatatgtcactgtataaatatagagttttagaaatcttgaacccgcgcttcctgttcacatcagtttctcttcttcttcctccccagtcaggtccgtcatttaagagttggacaaaagggacaagtgtcatttgtgttggtctgggcccagaatttgatacactccttgtgcaatacatgggtacacgccattggatgcagctcactgggctggacgagtttctggcacattagacatagcttacaggtggctggagcatgtgaagaccttccaggatatgaaacttgggcagaaggcaagaacattggggtactgatttgggccagtggagcagggaacaaggcccggatgcgaccaagtggctgagtacttgctgccacccgctcatgttctgccagtcgtgcagcaaccaactggataagttcctccatggtcaggcctgccatggtggtacgtgctgtcttgatctgctgaagaatgttggtcatctgggccttattgcactgtgggaaccgggtcagcagcttctccaggatcttctccagtttgtctactggttggggccggggagtttcagcagaagccttaacaccgcccaagcctgggggaggtgggatggaggcggcagggggcatgtgtggaccgtgggggctgacaagggaacccaagccagggctatttctgccatgggagccaggaaggggtgaggaaggctggctgggctgggaaagggcagggttcaggattgggaaagacaaggagcggggatctgcactgggcataaccatgggcattgtgacctgcccaatggagaagggcatccgaggagccagagagggactgggttgaaacacctg

SEQ ID NO: 345799 - DNA, 1000 bp, Homo Sapiens; identical to SEQ ID NO: 161290

SEQ ID NO: 345800 - DNA, 1000 bp, Homo Sapiens
ttttttttttttttttttttttttttttttttttttttttttttttttttttttttttttttttttttttttttttttttttttttttttttttttttttttaagtaaacaaaatataaaactttattggtttggagtgtgcagtagcaggtgttcctgggagcggcccttacagacttggggtgtggctgggagggcaggtggggctgctcggcagcagtcctgcccctgccagggagttggcatccatctctgcagtgtgaaggtcggtgcggcgctgagagcacacccacggggaatggtgctcagtctagagaaaggcccagggtctgctgctggccctatcacgtcgcttccctttcccgggcctcagtcccgggaacaatgggcacctggactgaacaatgggcacccggagcttctttcaggcttgtcaggatatgtgcaaatgcccacagggcgggcagctgggaggccctccgtgagagcccttagatgatgttggctgaggccaggcgcggtggctcacgcctgtaatcccagcattttgggaggccgaggcgggcggcaaggtcaggcattcaagaccagcctggccaacacagcgaaagcctgtctctactaaaaatacaaaattagctgggcatggtggcgcacacctatagtcccagcaactcgggaggctgaggcaggagaatcacttgaacctgggaggtggaggttgtggtgagccgagattgcaccaccgcactccagcctgggcaacaaagcgagactccatctcaaaaaaaaagatgatgttggctgaactgcggcccctgcagaagtgcatgttgaagtcctaccccctagtagctcaggatgtgactgtatatggagataggctcttgacagagataattaagttaaaattgggccaagtgaggtggctcatgcctgtaatcccagcactttgggaggccaaggccagtggatcacttgaggtcaggagttcgagacc

SEQ ID NO: 345801 - DNA, 1000 bp, Homo Sapiens
tttttttttttttttttttttttttttttttttttttttttttttttccaagtcctaagggtttatttctttggcacaaagaggacaatctagacaagcgaggctcatcactccacgttggggagtctggggcacctgctccctgttcttcatgcccgaatccatgcacacccaccctgtattccgcataagacacggcctctgtgcaaaatgccggctcggcctcccaaagtgctgggattcctggcgtgagccaccgcgcctggccaggatgcccattttttaaaggctcaactgtcccagtaggccatgccatgtgggcatcgggcagggtcctggccctgcgtcaggaccgctcttcaaagctcgatggtatcactggaggcgctgcgggattccccaggcttgccgcgcggctggacctctccctggccgtccccctgccgagcggcggtagaatcaggggctggggtcggggcaggcagtagctgtaccgtgctgggcaactcatctaggggcagactgtccactgatgacagcccgtggcgccaggggttccaactgatcttgagtgaacccctggagaagctgtcgagggagctgccagaagccgcagcggctgccccgtcgggtgcttccactacgtgctgtgggaccggcccgcgcacgcgcacgtcgctgagcgacctgcagcggccgcggaggagcgaggagccagcgtcgtcgagctcggctttgggatggctgccccggcgcggccgcagagcgcctccaggcggcggggaggccaggccgcggaggccgcagcgctggaacacactgtctcgcactaggtgctcgcggaagagcgcggcgtcgatgctgcggctcaggttgatgggcgatggcggccgcagatccagctcgctcagcgatggcgccggtcccacaccgttgcgggacagtcccgggccaccctggggtccgcgacccaacgacgcagccgagccccaggcgcctg

SEQ ID NO: 345802 - DNA, 1000 bp, Homo Sapiens
tttttttttttttttcgaaagtgctatttattttattacccattatgaatcagccatctcctgatttatcttttacagttttctatgttttgaattgatatcaattcttagaataaaatgcagtacctgcatctaaaatagaatttatttttcttgagacacgtctttcaggcagaggaaaggtaatgggcacacaaaccttgatcatcttcttataaaacaaggcagcatccacatttcaatactgtagcatatgaaataatttctcaattcctactctgtcatagcttaaatgacttactgattaaaatatgagtaacaataattctggagctgaaagacattctcaagccaaaaggtaacattaaacaatgttttactttaaatttaatgtcatgtagggtcactaaaaacaaaatgtaagggataaatgtaagtgcataaaacagagataataccaatttccacaaatacaacttttattatccaaaatcatcttggaaggactttttctaatatgcccattttctaaataagattaaccatttgatgggaatatttccaattgtatcacctccttccttgactttttcttcatcaacttagggcctgggttgtaggcactgtggctctttgggatagttaaatgggtgcaatttggctgagaccgcccctgtcttaaatggcccaggctacagggcttgccaaatggctttggtttgcaacctcttcctttgatatccattgaagaacacatgtcctaccctcttgattgcaagcttctatctgctattggctatcaggagcataacagataagttctaaggtccttccagttccaaaagccattgaccaaccctgtgaggcactatgagagattggagattactgaggaatctcttccaataacatatgatatataaaggtaattgtgattctatgaagagtgaataaaaattgaaaacaaaaccaatcttgtttaaactattaaatgaagttt

SEQ ID NO: 345803 - DNA, 1000 bp, Homo Sapiens
aacatttagaaattttatttctaaatttgccaatctagattttatgaaattcattttaaaaagagtgaaaatatgaattaaatacatttccctttcttcttgagtttcctaatgcatgattgatagttaaagcaaaaattgtaaggctatctcatatacttgttataaatatatgtaggaaaagacatttaagacaattatattattaatagggagggataatgggtaagatttctacacttcacttgaactgttaaaatgtcaacatcagtagcctgtgttataaatataaaatgtgatatttgagcaataactaaaaagttcatacaaagagatataatcaaaaactctataaattaatcaaaaggagatctaaaaaatgttaaagggaagagaaaaaacaagacaagaaagacaagagcaaaaaagaaacagaaaataaggagaagacaaaaaataaaataacagacatcagattaaactatgaataattacattaaatgtaaatggtttaaaaacactaattaaaggcagggattggcagattggattaaataaatgacccatggataaaggggccaccaagctagcctggatatttgagaactgggacagcagctgctaaagctacatcagtgggtaagctataatgatagaggtaaattggaaattaaggaatagcaataatatgccatgcagacattaattttaaaagtaagcagatgtggctatattaatatcaaataaagtaaatcttgggccaggcatgatacctcacacctgtaatcccagcgactcaggaggatgaggcagaagaatcacttgaacctgggaggcagaggttgcagcgaactgagatcacacccctgcactccagcctgggcaacagagcgagactccatggtgatgagatctgcatgcaggcattctgactccacggttcttgtcttgaccatcgtactaaagtccttcaccaggtagcaggtatcctccaggtgct

SEQ ID NO: 345804 - DNA, 1000 bp, Homo Sapiens
gctataactgctttttccattttattcaaggtgttaactaaaatacagagagctttcaacctactttttcagtcattaaactaaaatgccaaccaagtccagttcacttctaaaatgtattggtacaatccagtaaagaggagatgacaggaaaagaaaagtcaacaacactaagtatagtaatgttcctttttgtttcatgaaacccaaattgttacaaacatcaattttagaaatattttatgtagacattaaaacaaaaaggcaacaagaaatgcaaaataaacacacacacacacacacacacaccaataggtttcacctgagaatttgaagtaattcagagacagatttaatattctttgaccaatagagataccgagaaactgtgcacactaaaatgaaaataagcaataaaagcaaatagtactcaaaatttaaatgacattggttaacaatggagtacgaaaaggttattgaatgtgctaagtctaatgctttaacactcttcaatcattcaccttttaatgcagacctttaattatattcataatcttatcttggtgaactctacacccacacctatgaattctgtcaatttcttagttaaacaaaactctcctagaaacctaggaccagggtcagagatagaattaaaatcacccactctcaggagaaatggaggaagcatttacactgaaagtctgctgaatcccagattctgtaatataaaccacttaataatctatactgacatttcaaagcttaggaaagggaatgttgtacaaccctggacttcattgtgtttattccctatgaggcacagagcaagataataaacaagcccctcaagctaaaagaggaacacagaaacatatatgtgtgtatatatatatatactacacacacacatatgtatgtgtgtgtatatatatacatatatatgtatatatgtatatcacagaaacatatatatttcccaaatttttcttaaaaagca

SEQ ID NO: 345805 - DNA, 1000 bp, Homo Sapiens
tttttttttttttttcatgtttgaaaccttttattaaacaggcaatgcattgtgcagtggttaaagacacagatgcctagtggaaaagtttaaaaattatttttggaaacagtctatgaattgatgaaccctgccgtgttccttcatctccttctcagagtggctgtctttaggaaaacagattgttttatagctgctcttggaaacggcatccctgttttgccatgaatgtcatgcctcgtagtaaacatgaaagaagacaggatccacaggcaagagagcgaccagagacatgggctgatctcagctggaagcacagatgtcccttctcctagaagggcttctcttctggcctttgctgggtgtcctatttatgtgtccaatttcatttctattttcttccttgtctgaggcttctttatcaagggaattcgaaaagacacattcgtacctttgggcacaggaactggttcctggactttttcaatgttgttcttgtttctgggccctctggcccaggagtatggctgtgtgtttatcctctttgttttgcctggttccttcctcttccccaagttcgtcataacttgatgataaaatcaatctttaagtttcacagtttgtttgccacaatacactggcagtttttaactaagtggcttgtcagggtagtggacatgctttatcagcacactgcccacctattttataatctggggcatgtcactccaagcttgagatttctttctggcaagttccatccaggatggctgatctgtactggcataactggctctcttcagctgatgcagttccttctccatcatcactgcagactgagccaagttctgatgggacaatgagattcctctttgcagcccctccttgaagttgagctttgccccctgcttccggtccacagcgggcttcacaggggttatcaggaaagacttgctgcgaacaaagtcagcttgcttcacaggctcctggcctctctcgg

SEQ ID NO: 345806 - DNA, 1000 bp, Homo Sapiens
ggtttgtaactccgctttttattttctacaggatttaaaagacaaatgcataaaatgtaattataaatctgttaggtggtgtacaatgaataaagatacaatttgttacatcaataacctaaaaagagtagacctatatagcagtagaattttggtatgtgattgaagttaagttgaaataaattcaaatcagaatgttataactccaggatgttatatgtaattttcatagtaaccaaaaacgaaatctacatagaatatacacaaaaggaaatgagaatagaaacaaaacttgtcactacaaaaaaaatcaactaaagataaaagaagtaaataattgagaaaatgactggcaaaaatcagtaactgacgtattaaaactttccatgctacataaatctggaaactctatttcacatgaaactggagctgaaagagacaaatatttacttataaagttaaaagttatatggaaaaccaacactaattttttttagaaaaaattatggaaaataaaaatatgccttatagtatcatataatatcatgttttatagctcttggaaaatagaaaataaaatgttctgttagcatgaatccttctgtgccctcaaaaaccctatggattataccattattacctaaaaagtctattctcaaatgcagcacaatgataatttttataaggtagatgttatttttaaatatggaataatattggtgatttcagtttcagttttaataacattggattaagatgaaagaatgagaagataaaggtccctcagcaatataactcacaaacatgttcagaagcagtaagaagttacattaattatcttttgaaagtcaataatctacatttttaatgtatgcatatggcatagctaatgtactattgctgggtccatttattcaatgaataattgctgctatgcgtcagacatttttctaggcctaggaatggatacataagtgaacaaagcaaagattctggttct

SEQ ID NO: 345807 - DNA, 1000 bp, Homo Sapiens
cccagtgccgccgcctttattcacagaccctcgagctccacagccacacagacacttagctttcagagggcacaggaaggaaaagggacctggtgaccctcccagcacaccccagagccaagacagacccagcagcagcacctcagggtcagcctgggtgcccctgcccaggggccactgtgaccgcagacaccaggaggccaggcctggttgctggggacccccttggggggcccggcagtatcctaggcccaaagagctggtgccatcttgaagctgattcagggaagaggccaggctggacggtaggggtaggtgtgagaagctccccagcgtgtccaggccacgggagcagcaagggtctgcggggagcccaggctggatggggtggggctgcccttgtcctgtatcctgaccacttcaaggacaaaaccagcccagtcccagcagcctgggaggcagcagaggctccttcttctcccctcctgatccctgatcttccggaggccggggaggggcaccgggcgctctaggacttcttggcatcctgcgtgctccggcgcttcaggtcactcaggtcgatgggcttgaaggtcttcaggctggggttagggaccttctccacatactcctccaccaggccccgctcgccacccggcacctggcctcgcaggtctcgctccacaccctgccaggcttcgtaaatgaagcggacgttctcctcgtgggctggggtgaagatctcgctgctgctgggtggggagcgggggctgctggtcctcttgccgttgtacacgactctggagacgggggagctggtcatcgcgggggcgtctgatcctagcgctccaccgccagatcccctcagcctctgaaacagaagccagcgcaggcatgggacgcagggccaccctctccagcacagaaggagggggaggcgcagggcacacctgcctcctcccttcagatgtgaacaaagtgcatggtccctctgcctacc

SEQ ID NO: 345808 - DNA, 1000 bp, Homo Sapiens
ttttttttttttttttttaaacagtgtttttaattgaaaataaagctaaagcatgcttttcaacagtgcaaatttccataattttgatttactgcttccatcatcacaacacagtacaccagcatggcccttacccagggctagaccctagcatttgcatgttgaactactttgattttaagtgcaaatatagatagtcacctctgattgtcacttgcagtagaaactctcctgctctatacacaggatggtctgaaaacacaagttttagagagatgcagaaaaagtataaggtcataaaatccaagtgcctgagttctggtaccaaaaagccctgaaaaaactgttatttttcatttggggtattgcaactctgacccctcattttctttttcttggttgtatttactgatttgtcactatcaagagttcggccatgaaatattctgctattacgagaaatatttcagcccgggcatggtggatcacacctttaatcccagcactttgggaggccgagacaggcggatcacctgaggtcaggagttcgggaccagcctggtcaacatggtgaaaccccgtctctactaaaaatacaaaaattagccggacatggtggcacgcgcccgtaatcccagctactcaggaggctgaggcagcagaatcgtttgaacccaggaggtggaggttgcagtgagccaagattgtgccactgcactccagcctgggcgacacagcgagactctctccaaaaaaaaaaaaaaaaaaaagaaatatttcaattgttttgggagtttgaagagtcatgttcagaccacaagataagcaggacaatagtaagagtcaccttatttaaaacctttgggtgagaacacaaaacagacttttcctgttgcaaaggagtggctttaaaagtaaaatcacaccctttacaaaaaaaatacaattccgtatttattttactcagtatgtatgaggcagcttttactagcatttaatc

SEQ ID NO: 345809 - DNA, 804 bp, Homo Sapiens
tgagtttatttatttatttattacttgtttgtttggatgctctttccagcagactcatgtcaggaggctaggaagggattccttggggaccactggatgctggtagttaaatgccaggaggctgaatggacctgaagatggaggagactctgcagtcttggtcagccacccttgggtgcttgccaccctgcactctagcaggattgatggtctctggatttgtagctgtgaccggtcatggtggaatgctcggtggtttgcactggagaggcccacatggtggcgactgaggccctgtggggtgaggttggctcatgatagctctgaaagttgatggcacaattgagacaaggacgtggagttctggaactttcccagggtccttgcagcccgagatgaagccctccaacattgcagctcactgctgtgaaggctgaaaggggagacaggaggctgctgggtacctcaggtgccaggcatgaggttctccgctgtctggagtcttgctttgggagtgctacacctgtgggagtgccccaggcaccacccaaaggcggggctctggctcaagcttgcatggtttacagagcctcacatgatgtcctttcaggtttgttgagttggggctagggactcggtggcagcagagcctggttctcctgcctgaccaggccttggcaggacgcctcttcccttctgtggagaagatggagaagcagagaagcaggatacagagcaggctggaaaggactagaagcctcatggtgagaaggcagattttcacgtcctgggaagggagctgtg

SEQ ID NO: 345810 - DNA, 1000 bp, Homo Sapiens
cacaccaaatcgctacttcatttattcaacaagtatttactgagtgccttctgtgtgccacgctactgttaagacagtccaactccaactgcgggcaggtatgttttccatactctccccatccaggtactaaccaggcctgaccctgcttagcttacgagattaggcacgttcagggtggtatggccgtagactattttggatacccttatctttaattttctcagcaacccttcaaaacaggtatcacaagcctcattttgcagataaggagactgaggcttttagaggctaaaattgacccaggtcacccggctgacagatggcaggcctagggttctgattcagtccattggattccaaggcctgtgcttgttccacccggccacactgcctgtcatcaaaacacatgtctttcttgcaggctggtctattgcatttccgtcccgccatctgtcaaaaatgggcctggaacggagaggcctctgcctattctgccctccttgtttcgagaccttaggtaaagccagcatctccctaccagctcctccctcctcctgtgtgccctcctttttccaggcccccagccctgtgcctgggctcctggcagctgtgtttcatgaagaccctccacctttgaagagcagtcttttctgttggttggagaagagaaagacacccaaaaggaaggctcccagccaggcctttaaacaaaggagccaggaagaggtagaaccagcttcccatgatgccaagctctgtggaggggtgtcttattgcgcctccctcccactccatggctgcttccatcctacagcaggaggggtggcaaccatccggactgatagccgggggttaccaccataactaccacttccttatcttgaagaagagctctccttttttgaaaagagctcaatgttacctgcctacactaccatcttcctgcaatgaagaggtcctgtgccagtctctgctccctccaatgtctataactcct

SEQ ID NO: 345811 - DNA, 1000 bp, Homo Sapiens
ttttttttttttttttttttttttttttttttttttggagggcagtttcaatttattaatgaaccagagaaaacagcacaaaatgactgaaaagccaaaaaagatgggtaggggttcattctgcctgattctcccgtgcatatggaataaagcctccctgagctccatgccccttagataagggaaggctggtcctgcagagggagcacagtgcttctctgtttctatattgtggatggaaaactctctctccccacccccccatggaaagtttccctctgcaggatcatcaacctgaacatctaagacctcaaaaacacctctttttaaaaaaattattattattattattattttttagagacagagtcttgctctgttgcccaggctggagtacagtggcgtgatctcagctcactgcagcctccatctcccaggttcaaacaattctcctgcctcagcctcctgagtagctgggattacaggcgtgtaccaccacgcctggctaatttttgtaattttagtagagatagggtttcatcatgttggccaggctgatcttgaactccggacctcaggcaatctgcccacctcggcctcccaaagtgctgggattacaggtgtgagccaccatgcctggccaaaaagacgactcttgaaacacatttttccaatttgcagctatactttttcacacctttggatttcactttgtctgaagcagtgcatttagagagagattgcaaacccagtccattagattctattgttcttttctcctatgctgcttaatagtctacatccaggtttatcccctcacactcagaagacaaaatattaagactttaaattagagattccaaaagtatgaacatacatcatctcatctggtcctcacaacagccctgtgaggcaggcaggcaggcatcatggttccagaatgcagaggacagagtcctaactggttaagctggaaaccaaatccatgtcctctgtctcc

SEQ ID NO: 345812 - DNA, 1000 bp, Homo Sapiens
gagatggagtctcactctgtcacccaggctggagtgcagtggcaccatctcagctcactgcaagctctgcctcccgggttcacgccattctcctgcctcagcctcccgagtagctgggactacagtcgcctgccatcacgcctggctaatttttttgtattttttagtaaagacggggtttcaccgtgttagccaggatggtctcaatctcctgacctcgtgatccgcccgcctcagcctcccaaactgctgggatacctttttcattcttgaaagtaggagctacggaaaaaagcaaaacaaaacaaaacaaacaaaaaaccactaaaatgtctttaagagagccatctacttacgatctaacttacataatcaaaacactctattcagggtgaaaattgagtataataagaaaataatcacctgttttgtgagaggttccatatataatgctcctctacccaatacataccttaaaacataagcaaaatgtctcctatctcttctttttcttttaagatctgaagatcactgtgcaaaggactatcagggtcaacacatttaaatggccttgcctttcagtcttcctaattttctctaatattgcccagttttctttttcagttccttcatcctccaacttcttctcactagtaggctcttctttcatctcacagtgatctaagtcttctatatcttcatccatctcttcttcttcctcttcttttgaagtcacttcttctgttgtcccattctgacccatgggtagtggttgatctggcatctcaacattcgggtgcttaggaaggttatataatctgcagagtccacatatcagccacttccattgctgatgaagctgctgcatccagggtacaatgtgcctttccagaacacagcagcgacccgggatagagggatcgctcaaacagcaccagaggctgcattccaacttttcctccatcaacaagcccgttttcattgttagtttctccttaaa

SEQ ID NO: 345813 - DNA, 1000 bp, Homo Sapiens
cttaacagtttgttttttttaatgagacataattcacataccataaaattcatccctttaaagtatacaatttcagccgggtgcagtggctcacgcctgtaatcccagcactttgggaggccaaggcgggtggatcacgacttcaggagattgagaccatcctggccaacacggtgaaaccccgtctctagcagtatgaggcgtccacacctctgctccttcagtgtcttttctgggagtgagatcaagaagagagggtgtcccgtcccagcagatggtgaaaccccgtccagtatgtggcgtccacacctctgctccttcagtgtctttcctgggagtgagatcaagaagagaggggggggtcccgtctcagcaggaagcccaggctgcccacccagtctgaggggacggcactgactgggcaggatctggcaagaggggagtttagggtgcagatttgggtccaattcagcttgtgaccagaagagggatcatcaactgggatcccagatcacatggaatcctgtggttcccttgagaactgcctggacccccaggtcaaccatatgggctggaaaggaagtaagttctagcaaaaggaccttcatacaaggactaaagccgtgggaaccacacttcaattcatgactttcagcatatcttgaaagcacttagatagggaaggtttggaaaggcagaactgctactgccgctgctgctgcctcttctttccattttgtgtctcagctcaaagatagagcttctctttaccctctcagcccagataaatatcttgttttgcctttcttgcatttttttttgtttaaagaaatttggaggctgaattgggaggatcacttgaccccagaaggtcgaggctgcagtgagccatgattgcgccaccgcactccagcctgggcaacagagtgagaccctgtctcaaaaaaaaaaaaaaaaggccgggggggggagcataatagtggaaatgctctgtcttgcc

SEQ ID NO: 345814 - DNA, 1000 bp, Homo Sapiens
cacttaatgctgcttttcttccattttccttcaaaagctgggtccaccctcacggctgccgcctcttaccggccccaacggcttctgcccaggtgcgtggtcaccccggttaccccatgggagccccttggctggccagggctagtcatggtgctacttcttctttggaattttctcctttttgatcaattcagaaaattcttcgtagttgatcctcccgtccccgtgtgtgtctgccgcctggatcatggcctcggcctcctcgtctgtcagcggggtggtgggcccgctgctagggatgatggacaggatgtacctggggccaagggggctcgagtcagggccaaggggcttccggccagtgcccagtgactcacgagccgttcgccccccaccttgtaggcaagggcacttcgggccgggagcctgggcctctgggcctcctgggcttctagctggttctggcccagccctgccagctgcaaggccagcggggacccggtgggggaaggccgggtccgccatgtgggcattcggcgtggtctgggtggcctgggccccacccctccctggccgccagccattacttgatctcattccactcaatgaagccactcttgtccttgtccagggactggaaggccgtgtggatggcgtcgtccagctggcccgaggcgtggagcttgcggatgtgcttgaagaacttgaggtagttgaaggacccgtggtgtctcatgtccgtgggcagcagctcaatgtccttgtctgatagggacgtgcccatggccaaggccatcttcttcatctgggaggagaagtcctcctccatcctggtcctcggtggatagggagtcaattcgtggggtgcacgcacggattgggggtgctgcttgggccagagcagacgtagacgccgcgtggtgctggatcctgctctgcctggcttctttcgagagttctggaaggtgggtcaggctggggtgtggagaggcccaggggc

SEQ ID NO: 345815 - DNA, 1000 bp, Homo Sapiens
gagaataatgatgtatgctttgtttctgttgagtgtgggtttagtaatttgcaatgatgtggggactacatgagaccagcccacttaatgtatttctgtgcgaggcagatctagaggtctagctcaaagggaaatttttctgtcaccactttcaaagcttttgtttggaaaaaaaaaaaaaaggaaaagatggggaaagtaaaaataaaaataaaaatatcggccaggtacggtgacacacgcctgtaatcccagcactttgggaggccatcacggaaggattgcttgaccccaggagtttgagaccagcctcggcaacagagtgagacctcatctctataaaaataataataataattttgagccaggcacagtggctcacacctgtaatcctcacaatttgggaagcccaagtaggaggatccattgaggcaaggagtttgagactggcctgggcaacatagtgagactccctctctttaaatgctacaaaaaattggccaggcatggtggtgcgcatgtgtagtcccagctactcaggaggctgagatgggaggatcacctgagcccagaagtttgaggccgcaggaaaaggagcccagtcccagctctttgtggttcacaggcgccaggatatttcatcccaggttcaacaccagccccagggtcctcagggctagtatcacttcccaagagtcatgatcaggaacttagtgaagatcctttcaaccccaggagtgggagacctcccaccaccaagctctgagcatcctcccagctcaccatctactagggcaagcccaagtcctcactctagaaacagcctgacttgcacccctgggaacttgctgcatccagggtgccaatcctgtttgaggcacatctgtgtgtccactcacgaagaggcaaggccgtccacgaaagggcaggagattctcatctcaaagagacactcagatatggacccccagcctcagccctgggcttcaacaggaacatt

SEQ ID NO: 345816 - DNA, 1000 bp, Homo Sapiens
gagacagagtcttgctctgttgcccaggctggagtgcagtggcacaatcttgctcattgcaacctccacctcctgcattcaagcgactctcctgcctcaacctcccgagtagctgggaccacaggcatgcgccaccatgcccggccaatttttatattttttagtagagatcgggtttcgctatgttggccaggctggtctcgaactcctggcctcaggtgatccacctgcctcaaaaaagaaaaaagtggggggggggggaagactatcaacttcagaagtagatgaaatatatatttagtaatctaagtatctacataaagatactatgtttgactcattggcaggtatgagttcatggcccagcgttctttattaaaataacagctttcatagtacacgctgtggttacgtcatttttctttcagaggattattaccttttaaaagcttcttaaatcccaagttaaagctgttacattctaacccagtctcagagctgattggctcaaaacctctgtgggccagtaatgccacattaccccggaggggcgggcagcgcgggggtcagggagctgccaaagccagccctcctactggccagcacgcacattccaggggataaataggattaagtgctctaaagaggattcccagccctcctgcaaaggaggttcaaacactctggtctagttctgaacaaaaataagccccagagaaggagaaagtgcctgtttaaacaccaggtggccctaccccaagcctctgctcttcctcttacccccatctccgggtggctggggagagcccttttccgcaggcaagtgtgcgcactggatccaagtccgtgagagtaggttcaacccaccctctttggtttcctaaatagggtcagcccctgagcggcagtgggaggtcatgacctcaaatctcttctagctgctcttggggacgaatggataaactctgctaggaagggctgtagcgcgtcttagagaaag

SEQ ID NO: 345817 - DNA, 1000 bp, Homo Sapiens
ctttttttttttgtttttgagacggagtctcgctctgttgtccaggctggagtgcagtggcacaatctcagctcaccacaagctccacctcccgggttcacaccattcttctgcctcagcctcctgagtagctgggaccacaggcgcccgctaccacacccacctaattttttctcttttttagtagagacaggatttcactgtgctagccaggatggtctcaattctctgacctcgtgatccgcctgcctcggcctcccaaagtgctgagattacagaagtgagccaccacgcccggccgggatgattttttttttttttttaagaagtaccttggctacttcctgggccttttctgttcttgtaggaaaggctttaacccacccaataaaggtgtccacaaacaccagaaggcatttatagcctctacaggctggcaattgagtgaaatacatccatcagtctttccctgggtaagcttcccaatgctgaactggctcaactaagcaggacagggagctgcattggctctggccggttgtcctgggtcacaaggaggcaaggctacgcgtttgaggccaacctgggcaacattgaacaaaaaaaaaaatttggctgggcacggtggctcatgcctgtaatcccagcactttgggaggccgaggcaggcggatcacctgaggttgggagttcaagaccagtctgaccagcatggagaaaccccatctctactaaaaataccaaaaaaaaaaaaaaattttttttggtctttttttggtggcacctgcctgtaatcccagctactcaggaggctgaggcaggagaatcgcttgaacttgggagggagagattgcgatgagctgagatcacgccgttgcactccagcctgggtactaagagtgaaactttgactcaaaaaaaaaaaaaaaaaaaaaaaaaagcagggcagcgtagggccctgggggctattacaggcacaggatgcacaggtgttaaagac

SEQ ID NO: 345818 - DNA, 1000 bp, Homo Sapiens
aaaggaaactacatctattttaagttgcaaatactagtctttttttttctccattgaaaagaccattaatttcttggaggtgaggtctcaggtaaggatggggcctagtaggcttaaggccacaggaagcaaatgacccccagtctacccttttgtctctgccatgcaggcccatcacactgggttggggaggtcctcaggaggctgtcacacatggccttaggtaatggcaagtccttcctattcagctctctgtccagcctccaattgaggaggcataacaagggaaaggtgagatggagggggtgggggtgggggcggggagcggccaccaaatccagcaaaaatgagcagctccaccttatctgctccaaagctatcactgtctccacaggtgtaaaggctcctcctcacatcgacttttgtaaatgagtgagcgacaggccttggccaagctgagacttggacgaaaacctgaacgagtgccactggaaagccatcatcctaggtttgtccttccaatgctgagaaccatgggcattcctctcctgagtcagctgtgtgaccccaggccaggccctcacacctggctgaccagagcacagcccaggagctggcagtgagcacacattgactctcattaggatcccgtctgtcagcatctgcaaacatgatgctgagttgacccaaagcttttctttttccgaggaggaggctgacactcacaggccacaccctgatccccagtcccctgtagtctcctgtttgctgagatggcccccaggaagccttgaatagaggcctcagggggaaaatgtcctcagcgtccgtctagcggccagtttgtgtgcagacatcataagtttctctaggtcatcctaccccatgtccgcatccccctcacctcagcatccactctcataacacatgaagtagcaccaccatgcagcgctgcctttgtcggcgtcctatggccccaactacagcctcagccccacca

SEQ ID NO: 345819 - DNA, 1000 bp, Homo Sapiens
caacaattgcaaattttattttggtttgtgtctgtttatgctgtttatttttagtctacagatgccgacggcgccttggtagagaagccagacacagtgaacgaaatagcaatggcggttattaataaaaaaaaaattaatagagtcgggcgcagtggctcacgcctgtaatcccagcactttgggaggccgaggcggacggatcgcaagttgaggagatcgagaccatcctggctaacacggtgaaaccccgtctctactaaaattacaaaaaattagccaggcgtggtggtgggcgcctgtagtcccagctactcgggaggctgaggcaggagaatggcgtgaacccgggaggcggagcttgcagtgagccgagatcgcgccaccgcactccagcctgggcgacagagcgagactccatctcaaaaaaaaaaaattaatagagacaaaaaaagggggacatatgtgggaaagagagtttctggaatgccagatgagttggtcccccctgcgtgagacatccatgggaagccatgggcggcctctgaggagaaaagtctcctttttgccttcatgtctttacgcatgccacaggtgctggcggagataacactcccttgaagcagtggagtacaatcaaacatcttggctgctcctgaaacccgctcccacgcatttcagtccggataaggtaaagatcttaaatagtttagacacacgcctttgctagaggaaattcacagaaaccgccacggctacacatcttattaaatgagtcacgagttctccttcattgattaatccttttcctcatcccttctcacccctcccatttgccctaagaacgaagagctggtaaaccaataaattgggtggaggccgagagctcggggccgcgagcaagcctccgacgccctggtcccctggacccgccggttaaactgtgattctctttctaaatcctttgtctgcgccggactcggggtacccgccgggtggt

SEQ ID NO: 345820 - DNA, 1000 bp, Homo Sapiens
attctccaaatcagtttacatattttatcgaaaccacctccttgaaatacatataaacataaaatagacaatgctacatctattatatacataacatcatctttcgtcaatagaaaaactttagtatttaatatttttaagaatgcaagtctatcagttttcttattctctattcaaataaataatctcacacattagcattgttttctctgaaataaatatcttcagagttttggggtacatctgatatctgaatcacaaattgttgtccatcttttagggttatgagggcttcttgtcccataggaaggctgagtttaactgcgctttcagtggtttcatcttccaacagcacctggatgagcttattgcccatggcagtgtccaccaggaagcccaggatcctgaggaccatgttgctcacacccacgggatatcggccctggcccatgtgtgtgggcatcacccccagtggctccatgctggggctggcacacgcctgcgacagtgaggaattcagagaatggaaaagtgcctggtctggctggccgagagtcgggtcatctggtagcatttccttgacagtccccatgtcctcctcctcctcttcctcctctaggcatgactgaagtatatgaatcatatattccaaaagcaacaagtgaaacagatgccaggagccaaaactatctctgtggcagagggtcatgggagtcccttgggagatggagacagggatggggccagaggccaaactgtgaatgactgcacagcagtggaggagagtgggccatctgggcagtggaggccagggaaggttggtaattgattaactgctgctttagaatgatcactgggggtggagggagtgtggctggggaggggggtggaagaaggatgaccaactaggaaaccgctgaagtagcctacagaatgaagagacagaggcttgaattcgggcagatgttaaaggagcacaggaaaactggagggaggctct

SEQ ID NO: 345821 - DNA, 1000 bp, Homo Sapiens
ggaaacatgatttattagggaatcgttgggttacgctgcaaaggtcgtcttggcttgctttaatggatttcctgggttgcctttctgcccaggcccagcacgtgagcgcggcagaggggagcatgaagtcacaagacgacggacgtctgagctcctgggactcctggagaccagatgtggtggcaccacgctgcatctcgctggctcagcaagggctcagctggctgtcctcggctgcaccgggtttctgtcctctctctgtcatgttcctgatgctcaaagctaatgacgttgtcccaaaatacagagggaggcagaaggcggatcaccaaaccagtgctgcaggtcacttcctgcttggaaattatagggaagccctggggtggttgaaccaacaaagggatcaccgcagtggtttccaatctggggattcttgaggggtggtaacggggccacagggtctccaggggggtccctgaaaacctaggtggacagcatcatcttcacttcttccccagcagcatccagccagacactcgcacagcagtcactaaatgcatattgaataaataaataaatagacagatctgtgggtaaatcaatccaggaatacatggatgaatgtgctaacccatcagaaaaccccataaacgaatttaaagggtggaactcaatgtgctgaggctgcctttcttacgtctcaatggctccccaattttcctcgaaataaaacccactagtttctataattgtacaacataagtcacatgagatgttaacatcaagggaagcccggggaagagtctacgggaactctgtgtaattttcatttcaaacaaaaagctaaactacgttaaaataaatctatacactttgacacttcctggggagccgtcagttccttgtccttgtccttgtttgtccttccgtgaagggacagtcacttccaggagaggacagaattggacaggtagcggctttggcctttcccttaagcccc

SEQ ID NO: 345822 - DNA, 1000 bp, Homo Sapiens
gccttcaagggaaactttatttctgttccagtgttgtaaaagataccaccatatatttttcttgagtattaagaaaaaaataacatcatcatgccatattattatatgtaacaaagcaatatttttaagtctattttaacattttctttctcgatgacagatggaatagtgtgttgaccagctgtaggatttgctttaaagaaagtgattgttgtcttgacgtggttgctcacgcctgtaatcccagcactttgggaggccgaggtgggtggatcacctgaggtcaggagtttgagaccaccctggccaatttggcaaaaccccatctctactaaaaatacaaaaaaattagctgggcgtggtggcgggtacctgtaatcccagctactcgggaggctgaggcaggaaaatcacttgaaccttggaggcagaggttgcagtgaaccgagattgagccattgtactgcagcctgggcaacaagagcaaaactccaccacaaaaaagaaaagaaaaagaaaaagaaacagagaggggaggggaggagaggagaagagaggagaggagagaagagaagaaaagaggaaagaagaaaagcagagaaaagagtgattgttataggtccatgactcctaatgaatcagagttctccaggtatttggatcggtgaaggatctcttgctttacttgatattctggaagttctaagcttgaccataaccaacagaaggattccacaggtgactgtcatgcacatggcagcatagattacttctccattgaagggggaatgaaatccagttaaagtgattttgtttgcatgttttcttgtatacaatgccatgcctttgacattagacagggttggataattgaaacatgattttctatgaagcatgtgctggaaaatcttacacaaagattcctcactttgtgtaatggtcctacaggtacattgcacttgaaggaccgtcccaaggatatctatgtaagcagctttgc

SEQ ID NO: 345823 - DNA, 1000 bp, Homo Sapiens
ttttttttttttttttttttgaattaagtgtccatttattagtcttctctaataaatatagtgtatattttctgatccttttcatcaccgggcaatatgctttctggaggcatgaagtgaggaagccatctgagaagccgatgttggtccacagggcctcgaacagcaagtacatgccttgatttctgcatactcagtgcctgtcatactcaactaatattccttaaatgaatgaatgaatgaagagtatttctagctttccaggctattcaagggctagaaagtttgaaaagaatgagcaaattccccatatcccacccttacttttaccccataacacaaatgccgttgatccaggatatgcactcaagctgaaattcatgcccacagccccgctcgttagtgaattcatgctgttgaatgctctaacgcctacttttgctggacactctgctggaccttggagttagcccagaaggaggactgcaacccttaattagccttcagggaggcagggcttcaagtttaggaagaggtcaccagagggcaaagggcagtggaatacaacctggggacagagggtaggtctgggagagctggagctggggagggcccaggaaggcaccaagaggagatgtttgagtggagtcttggaggacaaatggggagggctggtgaggactcagggaagtgctcatgctctcacctggctgggcgagagactgcatggaggaaggactgagatgctgggatagcacagtgaatggaactatgaatgattttgttctattaacaagctttttttttagatagagtcttgctctgtcgcccaggctggagtgccatggtacgatctcagctcactgcaacctctgcctcccagttcaactgattctcgtgcctcagcctctcgagcagctgggactacaggtgtgtgccaccacaccaggataatttatgtatttttagtagtgatggggtctcactacattgcccaggc

SEQ ID NO: 345824 - DNA, 1000 bp, Homo Sapiens
caaatctcagggcttttatttataatttgaacaagctgtataatccttctgactctcaatcccccagtgtgtggaagatggatagtagtgtctgccttggagtgttcttgtgaagacttctcagtgagtgatctatggaacacgtccatgccccagcattacaatgtggggtgaagggttgcctgcttagaccacctgtttccttttcttgccagcgagattcagacatcgcgccgggctcccttcctcctctttactgcatattgatttttcctttcctccctttgttctatttgtggctcctctggccccacacaattgcattatttcttcagaggcacactgtatgaggaggtctgttcatgcccagcagcatcttgggacttcctccatgcccagccggcctgggctgctgtccttctggtctgtgaccttgttgcatttccttctataaaatggcactgtgtggagccttttccattcctttcagattctttgcttttactggaaggaagctgctgcctgtcaggtgagtgtcgtgatgtccaccagggtaacgcagaccgagagacatgtcagcaatatgcttgcaatgacccaggcatttataaattctttaggcaatagccataaatgggtgaagtttcaattttcatttgtttcatttgtttgtttgtttgttttgagatggagtctcacactgttgcccaggctggagtgcggtggcatgatcttggctcactgcaacctccgcctcccaggttcaagcgattctccttcctcagcctccctagtagctgagattacaggcgcccaccaccacgcccagctaattttttgtatttttagtaaagatggggtttcaccatgttggccagactggtcttgaactcctgaccttgtgattcgcccaccttggcctccaaaagtgctgggattacaggcgtgagccaccacgcccggcctcaattttcatttgtaaaccacaatgacatgttaa

SEQ ID NO: 345825 - DNA, 1000 bp, Homo Sapiens
gaatctagacctttctttcaaatggaaaaacgttatgcaaccaagctctgtggggggcggatggggcagggctgaccaggtggacacgggaggggaaggcggtgggtgggggaggatggctggaggtcactgcttgggtctggccgacaccttctggaggaaggagagctggctggtggcgaattcccggatgctgggctcagggtcacttctgagatgttcaaaagtgcggaacagcaggttggtgtccacagcattcagcatctggaacacggcctgggggtggtagcagatggtgtggcctatgaagagtgtcacccaggtcttgatgtggcaggagtggctgtgcaggtagctgagggcctgtgacaagtggatgctgaattcctcctggctgcgggtcatcaggcaggtccagaggaagtggcgggcgctgaggcccctctcccaggccagcgtgcagaagagggtgtgcagtagccgccagcggagcagcacagcacagcggtagaaggtgaacttggcctgcgtggcgacagctgggcattggtccttcaggtgtaggagcaggggcaccatgctctggtgcacctgggtccgcaggccgctcagctccctgtctgccatggccgccaccaggtccccgaacagtgccatggctgccgcccgaatcccgtcccgctcgtcattaaagaaggagcgtgtgctgatggcaacgccgaggctctgactccctgtgccctgcgcgcccaggcggtgcagcgtgtctgacacggtgcccatgatgcacacgatcacctggtcgctgctctggaagaagctgtcgagcaagggccgcagctgtccctggagcaggcttcccttatctgggtggaagaggatgttgcttaggccctgcagactcaacacgcggacctcagggctggggtcgtggaggccttgtgccagcacggtcaaggcagcttgtttgggaagcacctccagcaggacagggctgtag

SEQ ID NO: 345826 - DNA, 1000 bp, Homo Sapiens
atactttaagtactatttatttatatttttacatacaatatgtgggcataacaaaaaattaaaggaagaatggtcatttttagaaaaaactttatttacaaaaccacaactcagtctgctttggtattgacaaaatccctacaactgagatattaaagagatacatttattttagagttacataaaaccagaatccaacactaccctactttcctattcctttgtagctctgaatgcagctttaaaaaaacaaaacaaagcaaagcaaagcaaaacaaaacagctctttataatgtacaatggcttaagcaaatcgctttagtttttttttctatttaagatttaggacagaccactcgtctaaaattcactatttacagagaaggtcctagggaacaggataacttatttaggtttagctctcataatacaatatccataatggctttagaagaatgtaaataaataacattggtaaacagcgtatactgatattttctgacaaactcatttatctaacatcatgctgagcaatcaagaggattcctctatatattttaaattttaatttattctatttcctgattcacaaactcttgctccatgttaaagcagttatcaccaatagaacctatgagaaccagtgcccatggaaacctaacagcttgtttttttaatcccctattaaaactcggttgaacttgatatatgcatggttgaaatatgcgtgggtactaggcctttattcaggaatgtaaaattaatggtatctggtatcaagttgtaagaaaaactcccccagattgggaggtaactgagtgatatgtgaaagaatcttcccgtctgaatttaagaatacacctacactgggcagaaaaaggtgggggagaggaagtagaagtagaggaaaagcacaactccactggcttcaatcaaactgaggtaactaattagagacagaaaataaataaatcaacaaatgccccatttttgttttcca

SEQ ID NO: 345827 - DNA, 1000 bp, Homo Sapiens
gtatattttacaactttattgatatataattgatgtacaacaaactgcacgttttaagtgacaatttgattagtaaacatccttgaaaccagagccacaatcaagataatgcacatatctattacctcaaaaagttttctcatgctccttcctcatgccccattctccctcattcttcgtttccctgacagtagatgaggttaagcacctttccatgtttattggacattgggatttcttcttttgtgatgagctcatacaagtctcaacaaagctgaacagtgtaatgaagtaatcagatgggaaagttagaaagatgtgaggttgtggggattgaagttaagatttcagtggtgcagcagttctgggccatcgcaagatccacttggggccctgagagtgggtgactggagcagaaagggagggcaacagaggtgagtaggccgaagaaacaagaagtgtgggaagtgggatagatctttcacatgaatgttgaagtgatttggatttgggcaagactagggggtgggcaaaaggatagaatggagggaagtgcctgagaggtacagcggtcatggtctggaaggtgcagtggggagcaaagaaggggcccactccacctccagatgcagaagtatttgggggagggaaagaatctctgaggagaggcctacaggcgaagtggggttctcaggagacagccaggtctcagttaaagaaggtgtttaggggagctttctatttctgttgttggggtatttagcagtccctgtgctatggtttggatgtggtttatttgtctccatcaaaactcatgttgaaatttgatccccaaatgttggaaggtgggtcctagtgggaggtgtctgggtcatggggatggatccttcatgaatggcttggtggcagtcttgcaggagtgagtgaattctcagtctcacaagactggattagttctctcaggaatggattagttcctgtgacagtgggttgttataaa

SEQ ID NO: 345828 - DNA, 1000 bp, Homo Sapiens
ggggtgttggggcatgtattattacaattcttttttatttttattttgagacagagtctcactctgtcacctaggctggagagcagtggtgcgatctcagctcactgccacctcagtcaagctcaagaagtcctcccacctcagcctcctgaatagctgggactacaggcatacaccagcatgcccagctgatatttgtattttatgtagcgacagagtttcaccatcttgcccaggccagtctcaaacgcttggcctcaagtgatctgcccgccttggcctcccaaagtgctaggattgcaggcgcaagccactgcacctggccacaattcttttgaacaattcttcttccttttgcttaagcaaaagaggaatcttttggttccaatgacaggtgtcagtagtcatcagaactaatcacaaatatcccacttctcttccatcctggcacatggtaggattcagcttctctgccctttcatggttaggtgtgcccatatgatttgactgttacttctgggcaggagctttaagatcacaggtgcaatttgccatagtccctttccctgccttggtgattgtggaggcatgtgttgagatgaaacttccatcatcctgggcccttagtgattacagtgagcagactacccgccctcctcctccaacctgcagtgaatgtgcagcattggcaaagaaactttagttgtgtaaaaagccactgcaaccttgggattgtttgttactgcagcataaccttgtattgagtatatgttcttattttctgtattcttcatgcgctaacatttgggtccttgatccaaagaggtcaccccattcagggctagcaaattcctagagagagagagagagagagagagagagagagacacacgggtcgggggcggggtggcaaacaattctcctgggagcgtgcctttgatgtacaaaccagctaatctggagcccacactcccaaccatcttcttctttttaaaaccaa

SEQ ID NO: 345829 - DNA, 1000 bp, Homo Sapiens
tgagagatcactcaactgttttatttcttaagcttggtaatacagtcatagattttcatcatggtattctttatatgtttttgtatgccttaaatgttgcacaataaaaacgttttaagtaatagaagaggaactcttcaagcagtgtacggtggtgtttttcttaaaggatgaattatcaaatgcttgctccccatggaagcctcttaaggaaaagttaaaactttgaatatgtcttatgggaagagactgacgtagcacaaatcattaaaaaaccttcacctaattgtcttcctggtcattttcatatggaccaaatgttcactctagggcccaaaaaacatttgtttcctgcatgtattcaatcttctggaacttgatatttcccacgaggtttggtaacagtgtcccaaagtcaaggtgacaaaagaactttgcattaataaagacaatttcgagctgtagtcaaatttggagggaataaactaccccttttccttatactgaaagtcttttaatatgcctgtgccttagttgaataaaatctcctacgtgggggggagaaaacaatgctctgcagtgtcatttgcatacaagactgccaaaatttttcagtcaaaatattcgtttaaaactttaaaaagaaatctattccatttccatcactttgggtatggactgggtataagaaggttaaggtcaaatacaggatttctgaggtcaatggcaaggatagccagagatctgaaaaacagtgatatatgaagaactaaagaaactggatgaggagtctcaaaaggagaaggcttggggtgaagatgggatgggcataacttcttcagagttagtactggacctggtcagagtagctaatcagtatatgattgttgaatgaatgaataaaccaattaatgaactaaacaaactcacaatagaaaagcagtagtacagaagtaggagaagagagtaattgatagcagaaatcaaggtttacttattt

SEQ ID NO: 345830 - DNA, 1000 bp, Homo Sapiens
agaagcctgcatatttaacctttatttctttattttaacacaagtactcactaactggtaaaattcctggaagtctgcgtatttaacttgtatttctttgtctactataatgttgccagtgatctcaatgatcctgatctaagagaaggttgtttccaaagtgaaggtataagtgagccatcctctgccatgtgtcaagcaaattagtccaaagttttgacttcttcttggtcctctttatctgactctgataccactttcctgttggtagtaatatcagtcagttccaatacacagaactccgccattgtgaacatgatgtagcatgaaaacaacttttgaaaattctcccaataaaaattcactgttgtagattctatgtgttgggttttgcaaccaagtataaacttgtatgtgagagaagtggttatgatattgtgaagtgtggtttggaggtacaggagccctcctaccccaaatatgttttgtttattctagagtcagactcctgagatttcatcattggtaattgatttctttggtttacccattattttatttattcagacttcttttaaaatgcaaatattctgggatggataataaatatattgctactaaaaccttactatgaacacattttccggttccttctttctaacagaaggggacctggattatactaagaagacctgttgaaggaggaatggtaagggggagtctgtgtatgtaggggagttattttacaattgtgtctaatagaatagtttttaaagtttataaattaatgtatagtatgcaaacatcactttctaaattggctaacactgaattacatgatatttttcaactaaactttttgttataaatattttctgaagtccaacatgtaagcagtatgctggcactttgggtgacccaattcctcatggagcttacagtatagttacagacaatacaaaaaatatgagaaaagttaaataatgaaagcaataataag

SEQ ID NO: 345831 - DNA, 1000 bp, Homo Sapiens
gacttgaatagatacttcttcataaaacataaacaaatgtccagcaaacatatgaaaagacattcaatatcactaatcatttgagaaattaaaatcaaaactatattaagagatcacctcacatccattaagatggctcctgtggaaaaaaaaaacccagaaaataacaaatactatagggatatgggtaaattgcaaccctagtgaaattttcatggcaatgtaaaataatgcaaccactacagacaacaatatggtggttccccccgccaaattaaacattaaattataacctggcacttttgcttctggatatatagccaaaataattaaagcaggttatctccaagagatttatacagccatattcatagcagcgttattcacaagtcaacaggttaaagcaaccctggtgtccatcgatgggtggactaaaaaaatgtggtatatacatacaatggaatattattcagctttaaaaaggaaggacattctgacacaagctacaacataaataaacattgaaggctttatgctatgcggaataagccagtcgcaaaaggacaagtactgtatgatttcacttacatgagttacttagaagacttaagctgatagaaacagaaagtagaatggtggtggctaagtgatgggggaaagaggaaatggggagtcattgtttgacagatacagagttttagctttgcaagatgaaaatagttctggagattgattgcaaaacaatgtaatgtacttactactgaaatttacacttaaaaatggttaagatgaaaaattttgttatgtgtattttaccataatttttaaaaagtagtttcccagaggactgccagacactgaaatcctaatggtgagaatctgtagaatcccaaaagttgaggagaaatcagacaggagataagtttcagtcatatgatgtgacttctgaaaaacccccaacagcacttggtaagagaaagaaccattaacagcagatatc

SEQ ID NO: 345832 - DNA, 1000 bp, Homo Sapiens
aacatctctggacaccttggatcctgccagcaagcctcgggaggcagtttaggagttattttctttacttctcaggggaggaatccgaggcttggagaggaggagggattgaccggcctggggtcacacagctagaaaggccaagattgctatgccgtttttttttttttttttttttttttacaaagaaagaacagcggagcaaggtggccattttattttctcaaagccacactacctgctgctacacaggacataaaagtgcaaaattccaccaggaagggaaacaaaacagtcttgagacagccatgtctcagaggtgaagattggaggagattttaatatagggtgtgaattccaattcacatctcttccaacgggacctctttccgaagtcccgggaactaacattcatcaacacctctgacatcccagaggatcgcaacattcctgccaagggttattactcccatttcccagatgaagagattgagtccctgcagcacgcaattagacagtagcagaaccagaatttgaactctgacccaccccgattctgggacctgtggagctccaggtaccgagagctggctctcgcctggggccttggagtctgggtagctggatgctgggagaggctgcggaggtaagggcccaggggctgaggttgcagcggctgcccgggaatgcggcccttgcacgcccactttttaacacagtgccatccctgacagacacccttgtccttttcctgtgctgcccttcgtaacaccataaataaagccttagagtaacgtgacctgagccaggcagtaaatgatggcactgtcagttgtacacgactgttgaaacaaacacagactgtaatcatcgtgctgtacggggagaaagacatttggcaaatgagattccattttcacattggtttgtgctgagcatataaatttcctgcgggccggccagcattggggatgtgtaattgattgcctgcattataata

SEQ ID NO: 345833 - DNA, 1000 bp, Homo Sapiens
gaattttaccaaaaccatatttgatttatttttcccactggtatacataatttactattattacatataatttgcttataatttttatttgaaggctcactgaccatcatttggatagagctttgtccagcaatgataagtgtagttatctgtgacctttttcagacaaatgaggggaggtgggattcacatatagtagaaatgccataagtaggagagagactcatagcagctgaggtcaggaggttacctacagggccttaaaagccattggaatttttcttttattctgagacaggaatctattggaaagatttggacaggcaagtgaataactgaggacccctgaggttgatttgagctcctaataaaaaaagaggaaaaagagggaaacgttcctcagtgtagaattgaccactgccagcctcactcacatatccactgctttcttgagacttcagcaggttgttaagcatcgccgaattatcagcagatgactgaatggtgggctaaaactgtcgtctagtaacagaatatctatttggcaggaagataacacctgctgtgtccttaactggattcagtaataaataggaatatgtacacatgaggaaaagaaggtgaattgtgtatgaggtgatatttttccaagtgtatgttagagttagatattattgaaaatttaataataaggtgatttacaaaatcagtatcaaaaatactttatcaggtagttgtgagacaacttcaacaagaagtcgctgtaaccctaaaaaaaccatctatgtcgggctgggcacggtggctcacgcctgtaatcacagcactttgggaggccaaggtaggcagattacgaggtcaagagattgagaccatcctggccaacatggtgaaacccccgtctctaccaaaaataaaaaaaaattagcctggcgttgtggcgtacgcctgtagtcccagctactcgggaggctgaggtaggagaatcacgtgaactcgg

SEQ ID NO: 345834 - DNA, 1000 bp, Homo Sapiens; identical to SEQ ID NO: 161294

SEQ ID NO: 345835 - DNA, 1000 bp, Homo Sapiens
aatggtttaaacaccaataaattttatttttctcttaagagagacagtcctgcttggcacagcagctcccctgtccttctcgccactctcagtgctctggctgtgtcatccttagacaatcgtccttgtctttatggtccaaaatggtgtctgtacatccagaccacacatccatattccatgctgcagaatggaagagaggcagtgaagggcgggggcggctcctgccttctcagagttcccagaagaaccctcacaacacatgggctctcatctccttgtccgagctaagccactgaccacagctgctatggagtaaggaaatgtgtccttggtccaaacacagaagatcttgcttctctcccatcttcaccttctcccgagcacgtccttcctccatccgcagcctgggcactccttcagctccaacctgtgctgtatggaaggcctgcagggtgtctggggcttagagatggtaatgaaatcaaatccatcctctgaaggagttcacccagagcaactaccatttctttcttttttttttttttttttttttttttgagacagtgtctcaccctgttgctcacgctggagcgcaatggcacgatcatagctcactgcagctttgaactccttagctcaagggagcctcccgcctcagcctcctgagtagctgggaccacaggtgtgcaccacctgccaggctcacagctacccattcttgagcactctcccaggcgctaggctatgaacatactatactatcacaagactctcacagtgagttttgtggtgggtggttgcgtccttcccatgagaaggttgaggctggaaggaatgattgaatgaagatagtgcaggcagagttggaataggaacccggggccactggaatgtttctggcacatcagtcttccttgtgtgtccccagaagtggcccccaagagaatgtgacctgggccatgggatctgcagctgcttctggtgggcagggctcaga

SEQ ID NO: 345836 - DNA, 1000 bp, Homo Sapiens
actttttaaaagttttattgtaattgacaaataattttgtatatttatggggtacaatgtgactttttgatacatgtatatacactgtggaatgagcaaatcaggctaattagcatatttattttctgaaacaattatttcgttgcggtgagaacattaaaattctctttgtttagctattttgaaatatataatacattactattaactatagacactgtgctgtgcaatagaacaccagaattattcctcctaactgaaactttgtatccgtagagcaatgtggacattttccctgtctaactccccacagccaattccgggtttatacccaaagatatttaaatcagtatttcaaagggatgtttgagctcctgtgttcattgcagcattattcacaagagccaagataaggaatcaacctaagtgtccgtcagctgatgaacagattttttaaaatgtgctgaatatacaaaataggatactatttagccttaaaaaaaaaaacaggcaattctgccattttcaaacagggatgaacctaaggacattatgttaagtaagataagtcaggcacagagcgacaaataccatatgatctcacttatatgtggaatctaaaaaggtagaaattgtagaattagagagtggaatattgatgactacttcttaatgtgtatttggagtttgaatgactaaatatacataaagcgcttatatttgaacatataagatgttacagatattttttctgtcccttgccccatctttcctagtataataaagttatgctacaagttagtcacttacgaattccaatttgaggattcagtttgtgacttttgctggttctgagaaatcaagaaatactgagccattgcatgaacagtgtcactaagtataagaacctgagaagttcaacttcaacaactcttaaagtctcccttgagtagaaggtgaatgaactgtcataattgggcaagaagtgagtttattctga

SEQ ID NO: 345837 - DNA, 1000 bp, Homo Sapiens
gtgtgtaaagggtttttattggagagcctgtggcgctgaagtgccaccaaggatttggaaggtcactttcagcagccgccatttctgccaggaccagtggcaagcacctggcagatggagcccgggtgtttctgcgtaaggcagaggaatccagcttttccatgagattcagctgcagttgtcgaaaaccctgtgtgagccagcagttccagttcaaaggttgagggggcgaacagctgcgaggtggccaggctcccgtgagtcaccactcaggcctgagtacaccgtggagaggagagataaagcagccacggctgttctgttgccagtcccacccctctggcaaacagatgggggaaaacagggaaggaaagtcaacaaagaaggtgaaatgcagggagcagagactacacgcaggccccccgtggctggcaataccatgcgtgctgggccggctgcgccaccctcacccagggcttcccacgggctctgctctttcctgcagaggcgaaactgccttcctggcaggcggaggctgccgagctcccatgccccttcccacatatcccaactcttctcagaaaactgaagaaccgaagatggaggtgagtcaggaaaggctggagttttcatccaaaaaaaaaaagagcaggacaataaacaggcaaatacacaaaccctggagcaaagccaggaaaaaagggggagataaaaaataaaaaaataaaaaacacctttctagagagagcaaaatcccagggtcccgaaggcactgctaatagactaatagaagcatctttgttgcagccaatcacctctagcctgggaacaccgctagtcaggaggcctcaatcaacctgagaagtcagcccaaggccctgtctccagaagccagcagcagatccctgggtcatgtcacaggcaagtcctcacttcaccagctcagaggtgagccactctcacctgaacctctgccttccggcagggacctcctgggtcc

SEQ ID NO: 345838 - DNA, 1000 bp, Homo Sapiens
tcgatacagggtctcgctccatcacccaggctggagtgcagtggcacaatcataattcactgcagcctcaacctcccggactcaagcagtcctcccacctcagcctcccgagtagctgggactataggcatgtgccaccatgcctggttaatttttttattttttatttttggagagacagggtctcactatgttgccaaggctggttttgaactcttggatgcaattacagccactgcgcccagcctcagatgcttcagattaatttttttttgtggggggggatggagtcttcctctgtcccccaggctggagtgcaatggcgcaatctcggctcactgcaacctctgcctcccgggttccagcgattctcctgcctcagcctcccgagtagctgggattacaggcgactgccatgacgcccagctaatttttgtattttcagtagagatggggtttcaccatgttggccaggctggtctcgatctcctgacctcaggtgatctctccgcctcagcctcccaaagtgctgagattacaggcgtgagccaccacatctggtcagattcattctttcattcaagggttcccaacaaccctgtaagttatgatcattattattactatacccattgtacaggtgaggaaacaggctcacagtaacctgcccaggaccacaccactggtatgttgcgacaacaggacttggacccaggtcttccaaacccaaattttcagctctttctgcttcatcgtacagcctttctgaaatatgttctattagttagaaattcattgtccatgactttttccctaaatacaagcttcttctctgaacaaaccacaactctgcccagttgaacagttaagagtgtcagaaaactcagcaaacagctcccctctccaactctgaaagcagcatcttagccaagagcctatgcagggcctgggccctcgggaagtgtatgtaatgtggggtgggcctcctctctgtttgcct

SEQ ID NO: 345839 - DNA, 1000 bp, Homo Sapiens
gttttgttttggagacagagtctcactctgtccccggtctggagtgcagtagcgccattttggctcactgcaacctccgcctcccaggctcaagcgattcctctgcctcagcctcccgagtagctggaaccacaggcacctgccaccacacccagctaatttttgtactgttagtagagacggggtttcaacatgttggccaggatggtctcgatctcttcacatcgtcatccgcccgcctcggcctcccaaagtgctgggattacaggcatgagccacctcacctggcctacatccttattctttacagcataatattctgtagtgtaaatgtgtcacactttaccatactcttattgagggtgcaattaactcattaatggatcaagtaattaatgcccagtgtggcaaggaaacagagacacgatcatgtttctacagtactggtagagtttttaactgatacagtccccaaaaggtataagatatcaaagatcttaaaaacatatgtactctgtagtcctagttgcttaggaggctgaggaaggaggactcctagagcccaggaattcagtggtgcggtgagctatgattgcaccactgcactccaacctgggcaatggagtgagatactgcctctaaaaaccaagcaaccaacatacaaaaatctgtgctctttaattcatgtatagaaattccacgtataaaaattccatgtatagaaatttatcttaagataattatatggctgggcacggtggctcatgcctatagtctcagcaccttgggaggctgaggcaggaggattactggagtccagaagttccagaacagcctaagcaacatggtgagacatcgtctctatttaaaaaaatacaaaaaaactccccgtctctataaaaagtacaaaaagttagccaggcgtggtggcgcacacctgcgatcccagctacacaggaggctgagactgtggaatcacttgagcgtgggaggctgaggc

SEQ ID NO: 345840 - DNA, 1000 bp, Homo Sapiens
cattttgagggttattttaatctttttaaaacagatgtagacgttttggttgtaagttggtgttaaagagaggaggaagttccaaatcccaccccggggcccagcctgcagttccatccgttcagacctgtttctactcgggctctgcctctagtcagaaacctccacgccccgacatggcatctgtgcccttaggaactcttcacaggggaattattcggggccacgcggtggtggaaacctgcagtgctgggcagtgggtctggctggagagccactgcagaagggctgagaaggggcggccccagcaggccccatgcacttacaggcaaacaggctgtcggcccagagccccagcaggggcctggaccccaggagcgacgggcctgaagcagggcctctgtcctcggagtgggaggcagagtgaactttagctgctacaagacttggaggtccggccccgggaatctctgagctatggccccctcacacggacagggcatgagctggggcctgcgacacccaacgttgactgctcagaccctctcgtccctgcctgggcccacacttgccatccccaggctcagccaggatttatggccacctgggtgtcctggcccacgaactccctgccccgggcacccagcctcctcccacctcaccctcccagtgcccactcgtcagatagctgatgctcgccacgcacatgggcctcaacttctagaggagtcccgagagggaaaggggttccccaagccacacggtaggtcgagtacacctgctcagcctgcagaggcggcctgccctcctgcctgtcctgtcgccaccccatggggcaaggctggtgcccgcatttcagaagtgggaacggggacctggaggtcaagtggcttttccgggcatttgagggggtccagcgctcatgaggactgtgctgctgcctgtcctccaagagacccgcccctccctcgtcagcccctccatgctgatgggggcatgg

SEQ ID NO: 345841 - DNA, 1000 bp, Homo Sapiens
aagacgacagaaatttattttttcaccattcacgaggccagaaattcaaaaaggaggtgtgagtatgattgatttctttgagaggctttcaggtaaaatctccttcttagcttctggtggtttccagctgtccttggcattccgtgactgtaggcagcgtactccagactctgcctcccttgtcccatggccgtcttccctgtaggtctctgtatgttcccatgaccttctctgtcatccaggctggagtgcaatggtgagttctcagctcactgcaacctccgcctccggggctcaagcgattctcctgcctcaggcgctggagtagctggattacaggcgctcgccatcacgcccagctaatttttgtatttttagtagagactgggtttcagcatgttggtcaggcaggtctcgaactcctgaccttgtgatccgcccgcatcagcctcccaaagtgctgggattacaggcgtgagccaccgcgcccggccttgtcctcatcgtcttcttttccaccctcctttctcctcaccgttttcctccactgtcttctctaccatactgtcttctccctgcactttctccccactgtcttcttccccacctttctccccatcccactttccaaggtctttcccaccctctccgtcccctcctccccctctccccgcagtcttccgggccccagtgtctttcgcccgcagccaacactgttcagttctgaggtagcggcgggggcgggggcggcggcagccgtgatggccctggcagcgactctcctgggtctcctgttggctgttggggcggagctcaggggcccagctcatggggctgcctgggcgcacagacacaccaggcgcagggacacagccgggcgcacgcgtggagcgcttctaggtgaaaggcagttggagagcgcgagaagggggtgggcaagacgacgatcgggggcgaagacggtggggagtggaagaggggagaagagggtgcggggaga

SEQ ID NO: 345842 - DNA, 1000 bp, Homo Sapiens; identical to SEQ ID NO: 161295

SEQ ID NO: 345843 - DNA, 1000 bp, Homo Sapiens
gagcgccggcctagaggctcattatctatttattttaccaaacgcgaattgagacggactttgacaaaacacgaaatggtaatgtgaagctaagagcagagagtgaccaacagtaaacaacacgcgcagactccgcggctggcggctgtgtctttaaggaaactgcccaccccaccgcaggggggcatcggtcagagcagagctctggggggtggggggacgttgcccgggtcccccctgctgtccccagggccaccagcagctctgcgtcccgggtgctctccaggcaggcactgtggccacaggggacctggcacgtcgagtgtgcaaaggtctcggtccttttctcccaggcagtgcccccagccctgtggcgcagaccccacatcagggagcgtactgtgtggcaagagccatcttgtgacgtaggccagacacgtgtctttctctttaaaatgacggttatcctctcacggttagaggccccattcaagtctgcattgaaatctgggccacgtcagagttcctgggggagaagccgcttccccgctcctccccacttctggaggcccccactctccttggctcgtggccccttcctccagttcagggcctctgacccacgcccaccgtcaccacttctcatgcaggccagaagtgtttccaggcctaggggccgtacccacctcgggctgtgtgggtccttagccctaatcacatctgcatatccctctggccaactctttttgggtttgctttttgttttgagatggagtcgcacgctgtcacccaggctggagtgcagtggcacgatcttggctcacctcaacctccatctcctgggttcaagcgattctcctgtctcagcctctcaaataactgggattacaggtctgtaccaccacacccagctaatttttatatttttggtggagacggggtttcgccatgttggccaggctggtttcgaacttttgacctcaggtgatccacctgcctc

SEQ ID NO: 345844 - DNA, 1000 bp, Homo Sapiens
aatttagaaagtttattttgccaaggttgaggatgcacccgtgatggtctcaggaagtcctgacgacatgtgcccaaggtggttgggacacagcttgctttttttttttttttttgagacggcgtctcacactatcacccgggctggagtgcagtggcgcgatctcagttcactgcaacctctgcctcccagactcaagcaattgtcatgcctcagcctcctgaaaggctgggattacaggcacccaccaccatgcccagataatttttttttttttttttttgagacggcgtctcgctctgtcgcccaggctggagtgcagtggtgcgatctcggctcactgcaagctccacctcccgggttcacaccattgtcctgcctcagcctcccaggtagctgggactacaggcgcccgccaccacgcctggctaattttttgtactttttagtagagatggagtttctatgtgttagccaggatggtctcgatctcctgacctcgtgatccaccagcctcggcctcccacagtgctgggattacaggcgtgagccactgcgcctggcccacagcttgcttttatacattttaaggagacatgagacatcaatcaatatatgtaagaagtacattagttctatccagaaaggtggggacagctcaaagcaagcccccaccccccgggggaggtagatggaggctgagagatcagaccttgcggggcacttggggacatcaggtgggacaggccccaggtgcaccctcagtgcactgggcaggtctcaggatcctggcctggtaatgtggtcactccctcgaggactgcttttggggcccagtcacccaccctgggccatacacgtcctttctcaggactggacattctcagctcctgcagagggcactgcctctagcccaggaggggcagccctgttgtgtagcccaagcccatgctctacagggccctagtggtccctgccccacccacacacccctcttctc

SEQ ID NO: 345845 - DNA, 1000 bp, Homo Sapiens
cactgaacaataatttaatgaggagaatttttacaaagatggagagagggtgaagggatttaatcaaggatggtgtattagcgttctctagagggaaagaactaataggatatacatagatatatatatataaaggggaatttattaagtataaacgtatatgatcacaaggtaccacaataggccatctgtaagctgaggagcaaggagagccaatccaagtcctgaaagcgaagaccttagagtccaatattcaagggcaggaagtatccagcatgggagaaagaggtaggctggaagctaggcccatctctccttttcacatttttctgcctgctttatattcgctggcagctgattagattgtgcccaccagattaagggtggatctgccttccccagcccactgactcaaatgttaatatctcttggcaacaccctcaccaacacacccaagatcagtactttgtatccttcaatccaatcaagttgacacagagcattaacaatcacaactccaacccctgtcaacttgaacccatacacacctcctgaggtcatacataatcttaaagacaataatgtcataattacacctaacataatacaactattcttcatacaaccagaaaggcaccaatccccaacccaaatactattatataaagttaacaatacttaaatgctgctatgaagtcaataaatcttatgtcacatcatagagaaaaaggaaataaaatgaagatattttcttagtacaagtgtatacatgcacaaacatgattttagcaaaagaaggaggaaattctcatgacaattacagtccccatttctgcagctggtcacgtggtcgtagctgatattgatgactaccttcttctacccattctgtattccctttgccttcagcaagcagctcagcaggttgtggttttttttcctggtggagtgatccaaaccttcatttctgaggggtctgggccatttgtagtcctgcctg

SEQ ID NO: 345846 - DNA, 1000 bp, Homo Sapiens
aagcagtgtagacaagtgctccagtctagcctaaccatgtacatttgcccatatattaaatgaatggcatctaaaagaatgatgctatgctgtgttttacgtaatagaacaataccaagaatggtcaccacaaataatgcacactcgtttttgaggaggaaacttggtatattcagtttgatgtcagctgccttcctcttctaatcacccccctttgccttatactccctttttaaattaatgcattgttggaacggagtctttgaaatcattacagggacctgcagtttgcactttttcataatttatttagaaagacctcatggttttgtttttaagcttaggtaggcatttcattattttggtgacttgtttcttggcaccacataggtgacagcaagatgagaattaaacagggctttgagggattgaatgggccaagacatacccaggctgccttgaacatgtgtgaggcctggaacaagagatccaacagaagcccacattccttatgctgggaggcatctcctcacacctgccactccagccaggtaacctctgcccaccaggtgtctccagcactgccaacgtctgctggcattaccttttacatcctgcagaggaacatgaggctggggagtccagttcaaatgaagaatttgtggcctctctggaactctacactaaatgtggtggcacgaggtgatagtccctggtgcccagtctatagcccagcccacttctcttcccaccaggctccggtgccatgaaagttcttccatacaggcatgtggacaccccagctccacagcggagctctgtcagagcctctgcaaatagctgcaccttggccattccatagaaaaaggagtgtgcacaatgctgtggtttgaatgtctgtatccctccaaaactcatgctgaaactgaatccccagtgcaacagtaataagagatggggtgtttagggagtgattagcaccttataaaagggattgatg

SEQ ID NO: 345847 - DNA, 1000 bp, Homo Sapiens
ggtttgttttttgctattaatgtatcacagttactttggccagcacaccctgtgttatctaacaatgatttccatgttcgatctttccaggttttgaaaatttcttgacaaataaataagaaaataatccattaatatttttttctagagcttatattatttatcaattgttttaatttggagggatgtacctaattcttaaagatcttgataatgatcttgtaacacagttattagcaatgtttacttattgtaaaacaatccccaactacgccaggatggttgttggaagtacacactatatcaaatcctgaaaggggatttatttagactttgcggtgcccaaattttcttctgaggaatagagcttctttactgtaccctcgtcccatgacagaggatttcagccaaaaactcccagtcccaaagttccttaaggcatttatgctactgtgcaaatgtcagtactcatgggacttgtatcacaggggtggagttgaggtggggtggcttgaatatagaaattattctgagaaagtgtccaaaattactctcattattgcttgtaattcctggatgcttgagactaagtcacacagagattaggatcagatctggctcagaagtgctacctctggtgttgttgccatggtaatcaatggccaaggaacagatccagggaaactgcagtctttgctgccatcatgagctaggatctgccaccagaccctccctggatgaggtgcttcactgaggaatggcctctgtcacatcctgttgtatggttccatactcttggaccccagcctccaagtgacacttttcattaggaacctcagctgcctgggcctttgatcctctcctttcacttttgttgtcacttttcttgttttgtatcctatagaactcgtttaacacatactgatatttgggttgagtaagaccaaagaagacagcaaatcttccaccaaggaattcacatgctaaaagaaagaacgag

SEQ ID NO: 345848 - DNA, 1000 bp, Homo Sapiens
atttttattttttttttttcagagacagcttctttatagtgtttattaggattttaggtttttcactacaagcctcaatcaatgggctttgaaatatctcctcatcaattgtacaaaaagagagtttccaacctactaaatcaaaacaaaggtttaacattgtgagacaaatccacaaattgcaaagcatttttacagataacttgtttctagtttttatcacgggatatttgatttttcactataggcctcagggggctaagaaaagtcccctctttgattctacaaaatgaatgtttccaaactgctaagtttccaacctgctgaatcaaaactaacattcaactccattagatgaatccacacatctcaaagcattttcacagatagctagtttctagttttcatcgtgggatattcagttttttactacaggcctcattgggtttgaaatgtacccttgcagattctagaaaaatagtgtttccaaagcgctaagtcaaaataaaggttaaactctgtgagatgaaaccacacattgcaaaagatttttacagatagcttgttctagtttttatcatggcatatgtggtttttcactataggcctcaatgagctccaaaatgtcccttcttttattctacaaaaagaatgtttccaacctgcccaatcaaaacaaggtttaactctgtgagatgattctacacattgcaaaacattttctcacataccttgtttctagtttttatcctgggatatttggtttttagtataggcctctatgggctccaaaatatcccttcatagatattacaaaaagagtattttcaaccttctgaaccaaaacaagggtttaactttgcgagatgaatccacatatctcaaagcattttcacagataatttgttgtcagtttttatcagggatattcatttctttataataggcctcaaggactcagaaatttcttattttaaattctactaaaagagtgtttcca

SEQ ID NO: 345849 - DNA, 1000 bp, Homo Sapiens
aatcttccatgagtaatagtttatgtggtaattacaaattagtgcatttaaaaatacttttctctttcctttttttacatatacagggtctgtttatacacaagaatataaggatgcagcaatctttatcccagagataacacacataatttctcaataacttgattatccacaagaggtgctctttaaatgctgtctgttattatcattattatattacaagctttaatttaatgcactgaaattttactggattaaatgtaaatttcaaagtatttttcctctgcccagaaatatatttttttgttatgcttaagttctaagatacatgtgcagaacgtgcagatttgttacataggtgtacatgtgccatggtggttttctgcacccatcaacccaccatctacattacgtatttcacctaatgctatcctttccattgcccccaacccccagacaggccccagtgtgtgatgttcccctccctgtgcccatatattctcattgttcaactcccacttatgagtgacaacatgcggtgtttggttttctgttcctgtgttagtttgctgagaatgatggtttccagcttcatccatgtccctgcaaaggacataaactcattctttttatggctgcatagtatcccatggtgtacatgtgccacattttcttagtccagtctatcattgatgggcacttgggttgtttctaaatctttgctattgtgaatagtgctgcaataaagatacgtgtgcatgtgtctttatagtagaatgatttataatctttgggtatatacccagtaatgtgatttcagggtcaaatgttatttctagttctagatttttgaggaatcaccacactgtcttccacaatggttgaactaatttacactcccaccaacagtgtaaaaccatttctatttctccacattctctccagaatctgttgtttcctgactttttaatgatcgccattttaactgatgtgagatggt

SEQ ID NO: 345850 - DNA, 1000 bp, Homo Sapiens; identical to SEQ ID NO: 161296

SEQ ID NO: 345851 - DNA, 1000 bp, Homo Sapiens
gagatggagtctcactctgtcccccaggctggagtgcagtggcgcgatctcggctcactgcaagctcagcctcctgggttcacgccattctcctgcctcagcctcccgagtagctgggactacaggcgcccgccactacgcccggctgattttttgtatttttagtagacagggggtttcaccgtgttagccaggatggtgttgatctcctgacctcgtgatccgcccgcctcagcctcccaaagtgctgggattacaggcatgagccactgcgcccggcctgcttcctgccaagttaaacggcatgctagctctcagctccccatgcccaagtggacttgaaaggtctaccccagccctccttccacagcccatcctgagcaggctgcctactccaggcaggccccaggctgggctggaccatttaatcctcacagccctggtaaggctgagatcacggatcccacttcatagtggagaaactgaggctcagggggtgctgaatctctagctctaggtgtctttgctctcagaagttggtcggggagggggtctgcttgctctctgggcacgtgtcctactccctcccgaggggcactggagcaaatcccaggtccttagccagcaaggagaccgctgaggctcacacctggtgccgcccacccagaactggagactgagatgctgactcacccaggagtggggaccaggagggccccgatgcagcccgaccctcctctgtcccagcatcatctcgcctggggtcgcgaagaccccgtgttccctcaaggcctcagaacaaaagcggtatgagagggtctgggggtcctgctcccctgctccaattctgggtcccctggctggtgggcaggaccaagatgtccctaaggactgtccgggcagagccagccagggtggggtgagggctgaagggacagtggctgagggtctccttggaccctcccagctgtggtgagtggccggagggggaagatcaagg

SEQ ID NO: 345852 - DNA, 1000 bp, Homo Sapiens
gagatagagtctcgttctgtcacccaggctggagtgcaatggtgcgatctcggctcactgcaacctctgctcccacgttcaagcgattctccggtctcagcctcccgagtagctgggactacaggtgtccgccaccacacgcagctaatttctgtatttttagtagagatggggtttcaccatgttggccaggacggtctcaatcctttgaccttgtgatccacccaccttggcctcccaaagtgctgggattacaggcgtgagtcactgtgccccactgccagccagtatcttaacgtgaaacagcaaacacgtacccactaagactggggataaagctgggctttctgctttgaccacgacttctcaacattcgactggacattctagacagtgtgtgaggccagaaaaagatgtaaatgtatagagctggctggtcagggtttaggctcgggggaagcatgagcgagcgagaatggcagctgtctctgtgtggctttggcgtgagcctccagtcagaggagccacctctctggatgtgcttggggctggcccagtctcctggaggagctgtggacctcatgttctttttgaggctgtttttacagcatggtacctgggctggggagtggtgggcaggggcagaggtgacgggaggccctggtcagtgtcggaggcccatgccaatggcggtgaatgtgcctggaggagtttgctttgcttccacatggaaggaccacaggctgggagcaggaactcactgcacaggtctctagaggccacctgtccgaggtcaaggtgtgggcagggtgggttccctccaagagctgtgagggaagggttggttccaggtcgcactccgagggctgtgagggaagggtcggttccaggccgccctccgagggctgtgagggaagggtcggttccaggctgccctccgagggctgtgagggaagagtggattccaggccgtcctccgagggctgtgagggaagggtcg

SEQ ID NO: 345853 - DNA, 1000 bp, Homo Sapiens
attgatgacagcaaaacaaacattatttattaagcaactgtttacaactgagacccagggaagtgacataatctaagattacgtaactaattagtggcggagctaacaccctgttatatcatctccttattttaaaacaattgcaaagcattgcaaacatttcaaataagcacatctctggcattttatgacctttttatgcttaattcaaaagaatgtacttgctttaaataaacattaaggacatgaaatacattgatatatacacaaaagactgtttataattcttatgtattaagctcccattgtgtgctatgtgtttttttattttcctgcataagcagcattctctgctgcaacccagcaaggtaggcattattgcccctgttctgcagctgaagaagctctcactaagaaggatgaaagcagaaaagctgggaaaagatcccccacaaagcaaataaagacatgggaaggaacacccagatctgcctggcttcaaagccagtggtagtaacttccctagtgtgaacgagctcatccagggataaggtttatttaggaacaaaagagaaatcccaccgaatcattcctacagatttttctttcttagtctaaggagtgataggaaaaaccgtaaagaatgggaaacggtcaagcagaattggcaagtgttcttgagtcaagacccctcatgaaaaggataagccattctctctgcccaaatgtgattcctgtagctgggtcccagtcagcacgttttccactgaaatgctgaggaggggaggggctcttcctggggtagctgtacacagccgtggtggccagcctaattcaagttgcacagcgtggacatacacactctcacgctggtgactcccaggctattagttcaacagtccattgagtttgacatcatagatgggggttgcagggggtgcgcaagggaataatccgatttgcagagaggaaaaattgtttgttgtgtatatacttcctg

SEQ ID NO: 345854 - DNA, 1000 bp, Homo Sapiens
gataaagcgactagtttatcctaggaactgccttcaagtaacacagtcacttgcaaaacatcagcagggagcgtttttagacattacaggcccagaaatcagtcggggctggactcggaccagtaggccacagagcaggaccagtaggtggaattatctgggactcaggtgtgtgccactgtgcctggatttctggcctggatctttgcagtaacccaactggactcatcgtttccatccctgggccccttcgttttattcctaatctaggagccatgatgattcttctaaaatataaattaggactctgctcagaaccctgcagtagctctccgcttcactcataatgtagacgggatctgtcctctggccactgacctcaaattacaccatagctgaaggtcctgcagagttaggcctgctgaggttacgcgatgtcgagagcaaatgtcggcattccggtaataaatgcctttgactcttagttttccgttgctgaaagtcatgttggagacgtttgcccaatcttggtcatgtttccaagaagaaagactcgttttatgagcctcatgggatattgatggtattaataacaagatgagttgaaggctgagcatcaggattgccattcttagcaaatacttctttctccctattaaaattcatcagaagcagttcacttgcagctggcagggccaacgatacaccttcagtgtcccccctcgggctctcctggattcctcagcccagcactcactatgtgagggggtctggtctgcagcaactgtggtcagctttccagcccacagggcatcagtcagcccatcccattgctgagagtgcaggaaagacggggagagcagggggtagcatcttccccagacagcgttaggaggttacgtgaatgtcaaacagtagaaaacaatccctctcacaggcctctcaagcagggtgttcctgaagcccactgtgcctcctctgtagaactttccctccatgt

SEQ ID NO: 345855 - DNA, 1000 bp, Homo Sapiens
aagctaagggtgaaaaaatagagatttagtgaaaataagttagggcaaaatggcaccttgtgatttagaattgtatgttttgcatctcatacccctacagaggctggctgtgccttagacacagtagtgatttgcttcttttgggggcagtggtcttcaacatttttggcaccaaggaccagtttcgtggaagataatttttccatggactttgttggggggtggggaatggtttcaggatgaaactgttccacctcagatcatcaggcattagattcttataaggagtgcacaacctagatccctcacatgtgaaggtcacaataaagtttgcactcctataagaatctaatgctggccaggcacggtggctcacgcctgtaatcccagcattttgggaggccgaggcgggcagatcagaaggtcagcagatcaagaccatcctggttaacacggtgaaacatcatctctactaaaagtacaaaaaaaaaaaaaaattagccgggcatggtggcaggcacctgtagtcccagctactctggaggctgaggcaggagaatggcgtgaacctgggaggcggagtttgcagtaacccaagattgtgccactgcactccagcctgggtgatagagcgagactccgtctcaaaaaaaaaaaaaaaaaaaaaaaaaaatctaatgctgccacttatctgacaggaggcagaggagctcaggcagtaatgctctctcacccactggcccactgctcacctcctgctgtgcagcctggtttctaacagcccacagagagataacaggtctgtggcctgggggttggggacccctgttttgggggatagttaattctagtctaaaattcatcttcaatagttgaggaagtaactttgccaatgtgacaaagtaaggtaggggatacaaagttctaaaatcaagatttcctgaccaccaggtgttatgttttttactaatcttttctaaaaaattttacgaatttaggg

SEQ ID NO: 345856 - DNA, 1000 bp, Homo Sapiens
atgctttaaaaaccattttattttctaaaagaagtaagcatacttatatcaggtacaaaagcttcagtgttcatcctggtgagctggtgaggaagatctggaaatattggtgttacattgagaaaacacctttgacaaagctgaagacatttttgtcagcattttagatccttgtttggagacatcgggcttgggagtttctgaaatgacttcctttgagggatttgcactgccaagaacatccttggatctttcaaagatggtgataaacttaacactgtttccatgctctggcttttgttcctgagaactttcttctaatattttagcacttgggtctgagtgacaatcttcagcctcaccagtagatgaaatgagatcttcttggttgtatgaagatgaactcataattctgtgtatgaagtaatgtgttggttcagtaacaagattcttttcttctttcttacactggggcttttcctcccaagatgaagaggctgtttcaggcatcgtctttggtgtggccatgtcaagctcagcaacagctcttttaacatgtgtctccttggattctattacctgatttgagattgcttcagtactttcaatatttgcactggctgtggtctgacaacatttacttagtgacaaaaattttttcaggctgctcgtgcttagtgttgacttaggagaaagtttgctttgtattggcttcttgacttctttcacttgatcttcaaatactttgatgccttcttcttttgcaaaagtctgtgttaaaacaacttcatcttcatcagaatctcgttcctcttttatgtaattttccaaatacacttgatcaatatcatgagctactaatcgaacaataagatcatttttactttgaacatcttttaagagctccacctttgtaatatcaggctttcttatattctgaaatgaatttctagcaacggcctctaggggttttacatccagtcttccagtcttatccaat

SEQ ID NO: 345857 - DNA, 1000 bp, Homo Sapiens
aatagatttgcagaggttctgttgattggcatttctccagcatctctatgacgttgagcctctttctcgggcaatatgccctccttataccttctttgatgaggcctccgttccaatattggccctctctttaatactggggcttttactttcttatggttaagttttgatggttcttcacatatcctgcgtgccagtaggctgtgagacgtgtgattcacaaatgtttatttctagaccatagtttgtgtttcattctctttggatttttatattgctttatagaattataattttaaatgtatgattaagtttaatttgtcaatcttttatgaatcatgcttttggtgtcatgtctaagaacttttcgcctaaccccaggccgtacgaattttcccctgtgtttttgtctaagggtttgatagcgttatgttctccatttaggcctgtgataaatgttgagtaacattttgtgtccgccatggccatacctttctccgtctctcacagtatcatgggcgtttgcagctcccagtgccccgtgctgctcctgtcttcttggtctgctcctcctgtcatacctttctccgtctctcacggtatcgtgggcatttgcagctcccagtgccccgtgctgctcccgtcttcttggtctgctcctcctgtcatacctttctccgtctctcacagtatcgtgggcatttgcagctcccagtgccccgtgctgttcccgtcttcttggtctgctcctcctgtcatacctttctccatctctcacggtatcgtgggcatttgcagctcccagggccccgtgctgttcccgtcttcttggtccgctcttcctgtgagtctcagggcatgtcttagtgctcacgctgtcctggtccatcggggggtcccgtgagcttgtccgtgtgggaaggtcgggactgtgatgttgacgggatgccttgtgagttgggggaggtgctgatgggggtttccatgtgggagagagagg

SEQ ID NO: 345858 - DNA, 1000 bp, Homo Sapiens
gctttacaatttcctcctttatttactgcaggaagttagtttaacacatcatttcatcaaagatacagcaaaggtaaacatcatccaaatacatatggaattacaaggaattccaaacatacagaggcaacatagagttgaaactagtcatgtcttattatattttgggagcttctctccttaatggttcttttgaccattaaaatgcaaacgttcatgctcattccatatcctgaataacaaaaatatatctgaagtagccttaggattatctttaacggagagttgcacagaagtttagatatttcctttcattttacagaaccaatacttgtgtccagacaaattttattctcaaacaagttattctttataagtcaaaatcatctaatgagttttattatgaaaaaaaaatttttttgctaattcctgaggatacatgtaatggaatttaaatcaaagtggggcacatcatctcacttttacaagttattcagaagcttcttgtgtgtgttactgaaacactggcccatctaatcaaattttccttagacatatccagaatctttccagagacttttttctttgctatcttactgtaagtaaaaatagatttgtattagaatcaaagacacttctaaattaaagtttataaatcttgaggacatctatatttcacatgccttattaattttgtaataagcctaaaaattaattttgtaatgagcacagccaagtcagttctcatctgacaagtgagtggctggcagcaattttcacatctgctcttcattcatgggatgagagacacaggggaaaagctgatggaacactgacgactctccacttgcctactactaataatagtcatctttcctcagcaaagatgatggtgtccttgctacttattctgccaaacaagagtcaaaataaaaaaaaatgttaggagagggttctagggtcaaaccaaaagagaacaaatctcagtgcctctgtttac

SEQ ID NO: 345859 - DNA, 1000 bp, Homo Sapiens
gagacggagtctcgctctgtcgcccaggctggagtgcagtggcgcgatctcggctcactgcaagctccgcctcccgggttcacgccacaaacaattcttaatgccatgagaagctgcttgtgctgtattgttaggtgaagtggcaagatatgaaaatgtttgtatagtaatatttagtcagtaaaatgcaaatgcacataaaatcatgaaaagcaccactaaagaaagaatattagaaacgtaaacaatgcttgtgtctaaatagtgatttatgagtgatgctcattttctttatacggttccatatttttgaaatgtgttactatgactaggtcctacacttataacacaaaaataccacacatagtaagttcaggtttgtttttgccttaagtcttcttgagggaatataaggaggttcaagaaagaggagacagaacattccccagacagaaacaaaggggaagggcccttgggccatcagggcagcatgtgctaagacacagaggctgcaagagagtgggaccagggacacactcagagtagcaagcacagagcatgactggcaggggacagccatagcaaatcctggaaacagaggtgaggtcagacgagagcagggcaaggtgggcacggtgagggattctgcccacaggctacgggaggcagtgagtgagaaggcaagaagccagctgggaagccgaaggacaaatgccttcccagacacctttaataaaagcagagtcagggagcgcggaagcccacgccagggagagcaggaagatagttaagtgtcttacactcattgccatttacaaaatggttctccttaattttcttcaaacaaggctatgcatatattggtgtctggaaatgaaattaattagtaaatcaaatcaatacattcttattggccaagcatcactcacgatcccttctgacttcatcctaaaagtggacccaaccaacaaccccctatgttgcttcacaagtaatttct

SEQ ID NO: 345860 - DNA, 1000 bp, Homo Sapiens
gttttggttttccattttcaactgccttttatttccacgcaggggaacgtgaggagaaatgcctaatagaagacattccaagcgacacactggtaacaggtaagtaaaatgtgctcggttaaatgttgaactccagaagtggttttacagaattcttccatcctctacgtccatattacttggcagtgaacataatgctgcatggttttctcttgatcatttatcaagttattcaaacctaacagccttaagagtgaatggtaaaattcataaaacaggaaatctggacagtgttccctggaatccaagcttgatttgttttccagttgtcaatgttcctcagtaaaagcatcttggatgccatttctcactctaatagtggttgaacattcaaaacgtacgtgaggtctttagactgtgcagcaagacaggagcacaagtcgcacgtcctctgtgccctgacctcctggtgtccacagagccatggggagaaggcatcgtggtgggtgtgcaagtgcagatcggagactgttttccaagcaaacggctagtaaaagctgctaacaccatggtgagttccacacgtttcccacactgccaccaagcacagccccacacagctgagcttcacctgccttctgagaaagaaacaagtacctgtggtgtcagaacggtgtagaaaatccagaatatgcttaacatttaggccacaatcaacatcaaattcccgggttttaatgcaaaaaaaaaaaaaaaaaaaaaaaggagggggagtaggaagaagagaatctagtgatattcctcacaagtgctgattacgtattttatatcccattcaatcttacaatgaatactgttgaatcctcttttcaatttatcttggtcattacctttgagtgtgctattgcaaaaagtaatgacccatcctgcgaaagattaagtaaatgcatcaagcatggaggcagagaaagaaacagagcaatgtgagatcaagttttgg

SEQ ID NO: 345861 - DNA, 1000 bp, Homo Sapiens
tttttttttttttttctttttttttttttttttttttttttttttttttaatagaaatgttcttcattttatttttgttcctatatcgggcatttaatacactgcgttcatattcaacagtctcttcaatacgattttatctttttttgtaaggtacatcacaatcattattactgtctttcataaataaactgaaatagaaaacacaaatagaaaagataagtgacttgctcaaggcaaacataaaagttatcaaaaaagccaaaataaaagataatatttcagtaacaaaagacaggttttcatacttgcaaacaatggctatataaaactgggaaaattgcagaaatttttattgtccctaatatctaaagccaggattgcttaatacatgtaaagctactttcaagagaacacagaaaaaaagtattaaaaacaccttattgttttcaatcttataaggaaagtcacaacaatttaactcatttatgtatttcatattttatcaaaaaaaagtgtttcaagtttaacatctaatcaaataagagaagattacacactcagttccatgggctttatgtccatcatttcattaaatttgattttaaagaaatgccatgagttaggttagtattacagagattttatgggacaggggctcaaagccccagtaaccaggattccacagatacagtacaaaagaggtttgcacattcatatttgatgaatcactattttttgagctcagcacagtgtctgtttctgtagagaataaaagtgttatggtgcatactctttctattccagattctgagtgatatagtttggaaatttgtctctgctcaaatctcatgtcgagttgtgatccccagtgctggaggtggggcttggtgggaggtgtttgaatcatgagggtggatccctcatggctgggtgctgtcttccggatagtgagttcttgtgagatctggtaatttaaaattatgtggcgcctcccagc

SEQ ID NO: 345862 - DNA, 1000 bp, Homo Sapiens; identical to SEQ ID NO: 161297

SEQ ID NO: 345863 - DNA, 1000 bp, Homo Sapiens
agtggtgatagcatacataatatgatgaaaatcgtggttcacatttacatagccattaatggggcagaccctctttaagcacttttcataaaatcctgcattttacgactctgaggtaggtcctattgccatctccagttcacagtgagaacttgcccgatgtcacacagctagtgatgggcagagctgggacttgagtgcaggcagtttgggttccagatccaggctcttgagttggttggtggtgggggcaaatacctgccccttgcatgctgtccccagtgggtgaagacgcaggctctcatgctgccgctgccagagaaggccctcaaagagtgagcttcctggggaaggcagggcgaaggaggggtggtacctggctggctctacgtcctggaagaagagagggctgtggctgagggtgagcaggaaccacacagagctgggatgaggctcagggagcggttgcacctccgggtccttgggttcccagtgggctgctccatcctactcctgcctgttccctgccatctccctgtcccttgccatctctctggctctcaggtttcctggagtcggagttgaagaagcttctgggaatgcagcaagagtcccgcctctggaagctaggcagccaagagggccgagagctgcttacccggccagagatcaccgtggtggaggtgagcattgtggatggccaggtacgcttggcccgtgccagaccaccaaccccttcctggagaaggtggggctggaggcttaccatcccctccaggccctgggccctggttccagcccccaggccctggctccagcccccactgcctgggtagggtaggcataatgccttcttggtggtagtgtttctaaattcaggaccctggccccctgagtgagtgcacactgcatgcacataaacacacacacacacacacacacacacacacttctccatcagtctctctgtttctcacttgactcagagtcacaatgtcca

SEQ ID NO: 345864 - DNA, 1000 bp, Homo Sapiens
gtttgtttttaacagctttattgtgatataatgccaagcaattcattgattaaaagtgtacaatttaaaagtttctagtatactacaaagttgtgcaatgattgccataatcaatttcagaacatttcatcaccctgaaagaacttctgtatcattagcagtgactccattccctggcttcatcccctaacccaccaatcctcagcaactactcatctacttcctgtctctacatatttgcctactctgaacatttcatatatatagaatcatgcaattatgtacactttcatgacttctttcacttatcaaaatattttcaatgctcatccatattggagcatgtatcagtacttgtttcctttttaatggctgaataatattccattgtatgcatataccactttttatgtttccattcatcagttgatggacatttggattgtgtctaccttttgccattatgaataatattgctatgaacatttgtacagttttgtgtggataaatattttcatttctcttgagtatatacctagcagtggaattactgaatcaaaatgctaatactaagtttagcatttttaggaactgtcagactattttccaaaagagctgcatcatttacattttcatcagcaatgtgtaaagagttcctaacctacctcatcaatacttgttattgccttacttcttgattttagtcatcctaatggatatgatgtgctcaatgtggttttgatttgcatttctctaataactaattattttgagcattttaaatatacttttggccacttgtttatcttcttagaataaatgtctattcgaatcttctgtccactttgaaattgggttgtgtttttattattaagctgtaatagtcctttaaatattctgtatacaagtctcttataagatagataatttgaaaatattttctcccattctgtgagtttgtttttcactttcttgatggtattcattgaagtacaacttt

SEQ ID NO: 345865 - DNA, 1000 bp, Homo Sapiens; identical to SEQ ID NO: 161298

SEQ ID NO: 345866 - DNA, 1000 bp, Homo Sapiens
cagttcagggaagttttcttttattgttagtatcatggtcacctctcctccgttggttctattttttcctctttctgcaagtcaaggtttctctattcacgagtcaaggttttaggatccatcccatgttccttacccatttctacttgcttcccatctctttctacatttgctctataccacccttttcatcaaggggtctgtctgccctttgaccctccaggagagctgaccatatcttcacggtgatcttccactttttcagttaatctactgaatggtatttagttaggaaattatgatttttagctccagaaactctttttgtgccatatttgaatctccttcaatgctctgattttgaaattcatactgtcttgtgtctcctacaccagctctgcctgtgctgcctcacccttctctccctggagaaaggcccctccaagaggctgttgcttttctttgttggcttctggtagatgtgctcctgaaggcaactgtctcaaaggtgggaggaggcagcgcacttgccagtgtggctcgggttatgaaagcacaggcttttagtcccctgctgaggatcctgcacaaagcctctacttccagcttcagggccaggaaagactcagcccacacacccagttgcctcttgaccccttcagggccagagagagcaggtccactcactcaggactcatgtcagccttctccccacgactccttcagagccccagctctccttgaacccagctccgcactgagcacagcagtagcctcccttagaagaagggaagagagactagagccagagcagagggtaggtgagctaggttcactgggggagcgccagcatgaaccctcagacaatcacgacttccaaccaaagtccaagcaggagcagcttcagaaaacactccagccttctggtggtccacattgttcttccttactgttgatggtattttggtggaaacagtggagaaaaactgaaccactgaaa

SEQ ID NO: 345867 - DNA, 1000 bp, Homo Sapiens
attttatatgtttattaaagtcttttaaaatattcaaaatgatctattaactttaaaaggtaaaatccaagttataattaatatatgccaaaatttcatttcatatatgaacattttaattaaatcttgtttttatagagataacactattcacattgtaaatgttctatatccacctagttaccaatataaagaattggtaccatgatacacatatgatgcatgcatgcaaatttaagggtaatatgaaatgttaatattacaacatgttcctaaatcaccatctgcaacttttctgaatattatgttaattgagtagcatgggaaccaggaatgtgaacaagaagagaagcatgaaaaaggattcttggcattattgagaaatgacactttgttgtaaaagaatctattgcatttatgttatcttcagggaggaatttggtaagttttgttcttctcataacccagcactatttttctcttacgtcctccaagaattctgaagcaacatcatcataatccctgatttttatcaactttcaaattaggtcatcttttcttttaaggatacagggaagagatacagaggcacacttccctaggacctgagcagtgtggtcatgagagtgatgttaagtgttatagactatgctgggccagctctgagtgccacatcctgagtgataaaggcatctgtgtgctctttaatacatttatttgtgggtgattgtggtatgtggagccctctaaaatatctcttgcccagatctatgaaaagtactttatatatcacccatccaaatgtatacatcacattctccgggagaaactactgctaacattttggaatatttccttccagttattttctgtcccttgatttcacataggataatatactttacatacagtcttgtatcttactttcttgataaagttaccagtggaaagagatcttcactgactgaccacttggtacgggaattcctgtcagatgggt

SEQ ID NO: 345868 - DNA, 1000 bp, Homo Sapiens
ctttctttctttctttctttctttctttcttttctttctctctttccttccttccttccctccttccttccttcctttctttctttttgtttgagacagagtttcgctcttgaccccgaggctggagtgcagagcaaggctccatctcaaaaaaaaaaaaaaaatcctcacttccacactttcccacggtgccctgggatcttggctatttgctcaagcatttgaaaacatttcttttttaatttcttgaaagcttaagttcacaaagaaacttgtacatgaatgctcatggaagcttcatttgtaatggtcgaaaatgggggacaaggcagccgtccttcgacgatgactgattaaacagtggtgtgtccacaccaggaacacggctcagctatggaaaggaacgggctctgatacacacagcaacgtgaatgggtctcaagggcattttactgagtgcaaaaatgccttgtgaggttactgtgtggttttgtttatgtaacagtctcaaaggataaaattgtagagacggagagcagattaatggttccaggagcaaggaagacaggaaccctcgtgtggagctgttctgcctcttgactgtcaaggtggccatcctactctacagcagtgatacagttacggaaaataaatgcacacaaatgaactgagactggaggaaccccagtgacactggtgagtgtatgcatttatacactggttgagatactgtaatatagtgctacgtttgcagatgttatgacggagaaaactgggtaaaaggcacagaagatcatgctatattatatctgaccactacatgtgaatcttcagttatctcaaaattaaaagtttaacaacaaattctttggggaaaatgtttgacttggaattcacccccacatgtggccctccttcctatggagttgccatcctctctgtttttgttagaattgcctattaatgtttaatcagtcaagagtgtccaactgcaggccgg

SEQ ID NO: 345869 - DNA, 1000 bp, Homo Sapiens
gacggctaaatagtactccattagtatagatgtaccacactttcttttttgacagagtctcactctgttgcccaggctggagtgcgatggcttgatctcaactcactgcaacctctgtctcccgggttcaagcgattctgctgccacagcctcaggagtagctggaattacaggcatgcgccaccccacgcccggctaattttgtatttttagtagagacggggtttctccatgttggtcaggctggtctcgaactcctgacctcatgtgatccactcaccttgacctcccaaagtgctgggattacaggcgtgagccaccgtgcctggtcaatcgccctcattttcttgctaggaaataccctccaataaatactgggtacacgtcacagaattttctttccgtggtgggattcaaagggagaaaagtgcaggagtattccaataacatgctttctctctgggtttaaagcccacacccccaggattaggcgcggcttttgtaggactctgattcccaggcttaagcagaaaaacacagaatcctaggctcttagcgctgaaagtcagagaggacttgccctaccacttttaactgctgatctacagatttcagctatatggtgtgctggttgctgcttcagcaagttattacatgtctctcagcctcagttttctcacctgtcatatgggaaaaacactgcctggtggaaaagggtctggtgctcgggagtctcctgttttcacagagcttcctgagtcctttaggcaacattgtcctttgtcaggaaattcttcctattgttctcttagaccctctagcctcagggccgtatttctgcttttcagtcttggaaaaggatagctggtcacctccttggtaaccgatgtcatttcccttgcagcagggaggccaagttcctcagcctgactttccctcttctgggtcctcctctatgaaccctgtagatccaggaggtggggatggtcagatgctgagt

SEQ ID NO: 345870 - DNA, 1000 bp, Homo Sapiens
cccacaatccagagagatcctttattaaaatggttggcatatttacttgcagtcctttttttctgtacatataagaatatatggtttttacaaaattgggcttatattatgcatacaattttacacatgacctttcctcccaccttgtatgacttacgtaatttcccatgttgtcatgtattctttaaagatgtaattttaataactgggcattatactgaatcttatgaatttaagcagaattacttgattcttttcacattgctggacctctaggttgcttgtaaattttccgttttccaaatagcactgtgacagactttcttatcataatcttcgtatttctatctacttcttaaaagaagcttaaaagcctatcagtatttcacattcaaatttaaatcacttagtataccagtaaattcaccattggaaatctctgaggacaaaatgcaaataatgcatatgagacaaacaatactattttacgatcacttgaaatctatatttatccttctagaatagtcatctttcagggagcacattatttcctctaggcaaatggactattactaggttaatctaaatgcaataacatgaaacttggctgacccagatttctccaatatcggtatgcatgcaattacaatattctgcagaatgacaaatactcaaggctctcaaaaacacatattttatcatcctttcatttaaaacgatgtacaatggacgctaaaataaaacaaacaaagtttatagccaatgaaggttgatagcatccaaatctcatgtagacatatcagttacatatagtgtaacttaaggctttcttcgaattctagctttattttgtcacttccacagttattgagatcttaagtgctctcatcatattgaagttatttataattcctgttaagaattatatactcttaacagtgtagttttagattcactatagtctattataaaaattattccactttcaagaagctaaatg

SEQ ID NO: 345871 - DNA, 1000 bp, Homo Sapiens
ccaaagcccatattttactaagaatgttttaaactgaggcatattttacctacagtagaatccatcctttttaaatgtaccgtttgttgcgttttgacaaatggatgtacagtcctgtggcctccaccacaatcaagatgaaacgtgcccgtcaccccacgcagcccccttttgccccttcccggtccaaactgccccctttctgaaactaccacagccccggctctgattccagcgtagactcatttgcctcatctagaacttcatgtgaatgaaactgcgccgggtgccctctttcgtgtctggctgctttcacacagcatactgatttgtgattcatccctccaaagccctgccttcaaaacgcaaaaactggggcctaaagaaggttctgccactgcccacccacatcctccccctttttcccccagctagtaagtgtcagagctgagacaagaacccaggcctgctgactccaaccttgttgggataataaggattaagtcaagggcttggcccagtgctgggcacaggaaggcctcagaaaaatggctctgttggttactgccgttgtgcttataaaaatgtgagcatgggccaggtgcggtggctcacgcctgtaatcccaacactttgggaggccaaggcaggcggatcacctgaggtcaagagttcaagaccagcctgagcaatatggcaaaaccctgtctgtactaaaagctacaaaaattagccggatgtggtggtgcgttcctgtagtcccagctcctcgggaggctgaggcaggagaattgcttgaaccccagaggtggaggttggcagtgaaccaagatcctaccactgcacttcagcctaggtgacagagtgagactctgtcttaaaaaaaaaaaaaaaagtgagcatgaacctcagttcaccagatcataggatttcagaatgggaaggagagagaatccctgtccgtggccaaggtttcccagttagtggccatgccccaccc

SEQ ID NO: 345872 - DNA, 1000 bp, Homo Sapiens
ggcattcagggtgtttattgcgcttggggccagggtgtggagggagggggctctttgggcagggctgggcgcacggagcagctgacccctgcgggcactcaggggctggacccctcactgcaaaacaaggagcaggtgggcggcgtcccctgcctccgccccctcccgacgcgcagccccgcggttccccaggctgctgcggctcggatccgcccgggtgccccatcacccccgctgtcgtccctagctgccccgaaggtagagggccccgcggtgcagcccaccgagctgggagggcccatggtccgcggctccgcatggccatggtctactcacccgggagagcgcgcccgcacactggtctgcagagagatcgagcctgaggcgccaccccgcgcccccttccctgggacggaggcccccgacctgccccaaggcgatctcctcctaggaacaccggcctgggcaacgtctcgccctcccccgacccagacaggctgggtctgccccgggcacttctgtcccgaatctgagatcagtggagtgaccagggcctggcccttccagcaggggtgtgacccggggcctggccctcccagcagggctgccggcaccgctcacccgacttcggcagcaggacgccctggctggggctcaggcccacttggggcgccagtagctgcatcttctgggcgccttcgggaaacagctcgggcgctcgagctgaaggtggggagggcgggtaagctaaagggaaggggctggaggggcgaagagagggagagaggggcagggaggggccgggacccgcggccacagacaccaggagccagcggttccaccttccgcgtgcagaaagggctggtgcaggcacaggggtgacatcccagacccgaagcgggggtgcctgggtctccgccccgcagcccgcccaccgtagagctgcagccactggttccgcaggccccctttccgcatctccaagtacagcaaggcaaag

SEQ ID NO: 345873 - DNA, 1000 bp, Homo Sapiens; identical to SEQ ID NO: 161299

SEQ ID NO: 345874 - DNA, 1000 bp, Homo Sapiens
ataaggatgccactgaataatcaaagtaaatttatttctgaattacataaggatcatgaaacagaaacattaactctcatgttataaaaacagtagtaaaatacagtacacaggaatgtcaattgaatgacaacaatgaaagtacaatagcaaatgaaaaatagtaacttttaactttaaatacaaagtgaagcaatttaatatgaaattttgttaataagaaaaatatatgtcccatgtctttattacatactgtacaaaataaaatattgcacctttcatataataaatatatacaaagagtatgttacaaatgatctttcttttaatttaataaccttcaacaatcagatgtgattgatgattaacaactaatgggctggtgtgtcctcctcactgtcccccatccattcccaatcaccaaaccctccacatacagtagtgctcaacccagtgtcagtgaagctgaaattagaacaaaagagaccgtgtgctcagaatatggtagagaaactcagcaagcttgtccacagacacatccaaagccaaaatgcactgttcagttattactgaccaggaactaggctcagcagagcctgtggcaggtaactttgttgccaagaagatgtaggcagcaggtgtacaggcagctgagaccctgaataaagaagtatgaccacttatttggacttgtgtgccatctaaagacacaactggtagtatacaggggaaagaccccataaccaaatcagcttcagaacttacaatttaatgctagcctgaactcacttcagcaacaacgcttactccaaacctaacctccatcctgacactatcactaacaccagcactggccccaatctaaacccaatccaaccctgacctaacctggtcctaaccctaacccttaaagacaactctagccttaaccttaactttctttctcacctaacccaattctagctctaatcctaaaactgaaactaacccttaccctttt

SEQ ID NO: 345875 - DNA, 1000 bp, Homo Sapiens
ttttttttttggtgttcgtctttagcatttatttataattggaaaaactgtttgtttgtttgtttttctgagcaagcacagaccacaagcacgtcacaatcaattggctatacatgaatatttttgtcattctcttacagcaggaatgaaatagcaccaagagaggtgtgcgctacatgttacatagacaatctgtggtatgcaacaaaacccaggccacaaaatcgtaattagacacttcctgtctgcctcagagaggcaaagaaagctatgtggaccgaatgggagcacagacaggacagattgctgagggaagccaatgcgcagctcttggggctgcttttgcaggcagggaaacagcgggaaagcttcagtcccagctccctcgccagggaaggacggagaaccacagggaaatgtacagaggccagtgggacgagctttggaagcttggtcaccttcaggaaggcaacacccaaacactgcttgtggaaccaaaatcagtttcattcagtacgtttgggatatagaatgagactggctgagttttatttgtaaacagtagaaatcaaaggaagtctcttgccagtaaagtgacacattcaagagtcaaagtgaactacaaacagggttttctcagtgggtgtgttaagcagaaggggatactgacaggttgaaaaagacatgctacaggtcctctaaagccttgggtgagggtaggaagttggtccctggggcagtgagtgggggcggggggtggggaagcctgtgggacccttatgtcaaactgcgatttgggcaacaccaacttgacttggtcatagggatcaagtcatgtgcaccctctggttgtgtggctgtggagacagatttctttatactgcccaccacgcctagcacagtgcctggcacacgggcttctagcaagggaatgctaaataaatgatcccctgtgcattgtaaactctgatttatttgatctgcaaaaataaatgattat

SEQ ID NO: 345876 - DNA, 1000 bp, Homo Sapiens; identical to SEQ ID NO: 161300

SEQ ID NO: 345877 - DNA, 1000 bp, Homo Sapiens
tttttttttttttttttttttttttaggaagaaacaaacaatatatttcgcttaaaataagaagcacgtggaaaaagaaagactttgaaagagttggccaatgtcttctcacaattttttgtatagcttttaaaaatgtctgcatggctcagtggagatggtgtccacgtcttccctccacctggaacctgcattcaatccttcacaagtgctgtctatgtatgagaccagctgggtgactcggttaaacccctcgcctctctaaacaaagtatgtgatttaccctgaatcattcttcagcaagtactaaaaaggtataatttcttaaaatgaatgcgattgatcgacttttggcttgcaaaaatgacttctcattggaaaagagacacaccttagaaagatgaaaatgtgaaaaacaacagtcataaaatggaatcgctccatgctcggactctctgccaccagacatctgactgtgcagccatcagctgagaggctgcttgcagttccccatccaggacccacggtgcctggtgctaaggagcgactggactgaggaagcctctcatcaccagctgtgttgcagctttaaattctgccccagttgtggtatttaaaattctgtatgttaaaaaaaaaaaaaccaccaatctgcctacatcttcctagttaaagctagaaaggggaatggagagaagatccaacccagctgggcagagtggctgagcacgagacacccacaaacccaacgcggttctaggggttggatcagaagagtctctgtgtcgtcggtcgggcacaggcttgcctcctcgattctagacgtgccctcggccacagtgtctaatcttcctgtttcctggcattcaggtgttttacctctctgcccggattttgtacctgaggacaaaataggcaatgaggcggagggagatgaagaaaatcccgagtacgatgaagtccaggtacagcttggcattttccacgtccagctcccgca

SEQ ID NO: 345878 - DNA, 1000 bp, Homo Sapiens
gcgggtgtcactctttattgcggggtccacactgtgggtgctggggcccctcccactgagggaaggctgagcctctagccagggctggccacctggccacctatgagtccattcttctgtccccttaatctcaggctgagcatttacactggatttctgggggcctgtgagtcctccttgaccttcatcgcccactatcatgtgcttgagagcatcacaagtcagtagcaatgagccaggtgggtggtgggtcacctggcacagcaggcctggggctcgggtcccagcccagcagctgtggagtcccaggtggaggcaggggtggtggccccggccgcactgccctcaggctcaaggtccaggccctcgtagatggtggggagtgaggtgcgctggctcagccgccggcgcaggccgaccagcaggggctggggcagggaagccacatccacgttgttgcccaggtccacccaagccaaagcagggaacttggtggtgtccttgatggcatcagtgagcttgcgggcagtggcccgcgtcagtcggttgccgttgagcaggagctgggtgaggcggggcagcgcccacaggctgggcagcaggaggtgcagcagctcatcactcagccccgtgaagctcaggtccagcaccgccagcacagcaccatggctgctcaggtagcgtgtgatgtgttgcacgtcctgtgtcgacagcgggatgcctgagaggtccacagtctcccctgccagcagagtcttctggaggctgctcttgaggcagctctgggtcttcctctggcgcaggctggacccttgctgctgcttcgagtgaggggtgaggtggtagatgagctgtcggcagatcttgtccgaggacttccagagctcatagtcctgtgggagggcagtgtcaccatggtgaatctgagcccctcctgcccacctcagggccttggggagagggacccaggcagccaagtgtgtgtgtgagcacagtcatg

SEQ ID NO: 345879 - DNA, 1000 bp, Homo Sapiens
ttttttttttttttttgtgtgtcatctttttataacagtctactacagaataaggtacaaaagaacacttctggaaacagcagaagccaggtctgcaccactgaatttctcatccagtggtaaccattatatcaacagctggaaattaagaacaataatatacagtttggaggacatagtacagaactatagtttttttctgtatttggtaccaatatactaaatatataacaaaggtgcacttgttctaaaaataaaacaaacgttctagttggttagatactgcactttcagtactgcacatcacctaatacttttttttttttacaaaaaaggtaacttatgcaatgtttaataataagaaaaccaatagtacacgctaactcgattgtagaaaaagaagaaagaacccaaccaaaagccagaatagtcactttccaaaacagcccctcctctgccttcacaactagaggaagtaatcagaacggtgaggcgacttcagcaccagacctggctggacagctcccagatcctttgtaaatcctgaaaatgtcacaagtcaaaggtgtacgggtgggggcggggcagggaatgaaagcgttagctttttaaaaaaaactcatttaaagattttaacgtacttatgctcggccagcgagggtcattttaaaaagtaaattaaatgctctgtcctggaaaatgtaatggttaaccaaagggtgagaaatgggccgactggcgaggggtacctgtcataaacactttccggggactattctctatggcctcttgcagtcctggtgcttaatgtagacattttctttataatatactattgcctgagcccggctgagggtgggaatggggaggaaagggaagctaaaggaaaagtgaaagcttaggggtcagaggggaaggaaggaaactaaatcttaacttgacagctatgtacattaccgggccccctcccctccctttgctccgggaatcaatgcctttt

SEQ ID NO: 345880 - DNA, 1000 bp, Homo Sapiens
tttttttttttttttgatgtttcaaaggatttaatactttttacaatgtattaaattgtaatcaagagctcaatatttttaaattcaaatgtaattgagaatattatatagtataatcaagttaatagttaccttattttgagactaaataggcactatatttgattagttttcagtttgaaaatgaggatgacaaactttctccagtttaacttaacaacaaataaactaaaaacgtcttaaacaaaaaaccacatcttgttctttaattttagagacctttaagaacgccagtaagaagaaatcctcagactcttattttgaagtaataattgaaaatttagtatcaaataatacatgtgatgagaatttggactggatttactgaacttacactattattacaaaacctctcagagatgaaacctctccagtggagaggttttccaaatgaatattagaaaattttatgtgaagagtttcaaatgacaacatgaacacaagaatcatgtatactcctccagcccctgattaatatatgcatttccccatgcccctgcaacagagggccctcaccactacaacaatgctctgtagcttaaacatcagttgacactgcatggggcatggaccaagagtatgcttagaggaaaaaggcactgaattaatgagaagaaagaattatataagacacactagtaaaaaattttatacaacagcatctgaccttttctgtgtcatatttgttaaaattcacttaaagcaactcaactactaaaaatttctgctttcaggtttgagtctatgaaaggaattataaattcccattcatttagatcctggaataggccctctatagggaacagaacatctgaaaatttctttcaaactctctctgaggaacaaaaaccaaaattatatttctttggagaatcaaaagagtatctattggtttacttcattctctaaactgccttgcagtctttaaaattaccaacat

SEQ ID NO: 345881 - DNA, 1000 bp, Homo Sapiens
tttttttttttttttcagattttagtattttattatttccttgtaaaatggctgaactaaattaaacccttgtttcccatttgttctataatttatagtgaaactgagaacaaaactatctttataaatgatagctaaaagtatttccagatatttaaacaatttaaaataaatttcttctgcagagatgcaaagcatctcaacactggaatgaacaaatgccttaaattcaatggagtaaacctttagaatgaagaggaactgtcatttcacccaagccgaagacaacagccttatgcacttgtgtgctctgtctttgctgcttctcgtgtttcaagcctttcctgtgggatcagcacagcaaagtgcaacttaccaaatggtttaatgactggttaattctttcttctcccaatggaaaagcaatggcaacacaacagtagactgctggcttgacaatcttaaacgtgagcctttgcacatgtaggtttatcatcatttgagtatacgactaagcaagtcaatgaactttttttttttttttagcagtttaatttggtcctgagaatgttgcagtctttattaccccttttgcattaatccacttttctaaccaccttttaagctttaatttttaacactatacaccaagtctttgaaatcagtgatctgttatttaactctaaagcatttgacacttcttgccttaacagttttaaaaaccacacacaaaaaaactctgtaagtaatacagtaggccaaaagtttcatcctatctatcttgcagtttacctatctgatctgatctctgtaattatagttctgtcatttaaaatatactatttaaatctaatttttacatttcaaaaattatcttcagtagtaactaagtatattttctgtggattctgagaatgttatttttcagaatgtgagaatatatatgtacatttataatcttgtgactttaaagtctgttttcagatacagtatgtaaata

SEQ ID NO: 345882 - DNA, 1000 bp, Homo Sapiens; identical to SEQ ID NO: 161301

SEQ ID NO: 345883 - DNA, 1000 bp, Homo Sapiens
tttataaatcaaagtttgtacagtgttcataccattttctcttttgttgtccatgaaatatgaaaaacttagataacattaatttgtttacgtacttaggctacaaagggtcaacacacaagcttttgaaatacttaaaaacagcactattttacatagtaggtagacagaaagtacaggcaaactggtaaatctaactgatacacagattttttttttcagcaagctttattaatccatcatggatctactcatgtttgcagcagataccatgatttcagtatcagtgaagggagaaaaaaaaaaaaacagccttcaatgcctgtcacatctaagcagatctgaactactatgggactaaatagcctagctggtcaattgtttttacacatctgattaaaagcttcagcaaaagtggaaatacattaaaattcaaagtcaaatactgttctcctagtgcctcaagtagtttattggtagttattatccacatttctataaacattctaagtgaccatcactagtgcaggaatatttaacatatgaaggctccacatcaagctacttcattcattttgtgtgacacaagaatcaaggttccaaaaactgttatgccactgaaaaaaaaaaaaaacaaaaaaacaaaacccaaagccaaaacaaatcctgctagcaaagtgcatttcttttggtgatttttcagaacagctgttgctttagacataaaaaataagctgatttagtaaaatatggtcactggaagtaagtgtctgtagataagaattagataaaggcctttcctccttatagagctttttattccaatgtaaacagcaccagtgaattttcataaaacaggtttgttattttcccctcattttctataattgtaattcttatctgccatactgttaccatttcttcctctctataatcaggactggacagcccatgtaacactgttcaatttgtaaacaaaaaattaaagctcggaacacat

SEQ ID NO: 345884 - DNA, 1000 bp, Homo Sapiens; identical to SEQ ID NO: 161302

SEQ ID NO: 345885 - DNA, 1000 bp, Homo Sapiens; identical to SEQ ID NO: 161303

SEQ ID NO: 345886 - DNA, 1000 bp, Homo Sapiens
tttttttttttttttttttttttttttttttttttttttttttttttttttttttttttttttgagagatcataggacttttaataaaatttttaaaactaaagctgaccatttcacatttgatcttatttcagaaacatcttctgcatgtgccacagctaccttctgaattaacgggcatcatacctgtggtacattttcagaaataagggtctaaaaaagactggtatttacccactgcttcttcttggtctgagaaatcagttgcttgtgctgtgttgccagcttcttgatttcttctacaaattcttccttacacttttcctttacttgcttacattttctgtccatctcaccctgcatgttggctacagctttatttacagcttgtctcttttcttcttccatttcagaacgcagcttctccagagcttctcggacaacacgctctgtctcccgcttgtggtccgacttcatccggtctttgaagtcattgaagatcttggtgtatttgtcatggcacatgctctgacacacgccgtcgtttgtggtctgggtgctccgatgcagcattcttggtgaagaggcacttaacttctttgtctgagttgacacggagactttttcgatgggctgaggcatcgtgggtatttcctggctagaacttactgcttctgtttcaggctctggttcttcctttttgggctccacactttgattacgtcgtcctttctttgctcttggttcttgagtgacctttagctgctcattactggtggaggagatactggattctgcctcttcctcacctcggtcctcattcttagatttccaaaatctcccttctcgtaggaaacgctgatgcagctccagctcatcacaggcctttttccaacccatactgcgcttcacgtgcagccgatgaatgttgactgtgatatcttgaatgttttcagaaggaatccaggccctctggtggtggtggccaaagaagcgaacg

SEQ ID NO: 345887 - DNA, 1000 bp, Homo Sapiens; identical to SEQ ID NO: 161305

SEQ ID NO: 345888 - DNA, 1000 bp, Homo Sapiens; identical to SEQ ID NO: 161306

SEQ ID NO: 345889 - DNA, 1000 bp, Homo Sapiens
tttttttttttttttttggtactatttggtgtttatttagacacacaaataaacctggtggttcaaacagcttgtgctcctttttttttttttttgtcatatatatatttttttgaaaaagatcaacatatcaccagtcccccatggtttttctctactgagcaatatatacagcctattatatatatatatatgtctatgtatataatatatattttcaatagataactacattcaagtaatgaaacacaggatttacaatttccctccgaaggcagaggaaaagcagattcacacacagttcacagaggaagtaccatgagagcccggccagacggcagccaaggacgctctgggggcaggggcggggccagcagcagaagtcaccacagtcccactggtgcttatcgtggggagcgggcaggtgtgggtggagggcagggctagcctgatctgtccaggaacctcaatcttccaggaggtgctcgaatttggggttcacaaaggagaagccagcgaatgcagactggtccatggagtcgatgaggttcttgtcgctgtaggagaggcgcgccttctcgttcaggaactcctggtcaaagttactgtagtctctgggtgacttcactttgggcctgaaaggtggctccaacctccgcttttccagcagagtccagtttatggtcttgaagaaggggtggattttgatgtttccggtcactcccagcctcttggttggttccctttcaaagagcttctccaggatgtccttggactccttggtgatccagcggggataatgtggcgtgtccacacggatggactcgaagagttcatcctcatcatcaccatggaagggggactggccaatgagcatctcgtacagaaggaccccgaaagaccaccagtccacagagaatgtgtacttcaggccctgtaggatctcaggggcgatatagtcaggggtgccgcagaaggtgctggcccggctctccccgaa

SEQ ID NO: 345890 - DNA, 1000 bp, Homo Sapiens; identical to SEQ ID NO: 157858

SEQ ID NO: 345891 - DNA, 1000 bp, Homo Sapiens
ttttttttttttttttttttttttttttttttttttttttttttttttttttttttttttttttttttttttttttttttttttttttttttttttttttttttttttttttttttttttttttttttttttttttttttttttttttttttttttttttttttttttttttttttttttttttttttttttttttgcacagggctcaatgtttaatctgtccagcttcgtataccttataatcatcacagaagaaaggaggtatataaacattacttatctcacctctcatcatttccaaacaggagactgaggcagatttccattattactgaggttcccttacctacttctgtttaagaaacaaaacaactgtaccatagatcagtgctacaaatcgcaaataaatatgcagtgaggaggaaggcatagagagagagggtctggaggggagggggtgtaacaaagagactcccacaactggcttcctcttcaaaccccaaggaaagccttcttccatctgttcccctcaccacaggctgagcagaacaggtcagaagggtgaactggtagaatggagagttcaggtccctacagtgctgctttttctcagagtcaagaattgtgaaaaagttacagggaattggtttgtcaagactgagcccattcaacaggaatggggtaccaaaaaaaaaaaaaaaaaaaaaaaaagaatcagcccaaatctgtcactttgagattggagaaaaggccaacagtcatccattctctgtggtgggctatatcaccgattgcctcatcctcaataacatgtttggctaacaaggtggggaaagtggagaaccagcagtcactggctcactgttcccgggttctcctcaccccagggctatagaaattccatttttcagctaagagtgggaagaaataaaatatagcaaataaatattacttcaatattagcaccaaataaattatgtcacatagttggagatgagga

SEQ ID NO: 345892 - DNA, 1000 bp, Homo Sapiens
tttttttttttttttttttttttttttttttttttttttttttttttttttttttttttaaaatttaaattgcatatattttgaagtaatttctcactttttacatgttgaaaataaaagcttttcaaaaaatgttatttttgttgacagtccacatacatgtcttcaactatcttgtcttaatggttgatcaatgttcatctaaatgaaaaactcactcctctggctacccctccccaaaaagaaaagggacgtaatgttagacttactcaatacaggagtaacatttgccaaacaaaaagtcacttatgtaacccaataggcccacaaagctgaaaatcatcaaaaaattatgcaaaaatttgtatttagctccaatattaaaatattaccacaaatacaaaatggtattaagtatgaatatgacttatcttttcaaaaacattaataaactgtttctcttgccaaattagcccctaactagaacatctttgtgcatgtatcgctgagggcttatataacttacactaccctttcacagaagaatgacaaaattcttaatagaggcaagtctttgagtagggagatggggaaaagtaatgaaggatgatatgagacagagttggctgactgctattctgatactccacagatgaacactaataaagtaactacccatcttttctaactgaactttatatgtaatcatcatgggtctccagctgtactgtaaatgctacaaaggcaaagactaagcacctgtgaggcagaatatgctaggagaagagtatgtgttttaaagtcagacagacccagataaaaatcctggctccatcctgtactgttgaacctcataaaagtgacttcacttctctcagcttcattttccttatacgtagaaacaagaacaagcaatacatacctcaagaagacattgaaaggactcaattacttaataagacaacttaacatagcgctagcaaataataacattccttag

SEQ ID NO: 345893 - DNA, 1000 bp, Homo Sapiens
ccttaaataatgttttgtttaatgtcattttattataacaccgataagaaacaaaactgattcggcagggcatggtgactcatgcctgtaatcccagcactttgggaggccgaggcgggcagatcacctgagatcgggagtttgagaccagcctgacgaacatggagaaaccccgtctctactaaaaataaaaaattagccgggcgtgctggcacatgcctgttatcccagctaccaggaaggctgaagcaggagaattgcttgaacctgggaggcggaggttgcggtgagccaagattgcgccagtctcaaaacaaacaaacaaacaaacaaaaaaacaaaaaagaaacaagactgattcctgggcaaggccactgtctgtatgggttttctctgggtgctccagttcccacccacatcccaaagctgagcaagtgaggtgagctgtcgtgtctgaattgtcccagtgttgtgtgtgggtgggtgggtgtgggggtgtgtgagcaccctgcgatggaatagcaccccgtccaggcctggttcctgccctgcacactgagttgctggggtggactctggccacgcacgaccctgaactagaataagcacattagaatatgaatgaatgaatgaatgaatgaatacaaattattgtaaagtaaaaattcataaggcatacaataatcatccaaatgcatgacaataaatgatgcggtatgagagggcctagcaagcctgccacattggtgactgttctgaacttcgtggtggtaggaggtgctcctgacaaggttcgttttgcaaacatttattccttgatctaacccaccagcaggacaaccaccatcacatactgattcaccaaaaattgggtaaataattatcttacttgttattaatctcttttaaaggtatgtgtagcttgcctttatttcaatctttactattagaattgtattggtctttatttagaagtgtggtgatctttttgtgaccagaa

SEQ ID NO: 345894 - DNA, 1000 bp, Homo Sapiens
ttttttttttttttttttttttttttttttttttttttttttttttttttttttttttttttttttttttttttttccagttttccaaatatgttttaatatgcatatcatccaggcagcataatgttatatttcaaagacagatttatccattgaattattgtttttaaaagttgggattctctacatagaacatattttctgaaatttcaagaatattttcaggtaaattaagaattaatttcttctaagactatccaatgtgtctcaatctattccataatataatcaatgataaagattcacatgtatcaccaaattcgaggcagcttagttgaaaaaatttgaaacagcttactgaattccatttgctgattctgtggtggcttcctcgatggcatgtgtgctcctttggatgcctgcaggggtggtcactgcaaagtcgtcatctgtgccactgggagttgggaggcggcctgctggggttccctgggtggcaggatttacacctgctcctcctgctggaaggcttccatcctggacatctggattagcccctgcctgactggtgggcaggatgcctcccgggaacaaggaatggatgatgaggctcgtgaagatttgtggcaattcctctgagcttaggatagtgccctgggctccaagttgtgtgacaaaaattggtaacacatgtgggtgcagttgctgttgtacattcaaccctcccagggtcaatgggtgggtctgggtaccaggtgtcattcctgcagcaggatttaacagatgcagatctggccccagtgtgagcatctgtgttaatggtatcagacttaaagaaggaaagacctgatttgactgctgttggtttggtagtgttccctgatccggagccagttttgtgggagggagtcccaaagcaggtttgagctgtggtaatgaccgagttgatcctagaagacaaaacagtagaatcgtactcctcatgtttcagattgctacc

SEQ ID NO: 345895 - DNA, 1000 bp, Homo Sapiens
tttttttttttttttttttttcacaaagcagtcttcatttcttccacacatcggaaacattttcaattacagttcagcttctctgaggtccacatcaagtagtaaaataccaagagcacagaaaagctgggttggaggaaatctctgctaatgaggcactaagtgagaggcttcacttaacaattccaatagacaagctggaggcccatgcaggtccctgagaaaaagagtcattttggcttatgccctgaaggaattctactctgcactttctccttagagtgtgcctatgaagtgccactgtaaagagaggtccttgctgaatggccactagtaaaatcctaacagagagctaatctgcttggggagcagcttttttaatagtggtgattttcttctcagccagagcttctcactggaattaaaaagaccccagccacactgacagttgcaggttccacattagtcagactgtttcctgggaggtactcttagctggtaagctgtcatatcctctgatcagtcaggatatattctagcgggattctgggccttcagctcagcccaggaaagctcagaaatgcatcaagcaaatgagcagagctagaaggtcactttagagagcctaaagtgtttgaagacaagttattccaattgacttgggtaagaagggtgtgaatggtatttctgaccctttcaactatatagtcgataccccctgtttccaaacatagtggtaactcttaagaaaataaaacctatttgggagttgctctttcttctgataggcttaacagaaaagtcaagaaaatgtactgatgggtatctcacccatgaacctcatcctttcgttcaatttcatggttactcttggcaactcccaactcttcctaaaatacccagaaaatagaatcagacaacactttgccttgcttcagtctcaaagggtggctctgagttctcaaccctggtccgagggtgctggtgacagcagacacaa

SEQ ID NO: 345896 - DNA, 1000 bp, Homo Sapiens
tttttttttttttttttgagacagagtgtcactctgtcacccaggctggagtacagtggcataatctcggctcactgcaacttctgcctccccggttcaagcaattctcctgcctcagcctcccgagtagctgggactacaggctcctgccaccacgcccagctagttttttgtacttttagtaaaaacacgtttcactgtgttagccaggatggtctcgatctcctgacctcgtgatccacccgcctcggcctcccaaagtgctgggattacaagcgtgagccaacacgctcggcctggctttttttttttttaacatgttccatatggggcagggctaaatgttaggcagtgcgcccatagtcactgccaattactttttttttttttttttttgagacggagtctcgctctgttgcccaggctggagtgcagtggcgcaatctcagctcactgcaagctctgcctcccaggttcatgccattctcctgcctcagcctcccaagtagctgggattacaggcgcccgccaccatggctggctaattttttttgtatttttagtagagacagggtttcaccatgttagccaggatggtctcgatctcctgacttcacgatccgcccccctcggcctcccagtgctgggattacaggcgtgagccactgcgcctggccaatcactgccaattacttttgaacagagaacatcatatgtaattagaggaggcgggatattgttggtgcagctatatcattcaaaattggcagaagtcctgaagctggtggggctaaaaaaaaaattggtggaacggcgtatgttgagacctggaatagcttctctggaaggtgctctaaggcagggggtagagtagtacataggtagtcaaatgatgaggctgagggtgtctaccaataacacaacgccacagagcttccttggcacacttcccgctgctgctatgtgggatcctgtctggctcgcttaggattctgcaggt

SEQ ID NO: 345897 - DNA, 1000 bp, Homo Sapiens
ttttttttttttttttttttgtctggaaacattttttattttcacaactcgggtagggggaaggtgctgacattcggggctggattgttctctgggacggggccgtcctgggcactgcagggtgctgctgagcagtgtctctggcctccacccactccaggccaggagcaccccccatcgtgacaaccacaatgtccccaggcatcgcccagtgttccctgggggcagttcacgctgggtgagcctctgctgcagcagaaggctgtgtttccacggagaagccacttaactccctcactgaccaccggctggaggcctcatgcatgcctcgcttgaggacaagctcatgaggaactctagctactcccaagagacagacgttgatcaggagagatgaggcagatgcacgggagctgtgaaccaggcaccattttccaggggtgactgagagcctggccctgcagtgggtgaggctgggggctcgggagtagggacctcatccgcctgaccagcccgaggacaggagaacggcgggaaaggtttgggtgccatgagaaggccactgtgatgagggggagggaagagcaagctccccgcagtcgcccaggcctgcagtcagagggtgacgggggtgacaccatgaccatgggggaaaaggggggctggcagtggcctctgcgatgcaggagatgtcagagatgaccaagatctccatcctcgcagtgcagatgtcagtcttcacacaccgcgtaacgaacgaatgcagactcagccacgcggaacagcaggaatgcggtgtctcggctctgaacggtggaaatccaggtgcgggctagctgggccctacgctccaggtctcgcagggtgtcatcagggctgagatctcactgacacccagggtcctcttccaagctcactggaggtcggaagagtccacctcctggtggctgtggactgaggccccgtgtcctggctggctgttggcggggatggctcttgg

SEQ ID NO: 345898 - DNA, 1000 bp, Homo Sapiens; identical to SEQ ID NO: 161308

SEQ ID NO: 345899 - DNA, 1000 bp, Homo Sapiens; identical to SEQ ID NO: 335345

SEQ ID NO: 345900 - DNA, 1000 bp, Homo Sapiens
gaggagttcaaagtgaatacatgattatttttacttctgtacaatatatttaatatgaggtaaaactatcacatggctcaaaatctagtcttaaaaatataaaaaaggaattacaaaacgctctaaatgtgtagcattttaatcaagcctaagtccatggtgacaactgtgaaagtcacacatccctacatatatgcatgccggcttgcctgttaaaattccagttaaagtgaattttcacacactctttaaaaagattaaaaatgacattccttctatgtttgttcttctgagtttatcatgatctttcaaaggaattcagctacatactgtatttttgggggggccttaatttgacctttagaaaactgaggtggacctaactcaaaggagaggtaaagaagctgagaaaccacaatcataggaaaaaactaagattcccaggattactgtgggcatgaacaattacactatcatccctatcccagaaaaacttaaaaaaaaaaaaaaaaagtaaatccacatcaagaaaaagtatgtgtattgggtaaagacacatggtgaaacatttttttaaacaagcatctgaagtggacaatgtgtccaaacatatgtacatccttatctccttataaaagtgtttcataactcaagcctccatattttttataaagatgtatgctcctgcacctcgagagtggagaacgttgcaggactaagcaagttttcacaaaatgttttcaagccctcgtttgtataactgttctgacactgggcagcagtgaatgcatacacagaaaaataaaggggatgagatctttcgtttctgaaacatttccctctcccacataaaataacaaagggacgacaaaattgccataggcttgtcagacaagtctaaaagaagctgtggtttctttctcttccctatatttcctcttcctttgtttaaatatccctgagatggccgggcgcggtggctcacgcctgtaatcccagc

SEQ ID NO: 345901 - DNA, 1000 bp, Homo Sapiens
aaagtaaaatttttttttaaaaagtgcttgtaaaaattaaagaggaataaaaggggggtgaacagccagtacgatagtgcatgcctgaaattccagtgctttgggaggccgaggcaggaggatcgtttgaggccagtagttggagagcagtgtgggcaacgtagcaagaccccatctctacaaaaaatttaaaagttagccgggcatggtgattcacacctggagttccagctgctgtggaggctgaggtgggaggatcgcttgagcccaggaatttgaggctgcagtgagccatgattgcaccaccgcacttcagcctaggtgacagagcaagggtctacctcagaaaaaaaaaaaaaggaggagcaagcacgtgttgatgggtggaaatccagccagaaatgctgaggctgaaaagattgtctccgagtttcctggtagccaggggaaaaggggaaattggtacgttggtacgttacagtgcctggttaggcatgtcttctaaggggcatgcctgtttgtgacagtgtctctgcccttcacacatgagggtgtgtgtgagtagcagagagcagagacagcacagtgtctgggaagtaaacagatgatcttctgggtacccagggcagcagggtgtcatgctcgttcatgacagtgtctccaagcaagtgtgacgcgcgcaaagagaaagaaagcagcgttaaactttctgagtataaatagctatgagcttcctggcagccaaggagagaggcgaaataaaagtcagagtctccttagtgcctcctcaccagtgcctgccggcttgtgacagtggctttgactgcatgcagaggtgtcttaagcgtgtgtgggagggagtcacatagctgcacaggtgggacgtatttcagagctgcctggaagccagggtgagaggggaaatacgttgacgttgaggctggtcagatgtatctttcttgctgtgtgtggccggggctcctgcaggggctcagccagg

SEQ ID NO: 345902 - DNA, 1000 bp, Homo Sapiens
aggagaggggatttttatttgtttgagacagagtcttgccctgtcacccaggctggagtgcagtggctcgatctcggctcactgcaacctctacctcccaggtcgaagtgattctcctgcttcagcctcccgagtagctgggattacaggcacccagcaccacacccagctactttttgtacttttagtagagacgggggtctcaccatgttggccaggctggtcttgaactcctgacctcaggtgatccacctacctctgcctcccaaaatgctgagattacaggggagagctaccgcgcccggccaggagaggggatttattaggcgaactggcccacacacttatggaggctgagaagtcctcccataggctgtctgcaagctggagacctagagaagctgtaagtgaggctcagtccaggtaagaaggtggttgaaccaaggaagccagtggtgtaactctcattctgaggctgactggccgagagccctgggaggcctctgtggcaagcctgagtccaaaggccgaagaacctggagtcctgatgtccaagggcaggagatgggtgtctccctccagaaaagagaatttgcttgtcttctccctttgtgttccatctgggtccccaaccaagtggatgtgcctgcccacgctgagggcagatcttcactgagtccactgaaaacatcctcacacactcagaaacaatgcttcgccagctgccaggtacagtgtgtgtgccttagtcccagctactcaggaggctaaggtgggagaaacgcttgagcctgggagctggaggctgcagtaagccatgattgcgccattgcactccaggctggctgacagagagatccttcaggacagggggttctgaatttctgcgctagggccccgccggcttgggtgggcttccagcgtgaatcctcggcctgtcgtccccgtcatcaggaagcccaacagggcgcccgcctgccctctgtgtcctccccgggct

SEQ ID NO: 345903 - DNA, 1000 bp, Homo Sapiens; identical to SEQ ID NO: 161309

SEQ ID NO: 345904 - DNA, 1000 bp, Homo Sapiens
tttttttttttttttttttttttttagaaagaagttgtttaccactttaatagggctgtccaacatttggtcacatagatcatcttgaaatctaattgttttcatggccttcctatctcacaagaggagacctgaatactcttggaaaaagcaaaccaaacatagaaagagatgccatgataagacttgttgctacagcactatgtagttaacgatgccagactttggatttaatcagaggacatttctgcagtctaggacagctatacaaagccttaagacattgtatttacaggacttattcatgtagggatccatatcctacccataactctgccagagtcttaatagcatggtggagtggctcccttaagaatcctcattttcttctaagtggaaaagctagtagttctaaaaatattttcctggaagaggttagaacggttattatatatcaattgaatataaagtatgactatgtaagccaagcttgcatgctaatattgcacagggtagaaagcaataaaacaggacgatgtgcttccttgggccatctggtagaagcagaaggaagttcttgattcagtatcattatgatgcctcaaattccaggagtccacctgtagctggccttcccgtgtcagtgccatcttgaattctcaaaagggcacatatcttccttgccgttagaaaaagaaatgactaacaaaacaaagcaaaacagacaaaacatccaaaactcaaaggggtacaccagccgtctcaaactgtggtactgttcatttcttgaagagaatagataatatttcaaaatattatatatatatatatacatatatttcaaatggtacaaagtaactatagattcaaattagaagatagttgatcgttcttcatgatgcccaaaaatttcactgagaaaacccttttttaagcccactttccatggtgttgccaaaacgctgtgtcttctcactgtaggatatttcgttacacacag

SEQ ID NO: 345905 - DNA, 1000 bp, Homo Sapiens
ttttttttttttttttttttttttttttctgggcccaaacaactgtacattgtttattgagaacacccgtagatgggaaggagggatgccctgtaccgcatcgtggccaccactgactgggagccaggcccagagagcactggcagagctgggggtgggcttcccatgacacactgaccatctcggagggtgggaggaatgagaggactaggcctaagaccctggtgccatgctacaaatggggactgattggcctttgcctttcaaaaacagagggtatgggtatgcggactaccagcaaaaaatagaaacttgatttttttaaaaggtcctcctgtacataacaagacagcatctgctctccagggcccgggactggcagcggggacctcaggcaggcaggcaggccgaaggcctccagggaagatcagtggtttggctgagacagtcagctgcacaaaactggccagtcacgagcacccagcgaaacttcatccatgctctggcaggacaggaaagcacccggccccttgggaatatacaaatatttgccatattctctttgcttgttacaaaaaacagttaagaaagcttacagcagattatttacaaacagtatcctgggatatgatgaaggcagaggtgggctggcttggaggataggatctgtgggggcagaggagccacagcagcccagagggtcccaggctgggccttctccccaggcttcaggctctgcaaggcactggactctgctactgagaaggaggcttaattcttcttgtggagaaacttcattttgttgcccaaacctcggagaaacttattcattccactctgctcagtgtctgggagttcttctaagtactgctccactcgctgctcaaaaaggccctttgcccgacactttcttagctccctgtcttggatgaagccagcaaacatctgagactccataaaaacctcaagaaagcggcggatgcttttggaggccacagat

SEQ ID NO: 345906 - DNA, 1000 bp, Homo Sapiens
ttttttttttttttttgcaggttggacgagtttgtattaaggcattctgactccttcactctccccagctccctccatgtcaatcccttggcagaaacactgtagacttataaatggatgacagatgcaggctttgagagggaccaaaaggaacactctccactggggtgtggggtcagtcatcctgggaggggctgacattagaggggcaaagctcaagggcttacagccacagccacatatgccatcttctcctgtgcaggctcattatggcatttctgcagcttcctcaggagcctccacagaatccaggtcgtgctgggaagctccaccgacagcattctccacacctcagccaggtgcctgttatacggcactggatgacacagaaggaagctgagcactatatctgtgtacttgggtctggatataaataaactcacggtatttatgatttgttggcggactctaggctggctgattatggataactgggcacagataactcccataatttctggcaccttctcaaattgggactctgtatttttcgccaaagttagcagtaattctcctgctgatcgctggatgcagggatgtttcaggtttttcagggtatcaaatgtagtcattataaactggcagagctcatttgaatcaagaaaaccttcaaagacctgggcaattctgaagggacagttgtagaagcatttagcggcagagctgtggagctccaggaattctcgacattttgtcaatgctcttttcaagttttgctgatctttcttgtcatgagtgatatacttcagcctcagggtgatatgcagcagggagtgaatgccctctgcagcctcctcagccaccttttcctgtgggtccccacagagcagtgccatcagagccactaggtgtccaagtctttggaatcgcagtggaagcttaataatggtgtcaagattttccaaatgtgggtcttttaccaccaaactctggagcatct

SEQ ID NO: 345907 - DNA, 1000 bp, Homo Sapiens
ttttttttttttttttaattaataattataactttttctttatttgtcatctttctacagaaacgatcaggagttagccttaccaggaaattatacacattatgaatacaagttttaatagactactgattagactgtcatgttgcaggtatttctagaacatgatatcacaaattaagccattaattccaaaacagtttattaacaaaaaagtacaaagaagtacaaatggacatcctatttcccattgtggtccatctgtctatctacctttcagtccatgagatggttttttagagctttaagaatgggtaaaatacttctcctgtttctaatgggccctaataaccatcctaaaccaaataattgtgtatttaagttacacagtccaattttttaaaaatgttcaaatctattgttataaaagcctctccccttgcaatacaccaacgtacccaaactgaacattggcgtcaacatccataaatcatatatatatcactagtatgtttgctttgaaataacagtttataagtgaaaacttagatgtaccaaaaatgattttcatagggatacactaaaaacacttcaagtcaaagtatcttgttaactgaaataaagtgaggtacatggaaacattcaatttattagttgtgctttttgcattgattttaaatcaaagctactcacacatcaaatcttattgctattacttcagtttcttcaagaaatggttccttttcaagttatttcaacaaatgtaaggttgttccatactcctctttctacaggcctgaagaacttctctgaatcatggtaaactctaatactttgtgatttctctcacagtgctccttaaaatactaatgcagatggagagatttagtaaatcatcatgttcagtaaataatgactaatttgctctttctgctatggctcctcaagacagaacatgtggttttgctctctgatggtcttgaaagccttgtgtagaatttat

SEQ ID NO: 345908 - DNA, 1000 bp, Homo Sapiens
ttaaaataattgtggaagttttcctataacctgtggatgaagtgcagatcctcctgaagaaaatgaggcagttaagacctgctgagatgtggttccttgggggaaacagaagaaaagtggggattcttgtaacactgtctgaggcagatggataaagggcattgagacgtcagagccaaaaggtgcagctgctccccctgtagggggaggtgactgaaaatcactggggtctgaagaagtgatttgtgaggaatcactggaatattctgggcttcctattggccagttctgtccgataggctctaccacagaaacggtcaattctggggcatggtaattatgcttttcttcagtcacaggctgcaagtagccatgtaatccaactgattgaggaggcagttcttcttgattcaagtccactgcaacctgccgatttcggtaaacacgctgaggtaaaattccacctccttctcctgaagaggagcttggtgtgtgaacatgaaattcaaatacacagttgcttctgctctcattgttatgagttaacacagcaggcgcagaatgaggaacaaagacagggtgaaatttcaaacgtgtagcatctgtactgataggtgcagaaatactagagaggggagatcccggacccaatccagaatctaatcttagattctgaaggtgtcctaccaggaaagcctgtccagatggaaattcaaagacagaacttgaagtagggcccccttgtactggcttctgttcaggtatctgtttcataggacttgacagtactgatgagttgtatggaatgccctcatactgttctgccacccgggcctggtaatgtaccccagctacatacactgcttcctgaggaataaaatagtgagcttcttctggaagtactagtccaggtctatagtcactgtaaacttgagatggttcaaacataggatggacctgtatctcacatgactctccagttactctactggctgtagta

SEQ ID NO: 345909 - DNA, 749 bp, Homo Sapiens
ttttttttttttttttttttttttttttttttttttttttttttttttttttttttttttttttttttgtggtctaaaataaacttttaattgcacatttgtgtcttgggttatctgtggggtgagaaacctcctcacttccaatcccagctatctgggtacaatctggtgttgtggtctggctgtcggcgaggggtagaggtgggtgcaggactggcccccgagtctgcaccgacctcttcagggcagggagctcagaccatggtagtacttgcactgcttcagggcctcgctgaagccctcacacagggacaggtcactctgagtggtggaacagtccaggaactgcctgatctcgtaggcgcagggccccatctgcaggggctggggggcagcgggggtgggggcctgctggacagcaggctgggagggctccgagctccccccgctgaaggctccggtcagggcgctgcccatgacgtgtcccacagccgagcccacggctacccctgcggccgtggtcgccatctgagccatgagccccggctggcccgaaggggcgggggctggggcggctgccgagggcggtgggtgcgcgggcgggtgggcagagggcgcggctgggcggctggctggccgggaggccgcgctgcggcttccccgaggcatggtggcggcggtgggacccgggcgaccttagagacggcggcagcggtgctgtcgcggggacaaatgccgcagcgcttgtc

SEQ ID NO: 345910 - DNA, 1000 bp, Homo Sapiens
tccacttgcttgctttttaataacagagcagagagaatacaaggccaggagcggggcctggaggaaaacaggacttggggtgctcctgtgagagcggtgggttgagatgggagcccacgggggctgttaatgcctagttcagaggatgggaaaggcagttggagagacgaaggaaggggaaacgccttcatgtcagcaatgagggtgactctagtgacggaactagtcttgggtccctggggcaccactagcctctcggcattggtggtttctccttactcttcagacgctgccaactccatcccccagggattgtgaagggggttccttctggctgtgacagtgctgaacgaggccagagagtgcagctgcctggaggcacaagcctcctcctgatccagggggctccagggagaccaaagcagctgggccctgccaggagtgagaaaacggtcctcttcctgtggataggttgctctctcctcttccagatcagggtattcattggtgctggggaatccacagccgtcttcgccaagcaccactggctcagatgcagccccagagctgccccactgggccttcttcagttcgttgatgatgctctgacgccttcttaggtcctccaggtggtaagtgacagccctcacccgggcggggactcccccaaggccctgctgctgcattccttccaaacatggcctcctcttctttcttctccaaagcatttcagggggtgggagcagcatgggtggaatgtgctgctcctccagccaagtgggggtgggcctttgattaaggttcttccagaagacatctccataacgctggggcatgggtctgaggctctgggaaggcaaccttgggggtggagatcggctgaccaccctggaacacttggcaaaggggatgaggttgactccatcatcctgcacctgcatgactggacggggctgggtagttagtctcctttttggtgcgtgcggaagcggcagatggg

SEQ ID NO: 345911 - DNA, 1000 bp, Homo Sapiens
ttttttttttttttttttttttttttttttttttttttttttgcagttacaacatttaccactttattataaaggctacaactcagaaacagccaaatggaagacatgtataggacaaagaaagatgtgggggtggaagaggttgtatggagcctccatgccctctctggatgccattggttgactgggggaattaattccctggtgcttccagcctgcaagatgagctccttcaaccagcaagtccccagtcaaaagggtgcacggggtgtagagtgggtgaagttctgctataccacaatggaggctgaggctagcagggaaacaactattcgtctctgaagcaggctgcgggctttttgcagatccagtaattgtcaacgtcacatcgattgtcgttccagccactgccactaaattccgcacagtcttcattcccgctattgttgggttctccactgttccagtaccgctggaagctgggtgacagaggtgagccgtccacccattgccacgtgccttcctgatttaggtctgaaagtcccatccaggagaagcggttactcctggaagtctgcagctgtaggaagttctgctcctcagcagttttgattacgacgagctgggccctcacttcctggcaggcggtgacggagtcgtgccagttccgctgggagttagacatgaagtaacagtttccttggaagaatgtccagtccttgggacagtggcggcacaggcgttcaaatgcagtcttcaaatcggtcagttcttgatagatttgctgctgcttggactggtctggcaactcacccactgcagccttcagctgggtcagctcctggtagatctcctgcagcttggatttctctggcaactcacccactgcagccttcagctccgtcagctcctggtagatctcctgcagcttggatttctctggcaactcacccactgcagccttcagccgggtcagctcctggtagatctcctgcagctt

SEQ ID NO: 345912 - DNA, 1000 bp, Homo Sapiens
tttttttttttttgcagttacaacatttaccactttattataaaggctacaactcagaaacagccaaatggaagacatgtataggacaaagaaagatgtgggggtggaagaggttgtatggagcctccatgccctctctggatgccattggttgactgggggaattaattccctggtgcttccagcctgcaagatgagctccttcaaccagcaagtccccagtcaaaagggtgcacggggtgtagctggaagttgagcagatggtagtttgcatggatgagataaagccccaggggacagggcagctacacatgaatccaaatagtctaatctccaaaaggaacagagagtggattcatacaacataccaagcccgccccctaaatgcatcccactcaggtcacttataaagctccaaggatgggccaagaacacaagctctacaccagggaaacttggaggcatcagaaggacagaataagacccaggttcataggggatgaaaaatcgaacagagaaccgtctcagggcatttgtgaaggtccaaggatggagagaagaagcgctggcttacaagtgggtgaagttctgctataccacaatggaggctgaggctagcagggaaacaactattcgtctctgaagcaggctgcgggctttttgcagatccagtaattgtcaacgtcacatcgattgtcgttccagccactgccactaaattccgcacagtcttcattcccgctattgttgggttctccactgttccagtaccgctggaagctgggtgacagaggtgagccgtccacccattgccacgtgccttcctgatttaggtctgaaagtcccatccaggagaagcggttactcctggaagtctgcagctgtaggaagttctgctcctcagcagttttgattacgacgagctgggccctcacttcctggcaggcggtgacggagtcgtgccagttccgctgggagttagacatgaagtaacagtttc

SEQ ID NO: 345913 - DNA, 1000 bp, Homo Sapiens
tttcttttttttttttttttttttgtcagttaacattttactgggtttgcttctgccctttgcatgtggaatgggtgtgccccaccgctgcccgtcccaccccaaccctgaacatcaggcttcccgtggggcccagccacggaacattccaggcctggagcggccatctcatttgcatgccgcaaggttgtggctcaggcggcttctcctgggggcctggtggtcccaggcagggggccgggctggggactgctccgccgaaccacgtcccagatccaggccacaaaggcggacacctgcgtgtacacgtcgggggtcttggggtcgccgcaccagaggcccgagaaggaaacgaggccgtgagcccggttcctgcacaccaggggccctccggagtcggccgagcagaagccccgtctgtggctgtccccactgcgggtgcagagcatggtaagtgtcaggtggcccttccaggagctgttgcagacgtccgggtccagcactcggaccttggcctccatcagtccaggcggcagctcctcaaagtcagacacgaagccccagccagccacccggcaccgtgtccccgctgtggggggcctggcccttctccctggcagcctcagcagccccactgcagggcccaggacagcagagccgttcagccgcagcaggcagatgtcgttggcgtgggtcatggggtggtagtcggggtgcgtggtgagagcatcgatgccaaacacctgctgggtgggctccgcagtactcaggacgtgggcgcccagcaccaccaggccagtgcggaggtctctgtggctgaagcagtgggcggccgagaccacccagcgggctcgcagcaggaagcctccgcagtgatgttggcccccgaagcgcacggatgccatgtagggcctggagtggggggtcacctcgtggcccccgatgatctgggccccccaggagcctgcggggggcttcacgggcagcatcagggcggtgg

SEQ ID NO: 345914 - DNA, 1000 bp, Homo Sapiens
ttttttttttttttttttcatgataagatgtcatgtttatttttaaaattccagaattttcttggaataaattctttcttttaccccatgaaaaacttaacaaatgactacattctaaatgtgatactaaacaccacataatgtaccattagcaattataatttgctaagactttgtagcctcttgatatttctatttcggttcatcttcatctttctgttgtttcttatacagtcatatttacaaattcttctttaagtcttcaattcacacaaaaagcctgaattttgacaacataatcattaaaattgactatcatgtatgattacaaatttatcattaaatatttagaagtgaatattgcatgtatctgtgaaagacagatactataatagtttcagattattggctaagtcaaattaaagttagatcctacttggctctagaagatggaagcaaacatctcaagttaacaattttactgtctaagaaagtttctcattttttgagaccatgtcctcatggctatacataacagtaatattctgatccaatgtaggatatagggaaaaatacaaaattatttcaaaataaaaatatgttgaatgtttgtaaaaattttttcttccttcattctttgtttgttacttcattctttcctcttttctttccttccaaaaatattcactggtcactgaatatgtcccaggcattgttataggccctgataaagtgctgaataagacacagaaatgcctgtttttatggagcatatatttttgtggagataagatgagggcaacaacaaagacaatacacaaataaataaaaaggtaaaaagcagtaatagtaacttctacaaggaaaagaagtcagtaatagaacaaaaagcactgggttgcagaagagggatttatttagatagagtgctcagggaagagtattctgaagcaggatttctatatgagacccccgaagtagaaaagcagttagtcattca

SEQ ID NO: 345915 - DNA, 1000 bp, Homo Sapiens; identical to SEQ ID NO: 246618

SEQ ID NO: 345916 - DNA, 1000 bp, Homo Sapiens
aggggaatgaggttttattcaggaagagctcaagatgggaggggagcccctggggttgcaccctctcggcctcttgagaccaaggctgatgggacactagaaactaatgactgcagcatctgagcttcctcggagtcatctgtgggggacacaggggcggcctcagagtcacccgtagcggggatggggcagcctcagtgtcacccaaggtgggcacgggcctcagagtcacccgtagggtacgggggagcctcagagtcacctgaggggggcacgggggcagcctcagagtcacttgtgaggggcacaggggcatcctgagagtcacccgttgcagggacgggggcagactcggagttgcctgtcgggggagacgggagtggcctcagagtcccctgtggagggcatggaactggcctcctggtcggtcactgtgggcagcgccagataggtgagggtccagtagcgcaggaagttggttctcaggctccgcttcatggagctgctgcccatcttcttggtgatctccaggtagccgctgttttccgtagtgtagggttcccagtgtgtgggcacagccgagtcgcccatgttggggtccctgcagagtgagaagaggctgtgcaggggctggggactcccagggggctgaagcctgctctgcacctgcacgcctgagccatccccaccctctgagctggccctgggcaccatgcccctcactgcatactgggcactggctgtgcacgtgcacgggattggggctctgccagtaactctcatcctcaaacacacatggattccgatgcagggggaggttaagtgacttgcccaaagtccctccactggcaagtgagggaacaaggcctcgtggtgggaggcccttctcggctgtggccctccgccctgcactcaacccacgtcttaccctgttttggcaaagttggtccagtaggcggtcatggccttagagactgtcctgtcttggggccggtagccc

SEQ ID NO: 345917 - DNA, 1000 bp, Homo Sapiens
ttttttttttttttttttttttttttttttttttttttttttttttttttttttttttttttttttttttttttttttttttttttttttttgacgtggggaggtcatgctttagcgatgtttatttaattctcagtggatttgaaggaacatatcagggaatccaaagcaccagtgcagaatcccacagctcagggaacctgcgccaaggaggctttttgatagagggaaacagtaggaggaggcagctgggaatgaggatgggggaagactacagcagtgtgtgactgtggtctacaacaggcacgaacctcaaaaatagcgttcaacgtgaaaggaaccagacacaaaagatcacatattacgcctgtaatatcagcactctgggacactgaggcgtgtggatcacctgaggccaggagctcacaaccagcctggccaacatgtccctactaaaaatacaagaaaattagccaggcgtggtaccacatgcctgtaatcccagctacttggaagctgaggcaggagaatctcttgaacttggaaggcggaggttgcagtgaaccaaaatcacgccacagcactccagcctgggagacagagcaaggcttagttttaaaaaaaaaatcaaatattgtgtgattctgtttataggaaatattcagaattggtaagtccataaggacaaaaaccagattgacaggggctgagatgaaaaagagaatggggtatggggagtgacagcttgataggtatgggttttgttggggggagataatgaaaacatttggaactaggagaatcacctgacatcaggagttcaagaccactgaactcgaacctgggtgacagagtgagactccgtctcagaaaaaaagaaaatgtttggaactagatggtggtggttgtacagctttgtgaatgaaccacacaccactaaattgtacactttaaaatggctaattttattttatgtgaatttcatcttaatttttaaaat

SEQ ID NO: 345918 - DNA, 1000 bp, Homo Sapiens
ttttttttttgagatggggtcttgctctgttgtccaggagggagtgcagtggcacaatcactgctcactgcagccttgactacccaggctcaagcaatccccccacctcagcaactgtagctgggaccacagttgcgcatcaccatgcctggctaatgttttaattatttgtaaagatgaggtcttgctatgttgcccgggctggtctcaaatttccgagctcaagcaatcctcctgcctcagcctcccaaagtgctggggttataggcatgagctgctgtacccagccctgccttgtctctctcgtatttattatctgacgtagtatagatgtacttatttagttgtttcctttctgtttcaacctcacatgttagaacttcattttgttcactgctgcatccccaatatctaaaataatccctggcacatggtacgtgctcaataaatatttgttaaatggatccatttattaattcccatttattttaacctttttgccggttggtttttcttcttcttttggaatttccttttttttttgggtttcagtttctttttttaggttggttaaccaaggccacctttttcttaggttggttttttcttatgccctttaaatagtaatgtgaaataactcagaatgacctaaaatgtcatttcattaagtggcaaaacaacttacctacccataagcaagggatatattatatgacagaaagaaagaacataacaagattatgatgaccctaaagataaggattatgtctcttttagacacacatttttcattgtcaaggttttttttttacagtaatgttattatgacacttacgatattcaaaactcttatataataaaatgttctaagaatttctattaaacacttcaaagactgtaccattggaaagatccttcagtttttctcaaaattgtatattctgacaaaagctagtgcatgtcccttatagactactaatattttacaacctccttgatc

SEQ ID NO: 345919 - DNA, 1000 bp, Homo Sapiens
tgtattccaataaaactttctttatggacactaaatacattaattttcatgtatcataaaagtatttttttaaccatttaaaatttaaacccaatttttagctcacaggccataaaaagcaagcagcacgctggatttggcccacagaccatagctggctatatcttatacaggcttttatttgttatgcaaaatgtttcaaattccagagactttggagagttttattttttagatttctcattttaaaatttatacaacacaagttttctttctggataaatatactcacgagagataaaataattcagaaaaaaatacaaagccttacttaaaaaagggaaaagctgtgaaacaaaatgtttgatcttaaaacatacaattaggaaatgtaaaattaaagatgaaaattgttatgctacgcaacataaaacaatatgcaaagatctagtacataatttcttagtttttactttaggaaaaaggcaacaagaaaaaaggtttataaatttctcagcctcttttataaaaagctgcaactgaaaccagcaatcacttacatgtacaaccatcagccctgaatataatatgaattatacctaggaactgaaatttacctagatgagttctggctgtttttttaaaaatgcacaatcacagaacactgtggcttccacaatttgtgacaattgtgaaaaggaaactcctaactccataatacaagtaaacaacaatactctttccatagttgtcatccagtataaagaaaatttcacagcctgatttagctttatcaaaggtaaaatgattcactgctacatttgcatggattactttgatcctcagtagttcctaaacacaaaacaaattttgcataaacctttatctgtttgggttttccaaatctagatactaatatgtattaaactgacaggagtccacagtctaaagaaaaataaattaaatataaaatgtttaccaactttatcctttctaattt

SEQ ID NO: 345920 - DNA, 1000 bp, Homo Sapiens
tgtgttccaataaactttatttatgaacactaaatattcatgttaattttcatgtatcataaaagtctttaaaaacaaagcatttaaaattataaacacaattcctagctcacaggacacagaaagcaggcagcaggctggatttggtccacaggccatagttggctgtctcttatacaggctttaatacgttatgcaaagtgtttcaaattccagagactttggatacttctcttttttttagatttctcattttaaaatatatacaatgcaagttttctttctggatcaatatactcgcatgagagaaaataattcagaaaaaaatatatttccttacttaaaaaaagggaaaggcaccaggcatggtggctcatgcctgtaatcccagcactttcggaggccaaggcaggaggatcacgaggtcaggagtttgagaccagcctggccaatatggtgaaaccccgtctctactgaaaaatacaaaaattagccaggcacggtggtgcacgccttagtcccagctacccggcaggctgaggcaggagaatggctggaacctgggaggcggaggttgcagtgagcccagatcacaccactgcactccagcctgggcgacagggcgagactctgtctccagaaaaaaaaaaaaaagggtagggggaaagctgtaaaacaaatgtttcatcttaaaatatataattaggcaatgtaaagttaaagattagaatgtttatcctatgcaacataaaataatatgcatagatctggtacataatttattagtttttactttagaaaaaaagtgagaaaaaggtttataaatttctcagtcccttttataaaaagttgcaactaaaaccagccatcacttatgtgtataaccatcaactctgaatataatattaattatacctaggaactggaatttacctagacgaattctggctgctttttgaaaaatgcacaattgtatcacagaacactgtggcttctacaa

SEQ ID NO: 345921 - DNA, 67 bp, Homo Sapiens
ggacctcagattgacatctggaatgagtccctcagcatcctcagacaattattctcatcatcgatcc

SEQ ID NO: 345922 - DNA, 1000 bp, Homo Sapiens
gggtgttgtttaaagtcaatgtttgtgataatttgttatgcaatcttataaaattcatacacaggctcaacagactcggaatgaattgatatgcacactagttacataaaataaaatatttcttaatttttcagtgttttacattttataactttctgtgatgcaatttaatacattcatatttcattcattcagtcaacaaaaatttagtgcctaagatgaaccaggtatgccctcatatgctcacgtgcctgacattctagaagcttcacaagaccgaggtggagccactggagtgttttaggtgaggaaatgacacactctgactcacaggagcaggaccactgtggagagaacagtcacgtagcaggtaatgggacaatgctagagccacaatttagaagtgacagggtggtggggactaaggggagaggagggcctgagggatgaaagggacagagggaagggctggagaagcaggaggttaggaaaaggagcagagggaaggaattggaaagcagtagaattcttaggtttaaacacattgttttatagatttttattacatccatctacagagcctcgctcagtgttctttgcagttggcctttaatacctaatgtaggactgcctaaaaactaatgttttttatgttaataaggtttaaaaaacacttagtgttccttctttgcagttggcctttaatactatatttgggactgcctagaaactaattttttttaattaatcaggttttaaaaatactaagtgttcctataagatatacacaccacttagacgtgaatacttcctaaaaacaggcagcacatgagcactgctgaggggcattgtgactgcattgaacacttgcaactgtgaggtgaataaagtctgtactggctcccggttgcaacatatagtaacgcagtgtgctactttatattgaggagatgtcttggactcacccagtaactcagggctgtggaatgaaggtaaatgt

SEQ ID NO: 345923 - DNA, 1000 bp, Homo Sapiens
tttttttttttttttttttccaaatttgtgttggcccttctgcatcctctgcattttcatatacatttttaggattattttgtcaattttcttttctttttttcttttctttttttttttttttttttttgagacggagtctcgctctgtcacccaggctggagtgcagtggcacgatctccgctcactgcaacttctgcctaccgggttcatgccatttttctgcctcagcctcccgaggagcctgccaccacgcccggctaattttttgtatttttagtagagacggggtttcaccgtgttagccaggatggtctggatctcctgatctcatgatccgcccgcctcagcctcccaaagtgctgggattaccggcatgagccaccgcgcccggcctattttgtcaattttctataaaatcctgctgggattttgatagggattgtgttgaacctatagatctactgggggagaactgccatcttaacagtattatcgagctttccaactcgcatctctccatttatttagacctttaatttctctgaggaatgtttttttattttcagtgaacaaacactgctgtcttcctaaatttattcctatttcgctcttctggtaactactgtgataggaaagttgagattttcattgcttctatagagaaatatgttaataattaatttttatattgatttgatatcctatgggcccttctggattcatttattagtgctagccagtttttatctgcttgtgaattctacagacagggtcatgttatctgtgaatagaattgtatgttttcctttttatctggatgcctttaatttttaattttctgccttattgcactggatacaatctccagtataatattaaataaaagtggtgggattggacatccttgcattgatccccatcttaggagaaaagcattcagtcttcagtctttcttcattaagtttgattttagctgtgggttttttatagacgccct

SEQ ID NO: 345924 - DNA, 1000 bp, Homo Sapiens
ttttttttttttttttttttcagtggctgtgataggtttattcagaggaagcactagactctggggtagctcacatgggtaagaaagacttccaggagcaggcattgaagggttggcaccctgggtgagtgtccaaggtcagcgagagtcacttgtggaggggacggaagatgacctggctgatctggccagggatggtgtagaagaccaggaggaggaagacggtgagcagcaccagtagcagcagcaccagggtgcgccagtaccggcgccagatgaagaagacaaaggccttcagcgggttcacaaaccagttgaaggaagttttggggcggctgggtttctccagaggctctggctgcttccgccccttccccactggccgtttctcggcctcctccacagtcagcagctcaaactctgcctccaccttgcccgtgaggatgtacacattgccacccatgtctgtgaactccaggtcttctggccggcccttcctcctcctctgctttcgcttcttcttgccagcctgagcctcctgcgcctcccgctccacgtcctctgcctccttcagcttcactaccggccaccagcccctcaggcggcggcagcgaaacagattgcacctcggcccggccccattgcgggccagctgcacagagcagagctcggggccccgggccccacgcaccatgtctggtagctgcaactccagggatcctgcaagtccagagcacaccagattaggcatgggatcaaagtctcattgtgccaggggtgaggaggcaacacaccaaggttgtaaattggggcattgaaagttgttgcagtgtgcggtcaggccacagctatagaccacccagaccacagcccagcggtccacccattgctacttcccagtggaagagggccaagggtcgggatcagagtgccaaggaccaaaggctgtggagtcggtgtcagggtgacaagctagggtcaaatcagagttgaatcagag

SEQ ID NO: 345925 - DNA, 1000 bp, Homo Sapiens
tcaggggctgattcttagaaacttttcccaatacaaggggctgtcccttccctccacccttaatccttcctcctcctcccctctggtcttctaggagccccaggcctggatggagtgggcagaacagattggcaggtgacaagccaatacccaaacactcaataaactctccacctatcccagtccctcagcccacactgccccaaaccaatgaacagaccagatcacacgaggcattgaacttggagcaaagctttaatagcaggcactggacaaacccaggaggcctcctcagtgaggggctgcagaaagtagatacagaaagacaacaggtcatggaccagtgcccagacggacactcggggcgtggcagtagcatgctgggagctgcagctgatggctgtgccatgaccctcgaggtggggctgtcacaggcagaaaggggcctcagtgggtggagagatggacctgcttacagaagaccacctctccaacctggacttcctccacgatggcacacctggtggctggtcactgtggctgcaggcgatggaggagggaggcacagggaacatcaggcaggagctcttccccccacctgcccgagtctgtggtccccccagtctcccacacagaagggtcctcagcctctccgccgccttggggtccacacagcaggacagggcagcttcttaccttcccaggtgggctgcgaggccagggacaaggagtactgagtggccagcctgcagggagaggagcacccatcgacccagggatgccagccagcccaggcccctgcaagcactgctggggagaagcaggccctggcagaggaggttcccctaaattggtgaaaaatcacagttgggaatgcacagaaattagcacaggcccaagaatgaaagggcaggggttcagtgcagcaggaagaagaaaaagaaacagcacagcagtaggcctggaggcactcaccaggaatttacaaggagaagctgag

SEQ ID NO: 345926 - DNA, 331 bp, Homo Sapiens
aaaagaaaggcagactgccacatgcagcgcctcatttggatgtgtctgcagtcttggaagcttgactaccctacgttctcctacaaatggaccttgagagcttgtttggaggttctagcaggggagcgcagctactcgtatacccttgaccgaagaccggtcctcctctatcggggatggtcgtcctcttcgaccgagcgcgcagcttcgggagggacgcacatggagcggtgagggaggaaggggacacccgcctagccagccagatcagccgaatcaaccctggcgatcaatggggtgacagatgtcgcagccagatcgcctcacatcc

SEQ ID NO: 345927 - DNA, 1000 bp, Homo Sapiens
aaatcaactaaagactcatgagatttatttggttacagtgaataacctggacaaaatgttgagaagagttgttaaaacaagtttacattaaatatactaacaattacgtttggttacatatttgtaagtgatggttatttagaaaaactgcatagaaatccaaaccttaaatattctgcaaatcaaatcattagcttttctcttctctaataaagtagggtgactagttcttggattaatctaactataacattaatgtagcacttgattatcttatggaataattctctatctcatctaagcctcacaacaaccttgtaaagtattatccccatatggaggaagaaacaggcttagaagtggaaaggtagattctctgctcgcacaaccgtattatgtggctaagctattgaacttgaacctagatttgggacttcatttcaaatatgaaattttttgattaaatctttttatcttgtatggaaaaaatatctcattagctgtcagatgttatttaccctgctaactgttaaaaatatttcattaaaaaaattcagcttcatagcctttcagtttccctttaagagtcaaataaaagtattaattttaaactgaagttgcctgaacagaaaatcgttacctgggggaaagtaccagtttctaaatcttttaaaaaacgttgccagacaatccatgatataactggaggttagtagtccttctaatttttaactacaaaaatattatagaaatttgtgtttagcccacatttctaacagttgaatcaaaggtgtttatgaacattataatgaacaagccaaaacctgcaattaagaatgacatgaatatattttctgttaatgataaaaacaaacatgggcttgacatttaaatgaaaatgtttgcatttaggatactactgataaatcttttaaataaccttactttcaaaacttagtttaaggttgaacatcccagtgaccagattatgattaacaga

SEQ ID NO: 345928 - DNA, 1000 bp, Homo Sapiens
cttattccctgatcaggtaggcagactttcagtctctgttgctctgtgctgctttgtgttgcttatctgggagagagagtttgtgtgtctattcccagacatcttaacagctgcaggtatctctcacacttccacttctagattcgctattgtgtctctgtcttggtggtcagtagtgcaatctccagtggtcttcaccacaaaagtggtcaaggtggctttttcttgtggcttgggcaattcttcttaaagtgccctggctttaacactggtaacaggtagcaatcagtggaagttcctgggggatcctggactctgcaagtctgcaaagcagccactagagcctcagcctttctcttgttcttcctgtttttctcgtgggcctcctcccagtccataagtgtctgcagcttcattcttgaagtcagccaggaacccaccggaaggaaccaattctttcagggaatacacctttaaatcctgggtgggcccatgaaatgaagcaaccttacactttatacttgaagtatatactttatacttaaagggttaagtataaaatgaattgtttcaagattcacagtgcatccaaagtgagggtataaatctgtaggacacagctggacctgattctccaatggcttcatagcaggcaaaatatcttatgtatctggtgagttactagatgacagatcgtggggaccctctacagccagagcactcttcaacctggaatacaaaatagggaactgcaaaatctggctttttgtactctttttctcaatgattagagagatgaaaagataacgaaaaggtgagggtagggataccaggaagcagttggacaaggcagaaggaacaacaatgcagctatatccacaagaaaatccagcactgtgaactgtgccttggctatttgctcctgctccttcacctctgcctggctcacaatcatctcctagaagcaaaaattccttaaagcacagtcacgaagcagtat

SEQ ID NO: 345929 - DNA, 1000 bp, Homo Sapiens; identical to SEQ ID NO: 161315

SEQ ID NO: 345930 - DNA, 1000 bp, Homo Sapiens
tttttttttttttttttttttaacattcaaatcatcatttattattatgcttagtttattcctataactgttaaatatgacattaatataccgattcgttgatgaactgagattatctgtaattattttcactagagtctagacaactactttacaaacagtattctacatcattgcataatgcattcttgaaaacatgacagaagtcaagaacaaacgacagacttacacatttttaaagactttcaactcttaagagcagaacaaatgtaataaaatcccccataacacccatggtgctgcttgtaaaatggctccccatgatgcagcctcctgacagtcatggttttgtccaataaccatgttctgatcaatttggagcctacctaatgatttgtttttaactatgtcaattccatgattagattataaagacttccatgttacttgcatttgctgcagcttgtcttgcttgcttgccctaatgaagcaagctgctgtattgtgacttgctccataaaaagggctgcatggcaagaatgcactatagtagatgggtgaagaaataagaccaagaatcgaaaaggaacttaattctgccaataatcacctgagagatctcagaaccatactcagtcaatctttcagttgatgacaaacacatgaaaaacctgattacagctttgaagagatactgaaccaaaggacacagctaaatcatgcctgtattcaaaataaattgtgagataaaaattgttatcttaaaccactacagtcaggataatatgtgacatggcttggatccatgtctccaccaaccctcatgatgaattgtaattcccaatattagatggaggtggacctggtatgagatgactggatcttgaggatggctccttcatgaatggttcagcaccatacccttggtgctgttcttctgacagtgagttcttgcaagatctggtttttaattttaatttaattttattttacttttaag

SEQ ID NO: 345931 - DNA, 989 bp, Homo Sapiens
ttttttttttttttttttctacaacagtataagaatataagtttggaacccagttaggattaacaagccatctttttacttgtgaaaaactgaaacaccttttagggaatgatagcagtgttatgctatagggatagaccaaggtttaaatgtctcagggtcatctcttgggatctctaggccaagatccgcacagaggagttcctggagtgggtggagggtgctggtttcccggccctgcccatctgaggagggcatctgtccagaggcaggtgattgtaatcattgcatttctgtgaatcgatctgcacaggccattcgaacccattctggcgttgctgggctcttcaccgtgaagtcctcagctatgtctctttctcttcgcactgcggccacagcgtcagcaatggcaaagaacacagatgaccccaggaacatcccagactccccgaggcccttagacgaatagatggttagtggggtttgtgatgatggcagcaaggagacattgaactcctctgggacatcagtgatggttggaattttgtactcatctgggctccgagagtacaggacaccttctggggaatatttcagttcttcagtggtataaagccccattccctgaataaacaaaccttcaatctgcccaatatcaatggctggatttaggctgcaacatgcatccatgatgatgtccgttctgattttcttgtgagcacctgtcaggcagtcaatttcaacctcagaacaggcagctctgcagacatagtaaggaaatgggtcccccacccccttctcccagtccatgaaggccttgtagcccctgaagtatccagtggctgagagactgattctttgttcaaatgcagcttctatccagtcttcccatttaccttccggatgtttcttaatgatgggctcaaggcgtttcagaaggatctgacaagcattctgcacagctctgccgttgctcgtgccgaattctt

SEQ ID NO: 345932 - DNA, 1000 bp, Homo Sapiens
tgccgacctcctcgctgacaacaccttccctgaaggttcagcatcttcccacttccaacctcctgcttaggttacaagacctagaacaccagaagtcatagattgggattctactgtcactctagcttatttgacttagcttggcatgcagtgaaaagatgtctgtgaaccagccagtcctctaaggtatgtggcctcaaaccagcattcaacctctcttatcttattttattttaactatttatttattcattttttgagatagggtctctctttattgcccaggctggagtgcagtggcgcaacctcagctcactgcaacctctgtctccggggctaaagtgattctcccaccttagcctcctgcgtagccaggacaagagccctaggccaccttgctgggctaatttttgtattttttgtggagacagggtttcaccatgttgcccaggcttcttgtccattttttaaatgaaaataaacccaactcagtgcccactatgctggataaagctggcactgtgcctggaccactggggcttatgtcatttttagggatccacttcaactcataacacaaaagagagaaaaaaaaaactaatttcaagtgctgtactatgctgtgtgaccttgagcacctccttaacatctctggatctatttcacaaagtataaaatcaggacatcaacatcctcttgcagcttgttgggatgaccaatttagttaaaaagatggtgcccttagcatctttcctggcacatagtacgttttcaataaatattagctgctattgtcacaatagctacttgcaaaatctatgtatttgggcacatgagtcaactaaattatctattttaaattaattttatctttattaaaatgttatggctgaggatatggaatgatttacttggaacaagatggaaatatatacattttatttattctgtgtgtgtgtgtttctgcgtgtgtgtgtgtgtgtttttattaacaatgcat

SEQ ID NO: 345933 - DNA, 633 bp, Homo Sapiens
ttactcattagtagcttttttgagataagctatcaagtctgccctttcttcctctttttttttttttttgtttttttttttttgagatggagtctcgctctgtcacccaggctggagtgcagtggcgcgatctcggctcactgcaagctccacctcccgggttcacgccattctcctgcctcagcctccagagtagctgggactacaggcacctgccaccacgcccggctaattttttatatttttagtagagacgggatttaaccgtgttagccaggatggtctcgatctcctgacttcgtgatctgtctgcctcagcctcccaaagtgctcggattacaggcgtgagccaccgtgcccagcctcttccttcttaatgccgacaaagatcatttttgttccagggatgtacttcttgggattctccaaatactccatcagtgtatcctctccccagatgatgtctttgttcttaatggtggctatgtaagagtgtccaggggcctgacctgtcttccgcccgaagagaccatggagatttggcccagtcttatgcttgcctcccttttcaacaatgtggcactgggaacgcttcataataaaaatcttcttgcctttctcaacatcacccat

SEQ ID NO: 345934 - DNA, 1000 bp, Homo Sapiens
aaagtacaaattcagtttattaatccgtttatgacacagtacacaggaggcaaagtgtttacatcatagacttcacttccaattccttggaatgttcatttctttggcttacaggagagactagacaggaaagccaggcaatgcttaggcaactaaaatgaggttgggggtaatgctaacgtcatcctcacaggaacagccacagggactgctagtcacaagcgggttttctagacctgttagctggaagcatggggagcaccatttctggacgctcgtgctgtgtcggacttcagccatctccaccacacaggtacagcacccttagtgtcttgctggatatagtagtacagggacttgctatactttctcttgaattcagacctaattttcaacatgtccacttcattgtgggagaccatgattctgatcaggaccttatcttgagtccccatgcccattatggagtcgtacagccggtcagcgaaatacaggggcttgttctgaatacactggaccaggttcaggaaagaattttccaggtctcctttaacctctttcttgatgctctccaacatgtcataaggactgtagctcttgtacctatcaaatactttctggaagtgggacatgctccgctcggtcatgacgctgatccacttgggaacttcagttcctttcctcttcaccccagcgtcatagagatcccgggcatcttggtcaatcagttcataatcaatgacagagccatcctctgctcttctaccctttgccagggcaaccatcagcttgcagaagtcaccagatgtgtccgaaataatgtccttctccagatcagtcttgtacatttccttgtagactctgttaatttcctgcagctcttggttggttcttgagcagatgatctcaatgagggagtccttgttggttcccagccccttcatggaagattttagctcagaagcatcatactgagcaggtgtctttaataggcccaaag

SEQ ID NO: 345935 - DNA, 1000 bp, Homo Sapiens
caaaacagtatattttattttacaatagcaaccaactccccagtttgtttcaattgtgacatctagatggcttaagattactttctggtggtcacccatgctgaacaatatttttcaatcttccaaacagcaaagactcaaaagagattctgcatttcacatcagttcacaagttcaagagtcttccatttatcttagcttttggaataaattatctttgaggtagaaggacaatgacgaagccacttaattccttgtgtctgcataaaagcagatttattcatcacaacttcatttatgtgaataaagcagatgatgataaaatgttctcttattcttgtttaatcagtagtggtagtgatgccagaaactgtgaaaggaaggcttttagttactttcttctttccattttccaataatccattccccatccccagctgaagaaaggggtgttactgagtccagctgataccacacattgaaaggtaaacattaatatttcaaatctgatgtctaactaaaaatgtacagaatgaaaactagaaaatttcaaccccagattatcttcaaccttgctccctccaccaatcatactttgacatttatctatttccttctccacttatggatgtaattggcttgctatagaaactacagttcagatgctttgaatgtatgaactacaatgaacaataaagtcctcttcttttgaagcatattttggcttcagctttaagataatcttatgacaagaagggtcacactgattcacttaataaattccattcttacctaacacaaggtttagttgataagcacttggacaaaaataatacttttcaaaaatgtaaagcaaactagtgaggacaaaggattttgtcctcatctcaacaatgatcagctattggaactgcatgaaactgaacaatttaaacctggagctggtaatgttcttaagaccaattcagaacaaaggcaggttgcccttaaaacaggtttg

SEQ ID NO: 345936 - DNA, 1000 bp, Homo Sapiens
tttttttttcttttttatagcgggatagcaggcgtgagccattgcatccagccaaaatttttatctttaatccctctattagtctgctgtcacactgctaataaagatatatccgagagtgggtaatttataaaggaaagaggtttaatggattcacagttccacatggctggggaggcctcacaatcatggcagaaggcacggaggagcaagtcacgtcttatatggatggcagaaggcaaggaggagcaagtcacatcttatatggatggcagaaggcaaagagagagaacttgtgcagaggaactcctctttataaaaccatcagatctcgtgagacttattcattatcacaagaccagcatgggaaggacccgcccccacgattcaattacctcccactgggtccctcccatgacacaggggaattgtgggagctacagttcaagatgaaatttgcatggggacacagctaaaccatatcattctacccatggcccctcccaaatttcatgtcctcacatctcaaaaccaatcatgccttcctgacagtcccccacagtcttaactcatttcagcattaactcaaaagtccacagtccaaagtctcatctgaaacaaggcaagtcccttccgcctatgagcctgtaaaatcaaaaacaagtgagttacttcctggatacaatgagagtacaggcattggataaatacacccattccaaatgggagaaattggccaaaacaaaggggctaaaggccccatgcaagtctagaatccagcagggcagtcaaatctgaaagctccaaaatgatctcctttgactccatgtctcacacccaggtgatgctgatgccaggggtaggctcccatggccttgggcagctccccacctgtggctttgcagggtacagcctccctcctggatgcttccatggactagcatttagtagggactctgtatgggggctgcaaacccacatttcccttctgcactgccct

SEQ ID NO: 345937 - DNA, 200 bp, Homo Sapiens
aaaggggggggggggttgttgctttgagggaagttacgcttattttttttttgtcttttgtttttttttttcctttttctggagaacggggtctcgctatattgcccaggcaggtctcgaactcctgggctcaagctatcctcccgcctcttagcctccctgagagctgggattacaggcgtgagccaccgcgcccggcc

SEQ ID NO: 345938 - DNA, 1000 bp, Homo Sapiens
atgtcagtgaatccactcttagtcctttattctgtgatttgggccttctacaaaatactttatgattctcactaatgaatactaagaacatacccaattttgactaaaaagtagtgaaacagtggttggtagaatctttctcactgtatcacggtcacacattatatctgagaataagaaatgagcaccatacaaacaggtaattgtgtgtgtgtgtaaactcaatttctaaggtgtaatagcagccaactagatcacttagcactgtgactatcactttttaaaaatctggttatacacaaaattttaacaaatcagataaacacttcaaccccctattgcttgtccatttaaaaaatccttatagaaactctatatataacctgaaaaactgcatacacacatacgtgtatatatacacacaaaagtatatatatatacatatacatctttagctttgaataaatttctaaactgagatgaagccaaacctctcatttatatcttctagaatacagtaataccaactgaaagtttctaataagagtttcaacttagttaatcagaaatactggctactgaaaattctgaggccaaagagctgctattcagcttagtatattctaggcttacaaatcagtcaaagactgaaattaccaaatgcccatgaaagaaataaatttttctctctgtatttccttctaataacaaaaagaaaatatctttacaacaagctttcactttttaaagaattaaaattattactagtcttcaaaaatagtaaatgttatataaatacgattttcttatagttgaatttttcagctagaatctgcatttaaaaaatttcctttggatttttccatttagcacttcaagtttctattctgcaactctaataactggctcagatttgttagattatatcacatcgttcaaaatttgctactgtgtgtttaatgtgtacaataataaagtaaatgggaggaatgtaccaaat

SEQ ID NO: 345939 - DNA, 1000 bp, Homo Sapiens
catagtaagtgtccaaagcactgcagtagctttcactaatccagtctgttctggactccaggccatctatcttgctggcagacttcgggatcgctgtttgtgtagcaacacaaggcacatcccagcaacgccacacacaaacatgtgagcagaaaactaataaccaccggtagccttggagttgtgacagttctcccttgacagtggaccaggacacaggagctcctcttccagattctttcagttggcttgggcaactctgctttcagaaccatggaagttcaacatggcagtcaccaactctggaagatcaaagtcgtgtttccacccccagtccttccgagcattgctgtcatcaaagttcatcggccaaccatccgctatggcctggcgaacggcatccacgttgtatgtgatctggaattccggcacgtgcttgaggacctcctgggccagctcctcgggtgtgaagctcatggcgctgacattgtaggtcctcatggaaagggactcagctggggcctccatgacctccagggtggctctgaggcagtcgtcaatgtacatcatgggcagtctcgtgcaggcttccaggttgcactcgaatttgccatgctttgtggcatcatggaaaatctggactgcatagtttctcccatgagctccgcgtggaccttggacaccccatagatggtcctgggtctctgaatacagagatcgggggttgggttccggggagaggtgggtccaaaagccccaatcgtgctaggcacaaacaattgcagattgtgttccgcagcgacatccaggatgttatgcaggccagttatattcactgctctcgccagggaaacatttgcttctccaaaggcgctgagcaaagcgctgtaatgaaacagccaggtgatgcggttgtttaccacgatctcccgaagattcttgtaatccaagatatcagaataaatgaatggaccactgtgaaagacatgatcggggggtt

SEQ ID NO: 345940 - DNA, 1000 bp, Homo Sapiens
gtaaataatacacagatgagatcacaagcacctataaattatccatagtgattctgccacaaaatctaggacactctagaggtctgagtagagattttttccagttctatgttgtaaaagctaacttttaaaaaataaaaatgagatcaattgtaaaggaggagccctgtttttaaaaactaacgaaatacttgaagcccattcattaagtatgaggaccaaaatttccacaataaatatgccatctcagtatgttcctgatgctataacacagtaccttggactgggtaacttatgaaactggaaagaaataaatttcttacagttttagacactgggaagtccaagatcaaggcactaataggtccaatgtctggtgaaggtgggtctcttcttccaagatggcaccttgttgctgtgttctccagagaggacaaatacagtgtcctctaatggtggaagggctaaaaagcctagctacttccattgagttcttttataaggtctctaattgcactcttaacctcctcccaaagtccccactttttaattctatcacacaggggcatttaaattccaacatataaattctggagcgacacatatattccagccacaggtgtcaaatggaaagaccacaggcaatattgtactatttctaatgcctagaaaaatgtgtatcttaatgtttaggtagaaaacagaaatatgctgggaaaaacgacgtctcgttgtaaagatcacagcccaactcttcggaggaaaaaacacagcttacccttctcaaatgtaagcctagatttgaggaatatagtaggttatacttatctaaaaatttagtagaaaaataagaaggcttttttaaaagaacagctccttttagtataatgaatgagacattttatgactggaaaagggggtttcacttgactcgattattctcggttcatacactatagtaccaaatacattaggaaaaaccagtacactggattaccca

SEQ ID NO: 345941 - DNA, 1000 bp, Homo Sapiens; identical to SEQ ID NO: 161316

SEQ ID NO: 345942 - DNA, 1000 bp, Homo Sapiens
ttttttttttttttttttttgagatggagtgtcgctctgttgcccaggctggagggcagtggcccgatctcggctcactccaagttccacctcccgggttcatgccattctcctgcctcagcctcccgagtagctgggactacaggcgcccgccaccacgcccggctaattttttgtatttttagtagagacggggtttcactgtcttaaccaggatgctcttgatctcctgacctcgtgatccgcccaccttggcctcccgcctgccttggcctcccaaagtgctgggaatacaggcgtgagccactgcgcccggccctgtctggcttcttgaaggcagacacaagtctgcaggctgttcacgcccccatctcattatcttttctcacgggtacctcttctgatacaatcacagcaaccctggcctcggccccgccctgtccctgccatgcaacttcacaactcagctggcctagacccctgggaggcctccaagtccctagggttagacacctcctggggtgctatggactgtcggggctccaaggagccgagtgtgggggaaactcactgtgggaggcgctcctgacctgcagggagctggaatgctgtgggagggccctgaccccggggcccatggagctccctaggctcctctggccacacctcaccacccaccccctcccctctccagcagttccagtttgtggaagtcccaggcaatcactgtgtccacatgagcgaaccccagcacgtggccagtatcatcagctccttcttacagtgcacacacatgctcccagcccagctgtagctctgggcctggaactatgaagacctagtgctcccagactcaacactgggactctgagttcctgagccccacaacaaggccagggatggtggggacaggcctcactagtcttgaggcccagcctaggatggtagtcaggggaaggagcgagattccaacttcaacatctgtgacctcaagagggag

SEQ ID NO: 345943 - DNA, 1000 bp, Homo Sapiens
tttttttttttttttttttttttttttgcagatgtagggatttaatgtgcttgccctttcttacccacacaagaaaaaggatggaacagatcatgagatttgactgttctgctgcgcagcctccacagggcgctttgaatgtccctgtttctcaggctgtagatgaaagggttcagcatgggggtgaccacagcatacgtcactgacgccaccacaccattcctgaggggtggtgccacagctgaagtcaggtacacgccaatgcctgttccataaaataagcaaacaactggcaggtgagagccacaggcggagaaggctttatactacccatctgacgatgaaatccttagaatggaggggacaattttatagtaagacaaaaggatccctgaaatgggaagaaaaccaaacatagtactatcgaaatatatgaacatgctatcgatgatgctgtcagaacaggcaagcttgagaggttgagatgggtcacagacaaaattagagatttccacattcttgaagaaggtgaattgcaacacaatccaactgcgcagctgggaatccaacaggctaaggaaaaggacaccgaaactaagaagacacagaggtgaggattcacgatgactgggtagtgcagagggcgacagatggctacaaaacagtcataggccatcacagtcaggagcatgtcttctacacatgcaaaaaggaccaagaaagacatccgtgtcaggcagtccgcataagagatgactccgctatgcgaccgcatgtccacaatcatcttgggaaccgtggccgaggtgaaaccgatgtcagcccagcacaggttggagaggaagaagcacattggggtgtggaggtgggagtcagagctgacagccaggctgatgaggaggttcctcagcaccgtgaccagatacatggacagggacagcccagcgaggatgggctgcagttctggatcctctgagagtcccaggaggaggagttctca

SEQ ID NO: 345944 - DNA, 1000 bp, Homo Sapiens
tttttttttttttttttgcttgtcccactgagttttattgtagggatacacacaaaggatgtgccctcaattccatagtttcttgatggacatgtttttcctcactgtcctttggcatgagataggactttggactacctcaaagtccttctgagtgacatggactcgctactcagggcatacatgccggtttctgtgcacatgcccttcacttcagcctgatgctcctggcataagctcagcaatttttctcaggttgatcccctgggtcaggttcatttctgagaatgaatcttcaaagtgaccagccaggcctactcattgcaggttgggaattcaatttttctgtcaatgtgccctgggcaaagcagtgccgagtccaggatatcaatcgtattagcagccgtgataaaccgtgatactcttggtggcctcaaagccaccctcgaagcatcatctgctgcacttcactgttccctccagcatccccctccagctctgaggagccaaaagagtcaatttcatccatgaagatgacagatgagcattttctctgccatcacagaaattccccaatgaatttctgtaccaattcagagccagagacatgaataaaggtacacagtccctatgatgagccagagcccaggccaacagtctcttccaagcagcattcccttgggctgtgcaatgcccagtgctttgaagagctcgggatgcttagcaggcaggtcgatcacttctttgatcttcttgatctgcctatccagtctaccaatcatttcataagctgaatctggtactttcttcaccatcatcagtgacaccaatgagtccaccttgttgggtaggatcttgtgcaaagtgtagctgtcatttcttagaaccaccaaggaactgggtgtcacatcactgatgctgatatttttgtccacatctatgacaaacttgtccttgagatgcaccttgaccaacactttcttcttacccatggcctgga

SEQ ID NO: 345945 - DNA, 1000 bp, Homo Sapiens; identical to SEQ ID NO: 161317

SEQ ID NO: 345946 - DNA, 1000 bp, Homo Sapiens
tttttacaaatattgtttattttaatgaagctggtgtagacaatgtccatttaaaacccgatatcccaggccaaaaagtacaaataaaaaagagcagtattctgttgtattcatttctgcatgtatacctttattgataatgaaaatcagaacttttctgggatcttctgacaagattaagaaaaaaaaaatcttcaaatgtcttttcttcagggaagccatctttggagttagtcgttactctcaaccttatctgtcaccttgacttaacctgatgctccttttcttttggtccagaccctcaaatcttaaaaatagcttcaagttgttaaggagaggtcatttttccacagctcagttctctaaaaaacttccatctcccaccaaaagtcatagtccaggagtgaaacaatcacatggttgaaaatcagggccaactggaaagtcattatgaatacttgcattggtcaatcttatcatctgaaaatgtacagtcctgaaaaaggtggcctctctgtgcacacataatttttataaaaggagagggcaatatgaagaggcctgagccttgatcaccagaaatcagcataatgaaaacaaacaataatgaataatgaacactagaattcaaattaccagatgttttaaagagatggagtgcctgttttcaattccgttttaaataccatgctacaaaagaactatttaaaaaaataaaaaaggattgagggaaaaggaaaaaaaaaaagaatgtctaaactgttgaatgacctccgatttgttcctgataaacctcaatcacatcttcttcctccattcccagttcttctggagtatgattatcagcaattctctgaccttcaaagagaaacctgagggaattcactggaacgccctgtctctgacagtacgatttcttgagtttcttgagaggtgttgtcattttcactttgaaatgaatctcactgctatcctgtccaataaccctgagtttaatatc

SEQ ID NO: 345947 - DNA, 1000 bp, Homo Sapiens
tttttttttttttttccattcaaacaaattcaaatatttatgatatcaaaaagtgacacatcaggaaaatacattatctctaaaatttgttaacataatatagaattcttacaattcccttatgaaacactaattttcagattacactatgctaaattttaatagtcattaagaattgcatattaaataatatataaagatttttatatatctacaaaaaatgtagatatgcggcaatatatctacatgcataacataggtggtgttacaggttagaatacacacattctcagacatggtggagtgttgttgaacttcaccctcaaaagcaatggagacaaaataaccatgtagctatgcatcttaaaatggagcaaacactgcaatttccacttaaaaaaatctccaattaattacacatctggttattaaaactccaagttaaatgttagattattgaaggttagttaatagataatacaagttaaccgataggtatttatttatttatttatttatttatttatttattgagatggactcttgccctattgcccaggctggagtgcaatggcctgatctcggctcactgcagcttccacttcccaggttccagcgattttcttgcctcagctgagtagttgggattacaggtgcatgccaccatgccaggctaattttctgtatttttaggagagacagggtttcaccatgttgaccaggctggtctggaagtcctgacctcatggtccacctgctccgtactcctgaagtgctgagatgtcaggcatgagttactaaacccagcccatccaatagttttttcttttttaaaaaatacgtggtttttcttttttatgtaaaaattgacccctcatttctattgtgtaaatcactataaatatcattttcagtgtcttatcctccagcaaacaaagatacatacatatatgtgaagcagtggtttttagaccttttcagagtcacagactctttgcag

SEQ ID NO: 345948 - DNA, 1000 bp, Homo Sapiens
tcctcctggtcctgggccagcctgacgatgtcctcctctcccagtgctgcgtctttggcactgccccctggctgatgtactttctcatggtgtctgtctgtcctgagaggtggatgaactgaagctctagtttctccaccagctccttcaggtccatcttctccttccataaagttgctgcagcttctccatggcctcctgcagggcccagtgggtgtccccacacacagattcacccccagtctctggggctggggccgctgcctctggctttttctgggatgaggccactgggtgagccaggggctggcagcacacgctttgctcctcctgggcactggctccagcggagttgaaaaatgccaccatggcctcccggctctccaggtcccctggaatgttcagcatgggccgaggtgcctcctcctcattgtccagatgtcctcctccatatccttccccagggagagccatgaggctcaactgggctttagctgctgtttctgctggctggtagcttccaggttctccaagcttcagctcctttacttgccgctccaactgcagtgcactcttgttctcattattccagctcctcaaagctgctgtggggctcggcctgctgcttgtagagggcttcccactccagctccagcatcctctccagctcccacagagtctcctgctgccacagcctctcatcctgctcctgaagcctctcctgttccagcagctcctaccccttgtccagcagcctctcctgttcctgcagcctctcctcctgtctcctgttcaggagactcaacatctgattgttttccacctcagcctggagctgtcttcccacactctccagctccttccttaggtggttggtctcatcttgtagctgctccacctcagagggccctgctgggggctctggggccaggggttcagcagtgaattgatgttttcactgagttgactgattattgcggagcttgagtgcagggccact

SEQ ID NO: 345949 - DNA, 1000 bp, Homo Sapiens; identical to SEQ ID NO: 161318

SEQ ID NO: 345950 - DNA, 1000 bp, Homo Sapiens
ccccttctgcgcagtcacgccgagccagcgcctgggcctggaaccgggctgcagccccccagcttcgcccaccacctccctaccatggacccccgcaaagtgaacgagcttcaggcctttgtgaagatgtgtaagcaggatccgagcgttctgcacaccgaggaaatgcgcttctgagggagtgggtggagagcatgggaggtaaagtaccacctgctactcagaaagctaaatcagaagaaaataccaaagaagaaaaacctgatagtaagaaggtggaggaagacttaaaggcatatgaaacatcaagtgaggaaagtgatctagaaattgataaagaaggtgtgattgaaccagacactgatgctcctcaagaaacgggagatgaaaatgcggagataacggaggagatgatggatcaggcaaatgataaaaagtggctgctattggagacccaaatgatggtgaactccagaaagccgttgacttattcacagatgccatcaagctgaatcctcgcttggccattttgtatgccaagagggccagtgtcttcgtcaaattacagaagccaaatgctgccatccgagactgtgacagagccattgaaataaatcctgattcagctcagcctcacaagtggcaggggaaagcatacagacttctaggccactgggaagaagcagcccatgatcttgcccttgcctgtaaattggattatgatgaagatgctagtgcaatgctgaaagaagttcaacatagggcacagaaaattgcagaacatcggagaaagtatgagcgaaaatgtgaagagtgagagatcaaagaaagaatagaacgagttaagaaggctcgagaagagcatgagagagcccagagggaggaagaagccagacgacagtcaggagctcagtatggctcttttccaggtggctttcctgggggagtgcctggtaattttcccagaggaatgcctggaatgggagggggcatgactgga

SEQ ID NO: 345951 - DNA, 1000 bp, Homo Sapiens; identical to SEQ ID NO: 161319

SEQ ID NO: 345952 - DNA, 1000 bp, Homo Sapiens
caacatgtaacatcactctttattatgaaaataaatggtgatcatgagtggggcgaatacacagaacaactggttcttcaagtggttatgttacccggcctgcaagttaactttggctttccggtgagccaggctgccaaccccagtcctgggcacggccttaggctggtaaaaagaggaaacaaagaggatgtgaatgaggacaaagaagacatcgaagggctccttttaggggatttgcttgaaggcctccactgagatcttgccttcggtctggagaatagtgaaaacctggtcagctttggtgtagttctactcactgtcctgaaggcacttctgagactgctcaagtttcatcccagactgggtggagacagtctccaccatttcctgctgcttctgggagagggtaggcaaggagctggaggagggtgcaggcactgggatggagaaggcactctgggtctccttcgtgctggcattcctcacaatcagcttgtcattcacaatatacagactgaaggaaagacaagctctcagacaactggaaaaatggacaaccccacactttcaacaatgatcctgcttccactgccactgaggaaccagattccttccaagcccctgctctgcccacctttcggattccttggctggtaggctttacccctgctgcagagtccacctttggagagattgcctaccagtttccttagatttgtagatttaaccccaatgcatttacactttacaaaagaagtagacatcccattttcagaaaaggactgtttcacagagaaatcttacaactggacaaaaagatacacagctaattagtaagtattgtggccaaaaagagaatctggtattctcataatctagacctctccttggatctaccagttggctttctatggtactgagaacatcccgaggactgcaccaccacattaccacaccattggctccaggacaggatgggtgctcccacccacagcac

SEQ ID NO: 345953 - DNA, 1000 bp, Homo Sapiens
tttcaatgtcacacccataatgagtcagagtctagctctgtcgcccaggctggagtgcagtggtgtgatctcagctcactgcaacctccaactcccaggttcaagcaattccctacctcagcttccagagtagctgggattacaggcacatgccaccacacctggctattttttgtatgtttagtagagatggagtttcaccatcttggccaggctggtcttgaactcctgaccttgtgatccacctgcctcggtctcccaaagtgctgggattacgggcatgagccactgcgcccggccttttttttttttttttaagacccagtctcgctctgttgcccaggctggagtgcagtggcctgatctcggctcactgcaacctctgcctcccaggttgaagcaattctctgcctcagcctccttagtaaatggaattacaggtgcttaccaccacgcctggctaattttctttttttttttttttttttgagactgaatctcactccgttgcccaggctggagggcagtcgcgtgatctcggctcactgcaacctccatctcaagtgatcctcccgcctccatctcctaaagtactgggattataggcatgagccatcacacccagtcaatataactttatattcacaaggaaacaaaacaatttgtttgactcgctttatagcaatatttgctttattgtgatggtctggaaccaaatccacaatatctttgaggtatggctgcactttctaagcatttcctgagtcagcctactttttctccattttattgccattattctatccatctttttgttttcttgttgttgtctggaaacagaaaagtgctgtgtcgcccaggctggagtgccgtagtacgatcatagctcactgccgcctcgatctcctgtgtccaaactatcctcttgcctcaggcttctgagtagctgaggctacagatgcacgctaccacacctggtttttgttttgttttgttttgt

SEQ ID NO: 345954 - DNA, 772 bp, Homo Sapiens
  misc_feature (59)..(59): n is a, c, g, or t
  misc_feature (84)..(84): n is a, c, g, or t
taagatggagtctcgctctgtcgcccaggctggagtgcagtggcgcgaccttggctcantgcaagctccacctcccaggttcangccattctcctgcctcagcctcccgaatagctgggactacaggcgcccgccaccacgcccagctaattttttttttgaatttttagtagagacggggtttcaccgtgttagccaggatggtctcgatctcctgacctcgtgatccgaccgcctcggcctcccaaagtgctgggattacaggcgtgagccaccgcgcccggcctctaacaacattctttaaaaatatacattttacacttcctgcacctcagcaaaggtggcaatgtaatcaacacactggcttattttgttctcctcactattagacgcatgtccccaaactacctgttataagccctgttttttttctggacttctcaagggctttgcccatcgttctttccccggcatctggaacagtaccacttgcgctttggtttatggttgagactcacacacgagaagcggaaccactcgatggggcattcgttgtcgcagcggatcatctcccagtaggagggctcgctggggtcgatggggaggtctgcgggggacgcctgccgctacgccttggccatggagccctgcttcttcttagaggtctgggctttcttctccttgggcgtgcccgaggtgacgtcgtcgtgggtcgcggttgctggacgcgttctcacggttctagttgttgcgctgccgccgagaacgcttt

SEQ ID NO: 345955 - DNA, 1000 bp, Homo Sapiens
tgggaggcaactttttctcccccaagaataaagagttttctgtaggattgtctgccaaactgctaacacctttcttcaagttttgaatgctggtgctttcccagtcttacaaatccacatcaacacaagattttcaggcaacagccagtacgcagatggtcctaaaatagtttgtacattgaaacaccagggggttgcagatggtcagccaggccagggaaaataatccagttataaccactgcatcctgaccacttcctggctgatggtgattgtaggacacatccctgtttcagagatgttaaaatgtaaaataataataataataataataataataataataataatataagatataacctgtttcctaaagttgtgatgacatttaaaggtgagaaagtttgtagctattattgtgattatggttactataaattctgagaaaacacagtggggttttctaattaacactaactaatttatgggacactcattaatgttatatatttatttattgttcaatgttcatgcttaaaaatttcttaatttttcctctttttaattgaggtatggtttatattcagtggaatgcacaggtcttaagtgtttacagttcttgaattttgacacctgtgttacgaacagccctaccaagagatagaacagtctcatcactcaagaaacaacaccctatcttgtcccagtcatcatcgtccctcctctgttctgatatcttctaccatggattaattttggctgttctagaacttaatggaatcatgtggcactactcttttgcatcttttctaaagacatgtacatgttggctgggcgcggtggctcacgcctgtaatcccagcactttggaaggctgaggtgggtggatcacraggtcaggagtttgagaacagtctggccaacatggtgaaaccccggctctactaaaaaatacaaaaattaactgggcgtggtggtgggcacttgtaatcctagctac

SEQ ID NO: 345956 - DNA, 1000 bp, Homo Sapiens
tcacagtgcatgccaagtgtgaagtgacacccccagcagatgacgtttatcatctttacttagtcacacaacatcaaggactggtgagttccagggaagggctccatttcatcacccgggtcagttctcttcccccacatgctccacaatgcagtagaaccaaacaacacattcatctacaatagaatgtttaaataacacctgtccaataactgcccttacttctttgtgttgttggggaaaagtaaaaaacagaaagcaatgaagcctaaaccctttggcaagtcgaccggtgcctattctcctagggcatttttagtagaacttcagctgggcctttccctcctcccaatatcagtgaggaaagtggcagcaggacaggtttggtcatctgcactggagtagaacgagaaaccaaacacgattcaggccacagatggattctagcacatttttagattggattggttaaaaatgtcatgttgtgcacaggatgcaggcaaaggagtttttttttgagggacataatgcctgtaaggcagcgtgaatggtccgatctaccattggggaggagctccctgtgtaaggacagagaaactaggggcctcaaggaaggtattggtttggaagataaaggagacaatctttccggtggcattgatggtgccttcactgtctgcgctggactcagagttgctgctcccagagtaggtgcacaggcctgggaggatgctgatacagactgcagcagaggggcagtggatggaggagccactcagggaggtgtttctgagagacttgcaggatgagggctcttgattcttgtcatctggctcagggtccggtttcagtcttttcacactgttgtcactctctgagctcttacgcttcacagctcctgccaacagcttcacctgggagaacttgttcttggtttctaagggcttcacagtcagtttcttttccacttccttcttgttctcttgagaaattccaacct

SEQ ID NO: 345957 - DNA, 1000 bp, Homo Sapiens
tcagtttgaatgcatgggagagcccagagtgatgacggagactgggggaaagacttccccctcagggaaagggactgaggagtacagtgcagtgaagtgagggctcccatagcctggggtaccaaaatggggccctggggccggaggaaaggacactggtccccctgagaaaggagacccagcagcctcaaaatcctctcgttgtgcatagtcgctgcttgatcgcttgcccttctggcgccggttacagaaccacactcggaccacatccttctcgagcccaagctgctgggcgatgtggctgatctgcagtgtgggtttcgggcactgcaggaacaaattctccaggttgcctctcactcggttctcgatactggttcgctttctctttcgggcctgcatgagggtttctgctttgcatatctcctgaagattttcattgttgtcagcttcctccacccacttctgcagcaagggccgcagcttacacatgttcttgaagctaagctgcagagcctcaaagcggcagatggtcttttggctgaacaccttcccaaatagaacccccaggatgagccccacatcggcctgtgtatatcccagggtgatcctcttctgcttcaggagcttggcaaattgctcgagttctttctgcagagctttgatgtcctgggacttctccgggttttgctctagcttctccttctccagcttcacggcaccaggggggacggtgcagggttccggggaggccccattggagttgctctccaccccgactcctgcttcgctctcaggctgagaggtctccaagccgccttggggcactagccccactccaacctgaggcccacagtacgccatccccccacataactcatacggcggggggcaagggggaatcccccacacctcagagcctggcccaacccccggcccgattcctggccctccaggagggccttggaagcttagccaggtcagaggatcaacccagccc

SEQ ID NO: 345958 - DNA, 1000 bp, Homo Sapiens; identical to SEQ ID NO: 246620

SEQ ID NO: 345959 - DNA, 1000 bp, Homo Sapiens
tttttttttttttaattttaaaaattctttatttaaaataaagtttaaaaataatgtgggtagtgtaaaatattaatacagaaatgtataaagttgaaagtttcatgtgatctacactgttcaaagaaagctgtgaatagacctttctatgcatttataaacataagcacacacattttaaaatgagttcacactgtacacttttctattaataacttgtttcacctaatgtatcatggccatttttccatacacaatgaatgtactttattcattttaacagatacgagatattcctatatggctgaaccacaccttaacctatcctttaatgacagacatttaggttttctattactttctaccatgtcatttttacgcttctgtgggatcttaaatattccctcagttcctgtttcattttgtcttccactttggaaagtaatttcagtgaccatgacctctagcttaataaatacttggatctgtcaagtctcaatgttggtagatatattagtgtggattcaatttcaagtaacagaaacccaactcaaagtaacttaagcaaaaaagggtatttattggttcacataactgaaaagtccaggggatattctagcttcaggcacggttggatccaggggcacaaacgctgtcatcaggattcaagtctctccatattttggctctgctttcccctgcactggcttcattctctacatggtaggccctgttagtttgaggttttcatcctacaaagctaaagcaccctcagtaaagagagcttctcctccacagttcagatggatttgctgattgatgaggtctgaattacatgttcacccacaaagctcaaggttgggtcagactgtccaaaccacagactgaaaataggaagaggtggttttaagaaacatcagggagttgttacaagatggaacggatgctgggcaattaaaaactactgatgtccaggataagaacagatatgaaaaagctt

SEQ ID NO: 345960 - DNA, 1000 bp, Homo Sapiens
ctaaagacttactattctgttcctacatactctgttaggatcagatagatgttatagaaatgccttttgtttctcctgcccttcttgatgtcacagttttttgtacttccagctgtctaaaggcatgaatctcctcttggagcattctcccagacccttctttagaagagtctatactaagttcttggtgccctcttcggcagccaagggtgaaggccccatagaggagaggatccaaaggagcattgaggaggcccaagaggaaaaggatgtggctcaggctgggagggacttcagttagcatggtgggggagaaccagtaccacatacccagtaggtaataaggtgtccagcagaggatgaaggtcagcaagataagcagggccagtctcagggcccggagacgaacacggggacaattgtcaaaggagcgggggagggcaaattcaccagcaggggctaggaatttagaaaatatactgtaattcagacactcagcttctgatctgagtatagggtgaattgatggaggggcatagctagtgagacagagctcgcctcctacaaggaggagaatgttgcaaaccgttttccccttcccaacctgggactatatgatttcttacccccagggattatgatagaaatatgaagccaccaagtctagacttgatggtgttcaagaataaataatactgattgcctccctagtccttgtccagctaactcagctgtttataattgaagggattcaacaaaattatctctagcatcaggtgctagacatggttagaatctcaccatggtttagtgactggtagatagctattaggtaggtagataaataaatgatgctagaggcaacaggtctagggttaaggattaaggcctgggaattggagtctcaccatggctccccttccttgtctggggcctggacacactgaggacaatgcggctatagcagatggccatggcagtcagtggcagcagaaagagg

SEQ ID NO: 345961 - DNA, 76 bp, Homo Sapiens
gctgtagtcagaagggtgacatggcagtttcctcatggcagttcagtagagggagccagttgtcatcatgtacagc

SEQ ID NO: 345962 - DNA, 1000 bp, Homo Sapiens
ttcctgtcctcaaatgatctgtctgccttggcctcccaaagtgctggaattacaggtgtgagccaccatgcctggccccctttgctgtttctaaacacccagactcattcccactttagaatttgttgtttcttctgcttgggatgttttgtgcccggtgcctcgtggtcacttaagtcatgctcaagtgttacctcctcaggcatcccttccttggccaccccaactaaagacaccttctatggcagtgtcacactaccctgttttatttttttcatagccctcttcaccagttgaaaattatctttcatttttttacttgcttattgtccatttctccctgcccagaatttaacctccatgaaagcacggaaactttctgtctcattcactgtcacacccacaacacttaggacagggcctggcacatagtaggagctcattaaatagtgtggagagaatcagagggttttgaatacagtcgtcactttatacccatgaaggagagagtaaagtagggcaagcagaggtcgacttaggaccagtgaagattttacccttctctgtaggagagttgctggaaggtgaactggcccttcactggaggtaattatattacttgaggtaatcaaaagtggccagacgtggtggctcacgtctgtaatcctagcattttgggaggtcaaggtgggtggaatcagttgaggtcaggagttggagactagcctggccaacatggtgaaaccctgtctctactaaaaatacaaaaatattagccgggcgtggtggcacatgcctgtaatcccagctgcttgggaggctgaggcaggaaaatctctggaacccgggaggcagaggttgtagtgagctgagatcatgccactgcactccagcctggacgacagagcgaaactccgtctcaaaaagaaggaaaaaaaaaaaagtaccatgctttggctctttcatgtcacaggcaattaagttttaagtgaggcttaca

SEQ ID NO: 345963 - DNA, 1000 bp, Homo Sapiens
tttgtgttcatgtagagcctgtattggaaaggaagagaaactctgagctgaaagagtgaatgcccggtggggccacatatggtcacctctcccccagccttcagctccccaggtcaccatatctggggaggggagaagggtttggagaagtaaaacccaggagatgtgtggaggggggatgtctgtttaatcccagcacatcctctgctgtcctgccccaagatggtggaggacgtcgagtccgccgggcagcgtcactttttcttgggctccttagaagctaccaggtacctctgggccacactgagatgaggggagtagccgtctgcataggaggtgtcttcaaacaggatagaatagtcctcctggggcttgtctccaggtctggccacgtagtctcctgaggcagggatggccccacagaggggtgggggcttgtcaccaggcttcccaatccacaggggcagggtcatggccgactgctgcagcagggtcatcagcacccctctgcgcatggtcttccggggtggctccaagtcattgtagagacccgcgatcttggccactgggctggaggcgggacctgaggtgggcaggtgcagggggcgtgccttcaggcagttgcggggccagggctcggctgaagctgggagtgaggaccccgttctccggtgggataggaggggacccgcgatgctgggctgcgctggcggtagggcgcggcggggctcacaggaacattcctgttctcctccccatggagattgtgctcgtcgtgcacggcttcccatccgccgcggccgcccgcggttggagggggcctggcacccccgccctgggcgctcctcccggtcccgttgcgccccgacctccgtcagccgcacggcactggccactgaccgtcgggcctcctccgccccagggcgccgcgcaggtccctttgctgacgccgagcctgagcctgagccggtcccggggtccaagagggctgtgtgcaccc

SEQ ID NO: 345964 - DNA, 75 bp, Homo Sapiens
tgccatcagaactctaacatgctattaacttttgtacctcacagaacatcagcttatcaattcaaatcatctgac

SEQ ID NO: 345965 - DNA, 993 bp, Homo Sapiens; identical to SEQ ID NO: 161324

SEQ ID NO: 345966 - DNA, 1000 bp, Homo Sapiens; identical to SEQ ID NO: 246621

SEQ ID NO: 345967 - DNA, 1000 bp, Homo Sapiens
cggttccattccattttattacagtcctgtccttgagttccagaatgaatggctatttaatacacaaccccaaacactcctaaaatggatcttgttaacattcaaaagtctcccatttctttctcagtatattaaatcaaaaggaaaaaaaaatcttaaaaaaaaaaaatcaataggtttagttcaccccaggaaaagcacctttacaacaggaaactaaattgtcaggaatctgaccaaagacacaaagcagcagataagattcccgacagaagagagtgactcccactggaacataaatagatccccccaaagtatacatatttcacatgagtgtgtacatatacatgtcatatattaaaaaaaattggtttctatacccaaaaagttattcagaaataaatcaacaccccgagaccggggatgtcgggtgccgcagccaggttacacatcgagcttgcacctcgctctgtgcggatgacccctcggtgcactgtgcacactggcctggagggggctggatgggggcctctttcctgccccccaatccccaggcctggcagatccagtgtttgcagaaaagtgagccagggaaatctaggaaggcaggtgcctgtgtggtccccaaaccccctggtgcagagctcaggagccagctggaggctgggggcaaatggccaaggccaccgccagctgccctgcaggctgccctgggtcctggggtaaagggaagtgcttgggaccccaggaatggaacagcagcactctcactttttaacagcaggcctgactctggggtctgccaggccctggagacctttgtagtatcgccagtctgggcttctcctgggatccagtggccttgggagagggagtgggctttctgacccgccaggcctgagcctcgtaagcctgttgtgtgagtgtgtgtgtgcttaacggagctcaacacattgcaaatgagtgttctactgggacatactggagtagtgtctgcttt

SEQ ID NO: 345968 - DNA, 1000 bp, Homo Sapiens
cacttaatacaaaaaatttaaataaaatacacatcttcagatgcacatacacacacataaacagaaatctctagatggtcctaataacaatcaaatattaataaagcataaattttcactaatcctaagagatcaggtcaatatatcacaagacaatgggttgtacagttgaaaagaaacaaaatttagtacttcattgtgaggagaaacatcagattgtaaaatacactgaagctaaacacatgggtacaaaagattttatcaacattacaagtgaagtttaactatataaacagagaatgaaccagtagcttaggtttacgtcactctcgaggatgaaatcaggtgccatacatagatcaaaaatcaattagtagctgtgcacagtgactcatccctataatctcagcactttgggaagtctgaggcgtgtggatcacctaaagtcaggagttcgagatcagcctgaccaatgtggtgaaaccccgtctctactaaaaatacaaaaattagccaggtatggtggcaggcacctgtaatcccagctactcaggaggctgaggcaggaggattgcttgaacccaggaggcagaggctgcagtgagccaagattacaccactgcactccagcctgggcaacagagcgagactctgtctgaaaaaaaaaaaagtaacagatgtctactactgagctacttcaaataacggatactcatgaactgaaatatgaactacattcaaagaattactaaccaaaaagaactcactaatatttaataaggattgagtggtaaccacatgttttctttcctatacttgttataatcagagcgtttctctattatgaattctctgatgtcgtctaagggctgagacacagctaaaattattcccacattcgttacatttataaggtttttctccagcgtgaattctctggtgtagtcttagggacaagatctgatgaaaagccttcccacattcactacattcatagggt

SEQ ID NO: 345969 - DNA, 1000 bp, Homo Sapiens
tctgttatagaacttgtttatttcagtggaaaattacagctctgctcgtcttgttgaaagtgatttctgaacacaatagccagaatattcctagcatcttgcatatattctagaagatagaaacaaagaactggtagccagcccaaggggagggctgttggtagcaggaggaaagccaggcagcatggactaattagtctcctggggctggaagttctgggaaaatatcactcaggtgatttgtgggtcctgggtggagtttccactcatggtctattgtaggctttaggtttggatcctgggtgggaaggatggaagagctggcgttgctggtgtttagtgaattgatgatattgaatattttaatgggaggatacagctgaagttgaggtttgatccagctcatggccaaatagtgcggagctgaatagatgaagttaaacagcataagtgctataatcgatatgaccataaaggctatgagtttgaagcgatagcgtttccagaaaatatagcagaagttttgaactggtgaccgcagccacgtgaaagaggtgttggtgcgtaggggaggatgaagtgtggggtactggttgggttccgactggcctcgcccggctggcttgattaaggcttccttctctgacagaatctccaggctcatcttcaccttgcccgacaagcgccatttgccaccatcgaggacctggcaaggccaccagccagtcacagtcttcttcttaaagagggagaagtgcttgtattggatgaaatagggccacttggggtcggcgtccatcatcctgatggagcactgcttggcgtgccgagccgggaggggcatgtcagacaaatccagctccaggacccctaggaagtcgtcgggggagaagatgtcattgtcccagacctggatgataagtcgggctgggaacttcatggacgtggcatccaggctccatatgtaatccttctggctctggacacacgtgcgctccgc

SEQ ID NO: 345970 - DNA, 1000 bp, Homo Sapiens; identical to SEQ ID NO: 161325

SEQ ID NO: 345971 - DNA, 1000 bp, Homo Sapiens
ctgctttaattgttttaactgctttatttcaggtttatatattctacctttcaatcaccaaacttctgttcttagatttctaaaaaaatagtcacttttcgaaagcagaaaaggaaagatatatatatttaatatataaaagaaaatgctaaatctgacataattatattcttaaaaacattccatttatttacagatgtataaaaaggtgaattattggtctattgagatcatgcttcttatagtgttagggtgagagctcactgtcttccacgttcctcaactcctctcactcaacttcacctttcataatcacacatgtaatattcatagatcagttccccctagggtaaggttaaagggtaggagtttttggagattttagatttctgtcaagactgcaggattgttctgaagactaagccctcctcaaattatccctgacaacacctagttctaagaggtcttgagaacacagtatcttgggggttagaatggtatctgcagccttccccctaaaacgcctggaatcatccctcatttccatcttcgtacaactctcatcaagagtcaaatggtatctccaatcaagaatcattacctgtttacctatattcttcttaaaaaaaaaaaaaaaaaaaaggaagtgttaagctaaaatggtccttcttttcctgaggattgttcactcacttgcctgctccttggctgaccctcaaaagccacaaagagagtcttgggaaatcaggaggaaatgtaggggaacgacaagcaagaaaataacgggaaactgctatacctggattaaagtactagcatctctaaggacaattattagcaggggagacaggtgctggactccttggctaaggcattgaatgaaatctgctgggtaaagagtggaaggataagaagctgaggagcactctttacctacttcaggcttctttagtaacctttagaggagggaaggttaagtgctgatgagcagatctagaaa

SEQ ID NO: 345972 - DNA, 1000 bp, Homo Sapiens; identical to SEQ ID NO: 161326

SEQ ID NO: 345973 - DNA, 1000 bp, Homo Sapiens
ctatctggagaccagggagctgctatgagactggccggaggaggaggacgaggtggcggcgctgagctgggagaagccgctggtgcaggattccaggctggacatggagcccctgaagtcctcagaggcgagcacctcacagtagtagagaagtttgcacttgggcccggggctgtgcagagccgtcaggacatcgtccacacccgggaggctgcaggccacgctgctgggggggctgtgcatttgccactggagcaggtagacgccgggccaccgggtcacatgggagccctggatgctctccccctcccggcagacaaggggagcctccacacggctgtaatccctgcccaggacccagcctttgtcgatcagctgcccgctggccctggtccccggttcccgggcgcccagcctgggcgcctgcttggtgtggtacaggctgaacaccacgtcccctcgcaggatgtcaaagtcccaggtgatgaccgactctccttccaggatctccacggccacctcgtggggggctccgcggagcacgctggctgaatggtaggtctcactccactgccacagctggtccgtgtgctcctgctcctcttctgtcatgtagagggacttggggaccagccctccttcggggacattacacacactctctcccccaaggaagtcagggatcacttctctatccagatagtccacaaggcctccgggtccctggtagttgctgccactgtagatgaggaacttccgcctggtgttctcattgatgaaggggctgatcagtgtccagagcacggggaagactcggggggctcgcacgatgagcagccgacccagggtctctgggtaattgtcctcaaccacctcaatcatccgcagcagggccttcacccccggccgccacaggtgccgcatgttgagtccctccaggtctagcaggcaggtccaggagctgatgggacggcccagctgccttgtgctcccctcacac

SEQ ID NO: 345974 - DNA, 1000 bp, Homo Sapiens
atttccttagtttattaaagatgacaatgaactgccaggctgcacaagcaccacagcaggtggaaacgcagttcagagcacgggcggcacacacggaacatctctactaagactcgcactccttttatgttagttcaacgaaagctctaaatccttggcagagaacgtcaaaaacagcctcatttaagtggaaaatatttgtcttccactcttctgctatgtcttgaatcttgtctccacctggtaagcaaactatgttttttttctttccctttacttacagaaagaacactatcacctgccttcatttagaaggaattctcttcagtgcattcaaagcttctccccgcaacagcaggggattttcagatagtggtaacttgcaaagtgcttccaaaacatcccatcctctacccacttcccccctcttgaataaataactgggtatttggaaggtgaggacggcatcgtgtcagagtcactaaaacagacgcacgatctaaagggatggggtgcggttgagggagctagggaaaaataagtgacaagtgaggagcctatgagactgttgagttcggcttcagaagctgtcagcattgtcatcctttgatcctatgctgatgtgaaacaggcaggacaagacggcacatctgtcctccagcgcagtgacctggagaaagagctggatgtgtcacctttttgttttttgagacggagtctcactctgtcacccaggctggagtgcggtggcgcaatctcggctcactgcaacctctgcctcccaggttcaagcgattctcctgcctcagcctcccaagtagctgggattacaggcgtgtgccaccacgcccagctaatttttgtatttttggaagagacagggtttcaccacattggccaggctggtctcaaactcctgacctcatgatccgcccgcactggcctcccaaagtgctgggattacaggtgtgagccactgtgcctggcctggatgtgtaat

SEQ ID NO: 345975 - DNA, 1000 bp, Homo Sapiens; identical to SEQ ID NO: 246623

SEQ ID NO: 345976 - DNA, 1000 bp, Homo Sapiens
ttcataagcaaaatcaattttattagtaaggctctttccacatgtccaaagcaaacaattaatgaattccagggaaaaccacctatatacaatgaaattagaagtatctcaggatgacaaaaaatatacaaatatgtacacccataatcaccgccgcctccgaaaaccttttttcttccgacctttctgaggtatcttcttccgcttcttaataggattctgatcctcatcaagatgaacagttccccctgtcaaagcactgatgtcactgaagtgtgtaagggaatgaagttgtgagctcatgacatttgctcgttttcgccgtcctttctctcgcttactgacgctcaaacgcaccatcatgctctcctcatagttaatcctgtgttggtcctcctgactctggcgggtaacatggggatgccgagcatcacggatttcctctggagcatctgagtactgctccttaagttcacgaatgacagagctgctcaatgcccgtctcttggctcgttctagacgcttcttctcccgctcagcttctgtttcatcataatgtactggaaccaagcgtggaggaacatatttcttagacactcccttcacagatttcttccctgaagcctcagactggtcatcttctgcttcatcttcctcctcatcctcagagctcaacttgctcatcatattgctgggatgaggcttaaaacgaagtgggtcattctcactaaggctgcctgtcactgcagtcttgatcagcttgtcaatttgatacttcagcttttggtccaagggacgaagcttttccaaaaccgtgcgaatctccaccagtctcaaaactgcatcatgtccctgaagagatcctcctgaggctttgtccagaatgaggtgggtcaaatccataaggtacatgagcagcagctggtctttcacttccaagaagctgagacccttttctgtaggataggcaccagcttgaactttttgtgtcagtgatttc

SEQ ID NO: 345977 - DNA, 1000 bp, Homo Sapiens
agtgctaattcttccagatacatttattctgtgaagagggctgagacagtttgagggtgagcaaattgattccatatttgtggggttgaaaatattctgagggcctaagcagatcattctgtggaagggtaatcatgtatactgaggaacatattagtctattctacagttgagaagttgtcactatttctattcaatgtgagttttcccatagacaatgaggactgacttctgggaataggccttcccacaatcagcatatatacaaggtgtctttcctatatggattctgatgcccagtaaagtatacatgctggcagaatgccttcccacagtcactgcatctggagggtttctccccagtgtgtcttctctgatatgtaatcatctgtgatttccagaaaaaagtcattccagactcagcacattcaggggttttctccctaggatgagttttctgatgtataatgagtggagactttccacagaaggcctttccacattcactacattcatagggtttctctccagtatgacctctctgatgtagaatgagatgtgacttcagggaaaaggccctcccacactcagtacactcatagggtttctcccctgtgtgaactctcagatgaataatgaggagtgatttctgggagaaggttttgccacattcaccacactgataaggtttctcccctgtatgaattctctggtgtatgataagaggtgatttctgagagaaggattttccacattcagtacacatataaggtttctctccagtatgaagtctttgatggccagtgaggtgtgacttctgggaaaaggccttcccacagtcagtacacacataaggtttttctcctgtatgaattctttgatgtcctatgaggtgggactgttggcagaaagttttcccacattcaccacacttatagggcttctctccagtatgcgttctctgatgtataatgagctgtgttttccgagggaaggtctt

SEQ ID NO: 345978 - DNA, 1000 bp, Homo Sapiens
aatggacacaagcacggtaagtttttattgttaaattactatgttaccctatgcagagcaaaaagtaaagggactgatctacttctgcattcacattttaaattcttgaataatgattaagtgaacaaatcatcagctaggaaaggaaaactgaagctagggtttccttataagtcttctaatttctctaataattagagaaaacatgctcaaaaactttagaaaaacatttttctatatgtgatatattaataaataaactatgtttacctcattaaattggaaagactcaatattaaagaaagtttatatccggctaatgcaattatcatttggatataatataggcatcaaaaaataaaggagtggcataaatttttccaaaatgttaacacttaatgctgagtttccagttccagaattgtccactcgccttgaggcgaacaatcttcagaggaaaaactagccatggtgatgctcgctgaggaatcaagtggagatgttagttcactccatctgttcaaagtgtcaatatgtgttataccctgaggttttgagctatctcgtgctaaaagtagtgtctgattgattagatactgtgctaaacttaagtcttcaggaacggaatttgtaacatctaagtttgaatcctgttcagagagcagttgctttagtagtgtccaatcttgttttgcaaaatgttggtcatcttcaaaatccatatctgtaacatgtgtttctgattccactttctgctcaaatgcttctattacatccatctcatatattggagacagggtttttgaaggccgatggtcatacatgcgggtttgtgccagtgtgtcacaatcatctatgtctcctgcagataaagcaatattagctttttcagtagttgtagaatggctctctttcactggaccttcctgaggcagaacttgactccgaaaggagtctagagattttgtagagctgttctttggtatgtcagaattgggtt

SEQ ID NO: 345979 - DNA, 1000 bp, Homo Sapiens
cttgtacacagatgctttattttggatgttaatatgtcaacattgtatgcaagattctcttacaatgaagttttccatatatcacaaaactcaatttagtcagggtaattgctgtattaatgtgaaaaccttacaataaaatgcagtattatgtatgtgtagtcagtttccatgcaagtatggctgctacatgttatgtctggcatttgtataacatactgaaagaaactcagaggaacaaaacagtataaaggtgacttaagatgcctgacatgtttaagataaaaaatcttgcaaaaagcaacaaagcagttaactgaaggattcaaccagtaccaacccaaatatgtattatgtccaataagcccagacttatccacaatatattaccatttaggataatttaatgctcaagaaaaaatatgctttaaaaaatatagccttacaagatattatactttggtgattgcagactatgtatatccaggtaagggctacattaaaaacaacaacaacaaaaaaccattatgtgctattagttcaaggtaactgaaatgatccagtatgagtttgctacaatcattggtttcactaagtgaaatttctgtgagaagttcattaattagaaagcaatcaacatacttaaacatgctaagaggattcaaattggtttatctatttatcaataaggcataatcttagtaccatacattttcttcacttctcactatatatatatataaatatatatatatataaaatatgcaaaaactagcaagtagatttaaatagcttaaaacccttttaggtctactgttcaagagctaagcattaaaatacttagtatttccatttctattaacatacaaacagagcagaaaatcttaacctgctttcattttgttttataaggcatagtagtattttggtatttgcaagaatttgcctggtaatggttgattccatttagttaacttgagaacttgccatcatttgtttt

SEQ ID NO: 345980 - DNA, 1000 bp, Homo Sapiens
agggctttggcctctttattttctttttacagtttattccacaagtaaaagacttcacaaagcactatggctctgactattccccgaatgagctgctgaggatggagctggctattctggacagactgcactgggacctctatattgggacgccgctggacttcttgactatagtgagtaaggaggtgtttacagagtctaccctaaactcgtttgtgcctttggaacagctgtttacaacatgggatggcaaagcacaggcgtgcacacgcccttgcacatgcaccacagtgaggtgacgcacaaggctcatgacatacggaagagtgaaaaggtatcttaaatccaacacagttccaccagactcccacttctaaaggacattaaattaactttacaaagatttttagacggcactattatggtgagtttctcttttaaatacacactgcaaaaatatttaactttccattctatgaatactgtacataaatatctgtctgcttttgctacactttacacacattcacttagctgtctttattcacctacacacaatccttattgaagctttagaccatattgatctggcacttaaaaaaatatcatacattagtttgtatttgttttagttgggggaatgatggtcatccttaaggatatgattctgttagtaaggcaaaattatgcaatgtggaaatctcatggggttttggtttgttatgaagcatgaagattaaattactaaagactgtttcattacgaaaactggccaccgttgccaagttgcagagtttcgtcttatgataagcagatacaagtaacttttctgctaccttggtcttgaatagtatgtttctatttttcagaatggaaacattgtcatctaggtactttccgctcataacgatgatgtcacaaagcagacttttttttttttttggtcccggagtggaagctcagcttggccacaggatgggcattaagcctcaagcccctt

SEQ ID NO: 345981 - DNA, 1000 bp, Homo Sapiens
aactttcaaaaaactaattttaatcaaaacaaaaattgttgatcattaacaagtttataaaacagtgatttagttacataaataaattgatatcagtgtatcaaatcttaattactttcaacttcatgagcatgtttacatgggtgatgaattacaacctttttttttctttttacctattataataaataaaatggagcgcatgaaatagttcttctaaacaaaaatacctacaaacatacctctaagcatgttctctagtgaagggaacaagagacactggacaacttttgcaccaaaacataaaaattgctttaaaaagcacaaggttacagaaccatcagctaaagtaaagacactatactgtaaccaaagttggtatttaataatataatgaacagtttggtagttagatctccagtttggttattttaaagcattaagacaaggcaagatagaaggctgcttttgtttgagtaatttctagagaaaataaaatatattaaaaaaaaagaaaactgaaaagtagaacagtcatacctacacaactttctgtcctgcacaaagtcaaaatacctatgcagaatagatatataatatatataatgttatttgtgcacaaaggttagcttattattagctcactgcaaaggcgtaatgtatcattatgtcaattgttttggaaaacattttgtgttttgtgtcaaaaggatatttcttttaagtttcctaggctaggaggcacgaaccccaattccggcatattgtatattcttaatgctaaggcttgctgctctggctgtgtattttgttgtccctctttattctagtgcctgttataagcatgtgtggtgtagtggtggttgttggtggtgtgtgtgtgtgtctgtgtgtatacatatatatatgtatacataagttgtataaatatatatacatatataatttctcccaatagatctcagtccaaccatgcaatccaaaaggtggctctgcatag

SEQ ID NO: 345982 - DNA, 1000 bp, Homo Sapiens
gggggcctccacattttattagggatacggcagaagcagaggcaggaagcagagcagccgcattttaaacaacacataaattaaccgcagtgcggggctgggggctgggggctgggccaggcgcttcaatatataaaaacaacaacaaaaaagacggacgaacagaccccaaaggcatggggcagaggagggcagcaccatccagacagcagggaggaccagggcagagagagaaggcaacttgtccccctggcccccaaactccaccagcacgggggcctccaggagggcctcgcgagggcttcggggcagaggagcagccgggttgggcagagatggcacggctggtgggcaggaagcccagcaccacaagatggctcagcctgaagtagggactggagggctgcgacacagtggcctttaacccccagtcccttccaggaagagccttactctgggtgagagaagggaccaagggcggggtctctccctgagctgagcacggtcatctcatccgccgaagcagtgggtggtggggtgtgccagggacccccttttcaccttcttatccacctgcctccttggtcccttcagggaggggtccccgtctccgggggctgggcatgaagagagccggtccagtctgtggtccccagctccagcggggccgtggcgtggcgcagcccctcagccctgactcccacaagaggacagcgagtcgtagagtgagtcactgagagactccgaggtctccagccctggggggcccccgctggccactctgccttcctcggccatgtccgaagtgctgggggtgcggctacccccgaaaggtgggccctggggcgtaggggacgggcggctgggctcctggcttcgcttccggtccacgggcagggccatgggggtcctgggcagcccctccagttgtcggggtgggcacatgagagggtccgaggagctgccggctgccctagtattggggaaggtccagttcttg

SEQ ID NO: 345983 - DNA, 1000 bp, Homo Sapiens
aaggctttttctttttatttcagccaaggaatgatgcatgctacagattaatctttactttttcccacttggtttttcaaagaacaccaccacttcaacccccaatgaacatggcacttgtttgtttcttccccttctaatttattccagattttcaagtgttttcttcagtaacgctgctttctcctgcagttcaggtctgctgtctggctccatagtagctaaagactcaattaggagcactctgcattcagatgtcaaacattcccactgtttagattcttcaagttttttaagcagcaattctatcacagataaagcttctgttctcacagatgagtaggtcttattttctaaagaatatgtgattgatttacaagtttcaagcagaatttcagccaaagcctcaggatcggcatgttcttcttccaaaagcattaacccctgaaaaaaggcattcattgattgcaggactcctagctgcactttccacgtgctgagttttagccgttcacacatcagtttgcacagctcctgacgataacaacgttgggtctccgcgtttcgcggccaggctttgcccaggctttcaaaggcacccagcagatattccagctggagctccttttccttttcattctcctcttcatttttggttgtccggaccccactgctttcaagtgagttcttcttgatgagaggtatgacaatgttagagaactcctggaatctgtcctctttggtggccttcaagatatcagctgcacagctgattgctacaatcttgtatttgacattctctttgctacattccttcagaacagcttgaagaatttcatttgtgctgggttgattgggcacagacttttccagctctgcactgcaagctgtcaccacacaggcaatggctttcaatagctcctcctttcctgcccacgttcttccagccaggccttgcagcaatgcggtcagtatcattccgagatatggaggtactaga

SEQ ID NO: 345984 - DNA, 1000 bp, Homo Sapiens
gacagaataaagatttattatagagcttcagccttacacaattgtgggtgctggtggagaagtctaggccaggctgttccctctgcatctggttctgggcctgaagtcactgtaggtcgactgtgaatgcagcaaggatgaagggaagtccataagaacaaacagaacccatgtctgtctcacggcctccactgcaatgctgtgtgtgatctcaggaaaagctgatgctggttgccatggagctgcacacacacctggccagtactttgcaaagctgaaggaggaggctggcaggagctggaagagctctgggtccagggagctgtctctggtctcttctagctcccctttttggcctggagtcatattttcaagctgtcaccatgcttgggtctgtacactgaccttatgagtataaaatagctgctgatcaaattaatgcaaatttctttatgacctactccaatccagaaccatgagagagaggaattccgggacatgttcctccagctgagccaaatcggtactgcacaaatccagcatattacctgtcactgaatgtctcgtgtggggttacctccatgtttaaagcatgtaccagcatatagcctacatgtgtgttgattaggagagttttgcctacatgttcaaattgcctaactatagctatatttatatcacaatgctgaggagatcttatgacttccattctaccactgctggctcacaatatacattcatagatttaggggtgaatcaagccaaagttgcctaactttagtaaaaaccattcaccaacatgccctagtccccatgaagcgtgactggtctaaggacatcttctatgagtcctacccattaagaggaaatatggacaaaggatcaagtatttattcattttttaaacatcagaattgaaaaggttcttccatttatttaatctgtcatgtgaagcattagaaggtagtttacttgcatttgaggatcaaaaaatccccat

SEQ ID NO: 345985 - DNA, 1000 bp, Homo Sapiens
ctgtaagaaaagtcagtatatttatggtttgctttataaaagttactataatacaatggtacatagtattgaattcacaaaaatatgaacaaatatttacatcaagacacacaacggaaacacttctcttcaaaacaagttacatatggatgatggagtctacccgcacaaacatccctaaaactcattggttctcatctttgcagggggagggagagaaagcaaaaaatagcagaaacccccaactcttgaaaagcagagatttgttcaatgaaaaatgagggagttgaaagaaaaatgactcgacacatatcttgattattgcaaaccactctggggctggggctcctggggagagggaggtctagtccccttagtgaaggccagccgaggttaacactgggcacgatggctgggagcaaggtgaggccagggggaggggtgaggcaagggtcccttccctggtcttctcgaacacccccacttcttttatgggaaggggacagaatggagacagccctttggaggctgtacatgtaacttgaatcagccgtctctacaagctacgcatttcctcatgtgaaaaataaattatttcctcagttgcacaattaggcagaaaaccgcaaacggaagagaagttcgccgctgtgcccaggtaccccatctgtgtcttgttgccaccaatttccttgatcttgaaaccggcgggcacagtctcaaatagagagggcctgggggaaaggaataaaaaaaaaacaacaaaaaacacacaacaaaaccaccaacaacaaaaaagagaaaaataacaattctttgtacagaatttacatgataacaagcttgacacaagctgagataccagaggctccggccgcctgcgtccgcagggtgggagcagctccctcatggagcgcgctcatcttgatgaggactccgggtcacaacagtcactttccagaaattatttacacgcctcctctgctttctggggtacggg

SEQ ID NO: 345986 - DNA, 1000 bp, Homo Sapiens
gtggtagaggctactgcaggtttctttattttctaaagtaggcaaggctcataaattgaccaattcacattgtgattacttggtacaatgcatgcatgttattggtacacagagtgctttaataggaatctgttggattttcaaaattctgacaaggccatttttacctcagaggactattatcctttcacttattcattcattcaacagatacgtatcccaaactgtgtgttacctcatccatccccttctcaggaagaccaaccctggaaataggtgagaggagagtgttcacagggcacagcatgtgttgttgatactaagtttgtggacagcaatggtacaatcccaaggacttgtataagtggcctctacctcattaaccatttccttgaacccagaccatcagggagctagtgagctgattcaagagaggaaagaacaattctccattcaagtcagacatccctcaaggggaacatgactattctgactcatttgagaaggggcaaagaaaaggatatgaggtggaaacactattatctgtaaagtttagctgatggaagaaaatggtgtcatttgcttaactttggaaaatgcagtgggtctctgggccctgagggtggtatgcaaaataagcccatctctccacctacagccttcccaaaaaacaggctgtaggcgtggctgctttttaagaagctggatgctaacttcagatggcacagaattcaagaccaaaactgcaataacttattagtcatattttccatcttcagttcctttgggggtaaaaataccacgaagaagataaaatggcttttctcacggtataggtcattgttgtgttttctgttcaaaaaaagcccacacaaccacattctctattataaaaagtagtacctctcatagtaaaagcctgctctacagttacagttttcgtttcagaattaacaatccattagctcaaattaatattggctgcatcaacaatattcct

SEQ ID NO: 345987 - DNA, 1000 bp, Homo Sapiens
gtaaatacgggcttttattcactgccagctccaggatggaaggagggggtgaatcatgcacagccttggtctaccctccaacactaggcagtgctggacaggggactcagaaagggaagcagagtgggctgttgatgtctggaaagctccctcaccagagtgcccagtgggtcacacagcatcatgggggatgagctggggctggagtcggctgtatctgacaccagaccctccattcaagctcccttgatgacaacgcccacaacagggtctggctgatgctccgttctgccacgactcctgctgggtgatcgtgggacaggtctccgcccctcgctggggtctcagctgctttgtctgtaaaatggaggtgatgacaccacctccagccttctcaaggctggctgagggagaagccacgtaaaagcgcttggcacacagtaggtgcttaataaacagtcaatgggattagtcttgtaaacacaaggaaactgaggcacagagtgggaaagccattttcccagagccacacagtgaagctgaaattcaaacttgagcctcgactgggttttctggcttgaacttcatcccagagaggctctgacatatggagggaacccctaacaggtgtttcagacacatcacggccaagggcttactctgctgggcctcaaacacacggcatcttgtccagggtagactggacaaggccaggccaaggcagagcctgaggggaggggacactgagtgtttctggaagtagctggacgtaatcccgcaggactggcatactggagcgtgccccgagacagccgagcatttctggaggctgccttggcagttccaggtgaggcctgtaccttcctttatcagtgcccacctggggagcggatgacccctctgcccagatccggtgaacacctattcatccatcaaagctccagctcccatatcccttctccaggctgaagccagcaggattggaggcagactctatata

SEQ ID NO: 345988 - DNA, 1000 bp, Homo Sapiens
gagacggagtctcgctctgtcacccgggctggggtgcagtggcgcaatctggatgacccagtgagactggggattttcaaggattagggagtagtttggttattgttagttctgccgtttgctgtgactttagaacaaatctctagaaaagtacgtttccactgtatcattaccatccccattttatagataaggaaactaggctcagagatggtaagtaatttgcccaaggtcaaacggtgaggaaggtggagtcaggatctttagcaacatcacatgtctggaagctcaaccaaagaactcactacctctgcagtctttttctttatattgagctaaaactggtacctttcaacttccattcttggaatctaaaaagcacaaagctactccatcttctacatgatggcccttgaaagacttacaaaaagctgtcatgtctccctctccacctcacccctgagccttttcttctcatcaataggcttaacactcacacttccttcaatcatttctcctgtgatttgatttcaagagtcctcagcctctcagacactttttggcagagcacaacccaattttttattgttcttcttacggcctagaaagatacagaattctccatcagagtgagagagtgaagtctatcatttgttgcttatttatttttagagactggagtacaaaaaatatctcaccttcctctgaaatccactatcaaaaactaggagcacaagtgtgaccagaaatgacaaatatccttcaacctccatgtgaaagacaaaagggagtggtggagactacagtgagctggagggcacaggttttatgcagaggagcatcctctcttcaactccagacgaggttcacaggaaatcatggagacccaggaccacctggtcctgtgatttttcataagaaactgtaaatccagatttctgtgcgaacttgccaatttttacatgggggcaacaaattaagtaacaatttttaaactatg

SEQ ID NO: 345989 - DNA, 1000 bp, Homo Sapiens
ttagaaagaaaagtacttggtgaaccattcctggtgcggagagccctgtttctgctggacttctttggcttgggccgtttcaccatctggggtccttgtggcagtttttgcatctgtagactggttgggtttgtaggtccggccacagctggggcttgggtccaagctgggtgatgtagttattggaggggcattaatcctggaactcagatcgccactcagaaagttctttgcataggaggcgaggttcggcacgctgaccacgcggctgggcacgtcctccaccttctttttcttcatggaaggggtcaaatatcccgggtgaggattgaaagagaaagaccgattccggtgggacatggcactggggaatgctgcgtagtgaaatcttctctcttccgtgagctgcttgatgatgtcctctctctccttcaggcgggtctgcaggcggccaatgagctgaaggtcctcgggcctggacgctcccttccctggcttctctccggaatctttcagttcggcttccagggcagccagccgggcctggagctgggcctgggcactactgaaatctgccaccatggcctgcatctccttccggtgttcctggcgcagtgtctccacctccctggcccgctgggcttgctgagtctcctccaggaacctgcgctggtctcggagcttctgcgcctcctgctgatgctgctccacctccgcgcgcagccgccgcaccgcgtcctggagctgcgcgttctcctcccagagcccgcatccctcgccggaaccctgcccagcagcgcccggtggggagccggcctggcccgggccgccccgctcacagtaattgcacagctgtgcacggggagaatctgtggcccaggccccatgtctctgccttcctgctctggggttggcatgatgtgggatgcccgtgggcacccacttggcactctcacatgcatagctgcggccctgatgctgctctgggaggggtattgct

SEQ ID NO: 345990 - DNA, 1000 bp, Homo Sapiens
tacaaaaatacattttatttatagctgatttcctttttaagtaacaaaacactaacactatgaaagatcaaccagcatactaaaaggacactacctattatcatccgaacaagagacttgtttgaaggttccatgacacatcatctctgaacattccagaaagggcagtttgccattggaaaatataaacaacttctttgaaaagtctgtgcattgacagtttgaacctccccttctaatcagttccatttctagtcttctctcaacttttaaatttctactatcttctttcagtaaagaccaaagaaactcgttgaggacaatggaagatgggctcagaagaaaatggatacagctgaagctagatgggtcatgggtgaaagcaggacaggacctcattctccaacagataccaagtaagcccccaacactgcacaggctgccacacttggcgagggaaccagagtccccaatctccctgctacacaaagtcagtagctgttttgcttgcattgatgggtaggcagcggctggtgcctcagtgccgtgaggcgatgtcctctacccacagctctggaagccaactcaccatgccagggagggcaacttgcaacatcatggtcacaaagtggccaccctaccatttcagcaaatgtcttcctatgtccattaactagggggaactggctaactccatacgctttttaaaaggttatttacatttaaatgaaattcaacagcttttctacattcagaagcttctataaacagaggctgcggcctgggaagactgtggttctaccactcctgtttctaacaggaatcaagtactatttccttttgtaccactcagcagcacacactggacatcattgttgaagagacagagattttcttgtaaaagttgatgtatctattatcccaagaaaaagagaagctccattctcaggccaccttcaaaacaaggcaaagaaaaaccttcacaaataactgtgtttct

SEQ ID NO: 345991 - DNA, 1000 bp, Homo Sapiens; identical to SEQ ID NO: 161328

SEQ ID NO: 345992 - DNA, 1000 bp, Homo Sapiens; identical to SEQ ID NO: 161330

SEQ ID NO: 345993 - DNA, 1000 bp, Homo Sapiens
gagatggagtctcgctctgtcacccaggctggagtgcagtggtgcgatctcagctcactgcaagctccacctcccaggttcaccacattctcctgcctcagcctcccaagtagctgggactacaggcgcccgccaccacacctggctaattttttgtatttttagtagagatggggtctcaccgtgttagccaggatggtctcaatctcctgaccttgtgatccacccacctctgcctcccagagtgctgggattacaggcgtgagccaccacgcccagccaataagtatttcttgacttaagttgaatgctaagtcagaggagttcagagcagtgttcatatgagctatgcttaccacttcatctctagagtataggaatgcatgtatattacaactggctataagccacagaggagaagcctagaggccagccttctaatttatagctctgacagcccatgtatgatttgactgtgtgtcagaatctctatcagcaggtaaggaaactaacagcatataaaggcgtcctgggctttctcccttgctacattttgaaaaacgaagaacttcccatcaggtgaacaaagagttgataatgcaaaggcacaaagggtataccttgtctctattctggaagtttatcccaagaacctgctttcattgagagtttgaaggggcttagggtgaaacagctataaagacaactaggaaaaaagcaaaacaaaacaaataatacaaaacatctctgagatattgaaggtaatatactagcaagggtcataaacttgaaaacttgattgtattagtgcaatcctctgccaattagctaaacttctcttctttcagtacccaatgtttttaagctttaaatgttggtaagtacaatatttttggaatagctttaattagctaagttggcagtttatcttatttattttattcagtgtcttactgtttctacttcttttatatccaaaaagtgtttgagttggtacatt

SEQ ID NO: 345994 - DNA, 1000 bp, Homo Sapiens
agagtgcattaaataaatataaattttattaaaaacactcacatagcattatcaggaatgatataataataaacagctttcaaataacctgcattcataacattacaatacttacagtatttataaccatcctcagatcttataaaccaaacatctcatgaaaatgaaatgaaactagtttttaaaaaagcatagaaaaatgcacacagaagttatcttagtgtcaaactgcaaaagtttcctacacaagttaaccactagcttcagaagtgaactgtacatcactgtgcgtcaatcaagatgaaaaattcattcaagtaaagttgacaccactcagaagcattttcaagtatggctatatagtcaacctgatattcctatattagcaaattgtagatctgctttccattcattctaactgaggcaggttttatatttacaattatagatctgatatttacaatatgccactcaatttcttctcttccttatgtaaactctccccaaccccccaaactatacttcctgttcttgttggccagcagtttaacaaatgacagtaggtgacacagaaatcaaatattaagaatggatgatcaaaatcaccaatgcacatgtagtaatcaaatgtttggggctagatattatggtatacaaaaaacattaaaatcatgtggtttgtaagcaaagcaaacatttttggaaatgtttgcaaattggacacaaccacaaattcaagaaattttttaaaaagacaaaagccagcttacaaagatttgaccaataaaacccaaaggcctcctctgattaagaatttattttaaatactagtaagcaaaaatgtatttaggccaaaatgtaattgtacaatctgttgcacaccatacctgtaggtgtttgcctgtttaagggaagtccacatggagtatgtaccttcagtgattacaggatcaaaaaaacttcatttagagagttacaagtaagtctctggccaacagcc

SEQ ID NO: 345995 - DNA, 1000 bp, Homo Sapiens
cagagaaaatgtagctttattatgacataggagagactacaaagcactgggggggaggaggagtgacacagctcctcaaaatggaaggggaaaggaagagtaaacatcttggtaaataaagtctccaaccacagcacagtcattggaatttttttcttcatttttattttcaaacttacagtaaacaaaacaatcacttaaattgtcaaaagaacagcaattttacacaatgaagagcatacacaccaagccaaaatacaatagcactcaggtctatatgttgcagtggtgctggcgctggagggaatgcccagggaggctgcagtgctcaccacgaagcccaggtccacggagggagccaaggtccacagagggccccggggccagagggaggccgcccacactcccagcacatcacctgcctcaaagcactcccttcaggcatctgaagagggaaaggccatgtgtcttcctgggaggcactgaaaggccagccagcatctccaaaatgcaggccattttaacactgctgtgaatgtgctggggtcaccaagggggccccttagtggtcagatgcactttgtcacaatgtacacctacatggggtgattactaggcaacgggaggtttcctgaatttcacagccagatggggagctaaaagaaattcctgaacccaacgcgtaaatattttgttctgacaaagtaaattcacaagaacacatcaaacacaagacctaatgcaaggggcagtgccagggccgccgccgcctcctgtgagcagctcttcagcagcaggcatcaggtaactgcttagaacggcaatgccacagtggaataagggggactaacttggatacgaaagtttagaataatgcccaccaaaaatccatgtgactccatctctcttcccagttctaatgttctcagaacagcagccacccctgaatgcaagtggagacaggaaggggactaggggttggccggcgggaggggaggca

SEQ ID NO: 345996 - DNA, 1000 bp, Homo Sapiens
ctgaggaggaacatttgtatttgaacaagatccttggtgtgtagttcagtcttgcagtatacaagcttttgtgtataaatgttttatgatatgattccctgtattttgcaggggtttttttctcttttgctttttagataaatatgtatatcaatattttaaattcatctttgctttttttagaggagtttgtaatcaccttataacatgaaaataaacatttcctttttaacatccaacatgtgtgggttgtgttctggtgaggtatttccccctcaacgtttgccaaacgctttacattttataaagggcttcccgtccaatcccaggacgctcctcaaaggtaggtattttcccaggttagaggttcccacatggaggctcacagaggaagcagcttgctcactcaggggtacacagcaagtccatgaaagaacctggattcgcacccgggcccatgagctcttggctctactggctctactgattctacctgctacatgcccagccctgtacagctgggagatctggcagcagtcacctgagcctcagtttccccatctggaataaaccattgtccccatcaaggccaccaggatgattggaggtgatgctcttggccttaggtgctcacctgctgcggctttcagtccctcctctttagccttgggctgacctgccagaagggcagaaagcgggtggcggagtgggggaaagggtagagggggagcaaacctgattgcccttctcccactcccccaccgtcaggtgcaggcgctcattaatacccagttaggggctctctggggtcacaacaggtccatgtttggggcagccttcctgccaacagcgccccccaccctttgggatggacaaactcgggagtcagttgagccctttgcccaactaaccagacaaaattctcagtaactcatttatagacaatgttagaatagaagaccaccctacccccattttctggctctttctgacagcctat

SEQ ID NO: 345997 - DNA, 1000 bp, Homo Sapiens
tcagtcctccctccttttctgcagcttggtcctggtttcttcttgccggcgtctccaagcagcaatgatggcttcatcgtccatttcttcctcttcctccctgtcagtgcttctccgatactgggaccgccgtccagatgcaaacctcccttcttctctgttttctgtcctctctttctctccctcttcttcagacctcataaagctctgggtgaacttcctcttggctccaaattcagagaagtctgacttggatgactcttccacatcttcccagtccctggacctggcccaatttgggcgctgtggttctggggactcttccctttctgaggactctggggtccggcggaagaagtagggctctgggctctcctctcgggaacttgaggtctcgttgtacgtggacctggagaacttgtgcatctctctgccctccctggtggaggaagatgagaaccgtgaagtgcttcttacagagttgccatttgcctcgtggtaggaggaggtgtcctgttcctctgactgggatttggaaaacttgtaactggaggatttagactctgtctccctgagcagggacgatctggtgtacttccctctggaacttccagaccagtcactttggaaaggaggtttttcctccgtcctgaggccactgagccacttattaatactgctatccatctctttgccaactctgctgccacttgcatagtgatcacagacagccagggaggagcatgtgtctgtttcaggtttctgggaattactgcgggaagaatatcggaagctccctatggcactgtcagtgtcctcatccccatcacccacaccatcatcctcatcttccttgaccttcttcttcttgaagagggagctgcgtttgttgtctgaggccagcttttccattttgtactcagacatcttctccctaagctccatctgcatctccttctccttccggccaagttcctttaggtccacattgtcagcaaag

SEQ ID NO: 345998 - DNA, 1000 bp, Homo Sapiens
gtcaagccatgaaaagccttttaatgacaattggcatcacaggtataaataaatatcttcttctttccatctataatatgtgctacaaatatatttttcaaaggtccaacccaggttaggaggcttcaaggaccctttcttagctactgattttagtaattaaaaaaataaacacaataaacacccctggcatctttgtgagcgcccccctgcggagagcatgagggctgtcaggcatcttcctcctgcagccgcagccaatggagcacacggagaactggagtcaggtgatcacgaaggggcttatttcactggcgtggtctacgttgccacatgtgtcgctttggatgaatgcatttttgcaatgtgctgctacacaattatgctgttcaaaaacacagttgattgacaatctaacatagattttatctttagagtttatgctggtataccccacccaacaacataagaaaaacaactcaaaaaccctccaaacagtttttatctttgttcatgttcagcatcagttatgtcttgtgatagaccaagcccaccaggttggctctgattacacctgggcgtggcctcttttttgatttaacccaactttctcccatataggaacatccccacgatgacaggggtggaatcccgaggggtcaggtggtccaggtggggctctgttctcctggccacatcccgtctgtacagcccctcacagggccacacctgctggctttgccctatggtagtggtgatggattaaggacagttcctctcctcccccagaaggctctgagggctccctccaattgtacaaaacccgccactatcaacaaagctggagggatatagaaaaacattcaagttactacttaaacaatggattaattggcattgttcctaggaacctatctaatgaataggaatataatttatgtttcatttaggaaaaatatactgcttgattctcagaaataaacattaaatataaatgcaa

SEQ ID NO: 345999 - DNA, 1000 bp, Homo Sapiens
ctcgtgggtattttttattgaaagatcttttcccttcaataatggacattttacattaaaactttatacaactaaaatatgcaaattatattaaaatcacactaaggtattttcattaagtctctactttactgttggtaaaaatattgtaagacacttgtaactaatgtttctgctttaaaataagcaattaaactaaacgtcacaagaagagacaatacatactatatatttgcagataactggctaaatgataatttaatagtaataatgtctgtgtaagaaacaattgcacttgaaaaattaaaaaagtaaacaaaaaaccctctagttttatatataagtctatgaacagaggttaatcatctataaccttgccaggagaagtgtatgtttgtttaaataaaaaaaaaaaaaagtttgcatttaacatagtgatcattcatttaaaaaaaaagtcttgaactttttatatgtttttacagaattccccatagtttgttgctcagaagactactaaagcaaaataacacttcattggtatttagtgcaaatttggggtgattttgaaatgaaatgttaaacatgtaccctttagaagctgttagaagtaagtattgtgactgccctttcttcagtatactcttcttttaaagactttgatggaaaaattttaactgaggtatttcgcctgttttgtttgggcacagtgatatcccagccaatacaaagttgacacatctacaactttttgtaactgatcttagttccccacctgttccctgccataattgggatattgtccaaagctgacaggatgaaagaaaaagtcaattcagaagaattactgtagcattatcattccagggctgtaggtggaaagattcccattaaaaagtgttatattagtgaggaaatcattggaactaacaaatgcctacatataagatttagaaatgaacattagtatggaagacgtgcagtgaaatactaattgctt

SEQ ID NO: 346000 - DNA, 1000 bp, Homo Sapiens; identical to SEQ ID NO: 161333

SEQ ID NO: 346001 - DNA, 1000 bp, Homo Sapiens; identical to SEQ ID NO: 246624

SEQ ID NO: 346002 - DNA, 1000 bp, Homo Sapiens
gtgttgggaataatttactatactggcaatatttgattttgacacaactgtgaatgatgtaaaacatggagagagaacattaatcagactcttgccataagaattcaataaggttctagtacaatgaaagttacagatgaggagaaaactctgggttcttgttttgttttgttttccgtttcagttgggtatggcaaatatatttgaaatgcactgacatcttcaaatgcagattttttaaattgttgagtgtggcccaattgatagaaatagtttaccatgaatctttttttcttctatcacaacatgcttttttttcttttccccttaagatgttaatttatcatgcaaagattttttttcattaagtgcattaatgcttttgtttgtacaggaattttcaaatcaagaggactccccgtagttactaaatataaatccttatcgaatgacatgccaagatgatagctccattccacatgggaaaaggcaaattcagccgtattttgggattttaaccagggctccagcctttgggttgcacagtgtctctgatacatctcttttatgaaaatttcagattgactgtaaatggaacattttgtagaagaaactggcttctagcagttgagtagtgatgctgggaataaatttggtttccctgaatatggtttctcaaagcagtcacagcttctttagaagtcagaattggtaccatttcttatccttgtatttcagcattaactcatgtgcatgtttggaaaatgcttctgcactggtcatcatgcctgcagttttctcttccagctctcctagcctctgtcctctttcatcaagtgcaatccgtgcacgggtcagctctcccatcacccctccagcagcgcctttcatcccttctatactacctggtccaggaatgtgttgcgcaaggctgcgggatgcttttcctgccgaagcttccccaaagagctcttctctgtcaaatgtttgtccgcttcca

SEQ ID NO: 346003 - DNA, 1000 bp, Homo Sapiens
ttactaaatagacatttatacatatatataaataatttctctgtacaccgaacagtgggaggaatggggagggagtggagggggcttgggagagggggggagtcggactttgaaccctgccctggagggggcagcacagacacaccctgacccatgaccccctttccccggcgatggagcccaggtgttagctcctgaggacacggttctgtcccaattctcggttcatggaggaggcgcccccctcacaagctggggcggggtcacccgcagcggctgtgggcctgtgcttgggccagcaggtcactgaaggagtcaaagagctgttccagccacggctggttccgcatgcactgctggaccacctcctcctggcccaggtcctcggcgccgccctcgatggccagggtctggtcccggcagcgcaggaaggtgtggtatttatagtggtggagcgaatggtagagtgtatagtatcccgacttttccagctcaaccttgaactcctgggctctgaccacgctcctcttgagcttgctgagcgtcttgcggttgtagggttccccagcaggccgcagccgcacagccccctcttccggagagccctccccactctgctccacttgcagctgtgggaacgtgtgcagagcatcctgcagggctgggcttagcgacagccgcttcaggactttcttcttgtgctcattcagcaggccgtctatcttccgcatggggggcaggtacagctcgtcatgcgtgtcctccagggcctggatcatgtctgggtcaagtgctgtgctcaccaacatctccacgtagctccggtacatctcccgcatcgccctggttttgagcagacgcccaggtactgcccgctcgtcctcgctgggggctccaggggaggactccgagtccgaggagctgcctggtgggcccccgcctgctgtagcgttgccgcctgcctccttcagccatttcttcctcttcttagggggcggtt

SEQ ID NO: 346004 - DNA, 1000 bp, Homo Sapiens
gagatgaagttttgctcttgttgcccaggctggagtgcaatggcgcaatctcggctcactgcaacctctacctcccgggttcaagcaattctcctgcctcagcctcccaagtagctgggattataggcatgcgccaccacgcccagctaattttgtatttttagtagacatgggtttcaccatgtgggccagactggtctcgaactcctgacctcaggtgatccaggcgcctcggcctcccaaagttctgggattacaggcatgagccactgcgcccggcctaagcttctaatttcaagatgtcatcagacagcagggggacagtggagtcaaacctgccaactctaccccctcccgcacactccccaccaacgcactctcagctgcagttgcctagggcaaaggctctgcaggtgcagactcctagagagccctggacaattcagaaagagcccctgaggggagaagcctagtcctgtagtcagaggctttctgaattcccagagctgcacggctcagccaaagaccagaaaagcctctgaccacagccagaaggccctgccttgtttgctaaggccgccccagccatggggctgaggaagaggagagggcatacctgagtctgggcgcccattcccagaggccacgcagaagccgaaagtgccccctggggagcgctgcagctgcagctggctggtgccgtctgggaacacctccaccaggcggcccacggtgcgagccaggctgggagcacccacgtcctccacactgagggcacgccgtggtgaagtcttggccggcctgccagctgcactgtggtcccctggccctgctaccaggtagaggctggaccggttccccttgctgctcagcagagaatggaggttctgaaaagaggcagctttccgacgctggtgagagggtgacaccgggtgcagggattgtaacgatggggccctggactgtgacgtcaggccaggcggggcgggctgcaactgct

SEQ ID NO: 346005 - DNA, 1000 bp, Homo Sapiens
ttacatgtctaagtctccatcgtaggctaaggtcagaggcttctgttggggaggtgtgctttgatgtggttttggcttcttgcaaacaaggtaggaagtaaatattaggaaaatcatgatgagaaaagcgccacctgaaacgccataaacccaaatttttactcggccatctggatcaagtggttgaagagaccatcctttaaaaatatcatgtatttttgaattcacaggtctgtttttcccagaaaggtttttcacatcagcttttttatcctctgagcctggtactttcatgcagtaatccaggaaaccatttgatttcattatctctgtatagcccttctcacaaccacagactccaccctgtgtacagtaggagaaaggttttctgcaggctggaatgcactgccgaatggcagcaggacgggcctgaggggagcagcctcctgtgacattaacgccatctgaacgctggcaccatacagttcgttcgttattgttccaaagacttgctttccatgtgtagtgataacatttgcctcctgtacaagggcgtgtttctagaacctgttgggggcagctgtcttggttctcaaaagactgaattataaaagtccttgatctagactggcggcccacagtctcaaagcttcttccatcaatgcaggttaattcacatgtgctccactctgaccattctgttaaatggcagtctcctgggcaaggcacagaacacagctgcttcaggatgctgtcctgaaagggcatttctccacacagtgcatcctcgacacgtccagctgcatgagatattgaaccactgtggaccatgcaggaaaggctgcggatctgaactccttccccacagtctccaccctccaatttacatgcagaccagttgccaaggacccagctgtagcagggggtcactgggcaggttttctcctgggtaagctctgtggggcatggccgtccttctccttgggttggcataatgata

SEQ ID NO: 346006 - DNA, 1000 bp, Homo Sapiens
agaaaaatgatcttttatgtgatccatgatttattcatagaaaagcactgtgaattcacacacttgctaaaaaagggcaactgtgatacagaaatgagagtggcttctctcttttttttaaccaacccattgggctgagacgtaggggcccttggctggacagtaagacttgagtagccacaaatggcaaatacaacttcttggtcagtttggagtaaaaaaggtgacagtttgtcgaagaaagaaaaagtaaagcagatggagaagttcttagttcacattctagctataccaccccttccctatcaaaccccacccccaactcaggaactaagacatgaaacagtaaacaccaagacactggttccaactgacttttctgagtgcccttgctacctcctataacaattccaggctgagcacaggggtcaggaaggtagcaggaacatgatacactatggaggtcagccagggctaagacaggactgcccactagggctagaaattaggaagggagaggctaagtgcagaccagccctagcctccaagtcagcgagcaatgagactgtgacaaaagccggcgaggaagcttgaggtagaaaggcaggggaagaaagcaagtatgaggcgagaagagaactatggagctaaagcagccaatctgatggcagagggagattggtgcttagaagcttgtttggtgagagaatgaatagaggaggcacagagatggggaacaaacgtttagctggcgagagagatttaagaggaatgggaaagagaaatctggcaaaaaggacacattgatgcagatcctcaaacatgaatacacagacatccctacatgtagaaatacgctcagttacacatataaagacacagatgcatggataacaagcatacacatggatacaaacatgtttatacacatgcactcgtgtacgcagatacacatactaaacatgcacaaacatgagtgcatttgcacaaagatgtgcat

SEQ ID NO: 346007 - DNA, 1000 bp, Homo Sapiens; identical to SEQ ID NO: 161334

SEQ ID NO: 346008 - DNA, 1000 bp, Homo Sapiens
caacaaacaagtatttattgagtgcctactatgtgccaggcactgttctagaccctccccagaagaaaaaacaaaaaacaagatagaggcagcaaacacaaattctgagggagaggaaacgggcagttgagtaagacggctaagggaactgagaagcctgaggtgatgggggctctgccttaggcctcctctttggcctcctcaccgaaatcctcctcctcttctgcggtggcatcctggtactgctgatactcagagacgaggtcgttcatgttgctgtcagcctcggtgaactccatctcgtccatgccctcgcctgtgtaccagtggaggaaggccttccggcggaacatggcagtgaactgctccgagatgtgcttgaagagctcctggatggccgtgctactgccgatgaaggtgactgccatcttgaggccacgaggtgggatgtcacagacagctgtcttgatattgttggggatccattccacaaagtagctgctgttcttgttctgcacgttaaacatctgctcatcgacctccttcatggacatccgaccacggaagtcagcagccacggtgaggtatcggccgtggcgggggtcacaggcagccatcatgctcttggcatcgaagacctgctgggtgagttccggcactgtgagagctcgatactgctggcttccatggctggtgagaggggcaaagccaggcataaagaaatggagacgtgggaaggggaccatgttaactgccaacttgcagaggtcagcattgagctggccagggaagcggaggcaggtggtgacaccactcatggtgtcttagaggaggtggttcagatccccataggttggtgtggtcaccctcagagtgcggaagcagatatcatagagggcctcgttgtcaatgcaataggtctcatcagtgttctctaccaactgatggacggagagggtagcattgtaggactcgatcacggtgtcagacactttgggtg

SEQ ID NO: 346009 - DNA, 1000 bp, Homo Sapiens
atatttttaacaactttattgaggtataattgacacacaataaactgcacataacaaaagtgtacaatttggtaagttttgacatatatacccccataaatccattattacattcaagaaaatgaacacgtccctcttccccaaagttaccaagtgttcccttgcaatccttctgtccctcctctccccatttccatctccagcaaaccccctgatcactttctgtcactatagattcacttgtattttctggaatagtatgtaaatgaaataatcaaaatgtagtcttttttttcttctttcattcagcctaattctttggcagtccatccatgttgttcgtgtatgaatagttcatcccttttttgtggctgttattcattgtgtggatatacaatctgtttatccatgcaccaaatcatgcccattcaagatgtttccactttggggctactacaaataaagcacctataaatattgtgaagtcttcataggacatatgcttgaatttctgctgggtaaacatctagaagtggaatatcatatggtaggtacatgtttaacttttaaaggaactaccaaaccattctccaaaggagaagtcccattttatactcccagcagcaatgtacgggaagttccagtcactctgcatcctcgctagtagttggtaaggtcagtcttctcattttagccatttaattttagctattctaatgggtgtatagtgatatttcattgtgattttaatttgcatttccctagccactaaggatgcaactacagcttttagcaactggaagaagactgaatctatacaagagatccaaaggtataggagaaaaaaaaaccagaaaaatgtgacatcatggtagtcaacaggagaaattattcaaagagaaagtggtcaatagggtcaagtgatgctaatttgaggattgaaaattctcttttggatttagtgaaatgaaggttactggtgtctttatcaaaatatgtt

SEQ ID NO: 346010 - DNA, 1000 bp, Homo Sapiens; identical to SEQ ID NO: 246626

SEQ ID NO: 346011 - DNA, 1000 bp, Homo Sapiens
gacaaatgatttcctttattccccctgcctcccaatttccaggtagctctacaaagacattcagacagagccacatgcaggctgtccttcaaacacagagaaacaaaactgagccactggctggagatcacatctgcccaaaggtggacttttctcattcaatgccactgggcagctggccaaagaaaaaaaaactgaccaagcggaaggtttgaacaggttggggtggggactcagaagggggtgcccccacatccatcagtgccaggaggcgcctgcccaccatggccagcatccacaagacggcggcccctccccgggtcccccaggcacgggtcccgggccctgctaccacaaggggggattggggaccccctgcctcagggccagccaaggcctacatcagggagagagggaggaaggaaggacggaagctcaaatccaggcctcagtgacacatggcagagtgggttttctctgtgaaaggcactcagtggtacagggctcggggcggggggtgggtgggggtgcctctgggctccgggtctgactgtccagcacagctgttcccgggggaggcccagccaggatcctcatcgcccgtcggcgtgtccacctggccctgtggctctccccacaggggacgagcctggctcaggccctgctgacatcctggctgtggaggtgggtggggggtctgtttggagcaggctgggctgggggcgtggggatgccggctgggagctcccctgggcttgtcctgcacatgtggtggggccccagaacagggcctgcccacgtgatttcaaatccatgccgcagccgcatccaaagaaagttttgtttgtttgtttgtttgtttgtttgtttctttgagacagggtctcgctctgtaacccaggctggagttcagtagcgcaatctcggctcgctgcagcctcgaactcctgggctcaagggatcctacggcctcagcctcccgagtagctgggactacagg

SEQ ID NO: 346012 - DNA, 1000 bp, Homo Sapiens
ccacaggagttttagagactttatttatgtataaacaatttaaacactttgccataaattatctttgcctgtccctagtctttgcttagcagcaaattaaaattaatataaaaactcgatgaacaattcatacatgtatattacaaaaaagttcctgtaccaaagttcttattagactttatttttgtttttttaatttttaaaattttttttgtttttatttttattttttaaattttctctcctcgtggtgactgtcatgtgattgtctcagtttctggaccaaacaaacacactaataattttaaatctgaaacagtgattgtgcctttcggctcatgtatgtacagggtgatcagaagtggtacctgttagcaaaagtgtcacgatgctgcacctctaccgaaactgatacccacgaactacggaatctaaacagactacaccctgtaactgcgtattactgtccacaatggaatctccaaagacaaaagagtatgaaatttatctgtagtgattatagccaccattttgaattaaattttacactctgcgctcaaataaattagctcaggccagacttagttgggacctgagagttaagtgctggatggtattatttcactttgatttttgataggaatttcttttattccctcatgtttttttttctttaaaaagtatttccagtgctcactcctcctcttttatcccccctccccaggcgctacacacaaatcacccccaaagtcgtgttttaaatgcacctgtatttgcttaaacgaaaatgtcagaagtatttgtcctacaagcagtctgagtggtttgtcccgcagctggtctggtgacgctggccctcgcggatgtctgcgtgtcgctcacatgtgaatgagtgaggtaattggatatgaggccttctttcttatcttcgcttctttgtttattggtccgtgtgtttgttttgttttgtttttgtttgttttcttctttgcttattcgt

SEQ ID NO: 346013 - DNA, 1000 bp, Homo Sapiens
tcagtactgacctctgcctgtggctttacctatactgatatctttcataacagacatatctggatcatttgaatgtacttcaagttttttcagactgacggtaggtttcatttcctgaagttgctttaagacaagctcagtgcaatctttaagattcttgtctaaaacaatttttacattatcactgcactgaagctgtgatggattggcaaactgtacaaacgtttcgctttctttacaaggacatacatgatttccactagtcacagcagtcttatcaatattttttcttgaatttgaatgggatccttttttgtttccagtattcggatggtctttgtcagtatttttcttctgcttcactgcagactcctcaagaaacttcagaaatgatacttcaaatcccattggcttaaaagagctccagtcaaaagatgcaggatgctcctcaatggtttgaatggcaacagcagtttcttcttctttacgcacgctacttaactcagctgctgatgctggttcagctttttcaactttcctttttttattttgtgagacatttttttccttattaactctcttcaaattacttgctttttgtctttctgactggcagaggttatcttcctgaaaatcattacttacatttgaagaagtattagcttgggtctctacacttgtgctatcttcatttattaattttgtaataaacaattctgttagttcatccatttcatctttttcatttttttcaacttccttttgtgaaactgtagctgttgttcttgaattatcattgctctctgatacacacgtgtcagaatctttcacatcattcttagcaccttcttgctcagacgtttcctttacttgtgagttgcaacaccgtttgaatacaataagaagatttcggtgttgtgatgtaaatgccttagataatttatggcacttataatgtctaattatattgctttcacttgtaacaactgaagtacatccc

SEQ ID NO: 346014 - DNA, 1000 bp, Homo Sapiens; identical to SEQ ID NO: 246627

SEQ ID NO: 346015 - DNA, 1000 bp, Homo Sapiens
tcagaaaatactgacctgcgataatacttgagtctgtgtctgagactgtatttgcgactggtgctgctgagaggctggctgggggctcccgatggcagggatgggggatgttatctgagaggcgacaggggagtgctgccgaggagaaggctgagactggtgctgcatgtgttgcagctgctgcagctggaggcgctgctgcagctgctgctgcagctgctgttgattaatttgctgctggagatgctgctgctgctgctgcaggtgctgctgcatgtggtgctggaaatgctgctgctgcatctgctgctggatttgctgatgcatttggtgctgctggagttgctgctgctgcatctgttgcatctgttgttgttgctgctgctgctgctgctgcaattgcatctgatgctgctgggtttgcaccgaaggactcacttgggtggagggtgctgagccaaccatggtcgttcccatggagcttatcagtggagccccaatgttcgagggcatgttggctgcaatggtgactgatgtgacaatctggttcatggggagtctcatggttaagggtttgggagcgattgacctagggagggattgctggagagtctgaggtgatgctgacactgttccatgttgagacagtggagtgttgagaaggagagaggatgttagattggtcgacgccagggtctgctgaacagaacggatggtctgggcttctgctgactcagcagcagcctgcattttgggggagaaaattccagacttagaaacgaggctggccctgtatgccgccagggccttcaggtattcttttttggcagcttctgttttccttttatatacctgcttttgttcttctccaaggctgtcccacatagatgctacaatttttgagacctctccaaaggttgcattggggttttgacctttaattgcagcctgtgtgtctctgaaaaacagggcatatgctgacactggcttctgtggctca

SEQ ID NO: 346016 - DNA, 1000 bp, Homo Sapiens
agaaagagaaaaatcatgactttattctgatatttccaattcatgtgaaagactacagggtgtttacttgagtttatatttgttatcttttttcatttacactaaaaatcttggtccccaatgacattacatcactacttatttgctttagtatataattcaaaaaatataaggtagaatctcaaaaatttaaacggtctattttatcaaaataaaaatgccagtgttattactaacaatgtgactactgtatgaagttgaagattttgttgagttcagttgaaggtgggggctgggaactgtgatgaggagagagaggaggagcagacacactaaggactacatgggaaagccaatgtggaaaggctgggaaacagcagccaggggcaggaggaaagctgggagagtaaagggactctggaggccaagagaggagttgtgtgagagatggacagcaaggttcaagatcataaagctgccaaacttccaaatttgaaaacttactgcaacaccagtaaaactaccatctgtgcatgtttttcttctggggccagccaaattaaatctaatgttcacttagtttgggaaaaaaaatttactgagacaggggaaactaatcccagcaggtgaagatttgggaggcagaggcgatagaatcacttgaggccaggagttggagagcagcctgaccaacatggtaaagctccgactctacaaaaaatacaaatattagccagatatggtggtgggtgcctgtaatcccagctattcaggaggctgagacatgagaattgtttgaatccaggaggcagaggttgcagtgagctgagttcatgccactgcacttcagcctgggaaacagccagattctgtctcaaaaaaagaaagaaagaaagaaaaagaaaagcacctaagagaatccagccatttcagatatggcaatgtggtcaggcgcggtggctcatgcctgtaatcccagcactttgggaggccgaggcag

SEQ ID NO: 346017 - DNA, 1000 bp, Homo Sapiens
tcactgtcttctgcccaggccccccggaccagcctcctcccagctttggtgtgcggtcgctgcccaaggacagggctgccctgggcacaatgtgtccaactcgctgaggaaaagaagatacgtcattctttctgtctccaccggtccctgcaggccctccttccgcgtgagcttcagcacggtgggcttttcgctgttcccaccggccctgccttcgccggccaacggggaagacaggcctttctgctcctccttggcctcctctgacacgttgggatagatcaccaggaatgtggccgtcaggaagcccaggaaagagcccacagaggccaccatggggatgacgcggacagtccccacggcgtcgaccacgcccccaagggcagaggccaccaggatctgcgagatgtacacttggcaggacaggatggcacaatctatgccaaaccctcgcttggagttcccggggctgtggtggatgtactgcttgatgtcatggtactggcccagcagggcgtacgggcagtaggagatgctcatggagacgatgcccatggtgctgatggtgaccatggcgacgtagacgttgggaaacatggccatcacggctgtgccgacagagaagcccagcgtccccagcacgtagatcaccctgacgctcaggtcgtagttgtccaagtacttctgtaacagggcattgacgtgggacagcatcatgggaccgcacaggcaggacaggccccaaaagggtctcagaaccacactgcttctggtgccagcccacagcggccttttccctaaaacgaggacatgggaatttcgatgcttctccccaaggggtggccctgaacaaatagcaccagtggcggcataaatgaccaggccccagcagcccatcttgaccccggcgttgtaggcttgccaggcggtcgagttcgagggggcctgttccggaaatgagacgggggctgacgagggcatctgctgggccctccaggcc

SEQ ID NO: 346018 - DNA, 1000 bp, Homo Sapiens
ttactctgcttaccagttttatttacacagtaattgttatgagtggtttttagtgaattctttgtatttacattttatatacacatttatacttgaaaggtaaagaaactgtacaataataaaaaaataagaaaaacaaatacagtaacttaggtccaactgaggaaacaaatacatgaaagtatgattaaatttagtcaggtagtataacctgaatgagattactgccagatgttatattccctctatcaaggataccaataccaaggaagtagttactggagttaaaaggtcattctaaaacctgctaagaccatggccactccttcaatattttattatattaccagtctccaataagtaagtccctataatagcaattaccttttgagggttctactagtagtccttagactagaatgacccatggggtaaaaatatatggacaccctagggccccatactcctaaagaggcagtcactacactaacaaggatcgcaggcttgttagtttgaaaactatatacactaacagaaatagtgtgcttaagtgttgtttcaaactaaactgcaacataaaaacacactgtaaatctaaccaaacagcatgttatatagccatcactcataacactcaagtgatttaggttcaaatttaaacataataggacaatagcaatatgtcattagagatcagagatctctgtcaatcagatatagccttgcccccacctaaagatgtgttcgctgcctcatgtatgtctctagtagcagttccgaaagccaatgcattcactcttggaaagacaatgtcaattgttctgacattgctgttgactacatttaactaattctatgatatggtactagagctcaggaaatacatcaagccaggtcactctgttcagacctcccaagggaaacatgttccctggacagcacctgactgggaaaagactgttaatgttgctataaaatgcaaaatagtaaaagcagcatt

SEQ ID NO: 346019 - DNA, 1000 bp, Homo Sapiens; identical to SEQ ID NO: 161337

SEQ ID NO: 346020 - DNA, 1000 bp, Homo Sapiens; identical to SEQ ID NO: 161338

SEQ ID NO: 346021 - DNA, 1000 bp, Homo Sapiens
gcaatcctatgtcattttaatagcaaccttctgccgtgagcaggcggccggcatggcagctcctccccacaggggccatcccccaaaacatccactcagagtcaggtgggaaagacaggggcttagatccatgaggaaagctgtgctgagccccagagcccccagagagggcctttgaggggccccttgaggctggggtcaggggtaggacatgcagaagcccaagccgggtccttctgtcttctctggccaagaccaaaaggcccagggagggccacagggccattcagcactggccgccgtaaagctgaaggggagggttgcgggggggcggggttagggggtgagaggcccccaccctggatccactgtgctcttcctgtatgattcccgagggcggcatggcgctcggaggcagctctggctctgctactgatccagcgacagggcagccactgtgtcctggcgcctcagttttcacatcggtagaatgggggccaccctgtaacatccacactggaaggttgtgagcactgaggcagtgtgagagggagaccccctacaaaaataacctgacccccatggtgaccgggcatgggaggagggctggtctcttctgccactgggcaaaaagccgagtgtggctgccagtagcccggcctgtggggtggcggctgtctccaactcccagctccacaaggcagcatggtccacaccatctgtgtgggtgtcagcctccacgctggcccgcagggcgccctgggcccaggcctggggacacagctagctgaagtcgagctgggaagcagctcctgtcccccacccatgggaccaaaggtgcaagtgtccagagcccgtcccgggctatagggaggcccctgcgggcaggggaatcttatagccgctctgcaggagcacgaggcaggcacccagccccagggcccctgccagcagcacggcacccagggccttgaggaaggaagtccgggtccgagtgaaa

SEQ ID NO: 346022 - DNA, 1000 bp, Homo Sapiens
tgccctgaaagaagaggctttattgggggtggggggagtggggcaatcgaggcggtaactccggccctcttaacagtcaagggagagggtagttcagtttgcaattaggcagagaagggctgggcagtttcactggcggagttgtgggtggtggtcagtttcccaatgggggactgtaagttttatagagggggctggtcaatttcacaaaggcaagtcgatttcatcttccccaatgcagagagccgacccttctccaggcctaatgctagacgccccccgccctgttcctctgacgcgtacgttacttccggccgggggtcccagccttttcaaacctcaaggtttgcgctcctcctgctccaggccgttctccgagacctttctgcgggggggccagatcaccaccaactttccgtcgcccctgctcgcggtgaggctcggcgtaggctccttgaactccgcggtgccatagacgctgcgccgctggcgctgcagttcctgctcgcgctcgcgcacggcgcgcacctcctgctccagcagtgacggagtgaaaggcggcggggcgctgcccagcacccggcacccgccctgcacggccgagcgcggccgtcccccaggctctggcagcctctgcgggcccgcgccgtcccccgcccccgccgaggagccgctccccgccgcggcctcgaagaagcgcttgagttcgcccagcggctgcggcggcgaccgggcgcgcggctcggggaccgcggggcgcgccagcgccgcctgccggtgggcctcccgctcgatgtcccgctgcatctgcgcgcccgcccgcgcccgctccagggcgcgcgggagcgcggggccaggacccggcaggttgagcaccggccgcacgcgcagctcgacgagttcacggcctgcgcggcccgggctcaggccccggctccggcgcaggctctcctcgcgttcgcagctgcggcggatttcgcgctcgatgggcgtctccatg

SEQ ID NO: 346023 - DNA, 1000 bp, Homo Sapiens
tcacattaacaattcctttgtacagttctcttcggttactccattctcttggttgcttttataattggaaaggaacaaattttctatttcagtcaagaattcttcagccataaagcaattggtcactttgctcagagtcttcctcatacactccaaaagtttctgcaaacaagtcaggtcagaatcccggcgaaagattttatccatggggacgctgctatgggagagcctgtatttttctattatccatcttgtcttttcaaatactaatccccactgaggttcttctaacatctgctgtacttcaaatttgtaaggtaagcgataagagccatctgggctaatttcctcacttataaccaggcaggtaatctgagaatatggtaagggattatttcgattatagggactaacaatcatcccaatgaactttgcacctcctctggagaagtaactctggtatttagcttgtgtgtcaatatctcgtaaggaaggattaggatcaaaagcaggatgagaatgataccatccaataacactgaagcctctaacagccaaggtttctgaggcctgtgtttgtgatacaggatccatctcacactgtagtcctgtactcagactgttacatggttctgctgcacagacttcaactactttatcaacttctgagtatcttcctcctaacagaccaatcacttctgccatagaaacatgagcatgcaaatccattattaaaagtgcttctgaagccactttcacctgaaatggctcctgcttttcttcactaaaaaaattacaaggtatcagttggaagggatcaaacgagctttttgttggtcttggcacttttaaagatttaacaggtctgcctttttcctcttctcttctttttgccaactcctcagcagagagatgctcaaacgtttgtccttctaagtcctttgcatcacaccagtttccccatgggtctcggaccctacgtctccttgtacgcatagac

SEQ ID NO: 346024 - DNA, 1000 bp, Homo Sapiens
gtgagattaaataatttattaccattgctaagatgaacacatatacttaatactcaattttatgcagaactttaaaaaaatagttttaatacagtatcaaaatttacacaagtttattttgtcaaaagaccagtgtcccttgtattagcttctgcaggctctgctgcaggcacaaaagcttattttaaatgtcttcagagggtaggaatacaacaatttaaggatgaaagctttcctaggaaagaaggtgtaaatatagcaagcaattttcttttatagagtaataacattttaaaatataacatttaaaaggggagcttaaattgtaacccaattatgataattagagagataattctatagtaaattaattcataaatattttctgaaaatagatgatttttcatcacagtaacatttttgaaagtataacaaaattccttcacagtctcctactagtgacaattaactcgttatgtaatgagcccatctaaaacaacaacaacagagaatatctgccatgaatcaaatctcagaaatttagaacctatccaaaaactgggaattgttgcatttctacttttataatcttaaactaccataaaaacgtagcattcggtcacaggcctcttgcacattcatacaagaaactatcattgcatttggattaacacaaaatacctatcatagcatttccagtacacacattctaatgttatatatatgtatatgtataccaaaaataagaaataaactaagcaaagctagcacacctctttttcaaacctcaagcaatctgaacaagagcttttagcctcaataatgaaggacatgcgtcagtttcataaaatgttagatagctgcagtaggcaaagaaagcttttttcataaatgcagtgcaatattttaaagtttacataaagtttattaaatatacagcatgtctagaaactaaattgtagaaattgacatctcacagctcgaaacacttagaaaaatt

SEQ ID NO: 346025 - DNA, 1000 bp, Homo Sapiens
ccatttgaaaatgtgacccatttatttgaactgaaaggcatcattacaaagtgcaaacatttctttggtaatgaactgaatacaatggtcataaaaaaggcatttggctgttggagcagttagaaaagtaaataaatatgtacattccactcctgttacagcgatcccgcacagtggctgctagacacgttcacccaggcactgcccactgttctgattacagagagtatcaaactggtgattccgcagacattttggtttgaattacagaattttttttggtaaatcacagtcagcttccccctttggcttagacaacacaattccttgtgactggcccagaccgcacattacgcaggtgtgctacaggtgtgccgcctcagcactgagaccatgaggcctccagggcatgtaagaggcacagaacactcccagaacccagaatctgctgtcatctgagtgcctgagcaacttacataaccatcagcttttagacgaacttacacatttcctatttgacagaaatctcttccacaatttggtcactacatttgacttgctatttcaaaagaagtccacatgtcatgaaacaccaaccaatttttatcaatcacttaccaatatgaggttaagaagttaagacaaccatttttacagataaaacacatgaatccaatgaccttcctcacagctgaaatgctgcctccgccgcagcaacttggccggcccgtgctggaagggtctgggtgtctccttgggaggatgtgcacctggaacacgggttgtgcacaaatcacaccaggcactgtatgcgcccatcctgtcagaaggaagctggcctcccccaccccatggaagcctcgacgccataccccagtgctggacacctgccaccctgaaccgaaacggcccctgacctcaggggctccctccaccacctcagctgggccttgctgcgggcaggtggcccggaccttggtgcctcgtgtgcccagcactg

SEQ ID NO: 346026 - DNA, 1000 bp, Homo Sapiens
ttataataaatcaaatttattttttaaaattttaaacttctcatagagaggtattgatggaacattcaattaaaatctttgtttataggactcagagatagccagatattaaacaaataaaaaaatgtttctcgtgaatatcaagttgactcttgattaacattttatactcttattaacattgcgtacattgtttgtttctattcaaccaatttcagaacttcatgaaaaagttgaatggtaggttgagtgatggggtaacacaatgggagccttttctgcaaggctggcatgtgaataaagtaccacagtatgagcagaggctcctgcttcttggtttatcaggcaatgcgcagtgaggtgttgaaatgaaagggtcaagctgtggtgactactagggccaagtcaagagggaagagtagaactcatcccccacggcctcagtaaaagcctgaattcttctctgtagttattcctaatatactcagctagagtcctgctgtgccgcagacagctcttgaggatgtaaaattgctggtacaacagaactgcttggcagggacttagcagctgaaatgaagctgaaagacccctcaccacttgtttcacaatactggccacaaaagtaatgatgggaggacagctttgtagaaaggacattatccagctaatagcaaactttgtggatcccaatccgagatttccctgctgaaagaccagaagtatctcatataaaagtgctgtagcagtatttgtatactccagaataagcttctgtaactcagcgtcaaaagacattctgactaaagctgaatcagccaccaactggatatcaaacacaggacaagattttggaatctgaggctcactaattaaaattaccaagagattaaatagtgctcccttcttagctgccaatgtgttcaggcgtgatgactcggtttctgtttctctgaacatcaatactagggtctgtataatttcaatgcatgccaccagc

SEQ ID NO: 346027 - DNA, 1000 bp, Homo Sapiens
aaatctgcaggttttctttcattttcagccagtgcatgacaatgggctttttagggccctctgccgtcccattctgtggtttggtgtctctgctgtgggcctggcctgccaagccctgggggacactgcctcgggaaggagcgaactctcctgtgggtacatcaaaggacatctcaggactctgctgctgcccagatctccctggcatggcacagcgtaaaaggaaacggtcctctgcccgaggcagccccacgacatgtgcagatgggggcctgtgatgtttaattcagagtggtgagtgctggaaaggccacgtccagagcagagcgctgccttcatttttgggggctgcaagccagggagcctgtggtctgcaaggtttgtgggatgaaggccaggcctctgcaaggagctcacctggttggtggagggggcacccttctctgggggtttggctctctctgagctcaggcaggcaacacacacaaacacacacacatagtgtcacacacagccaaaccctcatgcacatggtacacatgtgcacacacacacacacatgagaatgtacacacacacgagaatgcacacacacataaaagctgacagttacaaggaggggactcacggccaaccctgcagacagcaggagaaccagggtcagagggatctggggtcaggtcccagctgtccttaccagccgctgtgtgcacttgggcgcctcttaactctctgaggcgcagtttcctcatctgtaaaatagggatcatcgtaccaggcagggctattagaggcattaataagccctatcacggctgcaaagctcaggtgagcccagtccctggcctggagacggtcatgaagaaacagtgactgtggttctttccctgacttgcctaaccccagccttgggatctgctccaccttaggcaagagtgaaggaaagggagagtctggctctatttagaggtcactgttccagtgccttgtggactgcagg

SEQ ID NO: 346028 - DNA, 1000 bp, Homo Sapiens
atttggcttgttgtgatgtttttctagttgtattagtttttctttaaaaagtagagaaagatggtccagtacatgacatgggtgagagtcatattttttccctacccatttaatgcaagatataaagaagctttcctagcttctatctcttttagaattttctgttaaaaattcttactctgtcttatgatgaacagattgatgaagattgtggcctaccattaagtgtaaaagtaatgtgcttataagggatgagtgcacatttaaacaaaaaaatgttaagagggccatgagatcggatattagatacacagttatttacctagttctgttaaagaatattttacaatgttctgcatggtatgtcaggttataggttgctctggcattacttcttgaatacatttttatatccttgctggattaaggcactataacagtcattgctagattacataaggttaatagcaatcatatagaacaaaggataataatgaaaaagttttaatatctcatgtaaatgttatatgccttactttaccagttagtttgtcagaaaggtttgtcccatgtaaccatctgtgagcttctttgaatagttctgtaatctagacatacaggcaattagaaaagggagggttaatcctgtttatggcatataatatatatggtatatatagtatatatggtatatagtatatatggtatacagtgttctacctaaacccaagggcaactctggcaattatagctttgataatttctcactttctccatctcaatgtccaaaagttatactactcatgacttattgcagaactgctcttcaaaaggtaccattctgctttgtgattcatgcaaaacttgagtgaaaactgcaaaccatcagccaaatgtgaaactatcattcacaaattatgttaaaataatctaaacatgggactggactcattcttgctgaatgggtagatgaaacacaaaatgttttatatcatcccag

SEQ ID NO: 346029 - DNA, 1000 bp, Homo Sapiens; identical to SEQ ID NO: 161339

SEQ ID NO: 346030 - DNA, 1000 bp, Homo Sapiens; identical to SEQ ID NO: 161340

SEQ ID NO: 346031 - DNA, 1000 bp, Homo Sapiens
tcagtcatccttgtcctcgtcttcatcctccgcatctttgttgggtgcgcacctctggaggcactgcaccacagtggccaggaagaagctggagatgatggccgcaatggacacggccacaccggagaaaatgatgatgcagaggtctgtgagtgacaggctgaacctacactcgctgaagctggcctccgacagctcacgcagggatatcctcctgctctccatgggcagggagcactggatttcatcaaggcatttgaccaggggacactgaggaccaggaacatcaggggacttatctgccatcggacagcttaggtcaagcttgcagttggcttggcaccagaaggccagaccacagtgcccacaagagctggcacctggttcctggacactggtaatggtgagaaaggtgacaccccagtgactcaactctttgggcagtttggatgcgttctcctggatccaggagaagaggtgggcgaagtcacagtcgcacagccaggggttcccgtccagacgcagggagcgcagcgcgggcagcgcggccagggcggccacgctgaggctgcgcaggttgttgtcgttgagctccagcacctgcagcgactccagggtctcgaaggcgtcctcgtgcacgcccaccaggttgttgttagccaggctaagcttcaccagcctcccggccgagcggaaggcgccggcgcccagctgggtcaagttgttgtagctgaggtcgaggaacacgagcttggccgagccgctgaacgtgccctcctccagcgagcgcagcgagttgttcctgaagtccaggtagaccaggtcgccgtagaagatgaagaagtcctcggggatccgctggatgcggttgccggccaccagcagcttgcgcacgtccagggggaaagggtctggccgctgggcagcccgcggtcgcggcagtccacggtgtgcgggtcggtgcaggcgcagcccgcggggcacgcgtgcccgggcgcga

SEQ ID NO: 346032 - DNA, 1000 bp, Homo Sapiens; identical to SEQ ID NO: 161342

SEQ ID NO: 346033 - DNA, 1000 bp, Homo Sapiens
gtacttagatgaagaacagctttattaactgaaatccatttatatttgaagctcatatatgctacaacttagtcttctcaatgttaaaaataatttttttctaccatgtaaaacctagccttctctttgacttttgaaaattatattttggtccctgagagttataaaaagggagctggactccagtaacatcatttgcctgatagctgggtcttaatccacctctgtccacaaacactggtccacggccacctccaggtccttcctgtacagcttttacaagagggtaaatatatttatttgttgtttccgattcaagttcaattacctctctggcatagtcctgaaattctttctccttttcagccacaagagcttcagtaagtctgcaataatctaattctgcttgttttgcttgctttgcattaaacttatttttggccatttgctgaatatgggcatcttgaacctcttgatgttctttatcagctttgcattttttctccttttcatgttcccagaaaatctgatctgctttcatgacagccagcaattgttctttagcctctatttttctttgtctttcttcttcctctttatttttcatcacaatggctcgatattctgcaattgtttttaattctgctttgtttttttcatctttttctctttctcttttttcccattcagcctcagcttctgcaatatctctagcaataatcatatcttcattgtcaagtttctctttcaacagttcactcaggaagttatgtattctttctcttcgtttctccataagcctgtgtgtttcagcctctttttctttccccatttgtataagacgcttttttgctttgatgaattttctcatcttttcatcttcttcctcttgctgctgctgttctacagctttgataatatgtttatcctgcatatgttcaagaaaccgtctcctgctttcatgcatctcttctcttttcttttctagtttttttctcat

SEQ ID NO: 346034 - DNA, 1000 bp, Homo Sapiens
gcacatgaaattttaataaagataaaaagcctaaaatatactctaactcttcaaaaaacatttttatgaaagaggaaaggaaggaggccctctttgtggctggaatgctggctctgagcagagtcagggtgacgcggcagggcgctggctttccagctgggtcagcggtcgtgaggctcaacacgagaggaggtggggtggctgctttggttgtaacattagcagggggaagacagctgcttagaagcatggtgggaagcagatgtggtgaagtgccgtactgttctgcttacaaagatggggatgtctaagatcgtgtttactacctgatagcctaaaacagtatcacttgagtcatggactaaaaggaaccttaaacattgtccagcccagcccaggtgtccatctctgttgcactgagacttgtaaggcgtccttgctgcttcgtggcagtgtgccttagctttccaagcaggggtctgaatagctttttccatgaaaattcaggggtctttctttgatacccttgtgacttgtcattcaggggatggcttccactgtttaaggctgaagcctaggtgatctcatagaacagggttcaccaaataaggcccatgggccaatttggccaccacctgttattgtaaataagtttttattggaacatagccgcagccattcaatgacatgcctgtggctgtgtctgcgctactgtagccacagggacctctggtctgcaaagctgaaaacgtttaccgtctgacccttgatagagaaaggctgccagtcgcgccgttgtctaaaaaagtctgaactccaccttagtgttaactagtccataggatggctcgtcgacctgcacgagcgtcataaacacgctggaggaccagagcaggggcggctgtgtctgcaacccggctttccttctgacatcacctggtctctgcccttcagcccctgcccccgtctctgttttggaagtggtccatcacagttcctt

SEQ ID NO: 346035 - DNA, 1000 bp, Homo Sapiens
gagttcctatccagggaaggggctgtaccttaatcttctgcatgccctgcatttaagaggagaatgctgagtgagtggagagatggccagttagttattggttgatttttgggtcagttggttgacttaatgtaagaactggggacagaaagcaagtatatgattaccaggtatgtgtattttaaccactgtaattgatcattctgagtcgatatctaagtgggttctaattaaagcctgctgtaatgtaaacgtcctaatactacgaaaatgacacttacatttcgttgacaatctttagtctccaaagcacttctgctgcgtcattttggccaattcccacactgacctggtaggagctcacagctgaggaaaccaaggctcaggcaggtggagtgactggccagggttacatggacacatggctttttgtctttcaatcctaggtctttttcactcatctacatatttttctcttaaaaaaaggtcaaattttgatagatggagctgaaaactttaagccgacaccctggtttttctgagtagtggattttagaaacagcaagtctttgcaggagtattggcacatgtgcgtgtgtgtgtaactagggggaataaccttgctgctcacatagaactccctaaggcataagcagttctcagtcttctagaaagttacagacagaccatgtgcaggccttacccagcagtggagaagatacccaataacaagggtgattggttcaggaaaattattggacgggaaggagttctgcattgagaagaggacagatgggtttgtgattttctgtttgtttggctctgtgggctctggcttggtttgagttcccacagatacatgggtgtgtggagctatcgggacatgaacatttgcacccactgtctgattattccctcgctgtctgtccaaagaggaataggttccttggcttgtgtgggaacgtggccccaggcttcaggcctctccttctcaccctgg

SEQ ID NO: 346036 - DNA, 1000 bp, Homo Sapiens
cagtgaaaacattctttattagtaagcagacatttcaaactttttgattacatacatcatgcaaaatgactgacctcacagatggttgtctgttcattgtgacatcttttttgagatgattataaatttaagatgactgcagtagtaaaaataattcatgaaaatgactctcaatgaagcaaaacactacatagcacacatgaaatactgttcatccctcctggatgtttaattctctcctaatgtaaatctctatcttggaagactattatatacaaaaatggcagttgtttttgtatgtgcatctataggcactcaactgataaaaacaagaaaatttcaaataattttacaaggattggttatttttcctgttttgttaatccaaaacaggacaatgccctttgatttacaatgttcaattcttttaagaaatcattttcttcggaagatgattttgacccatgaaaaagttgttttacccctggtaatctttttgaaatggggctggctgttacacattatccaagttgttttcagtaagtgaaaaggagtagggcttattttgagaattcctctatattacggcactgagaaaacttctctgcagtggtgggctcaccactttcatcctgtggtagttctggtagcactcccagtgtgaaaaccctagcacaggtaaattcacctctttgaaataaacagtgaccctggagaaaggtgaattccaaatctagtaccatattcaagtcatctggcagagaagcaggcataaaagagttttctaggtacttgaggtgctgctgtaacaaatacctaaaagtagaaaagtggctctggaattgggcagtaggtggaggctggaagaattctgaggagcatgccagaaaagaagctaaactgccttaaacagactgttagtagaaatatggaatgttaatgctagggcggccttgaagaaaggagcataatagagaatacctcgattgccatagaatat

SEQ ID NO: 346037 - DNA, 1000 bp, Homo Sapiens
ttttattgacatttattatttattttttgaattttcaaactcctgaaaatacagagaaagacagttttaaattaaattttaaattaaattaaattaatgcagtactcttcatgctgccaaagtagggcattgtaatagaagacgtaatgatcgcaaaatgggaaatgtagttcaaagtacgttcctactccttttaaattccttgtggttgggaacttacttctctgcttaccttgaactgcttaatctgccaaaattgaacaagccaaagcatttaggcatggttaaggtacggaaaattcaaaatttggataaactctgaggcagatggaagaaataagtgccagccctaccacctgcctcagccctttcctgtttgggttcatacttttcccgcaggcctggcttgctgattcatggcttattttttccctatagtatatgttaagtcagtttcttctataccataaatcaccccaaaggagcaaggcagtttgctttggaaaccaaatgaatattctcaggtcacttgctgtcttgtgaaacatttgtaaccatattttggagtatggaattattgagggaaatgaaagtagttagaggtgacatgcctagtttgacttggagaatcactaacatttttccttctttgtagccttgtggtaggaaggtaaattaagcagaaggaggagaggagagaaatggtgttgaaagggctatttctcagatgagttggaggtggtgggggagatattgggaatattgaaaaccaaagtcaatttcagatcaaaattccttctacctacaagggtctgaggtttctgaagtgggctaattgacaatagccatcattttgtgatagccaggtcaggcttcgagactgattgatctgccaagcattttagatatgggccactgactcagaaattgcacaaagaatgattgcagcagtgagtagttacaagttcatgcagttgcagaattctcttgacgagagtac

SEQ ID NO: 346038 - DNA, 1000 bp, Homo Sapiens
actggaacaatgttgccccatattttttaatgttttgtaaatatctccttacaaataaattcttaaaatcaatttttataaataaaattcatagcaagactcatttattccattaagaaaacatttgtagaagcacacctccttatattaatggagctacagagtgcaaatgcccatcattcaaggaccagatgaacccatgaaagataaaagaccaagcaactaatgcaatatcacttctgcaaagccttactgtaaagggaaagattcctatataagatccatttgaaaatccatttcacacttctaacttaaagccaattcaaatgtaatttactttatcagagtccttcatttagagagggtcaggagtacaatcaacagaagtgacaattacttaggcttatcaaaagatgacctggtagcaatagtgctgagcaagaaaataacaaaacaaaacaaaccaggactcccactggaaaccacagctgttagtttataaacagatcttctaacaaaccagaacatcctaagaaaaagcatctatgtgcgtcgtctctgcaccaaatgcaacctcatttgtcattctattttagtgtcctaacatccctttacttttccactgttgaccatttaaaagaggtgaaacaacactcttggcacaaaatattacacttaccactctcgtcgtctatactgaaccttccaagaccactgccatccctgatggagtactggatctctccatcccttccggagtcttcatctcgagcagtcacctgcagcacgcttgttccaatgcgtgagttttcctttacagatccaacaacagcaaagtctgggaaatagggagtgtggaggttttcattgacatccaccacttccacctcaacaaaggaaacagatgacagagagacaggccgccctttgtctttggcccgcacagtaaggttatagaactgctgtttctcataatcaagctctttgctcaagcggatgg

SEQ ID NO: 346039 - DNA, 1000 bp, Homo Sapiens
ttattaattaaaataatttaattaacaaaagtacacattcaaggtggttatcccattcataaccacatagtaattacattccatgaagttacaatgagctcacaggctctcgcacatagtgtcttaggacagtatttgcctcatatgtgggaggtcacaataaatcatcgtgaaaccaacttttcatgtacaaccaaagcaaaagaaaggcctcagaggggaagagaaggaggaaggaggaaaaccatagataagagaacctttagaaacatcaaaaaaactcacagatccattatcataatccagaaacaccccaacttgacccagaggcctttgcacatactgaattaaaggtggagagttggtggagagactatagtgattgctcctctttgaggaaattaaaaaaaatctttcatcagaatcaataacgaaattggcatctgcagtcctggaatcttgacagactcccagaatccagttggaggagagggtcacatccacctcccagtaatgcttgccggaggtgaatgcttgcgctccccacacagcaaagctgtccactccctggggatccgtgggagcactgagatggtcatctccaaatatcacatatctcacatcctcagaaaggcttatatagcaaggaatcatttccgtgctcagagcactatccactctgaagttgttgagcatgtctaggactccagttatgcaccatgaagtgagctctgggttcactggctggggcttttgcatctgtgccaaatcagtccttgctgatacatttctcacatcctggagcagctccacgtcaggcacgtggcatgtctcccacagctctctgtacatgtctttcatcctttctaaatgttgggtcattctcacttgactgtcttgtagttgttggaaaagctcttctgcttctctttccagtgcctgcagatgccgttgctcctcctcatcgagaaatataggcatcttttgatattgaatagtg

SEQ ID NO: 346040 - DNA, 1000 bp, Homo Sapiens
ggatgttatatgattgtatttttcacagaatatcacaatagcgaccagctgtccacttcagaggagtttagctatggtaatgtcagctatgaaaaacggtagtaagggaccccgagagcgaccccaacaactttttggaggaactccatatattccaagaacttgaaatctttgccactaggggaattctgaagtttcttttccttaaggtttcagggggaatagtccagcgaatggttttgggtataacctccagtgagtctgccggtacacaggcaaaaaaaaagggccggttttgttttctttcagaatagaagttgatatcgtcatgatgaggttttgatgctgatttatgtttgctttggaaacaatccaatctttctgactcataatcatacactctcttctttctgtcacgtttccctttgctgtgtgtacaactgtaatcgtggtcccaatgactgctgttcttcctaaataaatcagatctggccttctttctttcttggctttctgggtgcctgtgagacttgccttggttttttgcaagatgtgatttaatatttgattcagttaagggagctgaagagtaacttgttctgctcttggtagtccatgaaatcttctcttcactgaatgatacactagatgacctagactgaatttccgcagtatttgatgaactatgacacaaccagtcaggagatttcattttggaagatgatctatatttcctgcttttgtgggacttacaggaaggtggtgtaataattaaggtttcctttctgcactctctagtacaatgggaacctgaatcttcactgtaaaatgatttcaaatcagtcgtgattttgtagacattttccaaaggaatgcctgtctgtaattcaaatagaatgttttctgattcctgacttaaataagagttggcttccagaaacacacattcctcactctcacttacttcaagacatgaacactcgtccaagtcagctggact

SEQ ID NO: 346041 - DNA, 1000 bp, Homo Sapiens
gactttgccaagagcttctattaccgcatgagtagaaggcaggcccagggcctgggtgctgatagagacaaactaggaacaagttaccccaatcctagactcacatgcagtatctggaaaaattactgcctggggtgaggcaaatttgggaaactatcttctattcttgtagtagggggttttgtgtgtgtgtgtgtgtgtgtgtgtgtgtgtgtgtgtgtgtgcgcgcgcatctgtgtgtgtatttccccttgggaaactcagtggcacataaagttattcagggttttctttaaagtgattatttgctaaaaattgccttagcatttccacatcctcatcgaggatgtcatacgctcctccggtttttcttcacagctttatacaacttaatattcaggctagggaaactggaaatttcctccaggtcaaacaactccttaaatctatctacaaatttattttccttctccaacctgaatttcatggcccacaggatgatggtggtttctttgcacagatggtcaaaggtaatgaggagctcttccaagaaaggatgagcgtagaccacatccgctgccaaaatatagtcaaaattattagaagacctggggaagtttgtatctaaagctactccccaggagagttctttaacctgaggcaaatgcttgcttttcattttggtgtttcgggaaatattatattgcaggtttccaagtaattcgggtaaatctgtggccgtcacgtgagcaccaagtaaacttgccacaatggagactagccctgttccagctccaatttcaatcacgtttttgtcaaccatattatactgctttgcatttgtttccaggaaatagcatagaacaagggcctatgaaagttagaaaaaaaaaaaaaagggacgcttggcaagtaataacagaaagtaaaattaaactttattggacaaatatgctgctaatgttatgctatgtatgcgtgctcatatgagtacatgaga

SEQ ID NO: 346042 - DNA, 1000 bp, Homo Sapiens
acgtttctcctgctatccagagaaattcttatgacatgtgagtcctgggaagatctggccaatatgctcagaaccatctcaccaaacagggagatggcgccaggagctccagagctagagcttagtgagaagtttccagtgggtattccaagcgtgctcagcccagctctctgcaggctgcaggccagatgctgcgctctgcatggaggtgacttctggggctgctgggaggtcctctgccaagggcaggcggggacacagctctggccacctggcaatcatgaaaccagaaagtcactgggaaggagcatctctcagacccatggccccaaagcgactgttggagtagagaaaacctgtgtgcagctgggctgagaagggagcactctgcccctggagctgacacctgtgtggccttgggcaagtcactttccctctccgaacctcagagacctcagtgtccagatgtgaataattcagataaaagaggtgccaagacaaagatgctgccagagatggaggagctgcatcatagtggaaacagcgccgattcatcttcgtcgctgctgccaccggggagctccagctcatgggtccttggcgggtgagcccttggcccgcacacaccagggtcccacactccacgcaagcaccgatgatcagctgctgtccgtcatccaccaacaggctgtggcttgctcgcagggtgtataggaacaggggcagccgggccacccgcacggacttcagccccagacaccgtttcttctcctgctgacaaaagaagcacacgaacgtctccacctggtactgccgggaccaggcgctgacagcgtggtgggagctgcgggcctcatgctgcagccactgggccagcaggtcatggtagcagagcacacaggtagccaccaggccggtggagtccacaggcctggcacgaggggcaggcgggtacacggtgaggaaggggaagaagggctccttctcgcccaagcggctg

SEQ ID NO: 346043 - DNA, 1000 bp, Homo Sapiens
tctagttggaacactcactttattgttgactgattgaaatttatcagtgcttaaggtgctgaaatactgaggtactagtcaggaaccttgttagttgactagttgtgtcagaccctactggctaattcacaggaagactttattatacctcttgccattttgcccaagtcattaatgacagctttagttgatagatacaaggcgtgtaaggatagcaggagatccagctccttggtctgctgtattcatatataaaaatgtttggaaagctgattaaggcatttcattaattaagccttaaaacaactgaaaccaaatctatgccaaggttcctgcttgacatgtgttcctcaaaagatattatctcaacatctataaagctaagaaagccatatttaggggaaaatctacacagtatattagctcttcaacatgacagagaaaaagcaaagttccttcatttggaaattgggtctcctcttcacatactctgacaaaatattatatagtctggccaaaagatataggtgtcttgataatttgctcttttaaaccttgctaataaagataaataaatgcccatcacatagacattaactagtctaatcagagggaccacacaggtcgcttttcagaacctactttaatatctaaacagagtcactgcagatcaatacagagctcacccttttccagaaaagtagatctctgtaatatttctagggtttgacatcattgggaaggcacaatgcagtataagaaatgaactgttacatccacaacggctagcatagtactatgtcatatcaccaagtgcctttttaattagtttcatattcctaggctttcctttcgtttctgcagtgcttaataggagaactgaaacagaatccaataagaaagttttggtcaattgaaagactttaaatcagaaagtttcttgctgtcactggataagcaagtaagggattaaccacagaaactggacatccaagacatc

SEQ ID NO: 346044 - DNA, 474 bp, Homo Sapiens
ttagatgatcccaattttgttggcaacatctaaagcattgtaattaggagccagtcgaacatatgccttcttctctccatcaggccgaatcggggtgttgactttggccacatcaatgtcatagagcttcttcccagcctgtttgatctggttcttggtggtggctttaacatccacaatgaacacaagagtgttgttttcttctgtcttcttcatggtgaactcagtggtcagcggaaacttgatgatagcatagtggtcaagcttgtttctcctgggggcgctcttccgaggatatttgggctgcctccggagtcgcagtgtcttgggcctccggaaggtgggtgacatgtggatcttgttttttgtgtggctgtggacacctttcgacactgccttcttggcctttaaagcattcgctttggcttcagctttaggaggggcaggagcttccttcttcgcttttggtgccat

SEQ ID NO: 346045 - DNA, 1000 bp, Homo Sapiens
ttagaagacgaggattcgattgttgccaaagtccaccacaacgatcattccgtcgggggtgatggcgatgccggaagggcggtccatctgcccaaagccgctgccttgagcaccaaacttgcacaggaagctgccgttggattcaaacatctgtacccgatggttcctggaatccgccacaatgatgcgcccttcctggtccacagctaccccttgtgggcgcaggaactgcccattgcctgtgccctccgagcccagaaagcgtgccgactggcagtcggggtgaataaccaggagccggtggttgttgaagtcagtgaccaccaagtggccctcatggttgaaggccacaccccgtggggagtcaaagtgcttccagagagccccctcgaagccatacttgtttaggaagacaccatcaggcccaaacagctggatccggtggttcctcgtgtctgagaccaggatcttgccctcagaattcaccgccacatcccaagggtagttgaactgcccattcttggttcctttctcaccaaacttgaggaggaactggccctcgaacgtgaagatctggatgcgatgattgtccttgtcagccaccacgatcctgcgtgaggcgtcacaggccacgccggctggtcggtcgaactgcccaggccgggagcccagggtgccgaatttgtggtggaaggcgccgcagggcttgaacacctggatgcggttgttgctgcggtcggcgacaatgatgtagccctccttgtctacactcacaccccaagggcggcagagcttgccatcgctgtcaccctcactgccgaagctcaggcccgggagcccaatgcccacgtagctgcggcctgacttgaccaccaccttgaaagggctgttctcaatgtgctggttgcacagtgtcacagataccaggtgctcaccctccagctggggtcggtaactcaccacgtatgtcccattctgctgatcactcacctctgcacca

SEQ ID NO: 346046 - DNA, 1000 bp, Homo Sapiens
atttgttttatgttctttacttgccaatgcagaaaaacagacaaatacatcttaatggtatttccaacaattaacaaaagaaaggagttcgtgcttaactcagagttaactagaaaaatcccttttattaaaatacattgtaaatattgctcattaatttcctgtacttgaaacattttttctgaacccctaagcaccacttaggatagatgaagcaaacctgatgtgttttattcttctctattacctgagtatgaatgtgacatttaactccttgaacttcttgctcctctgaagacatgaggtgctatcactggatttctctaagtaagaatagcagaagtcgttttaaaaaaatactgcagatagtttttctttccaaattttatgaaaataggtataggaaagaaaatctgaatgtccttggtgtcagtatccatctgctccatgcatccaggcagggcttctttccattcccaaagagggggacagtctgcctaacagggccattgctaccaactgtggagccagctcttagactgaggtaaggtctgaacattgggtgtttcgttgttgaaaatatcagccctatcataaaaacaaaaatgcagatgaggacacagccatcaatacttttataaaacctttcctactttaacttactctgatctcttttgcatctctgcaactgcatatgaatttgtagattaaaacaatgattttcttacatttttctaaactcagtgtgtatttaaggctgtttttaagagctctgctaatcctgttttggtgctgtttattattgactaaacagctacctgatgggtaaaagtaactcagagcttcatctatgacaagtagtttcttgactctccttgtctaaagaatatatggattagtgaaaattaataaatgaccataacaggaaagacagactagaagtccatcaaaatgggggcttcaagctccatcaaaatggcagtaagcttcctaatgaaga

SEQ ID NO: 346047 - DNA, 1000 bp, Homo Sapiens
atttaaaatttatttttcttcagacctggtgaacagggagtacaacaaattttaacaaaaaacataaacacacaaagaatgcagtttgcttatgatgtttaatttttatgttcacttttaattttactatggtattattatagaaatcaaagattgattcaatatctaatttttatcaattgccattttgttgtcattatatcaaaccacagctttttaaaagaaagatcttcacacttaactaacactgtaaaatattaatgatgacactgaattcccagttcatcaacaggctacaaaagagagaatatgttcacttttcaaaaaagcaacaaaatggccaggtgcagtggcttatgcctgtaagcccagcactttgggaggccaaggtgggtggatcacctgaggtcaagagtcctagaccagcctggcgaacagcccgtctctagtaaaaatacaaaaattagctgggcgtggtggcatgtgcctgtagtcccagctacttgggaggctgaggcaggagaactgcttgaaaccaggaggtggaggttgcagtgagctgagatggtgccactgcactccaacctgggtgacagagactcctcctcctcctcctccaaaaaaaaaaaagcaacaaacctggccatggccatgtgcagtggctaatgcctataatctcagcactttgggaggctgaggtgggaggttcgcttgaggccagatttccataccaccctgggcagcaaagtcagaccctgcctcataaaaaccaaataataaaaagtaacaaatcaaacctcaagccagaacatcatattgtgtgtgagttgaaagtgttcttttttcttccagaatctgtattagcaaagttgcagaaggacaaaaaaatcttagatgacaaaagtagtttaagcactttgctttctttttgtggagcttctagtcactattggcattcgagagaaattaatggttgttctggcttttaaagcttttttaa

SEQ ID NO: 346048 - DNA, 1000 bp, Homo Sapiens
tcacagggtctgccatggggccctgagggtaagtggcagcaggagccaggtctgtggcagcacaagggctgcgcagggcccaggcaggccagcagccctcagaggcttgggtggagagcaggtgtgaggagccagcgcggggtcagaaagaggagtgagcctcatgattttgtcaatccagttgatgaagtaggtgaccctggtgaagatgctggggtaggcaggatgccggcagtccaggccccagctggccagccccaccaggacccaggcactggggaggtagcagactagaggccccccagaatcgcccttgccctcctggagatagaagggtggtgacagttgcatgggcagctgcatgtcccgggatgggaggcagacagggacaatgtaggaagtgaagttcataggcaggtgcagctgcaacatggcaatgtcactcccaaaggggtggagcttctcaaagtctggatgggtgatgatccggtgcacagacatcttctgggtgtgctgggtttgatgatacagttggatgtttcccaacagaacctgatagttcttcggggcctgggatttgaggagcatggtgcacactgaagagaagccctgcaggtggccagcacagacactgccaatgctctcacgcatgtctgggttgagcagacagacacaggggccagggaactccctgccagagctgaggatgaaggatgaggaggttttgagaaagcagtgggtagttgataccagccagcaggagtcgatgaggacagctccacagaggtgcgagccccagtagagcaggctggcctgccatggccactggccagctgctgcgtcccggccaccatagatcttccccaccaccttaggcttcccacacacccactcccggggcccagcagcagtcccggtgctgtctccctccacccagccccggcaccaggcaccaggccctggcaccccgtccagtttcgtgggccccacacccagtcct

SEQ ID NO: 346049 - DNA, 1000 bp, Homo Sapiens
ttttttttttttttttttagtaatacaaaattatttattagtaaaaaaggagacagcatttgttcgttatacaaaaagtaaaacaattgaaagtttcctacaaaaatttaaactatgagcatacaaagtaggagtggcgctgtgaccgggtctgaggacttcatatgaatgcttagcatcagaaaattggaaatagtgacatgtaaactgtgcttgggatattgtgttaccaagttgcatattttgcagtgtcatctagacgtggtagaaaaatagatatacccatgccatgttctgaattactgtaatttctattaactatagcagatgtcacagtttgtttccctcttatagaaatcactggtggcggctgctgagggggcaaagtccacacagtctgtgctcgggtagaagtactctgctgcctggagagcatccaagtcctctgcctcacacgatgcgcagtagcagatggaggtggtggccgaggagaagcagctgtactgggcgtgtgaggacaagtgttggtaggaatggtcttctggggggtagccacaggttctggtgtccagagaagcaggggaattgtaattctctggagcatatgaaggcagctgcactggcgagtaactgtagtctaaggagccagagagaatggaggaatttgaaggtgatcctgggatcaggctctggttaaagcagaaaggggtggcctggaagctgtctgggaaatggtgtggagcactttgtgtggaattgagcaaaggctccgggtgcatctctgtctgaaggtaggaatcaaagatctggtcgaggcagcttgagttttcttcacatgaaacacaactggaaaattctccccgttgcaaataattgggcgtggaagaaattggttcaggctcaaaatacagtcctgcagaagatggtgcaactgggtctgaaaggtggacactgctgcctccggaccgggttcccccggaggccgcctggtgtgcccgtc

SEQ ID NO: 346050 - DNA, 1000 bp, Homo Sapiens
aatttctaagtcatgttctggtttttgcatgcaaaaacaaaacaaaaccatgattcaaaacactggtggctaggtctaaaggaaaagccagcgagaggcaggtgtgtaaagggagcctctcagcatgcaggctctctacgatgagaagggagcatgtgtctctctagcacattactaagaccccctctggcccagcaagctgatccgtgagcccaggaggccacacccaagctgggagcctcactcatataaggaaagccaagcttttaacaggtatttctgctttaaatttgtggtctccaattgctcctgaggaaggatcaggtctgagcctgtcacaacactcaccagttgcccaacaccaagtacaacaaagttcacaggatggtgggaatgtgggctgcacaaaggaaagatgacctagagcaggaattagtgacatgagaacagagggtactttgccaagccaactgaacagagaaggagattcaaaaattgaaagggaaatgaccagaccccaaaccagaaagtcatgtgagtctcaaagggcagaagcctaagtccaaagattgccggactagtaaagcattcaagactcagttaccccaaactagaaaacgggatcacggaagcccatctgcttagaacgtggcatgtgctgctgaaagaatggcaagccaaggggcatggtttgctttaaagtgaagatgatctctcaggttgggtagagaaggaaatgagcaataccatcaactcacaaagagagaagaaatgttttctaattaaaaaactgctcattagcaaaggccctacaaacaagaacatccttgaacttcatctgttagcaaaaataaagccatgacctcagactcccctgaaattagccatgcaatgacaggaccagggagagctgtctcagtcctggccactgacatgtcaggttcatagctcccccaacaatatgagcaatgggttccttctcaaccaagcccttgcttgg

SEQ ID NO: 346051 - DNA, 1000 bp, Homo Sapiens; identical to SEQ ID NO: 161344

SEQ ID NO: 346052 - DNA, 1000 bp, Homo Sapiens; identical to SEQ ID NO: 161345

SEQ ID NO: 346053 - DNA, 727 bp, Homo Sapiens
atcagttgaaatactttatttaacttattttaaaaattgattcaaaactttttatcttctttattaggtattctacccttagatttaacactcatttttcccgagtatattttctcttcaatatacaaaggaatatattttcatagagtgtgttgaatattaggaaaatcaagagttctggttctgtcaggtgcagtatttagagtgttattttgataaaatccagttgctctgatatggcttgaaaatacttgctcctttggagtataattgcaggggaaaaactgtggaataggtagaaattcaccataatgacttgaattggttttatacataatcatttgaggttttgatagtgaggtggctgtctggagtgtctttggatccaacatacatgaaaacacaggattgccagggttcacacaaggaggcagttgttcagatttcatttctgtgtctgaatttgaaggtgaagtacttttcttatcccggttgcggtctgtcattttcgctcttctttgttaattttttcggcaaagtcagttttcatgcagcagatggcaagaaagccggtgaacgcctagggacgtggccttttaaccgcacccaattaaagcagcaaacagaagatgaatagctgggtggatcagtatgtgtaaacctatccgtttaatccggggagctgttttcccgggtgaaaccacgaattctttctggaggttgcaac

SEQ ID NO: 346054 - DNA, 1000 bp, Homo Sapiens
agggttttagagtgtttttcattttctttttttttttttttttacaataaagtttcaggcttttttaccatgctctttctttctatgaatgggggccaaatcggtggagtgatttatatattactctgtccgatcttgatacataaatacccagccccatccctgccctagaaaagatagacgtatattaattcggaaaatagctctgttcacctgcccctgccacccacctggagctcctgccccacaaagctggcccctgctccggatgagcccctgctcccgatgagcccttgcccagcatcctggggcggggagggcatcagcttcttttggaagacaatctgggccctgtcgctccattggcctgaagaggaaagtgagcccctaagtgggcaagggcagccctctgggcccagccgtcaggtccttcggaagaggttactgagaaagccaccggcgggcccggggcccaggcgcagcgagaagcggggcgcggcacggcgcggggtcgacgacgacgcggaggcgctcagctccttctggcgctgtgagcgcagctgctgcccgatcaccacctgcatgtcgtcctgccaggcctccagctcctgcgtgagcgccaccttctggcggatggcgcgcagcagctcccgagacagggagtctcgctccagcgagacgcggttgagctgcagggacagctccagggccttgttcacggcctcgtcccggtctgagagggcactgtgcagggcctccccagggtcttcctgcgcccgcagctccttctgcctctgcagctcttcccgcagggactgcagctctgcctgctgcagcgagatctcatcttgcagcttggccacttccacctccttctcctccagtatctccgctggactgagggatgttcgcttcttggggggctctaagatctcttccgggggtgaaggctgggggctggacgcctttcgggtctttggggaccgggtggtcggggtgt

SEQ ID NO: 346055 - DNA, 1000 bp, Homo Sapiens
tgggaagctgaggcaggcggatcacctgaggtcaggagttcaagaccagcctggccaacatggaaaaaccccctctctattaaaaagacgaaaattagctgggtgtggtgatgggtgcctgtaatcccagctacttggaaagctgaggcaggagaattacttgaacccaggaggcggaggttgcagtgagccaagatcgtaccactgcactccagcctgggcgacagagtaagactccatctcaaaacaaaaaaaacaaaaaacaaaaaccaccaaaaaacaaaaaacagcagcacattaacactcacaaatgaatatgtacatgccaagaagctgagtgtaacaggagattaacagagggtgagtagcaggatggatgtctggggagggatgttaatacagcaaaggtgtgttggcactaattgctcccaggtaaggaaggcaggtccagctcctggtgcaggtggctacaggtccaagaggggtatccagcagaggggccggtaggttaggacaccttggtggtcaggacattctggcggtcaggacaccttggtgacgccgttccctgctgagagtgctctccccaccctgatgaggtcctttccattcctccggttgctagggcacaggggactcaagggcagctctgggagtacaaggggcccagctggcctcttcaaagtgctgctggggaggcgggcgatgcggctgcggccatgggagactgaggaactcgcaacgcgcttcttcttgcaggcagaggtcccagggagggaagatgttggcttggggcccttcatggtgaacaggggcacaggtgccctggggatgaagggctggtccagcctgctcagctcctggggtattttgtcccagccaatgcattcatggaaactgggctttgagggaggctcctcagagagatcaaaggtggcattgaggtctcgagtgggcagagccagcggggtggagcagttctgcatggcggaagggccca

SEQ ID NO: 346056 - DNA, 1000 bp, Homo Sapiens
aggaaatacgcaagttagcaatttattatgataactctgcaatcttttcagccactcttgaaggttcctggtcatccattctgggcacagtgtgacatttacctgaacagagaggagaatggcactagaagatgagggagatttggtgcctaaaaattactacaaacaggcagggcgcagtggctcacgcctgtaatcccagcactttgggaggccgaggtgagtgcatcacgaggtcagaagtttgagatctgcctggccaacatggtgaaaccccatctctactaaaaatacaaaacgttagctgggtgtggtggcaggcacctgtaatcccagctactcgggaggctgaggcaggagaattgcttgaactcgggaggcggagcttgcagtgagccaagatcacgccactgcactccagcctgggcaacagtgcgagactccgtctcaaaaaaaaaaaaaaaaagaattactgcaaacacatagagaacagcaccatatggagcaaaagagagcagctggagaatgttttcattcagagaccccataggatttcaaaagccagctaccatcagcagttatttttgcccccaaatcaccctaaaatgcaaatcccatcactgtagctggcaaaggtctgggatatggctcctggagtctagggagcagtccccaccaaggacggtgctggcttctcgggttcctctcccagatctacaatccggatggcgttttccttcttggaaagccagaaggcagcatagactggttctgaaaacttgcaggcaaacttgtgaaccagagtcatggaatcatactctacgccatagaaggaaaggatccctcctgggaagtcaatatagaccccgagcctccagaaagggccagctttgagtggggtctccatgtcactgtaccaggccgtgaactccttcccgttccattggaggctccaggagaagttgtttccggaaatgcaactgctgcgctcctccccttt

SEQ ID NO: 346057 - DNA, 1000 bp, Homo Sapiens; identical to SEQ ID NO: 246628

SEQ ID NO: 346058 - DNA, 605 bp, Homo Sapiens
tacggtttggtgctgttttaatgaccaagtgtaggggaaggggttgaggagggattattctgttagcaggctctaggaatcccatggtcaggtagaaagagggtttcctcaacaatgaggagtgtgatcatctccgtccattgttgacaagcactgagtccagggagacatctctccacacttgaatcatcttcacatatgatggcgggattcgatggacaaaggcataaatgtattcaccatttacctttacctcatactcattgagacacacgtagatgcgcaagtcaaatggtttgccatcctcaaagggcacatagtgtaaattctcctccaacatccatatcccaaactcacgactgttcatgaccacacgacggcctaagtgcactcgcaaatggaaggcaatttctgagtcctcattcatctcagtgtagaaatccacctgcagctgtggttcgttgatagaagagtcgatcagtgtccctttgattatcacgcaggaaccaacagacaaagacacaggcagtttgtatggcacagttagaaatgacattgtcctctccttctgggcgaccttcggaattgtgtccagtcttctgagt

SEQ ID NO: 346059 - DNA, 1000 bp, Homo Sapiens
cagatttgaaactttaagacattacaaaaaaaaaccctcaatctcaaaaactcatattaagcttgtttttgttgagctcacgttccagatttccaatcaaagtatcaatactttcttgtagatctttgagattgttttttcgatccactgtagactcaactgtctgcattgtcaaatatgtctgaaatgtacactctttggacatgggaattggctgttcaatcattacttctggcccatccattttgctataattttctccgatttttctatcttctgaagggacatcatcataatccacatcatttaaattttcttttgtatttaaaaagtagttttccccacagctgctccagtctcctgcataacgattgctaagtggactgtctaatcggttttgccttggcctaagtactcctgatgaatcagtaccactcaaatttaacatatgaggtcgttctttcttctgcctcagataattcagagaagacttctgctctgggaataaattgtctgttgattttttgacagttaaacgctgcactggccagagttggagtaagtaatgaagaacttcaatgtgttttttaaaatccaaagcacttgcaagttcttctgaatcagtaaagactctgttgttatgggtggaaggctcttgcctctgacttaataatactggtccaaagcacacagccaaattctggcacgtcatcttattcacttcatgataggaagccaccaatttcaaatgatccaacaacatctttagggttgccttctcaatctctggcagacaatccagcaggtcaacagtgtacttagagtcacctgggtcattctcacaaccatttgatgacattttcaaaggactttttgccattgcatctaatacagcctcataaagctgctttgttatcagaggagaagggagttctcttaaataatccttaagaacacctgttattacatttatatctgggtactggttttcacacagacc

SEQ ID NO: 346060 - DNA, 1000 bp, Homo Sapiens
ttcacgcttggccacaggtctttattccaagaccctttacctttgcagcacagggcccagtggaggccgcccttctggggagcccaggcccacgtggatgtgtcaggaatgctgtccccatcccacagggcacaaacctctcctgcacagtgaccagtgccgactcaggggcagcccgtctgccagtgcgctgttcagacaattgtagaggtagatatactgcttcagcgttggggtcataaggtcacaggcctgagactgctgcagggccacgttaaagacatccacggtgcactcagaccctgcctgctgcagcagctgctccatggccaggaaggtgcccagctgggtcgcacccttgctgcaactgaccttctccatggcatcgagtgggcacagagagacaagcacatgagccccgtgctgccacaccagctcccagagctcctctggccaggagatggggctgtcctgctcatagccaggcaggggtgcgtaagagccagcctcgtccttgatggcctgcagcaagagctcgtactccttcaagaagccagcgttggcattggctgccctcttggcacacgcctgtgcgaagttcatcacagagatgggccaagactcagagatgttgaagggcccttccagaatcttgttcagtaggcagctgtgcaggaagacgtactggctcagggtctggatcatgaggggcccgtgcatccagaatgcaaacacagcatggaacacatctaccatctgctcctcctccagctgctgcagcagcctcaacagggccacgaaggtgcccgtctggcccatgcccacactgcggggacagcccctgaggaactgaatgggtgaagaggctgccctcctgcagtgcaccaggatgggtcccatgccctgggtggcccttgcctgttcctgtaccagctccataaaggtaagcagggagctgggggccttgaggatgcccctcatccttggggcacgcatgtgc

SEQ ID NO: 346061 - DNA, 1000 bp, Homo Sapiens
cacatttttggtgtttttattaattaaagactacaatgcccatttccagttttttcacggtgtgcggagtaggtgaggtccatcctctgcaaagcataggccacatctaattcatttgaggagatgcaaataggtctgataaaggggcagataaaaatgaatgccttcatgtaaatattcaatcataagatatttaggaacgtgcacatccatgttagaattgaatcttactttaactgagctcagttttgacagtcaattgcagatttctggttgaccctaatttttatactcgtatttcactgataatatgtaataatacccctacatattaaatatacataaatatcatcttcatatgctttcagataataaaaacttttgaaaggcatggtagaatacagacttttatctaccatttgttggattaacaagtaggagtgttgaatgttgagaaaaattatgatgaatttgcagcttttacttagtaacttcatggaattcacaaaaaccatgaaacctcttaaaagtcacattctactttgaactctgggaaaatcgattccttctctcactgtcaagtatcagttctgatgactccgacatctcctcttcaggtaatgttggcaaagctgcaggccagtcttaggatggaaaggaaggatgccatcgccgtgttttgaattgtcagccaagtgctcagtggagcttggggaaggctttgctatactacagttgtattactgaccttctcaggactggccagattaaaagaagcctgtggatgacttgctggcctgggtggacgttgatcagcccgctggtgaggagggccacagctactgtttctttgttcaggatcactggattcacaggatttgggagggagagaagcggtgtctgtggtcttttgttcatctgaattgtagccggagttttcatttccactttctgtctcagtttctttgtttgtcttctctttttcagatttcttttgaaa

SEQ ID NO: 346062 - DNA, 1000 bp, Homo Sapiens
attcaagatcaattttatttgttgtaaaaacaaacatgggttatgttccagacaaacagatataagtgagtagacttatgccctggtgcctccttggctcttcacaggatgcaaaaacaaatcctgccagcaggaggtggcaggttgcagaggtggctggttgctctttcagccagcttggccttgtctggcatgcacaggtcccagcacagcaaaacattcagggagttagagtgttgcacaaaggattttaccaacctctcacattaagcagcattcaaggatttgctgaccaccacttatgcaaattttgtgttatgctatagcaatgaacttacttgttctatttctaaacaaaacattgggttcacacacaggcctggacaaagcttccctcttctgaactatttactgatcttcttattctcaaagaatgcaagatgaatgatgtgcaataccatggctatggcatgtgacttttcttgacctggatggttagtgtcccaatatttaactgatttttgtgggggtgaaaatatgccataagttcttccttctatcatccccatcactaccatacatgtaatgacataatcatgtcacagtgtgccctcagaatcactattcctagctgagtatactaaggctttctatctagatcagttcattgtgtctgtgtctcctctaaaccctccttcatcatgcctaccttgaggaattcagcaagtgatcattcacgcaagctaaaggattttagctttctctgccataaagattattgctaaaatacataccatacaacaaaccaacccatttcccacaaatcttactgtctgacttctcacagaatacataatgacttttattgtgtctcttccttctctttcctaactgaactttgttctttatccatgccttcttccaatcctgacatattttaaaacctttagcatttctgcctataatatttgggttttcttcttttcctatctttatttga

SEQ ID NO: 346063 - DNA, 1000 bp, Homo Sapiens; identical to SEQ ID NO: 161348

SEQ ID NO: 346064 - DNA, 1000 bp, Homo Sapiens
cctttagaaaccttcttttttatttccatacagcaaaacattttatgaatatacatatatacatatttagtgtacattttatatatatgtgtatatatacatattttgcatacacatacatgtgtatatagaaatgtatacaagcacatatataaattatagacacaaacacacacacacactgctcaatagaaaaaaaatttaactccacattgcacaatgaaagaaaacaaggagattaattttggcaactgtattttccccagaatattgcattaaattatcttctacagatatagttgtgggtgtttatgatgacaatgtctattttttaacactgttctgccaatacgacaaaaaacttactttgaaaaatcttatttaggtactaaccagttccaattaactccttcctatatattccatttattctgacaataaaagtgtgtagctcgagcttgttatcataggcaagtccaggatttagtagtatcattcctgtcttagaattgaccttcatgtcattttaatttttaaactattgggtgttctcaaaagcaaataaaggaccaatgtaatatttaaaacacttgacaaatgtaacaaacaagtgacaaattcaaaacagaaaaatctatgtttcattagggtaaaagaagagagcaacatataattagtctgcttaggaaaacacatccacagaatatatgctgcaggagaaatgtaacaggagactcactcatctactgcaaggctttgaaaaatgttggtatctgtaaacaataaagaaagaaaagatattcttctctaattattaaagagatgttcaaccatctgcaaactatttttttaagttcttgttgttcccttcctttgattcatgcaaagccatgttgtacctttgctacttttgagaataatgggactttgaagtcaattaaactcattcctcagcttgaagggagcagcaggtagaatgttgtctttggctcctcattaa

SEQ ID NO: 346065 - DNA, 393 bp, Homo Sapiens
tcagagaaagaagagaaagtttatttagagacactggcgtggagaggaataatcaatgatgattatggtggtcttgggcctgcaccaaaagcccttctttgtgctggccctgggagaacacatggcacagaaaagcccagattcaagcagcttcttcaaccaaaacattgacatattctgctgacttgtcctcccattccttttcagagataatttcctttctttttgcctctgtggggaatatttcagatgacatgctgaacacctatacctgcaggccttcaccatcttcttctgttcctcaactctggtcagcatgaggttttggttgaaacagcaagatctgcctgctcctactgttgtccctctctcctaccgcaggtccatttgtcc

SEQ ID NO: 346066 - DNA, 1000 bp, Homo Sapiens
aacaagagaggctttatttagatcaccaaaaagaacattttacagaaagggaaccgtaacattacacaaaaaagtatagctgtaaaattgcaaacaagaaaggcaatgctttctttagatcaccaaaaataatgtttcacagagaaggaaccgtcagaagcaaattatagctgcaaattttcttttgccatcaatatggattccctctaaaatactttgagactactttgcagttttcaagtacaaactaaaccttgttggacagttgctcagcttcatcaagagaatgaaaccaatttgcaaaaaaaattttgtttaatgctaacaaataacgaaacaatgtggttcttgctgactaactgcaatgtctgctgaaatggcctaacctatgtacacttccatgaacatttcactgtgaacagttgctttttacctgccatcacagatggcctacaaagtagcaagtgtcatgtcagaacactttcaggcacctaggaaataattctaaacagagtaactacagtacatggggaactcaaacaacagggcacacctctgtcaaagccccctggtgggcactttgttttgtgctctggataaaaacccaccaccttgttaattttttacctggaactcagaacaccatgctagatggagcagttgttcttacagaaccatcaacacttattgactgcctgggggttcctggtgctgtaatgcacctcagaggcagcgacgtaagctgactctgggaagaagtcatcgtggtattctgctaaaaacctcacaaagagatcaaagtgcttcaataaagccttcagattcttctcagtaaaggacatttttccaagaatttctggaagtttgacaaacaatcgcagcaaatgttgcgccccgtaaatgtaagagggtggaggtggctggtcacctggtgggtaattgtcaggtacgagcttccaggagaggacctcatttatttcattagttcttctcccttcaa

SEQ ID NO: 346067 - DNA, 1000 bp, Homo Sapiens; identical to SEQ ID NO: 161349

SEQ ID NO: 346068 - DNA, 1000 bp, Homo Sapiens
aattctcaaaattttatcacacaggtaaagttctataaccactatgcaagtaatttagaaattaacaataaaagatggagaaaaccaatatatttgggaaaaaaactcccaaataatctgtgtgttaagaaggcaatgatgagagaaactatgaaatctttagaactaaatgactataagaatacatatatatcaagatgtttgataatcggttcaaatggcacatagggataagtttatagttttaaatgcatctattaatagacaagaagacattgtggcactgtcagatccaggcttgtttaaatttgtgctttctatttctttaggtgtcttaacaaaatggataacggcatataccaattcaccccaaacttctccctgacaatagcaagctttcgaacttttaactgtttattgagattatgtgatggtctcactatcgaagtcaataaagtgcagttcttaatttaaaaaaaacttccttgcctttagtatttttaaattaaattgtaatagggtaaaagcaatataaatgttctaccttgtcttgacataagaagtcatttagtactttcaagtctactagtttatgcattgtttacttatctgctagataattatgtattttcattactacaatttctgaaacatgccattagatatcaaggttatctgaggttccaggtattacagagtttcttcttatttatcttcatatttttttttcatattgttcttttctagggaatgatgaatgtatacccacatgctggaaaagagaaggtttatactgaatacgtatttgcttctttcgtttcatacagtttctaagatcttctcctgcgtcacacacctttacctgaaaaatgtcattcaagagccagtctatgggtttctctttgtagaacattaaaaaaaaccgtacaaagtgagttaagtcctcagatctaaacagctttcctatgaatccaagcattgaaaactcaataaaaaacca

SEQ ID NO: 346069 - DNA, 1000 bp, Homo Sapiens
tttttaaaaaatcaaagactttattggataaaggttacacaacattctttaacatttaaaactctgagcatacttaagatgagaaacaatttttatcattcaagtctacaaaacaaaataggcttatgaagattgaaatacagacaaaaggtagcatgaagcaaagcttaaatattaagcaactaaagcaatgaaagtgaaatagcaacatggtaggtgtaggttttaaataccaccaagtctcattttttaaaaaatgaaaatctggtttgtaacaaaacacctttgagaatatgccatgagaaaaaaaaaatatttatatacttaaaacctgatctctcccaattcttttgctttatattattacttcttggtcatttccatcactctacacaaataaagaattctaaagcttaattaaaaatcttgattatacacttcatgtatcatggtttgggagagttatctggttcttgaagtgagcccgaaagtactgctggtgttatgtatctgaaagaacaagactgacccaaaccaaagccctaggccatatagagtagggcacccctatagtatagttcatgtcatctttagaactccctgctgctacagttcctgagctgactttttctgatttgataaaatatataatgacttcataatatgtaattttccaaacagacaattgtagaatgcaatcaaaactttaaattatttgcagtataattagaatttgcattaagctcattagacacaagactgcctgccttttcttcaagttgtaaaacaaatcataggtatattaaatgttttaaaactcacccagaaccttctgttaatcctgagcctggggttattaggtaattccaaacttacacagtaacattatgaaaagtctgaccacttgagccaagtgctcagttatctgttacgttgcttcatatgaattttaaggttttttattttttggcatattttcccttttttgtagtaagtaatc

SEQ ID NO: 346070 - DNA, 1000 bp, Homo Sapiens
gaaggtgcttgaaggagcgcaaaatattttattcaacaatttgcaatgtaacaattctcatttaggaaaaatagccgctcccgcctggaggaagcttcttgaatcaaaagtcgtggcagtcgaccccagaacagcgggcagagccgaccggaagaggtcccaggattcacacgagctgaccgagggacagagagggctgccccgtcacagggactggcctttctccaagtgacaaggacaaatggatccagcgggacacgcctgtggaacattttggaaaacatcctgggtggtctgggctaaatgatcaagtgaaacagaaagccaggaaggatctgtgctaattccacattctacaatttctacacttaaatttaaaacaccaaacagtttgtattcctccagcagaacctacagaaattatctactgatttttattagtatttaaatcttttcttcagtctctttagacttgacaagaatacgaagagtttcagaacagtcagagaagccttaaagctttgcatcagtgagaggaggcccgtctctgagttgaacagggttgagtccaccaggagctactcaaagtctcagtgtggcaaaactcggggcagaaatactaagttccagagctgctgtcaagaaactgtgttaagatactctccccaagtgctaccaacctctgaaccaacgtcccccaggggagaaagtgggtcatgtggattgtaccacgaaaagtgctcacggaaagtgcagccttttagagaagtgcatccagcttccttaacagtgagtctaaccgtgctcctacacacgaaatgaagcccaaatcaaacatcacacggtcagttttcaacctggatgaccaccctgagccatcatgtcagacagccggctctctggggctccttcccagtgactgggccacacggtgggcagtccccagcgctttgggtacacaaaatcacccatggtcctcatcaggccacagaaagtaaag

SEQ ID NO: 346071 - DNA, 1000 bp, Homo Sapiens
tcaggtacgctccgtgcgaccactcctccctccctgctccctgtccagttcgggtggtcctggctttctggctgtgggcagcgcctccgccgccgcctcgggcagcgactccaggcccaggccggcggccgccgactgcaggaagagcagcgagcccggctcggcgcccagcgacagggagccgtccagactgatgggaggcccgggcgcggggccctctgccgcgggctcgccgcgctcctgcttctcgtgcttgcgcttgtgcgagtccatctgcgacatgcccaccaccgtgtggcggcagcccgggaaggtgcagtggaagtgcgagcacttgagcttgtacttgcagtcgggcacggcgcagtcggcgctggagctgaactggcagaagcccgcggcgctgatcacgtcctgtttgccgtggtgcttgcgatgcgccgtgaccttggtgctgtcggtgcagcggaagcggcagcgcaggcagtggaagtgcgtgctggtgcccgagaaggggcagtcggcgaagtggcagctgagtgaggccttgaagcgcttgaagtcgtccagcaccaggttgtccacgcggtcgtggtgctgcgcgtgcttgtacatgtgcgtgcgcccgcagaacttgtagccgcagttctcgcgcgtgcagtggtagtgggtgaccttgagcgagaactgacaagctgcgtccttgcagtcctcgtaaaggtcgaagcgccggaagccctccagcatcatgccctcgtccagcatcttccgggaggacgccgtcttccgccgcttgccgaagggcgacatgtcctcgatgatccagaagcgctttttggcccccgaggctgtcggcatagagatggtgttccctgccgcggtgctctcgttacccacgggggtgctggagcagctccggtccatggtggatgactcagaggacatggcgcctgggctgcagccagtgtagtccatgcactcatctgtctcagcatccatc

SEQ ID NO: 346072 - DNA, 1000 bp, Homo Sapiens
tcagacgttcagcaggaggggccggtgctcctcgtctgcagcgtcgctgggaggaatttcataaatgacaaacagggaggagtacaggcagcccaggaaggacacgaggctggagaagtacatcaccccgttggcactgcccacggccgaggtcaggggccccaggaccagggagaccagaatctgagccaggaagtactggcagctcagcagagagatgtccacgcccatgccccgccgggtgccgtccgcactggaccctgcaaactgacccagaggaagaaacgtgtcagcgagacacgccgcggccagcacggggtgaccgagctcggtgtgtcctgcgagcccaggaggcccgagcggcccacacacagcggcctcacatttttcagcgccaacatgcacagggagttcagccaagagtttaacaatatttgtgttcggagagatgacgacaatgaaaagaatccatgacttcatccaggatgggacctgccctacacccccaaagtcctctgcacatgacagccgctggtcctctgtccgaggctccaaggtcctcgtggcctccagcttgggcacgtcactcactctccctcccctgcatgccatgctgggggacagtggcttcttactctgatagtaatcgcagagcagcgagtaaggcaaggtgcacagggtggaaaataaaatcccgtaggttatgcagagcgacaggaccacgtagaggttcctggagagggtggcaagcccggtccccaggccgaaggcgagataggcgatgaagtagagggtgcggacgctgaggaactcctccagcttctccaggatagtggcccgggccaggtcccccagggcttctgcaggtggaggggtcttggggctgtgacaccaaaggggctcagggactgagggtctcgagttaaacctctgtgttcttgtgtaattgtgggtacaacagcagcccatcccgtagccagccaccatctttacaccccca

SEQ ID NO: 346073 - DNA, 852 bp, Homo Sapiens
tcaggagtgtctgtcgctgtgcagtgcgaacatccacacggggatgcactgctctgggaagccatcctgcttctcctggcccagcaccaccagcccactcttccttattaggctccggaggatgtccatgtcccgagtcacactgctgtcagagagatcaaggatacagccctcccgggccacattgtccttcaatatgatgatgccattttctttcaggccatctcggcaccgggaaagaaatgcaagaaggtccttatcagtcaggtgcccagagacccactgaatccagatgacatcatatctcctgaaggggggtgtgaattcctgcaggctgtagcagtggtagctttctactttgtcacctttgacctgcaggtagttctgggcttcaaggagaaaggattccatcatatccaccagctccacactgttgaaaacaggcaataagacgtgtttgctgacccttcctatcccggagccgcagtccaaggcgcagtctgttccagctctcccaggccccccaacaaatttcctaagaaatttctgagaggcctggatgtctgggctggacagttcaatgaaatttcccatcataccctcttctgtggctggtacttcttggtagaaaagtttagctctggcatagaactgcatctcaccattgatgacttggcttgttaaagcgtacaatttcaccaggggaattttttccagcaggtagagatagctctgaaagaagtcattgcgaatggctttgtgaaggataaaagacatgctatgtctacagagttcatcgtcggtcttctgccagcgggatctaaaggcaaaatgggctccccggtgggccat

SEQ ID NO: 346074 - DNA, 1000 bp, Homo Sapiens
ctaatattccagtgtcaccgtcttggttttgagatattcatttagagcttcctcacctaagtcttttccaaagccagattgtttaactccgccaaatggggccgccacatctgtcttgttgtatgtgttaataaaaacagttcctgcttccagtttttcactcacatacatagctttgtttatgtctcttgtaaaaacccctgaggccaaaccatactctgtactatttgctcgctgcaacactccatcgatgtccccattttggaatttagaaatgaccataataggcccaaaggattcctctttggcgaggtacatgtagtcttccacatctgtgaacacggtcggctccatgaaaaagcctggcctttggacttgtcttcccccgtacaccaaagtggccccttctttcactccagtttcacagtattgcagcagcttttccagatgagccttatgattttggggcccatgatcagtggatctcaccactcttgtcacaaattcgtcgtggatggattcttccacgaacaaccgcccagcagcaatacagttctctcctttgttgaaaaatactgctcccatgcccattcgcacagccttgtcaagttcacagtcattaaatattataagtggagacttgccaccaagctcaagggaaactttcttcaagttgctaacagcacagctcttcatgatctgtttgccaataggagtggatccagtgaaaccaagtttgcggatgtcaggatgttcagacagacgttgtcctgctatgccacctgagcctggaatgatgttgatgaccccctttggaaagcctgctttcacagacagttctgcaaacttcaaagcagtcaagggcgtgacctgtgctggcttgagcactaaggtattgcctgctgccaaacacgcagcactcttccatgccagcatcatcagcgggtagttccagggaataataatggcacagacaccgagtggctctttcttggtgaag

SEQ ID NO: 346075 - DNA, 1000 bp, Homo Sapiens
ttatattttgctgtgcttgacagattttttaccattgagatgtttatggaagaaagtttgaatttgctgccaggcatctacctgtgcctttgagtgagcctttggctcacctccatagaatattgcctcacccaaaacagcgtgcacagaagctctagaaggaggaaaataaggtgggtcaatacagtgaccagtttctgggtaacagattatctggggtctttctttcccatgagcttgtagcctttcagaggctatctgagcatagaattcactcttccagctttgatcatccatgccaacaataaacaagaagggcacctgcgccttttccaatggaacaagactttggtgattgtgttcctccagtggattgctccaagtgtccataaaagtgagaaatcctgacttagtgatttttacttttcctagatcatcgacaagtttaggaataatcatatccttgtaatgtagaggagctactgtgttggctacacaggcattgataagtacagtggctgtgatgcccttcaagaaagaagccattgagagacacaggtcacctcctttggaaaatccaagaagcgcaatactaggacctttcacctttggatgctgcagcataaagtccacggcttcttcaaagtactccagatgtacatcattcagatcttcggggaggtcttcaaatctgaaataagccagggcaagcacagcaaaaccatgtccggccaggaggctggcctcatccggcggcaggaagagcgcggcgcgcaccgggcccgcgcgcaccggctcgcgccgcacccccggccggagaaagtcgcgcttgttctgcgccaggcacagcagccgcccgggctcggtgtcgtggccgtccagcacttccagctccacggcgaagggcgtccgcacgtcgcgcttcaccagccgcaccaaggctttctcgggctccaacgcccacagcagccccatgggctggagccccgcgaagctgcct

SEQ ID NO: 346076 - DNA, 1000 bp, Homo Sapiens
tcaggttttttcacatgccttagttcttagatgtttagcaagtgctgaagattgagtgaagtttttcccacatttcttacattcatatggttttgctccagtgtgagttcgtgtgtgaacgttaaggtatgtggaatacctgaaggctttcccacattctttacatgcataaggcttttctcctgtgtgcgttcgcatgtgcatattaagatttgtggaacgagcaaatgctttaccgcattccttacattcacaggccttttctccagtgtgagttcttaaatgggtactaaggcccgaggattgagtgaaagctttcccacattctttgcattcatatggcttctctccagtgtgaatccttacatgttgactaagcattgaggaattattaaaggctttcccacattctttacattcatagggcttttctccagtatgtgttctcatgtgtaaaacaagtcctgaggaacgagtaaaagctttcccacatgccttacataaatacagcttctctccactgtgaatccttacatgttttgtaaggtatgaggaatgaataaaagcttttccacactccttacattcatatggcttttctccagtgtgaattcgcatgtgtaaaataagtcctgtggatctagtgaaggcttttccacattccatacatacatagggcttctttccactgtggattcttgtatgatcagtaaggtatgaagaatgggtgaaggctttcccacactctttacatttatatggtttttctccactgtgagttctgatgtgtaatttaagtcctgtggattgagtgaaagctttaccacattctttacagacatagggcttctctccactgtgaattcttccatgtcctataaggtgtgaggaattactgaaggctttcccacattccttacatacatagtgtttgtctccattgtgagatcttatatgtaacttaagggatgactgattaagaaaagttctccaacagtct

SEQ ID NO: 346077 - DNA, 1000 bp, Homo Sapiens
gctgcaggtatattcatttttattatattaatagacttagttacatataaataaacacaaaaagcaaatatcaactgaaaggtttggttgggtagtcaactaattttgttcttttctagggcaattcaagaaggtaacatttgaaaggtttctaaatgatgcacactgtaatcattcattctttgttaaaatacaacacaaaccaacagctacaatgctttttatttttaacaaaaaggatgtaaggagggtaagaaaaacagaggacagtaagataggatgtaaagtgtgatgtatctctggacaccatccctctctgcctgccccacacccaaaagttttaaataatttaaaggataccaattacagtaccagaacaccatcaaaataattgtctttatcagggtcaaaaaatacagtgattatgaatgagctgtgaccagttacgaaattttactggaaatgtttaactgtggtcagcagtccaatggtgtgcacagtgccttcaattaatgcacttgagcatacgtaattacatttctggcagggtccacaccccccaagaaaaggtaaagctaagcatttcatttctacattctaaactctggaatcacagagcccagtttaaaagaaaagtcacagtggataagagatgtatataaaaaatacaaggtgtttctttcaaatcaggagttgtgggactacattctttttttttttttttctttcttttcttacaaaatgcgattttagaaaaggatagagactccagttcatgttatactacagacttagacagtgaataagtatattgcatgttttggtagtcagtcttcaggcttcctttcatttcccctagccccaggtttctttagggtaaagcatgtgagtcctgaataaagatacaaaaatgcatttgcagctcttttcttgaattctgcagacttcaaagcctgcaagtcatatattccatcatcaatgaccacaatttttctttagc

SEQ ID NO: 346078 - DNA, 1000 bp, Homo Sapiens
tcagttcttccagtggcctgaggcatggccctgaggtcccccttctccttgcagagaatgcatgcctgtgccttttgtcttgtggtaacacctatcattcatgtgcggtatcatcacaatgattttgattaaattgaggtaaacagcgtcatcaggccccatatattgaatcttggctgagaaaggctcagctcccactgtgtcagacagatgaggctgacagagacaaatttttgaatgcttagctggcagaaagccagctgtggagtcatcagtgttgggttgctccccatagttcactgtctcctgggctgagcccctgtcagtggagcccttaaattgggccctgggtaagtccgtgatggtgtcctcgatgaaaatggtagttttatttggttctccaagcactgcacccataggcatctgaagaagtaattcaaacttctctgggccttccaaggtaggctgtcccaggtcatcaaggatggtcacttggaatgtctgcatgcgcacgcctggagcaaagtccaggtttcggctgataccaacataatctgttccagcttctgctgactcctgctctgactttctggagcgcacggcgatggatgatggttgggaaagatcagtgcctcttctccaaacacaaacctccacgtagcgagcactttcattgacgtgatattcagcatccccaaagtgcaggacaggttcatcataacgatcagccagaatagtcaccttagtggtggggaatctggctcccagctgtcctcccactggcagcctaagtgaaacgctgaaggattcctcctcttcataaagggagtcatcaatgatcaggacctggcaggtcttctgtgtctcattcttgtcaaagtggaggatgctggtgtggtcttctggacgtgagatgtaatcagagaataacactgtggaagaaatcgtgcctgtggcagaaccttgacgtgtggagcaaatgacgattagttcctggctt

SEQ ID NO: 346079 - DNA, 1000 bp, Homo Sapiens
ctaccttagtgaggctgctgtagcctcacccttccccaatctccctacagcccttttgagctgccttccccccccatgctcctcggcgacctggcttctcagatctgcagagaatgggaggaagccagcgtgatccccagaccttttggaagaggcctcggcctgggctccggaggacacctggctctttctgaactgcgcccgggcggcagcggctggcagagcctgagatgcgcgcaaacggccaccgggggcgccaggtatctgcccactcgcagggtacctctctcctgcaggtgagacgagccagagcagggcgttggagaggccctgcgagccggccaaggcattctctagggctcctctggacaccggggcggatctgaagggaccaatccacgatccccgcacccagtggccacctccctcatctctaagttcaactttggtcaagtcaaatatgttttccttatcaatcccatgttcttcacaatatttcacaaacctctccttgagttgtgagctcacatccggtgttcgaaattgatagggtctctcccttgtatgtattcgcttatgtttagttagagctgagcttaagctgaaggatttcccacattcattacactggtagggtttctctcctgtatgcgtcctctgatgtcgaattagtgatgttctatagcaaaacagtttctgacattcattacattgatagggtttcacacaagaatgaatttttagatgttcagtaaggtgtgtacttcgactgaaggtttttccacattctttacaaacatagggcttctctccagtatgagttctctggtgttcagtaagatgtgcactccgattgaaggcctttccacatgcattacactcatagggtttttctccagtatgaattctttgatgttgaatgaaggctggggtatggctgaaagctttcccacattcattacattcatatggtttctctcctgtgtgggttctctgatgt

SEQ ID NO: 346080 - DNA, 1000 bp, Homo Sapiens
gacttaaacactagaaatttatttctcatggttctggaggctgaaaagccccagactggagtgttattatgggcgggttccagtgaggactttcctcctggctagcagatggtcacattcttactgtggcctcatgtggcagaggaagaatgaaaacctgtggtgtgtttttcttacaagggcacaaatttcaccatgaggccccaccctcacgcccacatctaagcccagttacctcccaaaggcaccatctccacataatcatcacattgagagttaggccttcaacatatgaattttaggaggacataaacatttagtccgtaatgggcattcttctttatagcaaattgcatactcgttatgatgagaatccttccaaagtatcgacaggctatgcatttgaaacctttatttcaaactgtgcttgaataaactcttgcttggcagattactcgatccctgaattagtagcctccttaggtctagactttagctcagatgggtgaaggattagaagaggaaaaacagaacttgagtatcaggttggatgttttactcgcaaatgtttataaacctgctactgcatgcaacgcactgctctaggtactagagaagacatgccaaatagtgaaaatacttcaccatcaatggagactcaaggttttgcttgcaccttgtggcagttctaattccttttgcatctcctggaggtgtttactagcttctatatgcatatattaccacaccatgaagtagtgtctatatacttgagagatgatacttcaagcttctatttctttagaactcttttttaaaggtttaatgtttgaaaatgttagtaggtgttatacgactgcatatgttaagtgtatctcccttgcgtagttgaatggtgtgggagtgcactgttaaaccatctggttggtccagttgaaaaatcccttttacttgatgagatggggatgtaggctgaagagccggcctggttgaagagccg

SEQ ID NO: 346081 - DNA, 498 bp, Homo Sapiens
ctgcagcactgcaggtccttgtcatcaggtgcagtgatgggttaggccttagattccagataggaggaggtagactggcattttgttctggaaggtttcaaaccctatgtgtgctcttgcccagacagtagcctgggccttggcaacaggaggagaaccagggcaagggatctgcagcagagtccaaataggagaaccttggaggggctcaagaaagcagctcttggcaaagcagcattcgatatctctcaacccagaaggcaggaggccagctcctgacactgccagcaccttgtttagcacagccttctccctcctctctgaccctttgttgtcttccagtttcttcctttcataaagaagctgtatgtgcaactccaaaggcatccagacaccaagtgccatcctgctgctctgagcactggagtctgcagctccaatccttggcaaacccttcccagtcccaattagcacagatgataactgggacgtgatcat

SEQ ID NO: 346082 - DNA, 555 bp, Homo Sapiens
tgattttccaattatttttattgtctgagttaattattacacaagggtatcactttgccctaaaggcatttttttaaaaagcaagcataccttttccaaatatagcagagaagcgattcaaagctttctccaggtacaagcctggtaaaggaccttccttcttcactcccctctccttcggtcccccgcgcgcccctccttcgcctccggtaattaagcgtttcagccactctcccctctctctgagttcctgcaacaccttgggatgtgagaaagtgatggcagttctcttctgcagatcattacagcaaaactggaagtatctgtagaaggctgatgaatttcttgcagtaacacttgtcatacatggcggcgagattttttttaaaacaagctaagtaaacacagctctgagatttttaggacagggacttcagtggattctagctttctatccgctttctatccctttcccctccacaccccataaaataaatgattgccactgatctgatgtgccaggtgaaaatgggtagaattaaaactatcaattct

SEQ ID NO: 346083 - DNA, 989 bp, Homo Sapiens
tggtggtgttttaatttattttttggttctttttgaaaaagagaaaaaaaaagcagcatgtgtaaaagacatattttggggtctggccaatttccaaggtaaaacctcccccctgttttctgagcactgagctcccacagacagggatgagcctctgatgctttgcttgcacaacgtgtcacggcgatgggaccaaggatggcaccgagtcaacccatcagatgttttcttcaggtgtttcagaaacagggcaaagggagtctggttacgttgggttgttcccttgaacagagatgttgtagacttggaagctatgggatgggtttttttttccacgtggatagagaggtacaaagcacccatctcttcagctgacaggagagttgcccacatttcagctgcatattcctattctctgcctgtcagtccttaggctctggatgatgatgaaacacatgcctgcaatcagtgccccggctcccaggatcccagccgcaaggagcccgatggcagagcctcctgacagggacagagtggggtctggctccatgggctctgcttctgtgggctgcatgatgggttttggcagcgagatggttacaggctcagagaccagctgtttcttgctgtttgtggctatgcacatgtaggtgcccagctgctcacaggacaaccgtcggatgaacagcttctctcccatcccacagggcaccccactgaaggtccagctcagcacaggctcagggtccattgtcaccacccactgcaggatcacagaatagttgagctcactctggatgactccccggatagcagctgggaatgtcttcagtggcattagttggaggaccaagttggctgggaagtcacctccagccgcatccttctctagcatcgggtcagtggtggtggtgggtggggaccaggctgggacagggttcctgggaagggggctctgaggttttgctctcattctctcaccgtacaat

SEQ ID NO: 346084 - DNA, 1000 bp, Homo Sapiens
cattttgatccttgatttattacaattgtaattttgacagcaaagtatgtttctatatcaagtggcctttttttctttgtaagcaggacatgacttttctaagccagatgtaattacatcattggagcaaggaaaagagccctggatgattgtaagggaagaaaaaggaagatggtgtacaggtaaaaataagtctgactgtgggaagccatctgtgtaaataacaacctgtgtggtcagggaagagacatacacttgggatgttagttggaaatctccattcacagcagagaaaaggtgtgtgatttataaggaagataaatactctgcataagctacccagtgagcttcaccttcaccttaacattcctggatgggaacttgctatccttgaagtgacaaaagaacaaatgccatccctccaagatctggtgtctggtctacctgcacgtccaggagtcccagccaaaccccggctcttcttttcacttttcttgcttttaccttcttcttgctcatcaatttttacgatgtcttccttaggttcttctgtagtcacctctgaaatatccttcaaatcttttttctctttccacagcacatctgcaattctgccttttctcattgactttttccaaagccttttaatgtgttcttttctttccagcttagagatcacatctccataatctttcatgctaccttgatctatggcttccatggcgtctgtggcctccagggcttctgtggcctccatggcctctatagcttgtaaaatgacctcctgctctgtttcagcataatcctgggatttgactgtgcttagagaactcagtggtagctctggctctaaggtaacatgttgggtttcaactagctctgatttcccggcctctctttgttcacctgcatcttctgaaggcatcaacatggaactagacatttccaattttgtctttctgtgcttcctggcaactctcaggtcctttttaataagctt

SEQ ID NO: 346085 - DNA, 1000 bp, Homo Sapiens
cagcagtctagcatttatttcattagtccttgaggattcattaaatgatctgcaagaaaaccaaatgtccccacatcacaggttctgtgctctactctctgaccacttctctgagctgaggcagcctgcttggagtatgggcaccagcatggcttagctacttttaagataaaaagtggaggaaataaataggtagactaggtaaggcagaagagaaggctggcactttgggccctgacactagtgggcaccctgtggttctgggtgagatggaggacacggatggggtggggtgtgtggttggacacaatgaccagagctctgggtaccaagcagatccccatgtttgagattcaagggcacaaaggcctgctgtgaggcacgtgaacaaatgcaggactgagctccaggaacgcactctcccaactgtaccctcctgtgccagtgacagaaaaccagggaaaaacaccaagtattgtcagagacaaatgatgggggcaagagattggcggaattggaggtggttgactaccgcttgcttctagaatcaaggagaagctgacctaaatcaacctgctcttccacggaatcagtattctgagactgaacgccacctgacggatggatgactagctgcagtaaagtcagagcagaagccagggtgctagagtcatctgggcagtgtctggcttcctaactagataagtgggtcgggtcaattgcagagctgtgctcttccaaagttgtcacccatgaaccaggacccacaggtggagcctctgaggtgccatgggttaggcttgtacacgactcacctgtgtgcggggccaggccccacccccctcaaccacggtggagcagagggggaagggaaaggcatctcacagacacagacatctacaccctcactctggggcagctttaggccaaaagccaacagagcacaaaggagagtgggcacttgggaaatcggtgcttaaattaccagccatcttcttgt

SEQ ID NO: 346086 - DNA, 859 bp, Homo Sapiens
ttttgtttttttgttttttgtttttatttttgagacagagtctcttgtcactcaggctggagtgcaatggcatgatctcggctcactgcaacctctgcctcccaggttcaagccatcctcctgcctcagcctccaaagtaactgggattacaggtacccaccaccatgcctggctaagttttgtatttttagtagagatggggttttgccacgttggccaggctggtctccaactcctgacctcaggtgatccgcctgcctcagcctcccaaagtgctgggattacaggtgtgagccactgcgcctggccccagtgttcttaattaatctcttttatttctctttccctctttctttcttcttctaaggtagaggacctttggagatgtgaatgaaaacagctgtctgaacaagtggtaccctaactagcgcggctgtgagtctgaagcttgaaatggggaagttggtcagcatgggtgagctatgcagcccaggtgaagggatcctcaagcagcagcctctgcctttttgtcttctccttttcacggagatgacaagaatcaccccaggacttatcttctgaggtgctcagctgtggtcccagtgctgctttggtcactgctatggcgggtggaagcaggatgggtgaagtcattcctgtcgtctgcgcagcattcagcttctgggaaccatgtgtggctgcctctggctcctttatctccagggcttctcggaagccatttgtacagacgttttcaggcctctcctgcccactgctcagggtgtgggtgctgagggtgggatttgggatttggccaggaggaagcatctgccaccaccggcatcccttttgctttct

SEQ ID NO: 346087 - DNA, 1000 bp, Homo Sapiens; identical to SEQ ID NO: 161355

SEQ ID NO: 346088 - DNA, 1000 bp, Homo Sapiens
ataatgaaaattagctttatttatgtaatttagaaaaaatgattgtagtgttagagtttgtcaaatgttttcactctgaacaatttacaatagtatttatatacaaacataataaaataggtacatcacattgttcttgcttcaaaatgtcttctcaattctgacatgcttctatcacttcggtttgtaatttttaagagggaaatgctctgttttgacacagtgcttgattcacacagtataacactgaagtagaaggagaatcaacaatcatgaacacagttaaaaaatatttttcaaccaatatgactttatcattaatcttttttctataataaaatgtttcctgttaaaaaaaatacttgtattcacctgatgacctaaatttgttgtactaaatttggcatttatataaacccatagttgatctaaatacaatgtagatatgaacctaggttaaaactcattgatacaaatgtttgccacaaatgaaaatgaacaaaattggtaagaacagaggtaaacagaaaaatccatttgaaaaatagtggaaatggcttattctatttaaaatgagtaagactcaatttctgaacccaatataaactaaaccaaaagatggtggaaaaccatgatatagacaccaaatcttatgttgcactgtaaggctgtaagtaatttgtactattgtatactggataatcctagaccaggtttcctaaatagctctccaatcattttatcttcttggagaaatcagagaaagtttaatacaattactgaataaggcagaattttttttttttttttttagatggagtctcactctgtcgcccaggctggagtgcagtggcacaatcttggctcactgcaacctctgcctgccaggttcaagcgattttcctgcctcggcctcctgagtagctgggattacaggtgtgtgccaccacacccggctaatttttgtatttttagtagagacggggtttcaccatgttgg

SEQ ID NO: 346089 - DNA, 1000 bp, Homo Sapiens; identical to SEQ ID NO: 246629

SEQ ID NO: 346090 - DNA, 1000 bp, Homo Sapiens
tcacctattttgtcttgtagcttctcgtctcattcttttaggaggaactggacaatctgtcgtctcaacctttggtgaatgacgcaatgagtcattacacttacgtatgggagtcatacctagtttttcctctattagtttgagatttttctcatgttcatcaagttcttgctttttcttcctcatatccggagtgcgaaggtactctaattgactgttaagatccttattcacactgtctagtttgcacacagcagaacgatactgctgaagaagatctatttgttcccctaagatcagacactgttttggaactggagctccaaataccattccccgaagtttatccattggaggagctttattctgaaggcccccaaactttccattacttcgaattcgatctccatctctggtcagcagtgtaggacagtgtgtaattttaacaacctcttttctataatgattggccgcatccagattatccaaaataatggtgtctcctaacagcataccaaatactgtttcacaatgttctacattatctggaaatgttaacaagtctcgagcaaagactggatctccaatgggtttaaaatacaattttccatttcggaaatgaggtagagatcttttccaatctggaagagtcttcttgtaaatagaatcaaggggcaacacctgctgacgaccttgggtttcatcatagatacgacgtgcagcgtcagtggttagggtgactacacagtccatgtcacttgccagatgccaagaaataaccatcgcagctctatcatcttcaatttgtgctagatgtgcaatctttcccaaaacatctccactgcctttagtatagtttggaagagtacacgatcttctaggttttttcttcagttcttcttgttctgatagctttcttttcagaagtgcttcaatgtgtggcacctgttgtgttgtaggaatgtcaatattatgtatttttagttcatttcgcaattgg

SEQ ID NO: 346091 - DNA, 1000 bp, Homo Sapiens
tcacagtgtctcctgcccggattcctgactggcttccagaagcagctcctcgagctccttctcgttcttggagcagctcagttcgtgctccaggccgcagctgccccccttgacctcaggccccgggggcggctcagggggcagtgccagggcgaactcgggcttcaggccgttgggcagtggtggccctgaccgaggcggctccggtggtggctgaggctcagaggaccctgtgtcccgggtgtcaatggccccggctggtggtagggaaggtgaggcgggtggggagggagggggtgggggagagggaggggtgggggacgcagggggctctgccctctcgggcgggctctccacccgggtcaccacaaacaccttgtggccccggcccgggctggacacggaaatccgctgctcggtgggtgtggaggggctgcctgggggactcctgtccccagggcccagggagtccgtggggggcaccagggcaggacagggggtctcgtccctctccccttcctcttcctcctcttcctccccatccgagtccgagtctgagtctgagtccgggctgggtgcggggctgggggccccgttctgcaccccagcggcgggctcgtcgtcgggctggggctcggtggcggtggtctcaggcatggaggccgacagctgtggcggctgctccttctcctccctctcccgcgccagcaccaagttgcgcttgcagccgttctggatctcggccagcagcgccttctgcgtctcgatgaagctcttcaccgcctctttcttgggttcacggtcgaggtccaggcgcagcagtgagtggttcaccttgagggccaacgacagtgccatgagcccgcctgtcttgatctcgttctcccgaaggtccagtctcaggaggcgggggctctcagcgatgaactccgccaccgccaccgcgccctcgcacgtgagcttggtggaggccagcccgaggcgcagcacgctgcggttg

SEQ ID NO: 346092 - DNA, 1000 bp, Homo Sapiens
tcagtgcatgtacgccttcggctgctccatagcctggtgtgcctgcagcacggccactgcctcgtctatcttggcatggagggattctggagactccagcatgagcaacagctctgagttgtcaatctccagcagcatgcccgtgatcttgccagccagctgggtgtggacatcatggataagggggtagagacgctccccaatcatctgcttttgctcatgcaggggcgccgcagccagcatggacgcggtcaggggctcctgtcctgggatgtgcacagccggctcctggacccgataggtgctatgtgctgctgaggaacatttgcacggcaggagcggccggcctggtgtacagcatcctaccccactgggtcctgtggtctgagtaccaatgttggctactctctgggtatgaggcaccgtgcgtggcacctgggtggaggcctgcctgacactgctgatgtgggccggggggcgccgaggcacaactggtggccggaccattgaggcacaggaaggtctaggtggctgggatgtccacctgggggcaggctgggtgggtgtcactgggccacagccatagtatgcagcctgggctggaggtggctcctgcagggactggtgagtcaagacccacaaggctgtaatgaaagctccttcctcccatctcaggatgtccattagccctgaatcctgcagggcaaagatcttagatttcaatcttggctccctgtcagctaacccaatgacctggggcatggcaggcaggaagtagctggagggctgctgaaaggagcccaggagggggttgctcagggtccgcatggtggagaggcgctgcatgtactggttggtcaagatggccttccgctcctctttgcgctgggccagtgccacgtagagtggcttggtgcccacgatgcgcccgttcatctctgtcacggcctttgtcgcctcttctggggaggaaaaacacacaaagccaaaccccttgctg

SEQ ID NO: 346093 - DNA, 1000 bp, Homo Sapiens; identical to SEQ ID NO: 246630

SEQ ID NO: 346094 - DNA, 1000 bp, Homo Sapiens
cagtagcacaccttttgtttattgacctatgtaaaaaaataataggtcttgaaaagtcagaacaataaaagaatatgcaaaaaggttatttctgattctagaaggctatacaaatatgcaaaaaaggaataagttatttttttttgcttgtcttttttccaaaattttttcccaaacttcatttctaattatacaaatgactaaggaccagtttaacaaatcgtttttatgtatatattacatgctttggaatatagatagaaaatgttccaaaaaagttgttcagaaacttttctattcacaatatgaacaagaaacttgtataaaagaagggggaaaggagcaccttttatgtaattttgaagcaaagatgacaaaaaagatcaatctggaatatggaaatcatttgctttaaaaaacaaacaaacaaaaccctacaataaaccatagctaattagttcttccaaggaaagtatgaggtagttttagcctcataattaaatccactgcagcttggagctttttgtcgttgttgttgtttttcttttttaatgttaaccttgtttttgtcacttggtgacttggaactacttgtggaatccagacttgtttaattttctaacgttcaccattttaaggcacgcaattcatctaaaatgacgtggctttttttttctgttgttttggatactttctgtatcatcttaaaatgctttttcaaactcataattataaaaactttccatattaagtctgccacttcaaatgacagccgagttggagaattaacagccagaacaatagctcatcacgcaattagtggagaaaggaaaaaggagctccatgatattgtaccttagaatgttctccaagcagactttgtcaattattcagtgggctgcttcattttccccaatctgctaccataagttatattacaggatgctaaggtaatcagtttttccagaacccattttatggtgcttatgaaaaacatcac

SEQ ID NO: 346095 - DNA, 1000 bp, Homo Sapiens
tacctttttctgtgcttgaaaattatccaatagaggaaaatgatgattaaaataaagatgatcgtaccaagtaaagtgccaactataagagcatcatgtgaaccagcaccaacaggaagttcacagcgaggggcagggctgctccaaaccccattcccatgaggttcacttgtgcggcggatggtgctctccccaatgaggttgaaggtcatccctctgtctgggtgggggtcacatgtgtaagatacttcttttccatagggaatatctccaaggggagttcctgtgtgtctcccattaaggatagctggaggatttggacaaaagatttgttcacacactggaacactgctattccaaagggctttcattccagccaagacacaatgactagcagacctgccttttaatcagaaccctgtagtacaagaatagttgattctggatccaacatggatgtctgtgatcacatgcaccatgccattcactggaactggaggagtttcacatgatttacgttcacacactggaacactgctattccaaaggctttccattccagccaaaacacagtaactagcagagctgccttttaattgaaatccttcatcacaaacaaaatccacttttgctccaagctggagattaagtggaaatagcacatggccattaggaagttggcccaggaagtcatcacaggatttcacttcacatctgggggctgcagggctccagtctccctggggtgtgcagtgcaaatacgtagatcctctgaggtcgtagccgggctcacagctgtagaacacttcctgcccgggtgaaaagttgtccttgtccctttgggtacgctcagcatgcaggacatctggaggtggctgacataccctggagcagcttggtaactctggctcccatttgttcagggcctggcacttcacatgggagggccctttcatgccaaagccaggctgacacctaaactccacaacttcatttaagg

SEQ ID NO: 346096 - DNA, 1000 bp, Homo Sapiens
ctgtgaaaacagtgaaattttattgatgatacactgcggaagacatccataccacaactaagcatgagcgattttagaagcatagagacaaaggcactttcaccttgcattttagatatttgaccaaaacttgaaatcagacatattcatagcagtacagaaaaccaatgactaattgttcacataatcagcatcctatatcctacaaaatgttagcttcagatattagaacatttgaatgtctgaaaaaagaaacagatctaagcatgcagttgtcctccctgcattttcacgagtgcacaggaaacacattgtcactagctattatcatttgctgtgctgtatgaaagagactcggcgcacctgggtgtaaacagcaggcagctggtgcgcacggggcgccactggacggcggcctggtctctgcccccagagctccaccaacagggcagcagccacatgcagagaaacagacactgatatgggtgttagaagagctccacagtcaaaaccttcaccagcaaaaacaccagaactttctacttcccaagagcctgcccaatttagctacaaaaaaggaaaatcaccatcttccttcatgggctgatttgatacctgccagtcaccctgcgaaggccatagcagtgacctgggcacactcccggcagctgtcctggctgcacagcgtgtcctcccaggggaggccagggctctgagcccccatcagagccactgggcagaaaaactgcccaacccagcagcactcggcgggcgctccctgagacaaggccaggccacacaatgaggggatgtctcattttacagatgagaaaactgagccagagtgtgatccagacctgctcacaggacagcttgatgacaaagttcacctctagttcaagcggtggcttctgctgggacatacataagcctgggcattggcgctttctgatacaaaaaaataataaagatcttggggccgtcacacaacactcatgtt

SEQ ID NO: 346097 - DNA, 497 bp, Homo Sapiens
cctcagcctcccaaaatgctgggattataggcatgagctaccacacctggccttgaaggactttttcattggccaaatttgggacaatcaagaaattaaccaaatcagagatactcagcatgggcttgaggaagatgtgttttgacatcattttctccaaatctctcgaagtttgtgacaagtctttttctgctacactttcttctagttcctgttcacagttttgacctcttcctccattttctctgatgtttagctgatttttaccgtctgttccatcatccagttctccaaggtgttcattttgacatccagcctgacacttccttcgcacttttgtggcacctctagcactgccacttgcttggtttttgacagctggtaccatcaacaaacaaatgccttggggaagaaaacatgtcaattcgcatggcttgaaatgcaggaacaaaacagaagtgcacaccgacccggagcttacagtacagcgtgccatg

SEQ ID NO: 346098 - DNA, 1000 bp, Homo Sapiens
ttccttgtatgaaaagatttaatgaattatgagccattgatcattacaaactttaagccttaatatttcttctttcctatgtaaaaccaggtaattaaaacagcctgtctcagtatgacagaagaccatagtagggataatagtaacgtctgcttccacatctgcatgcttcgttaaccaaccaaagaaagtgctccaggtttcccaagtcaacaaagtatactcagttacactttccctgatcatactatgaattgaaacagaacactcctttgacttttaatagcacttttcatccacggcacaagcactttcccattattttctcctttaccctcaatatccttgtgaggtagtgaagggagggagcaaggatttttttttttctattttgcagatgagaaaactcaaggtgaattttacaacagtggttctcaaccttggcagcatattgaaatgaccagaaagtttttaaaaatccttatgaccagctcatattccagaccaacatcagaatcttggcatacggaacccaagcatcgatgtgtcttccaacattccaaagtgactacaaagtgtatacagccaacactgagaaccactggtttgaatgatttacactcaatcttcaggcgcaactgtcttctaccgaaatgctctcctcagcaccaatgacaaagatattccatctccttgagcactgcagcagtttaagattttgtagagctactactgggttttagtgacaaatttacgtaaatgaaggccctcatgacccagatgctcatgctgctcacttcaattgcatatgatttgcgaatgggacattcgggaatttaaatctttgagataagaatggcttgttgttaaatattgaggcaattatttcattctaggtccaatacgcaataaccatgtgtttcggttttccactcagcaccttcaaaactgttgcaaatgaatgtttactaacaagacaaaagagacaattataaaccaa

SEQ ID NO: 346099 - DNA, 1000 bp, Homo Sapiens
ccattagtagaaaaaatttattaaataaaaaacttcaagtaataatttaaaaaaacacatgaggtagaaataaaaattttaacatatttaacactcattaaaaaaaaccctcaagagaaatggaagatttccaagccccagaagaatctgttaccccaagaatcttttaacctttgttaaaatctgttactttttatatatataatataatcactttgagacaattttgttttacaaaacatctttacacaaaaaagggaaaactgagtgatacccccaaacataggggcatatgaacatatgtgaaaataggaatcaactttttaaatttattatcaattcagaaaacaaaatttgttgcaaaagatgatgtaagaattattttcttttatatcaaaatctactctagaatactgaaatactgaatactgaaaacaaaaaaggaggatagtaagggaggatagaaaattaacaggaagtaatcaattcatgtcataaaagactaggtttagagtgaaaacacatctgatagcagaaaaaatcctagcaaaatgggctttggattagggacctcaaaatacagaaaagaatcacacttatgttctcatcatcacaagactgtgcttaaatgatgaaaacaaatcaaatccctttattcagtctttcaaataaagttcttacaatgatatctacaaaatcaaattagtcctgaaatgtctgacttaaaagtttaaagctcaaagtcaaaagttaatccatcttcaaagctggtaaaaatttatcaaactctttctctaggttaggcaaaaatgcatgcatagaacccataaattcagacttttcacagttttcggtacacctgtgctttaaaacataaatactgcattaaattttgtatggtgatagaattttctgtatgggcactagctagaggagatactgccctagtatgaaaaggcaagggaaatagtgttttattctctttgaaagtcacccaata

SEQ ID NO: 346100 - DNA, 1000 bp, Homo Sapiens
ggtcaaaattacaacttttaattttatgagctccaaattattaaacaccaacagtaaattgtgtgcatgagaagaacaaagacaaatacaaaatatagaaactttttcttccagccacaaaaaacgaagttatgtatgtatgagaaatagaaacaataactaaacaattagtgttaaattcaagacctctgggaaagctgttgttggttataggctattatttaccttagaatatgaaagtttaaaggtcaaattttcaagttaaacttttcaagttaccttccccccaaaaaagatttacatgtaggcttaaatttagaacagttaaagtataaatgttgaaaatttcaacttaattcagaatggtttcagaaagatatgatacaacaatttaagataacaaaacagaagcgcatcacattttggtttgagaatcacagaaggtacaacagtttttcttccttggggatccttctctttctcttgaggaatgagctaaaattaagttattttgattcaaagaggtatttagatggtatcaacaaaatttcagaggaaatcagaacggagttcatatacatgtatgggtatgtgtgcatacatgtacgagtatacatgtgcacgtatataaatgtatatacacatataccttcttacgtttgcatttaaagagggaagaccccacaaagacctccaggcgcctcagcccttatttggtactaccaggtgacttcaatgattcaccagctacaacagtgtctgaactcttccccactcaacttttcctgggaagaggatctttttgtttcccgcacttattgctgctgtgaaaactggagtgcactctcacttttcataagagctgaattctggactgcagataagtgttttgaaaaggcttggaaagatttttcggggcgacttaggttctgttttgtttgttacagtccaaatacataaagttattatgaaataaaatcatacggtacagatgagaaca

SEQ ID NO: 346101 - DNA, 1000 bp, Homo Sapiens
ccagggcccctccatttaatgcaaatttcatttggtctgggagatcagacaggtatagagttatatctgatgttgagaatataccttcctcactagctttggagaaagggctacaaagatgaaaagtgaagacaccccaaaatggactcatggtaattaaataaggcacacacagcccaccacatcatggaagaaaaaaacctacagatacatggcaagacaaaaaacaaaaaacaatatttccatacctttcctctaatcccaaggaaacctaaagaacttgattaaaaagccgtggccaagagttcgaagtgaaagtcagccctttagctattatttattgctttattagagcagagggaagtgacactcattgccttcacagagctctgcagaaatatatgcacagagtggtcaatgaccaacatctgagtaagtcttccaaattatcacattaaaataacctttcaaatttgagtgcctctcctttgcaaacaactgcaacctcataatgaataattttatatattatcaaaaagaaccagaagcccaggtgcttttttccccaaaatccacttactaaggacttgagtgaaaatccactctaagcagatcactgttactatttccctttcaaaacagttggaaatcctaaggtacgggtactaagaagatagcaatatccttcttaagctggtaagaatctagccccacagggacaatttggcaatcctgtttctggaagccaggactccagagatttgtcttagtgatggacagatactcctctaaccttaaggcatgagggctgtcaaaacaaggctctgaatagtgccttcctgctcatcaatgtcatcacaatgaaggagagaacaggttttcgttttcctgaagagtggtcagtaggagtgcagtggtttggcatagatcggctccagaacataatggattaaaaccaagaagaggcctccaaggaagatggcactaaggaaagccagca

SEQ ID NO: 346102 - DNA, 1000 bp, Homo Sapiens
ttttacaaaagtacttttaatgcagttaaaaccaacgccacacacccttgcctaagcccctggctctggtgcctccatggagcagaagggaacccccgggccgtggctgctgagctgggcaccctgcccatctctgcccacagagccagtcacctcctcacttcttcttggtcttcaccagtcctttctgcacaaggctgcggtacagttcctggatgtatgtgtagacgcacttggagtcgggcacagccaaccgcaccatgtcatccacgtccagcagctgagcacagtcagccagtttctctgctgtggagaaggccagggtgaagttgtgccggcgctttgcgggatccagctctgcgtagtcaaaggcgtcagggaagaacttgtggatgagggcacagaaggccataccactgctccagctggaggagaagttctggatgtccacatgctcgtatttttttgtcatggctcggcaccactccaagagcatgttcttgacaccaccaatggctgccccggctgccttagtgttgcggaacaaggccgtggggccggaagctgccctgtgaggggagaggggtgcaaggccaagccagagaggcaggaggccatgaagggccccaccgccaaacttgtccacgatggctttgcggttctgtgcccggggcccccggggccgagcaggggctgataccctgcgctctggtgccttctccttcttctcccctgaggaaggggactcagggggactctggggcacgtcgctgggtgaagactcactggctgaaggactggtctgtccggaagctacacagtctggacccagcccatctgtgctgaggttgtgcccctccccagtggggctctcaggccactcctctggggagctgggaatcacccctgcccctccctctggctctttttccacgtcctgctcctgctcttcgctgggactgcctggctctgcctcctctgcatcctccgcctcctcttt

SEQ ID NO: 346103 - DNA, 1000 bp, Homo Sapiens
gtttttctatttttataacattttatataactcataaaacagtgtttgtataaaaattcacacaaagttgctagagagcatacaatttccaaaaatgtcctgggtttttgttacattcagtttcctaaggatgcactccaatctatggtaaaatgcagacatgatgcgagatttcattatctttggtaaaactattctcattattttgtctcctcacagtattaagtctgatatccactttgtgcagggtctgctattactaggatgtcagaaaaacattaaggctggatctacgagaggcaagtatttcccaacagcagtaatagccccttggccctcacccccacttcatgtatctatacagtcgatctacacagccaggcggggtgcaagctcacgacctccactcgggagtctcgagatcccctcttgactgggaaagaagcaaacatttgtggggaacgttggaaacggaggccatctctaaatgaacccagtggtcatgctgtggtgtggtcagaccagcaacttttaccaattaaatagccaatctattcaccactaagtagatcccattggttggttggttgatgattgctgctgatgtggttccccactccccacaaacataaaaggaaaggaaggtttggagccaacaccgaaaggggaggggcacgctagcgcaaatgacaccagacacgactttattccctgtcaaacatttgttgtcctgtagacacagccaaggtgaactgaagggggatgcgaacactcagtacattcgtgactatcttcatacattctttaaaaacttacagagaaatcaatgaagactaccacctactgtgacttactagttcattcaacatcaaaacgtgtctgtgctaatcttttagtccttgggatacaaggccaaaaaaaaaaaaaaaaaaatccaaaaaacaaacaactaaaaaccaaagaatttagatgtgggggaaggaaagcgactgccaacagg

SEQ ID NO: 346104 - DNA, 1000 bp, Homo Sapiens; identical to SEQ ID NO: 161357

SEQ ID NO: 346105 - DNA, 1000 bp, Homo Sapiens
ttcatatttaaatcatctttatttacaaaatactatcctgagaattataattccattaagtttgaatatgagcaaaagtgtaatcactgaagtaacaacagttacttcaactgaaaatgagaatagtcaaaatgacttttgaagagagcaaaaatattgtcaagtttcttgccatggttctggatcttcagcagcaggctcatttgaaggcagactcaaccctaaagggaactcactctaccttcagaatgtgcgggtagggggggaaaatccaggtcttgggggaaggtaaggaggaaaacccctcagtggacagacatttctcattgcaaatggagcacgtggtggacctgggacatcccttggtggaaaataatctggagaagctccaaacatggttcctggaggaggtggagggaaaggaggtcctcttctcatgaacgggcccctcgtatccactggaaacaacggacctctgattggagcaagaggtggaggaacaaagccagggccagttgcttcactttcagcggggagagatgaatcaggcacatttaaattaccaagattatctttggtatcatttccactgaattccatttctgaatgcactgacccatccattttatccaaagaaggcatattaaaacttctgagttctgctggtccagagcgtctagcacaattagaataaaatctgtcttgcctttgtggaggaagagctgaatcaggatatgattgtcctggtggaggaaacatcatcctacggtcctgttcccacggaggtgacaggggcccagtgtcagaaggagccttgtgaggatcagtaaacctattacagcttgattctcctctttcactggtaatctggtggtccagaggattccctgggcctcttgggcctcttcctcctccccctggagggaaaggtgagagtctgagtggaccctccgacaaagttggaggatagagaaaagctctcgtttcagatgaaggccga

SEQ ID NO: 346106 - DNA, 1000 bp, Homo Sapiens
aacattttaaaatagtgagatttttcatctataggagtttgttaaactatggagtatgaacaaataaaattctattcacttataaaaagaatgaagaagttctgttatgatgtggacatctctaaagattatattctttcatgaaaacagcaaggtattagaagagtataaataatatgccatcttcctgagtaatggaagaaataagattatacattcatatttgcctatatttacataaagaaacactgaaagatacataagaaactagtacaatggctacttataaagggaaagtagacctttttgtattattttgatttttgaaccaggtgaagaatgaattatctttttaaaaaagtcctactgagtaaattaaattttaaaagctaaaaataataattacaaaaataaaatgctttcaatgaggaataaatgagaagagtctttcctggactccactgtaaattaaatagaggagttgtgctttattgaaacatataaatgggtgggtttgttgagcaacttcagtgacttataaatcctataaattccatatacttgtaatttttatttggtgatataatgcctccagtggcttaatagaatgttacactaggaagtaggagacagggttctagttccagctctgcttttaactggctgtatgatcttagttacttcccagaacttccttttctcttatctgtcaaataagagcaagcagaagtgatctctaaggtcccttagagtgattctgttattctaaagttacttgctatgtattgggtatttgggtgtattccaaaccagattgttttcaccataggttttccatttctttgtctcctggaccttgtgtaaagctttgtaaagagttactaagtcaatgttaagggaaataaatttttttatttatgatcttggtggtaatcaatagtaaatgctgagaaaatgtggaggttataaaaacaatcaacatgaaagagtgatcatactc

SEQ ID NO: 346107 - DNA, 1000 bp, Homo Sapiens; identical to SEQ ID NO: 161358

SEQ ID NO: 346108 - DNA, 1000 bp, Homo Sapiens
gctttttacaataaactctatattgtgcacatggagacctggagatgtgccgacttcctgttcccaaagccaatcttccccgccaaggagactgaggatttcagggctcagagttaccgcaggaatcgagttgacaccagggagagaggggggaggaggggaatcggaggggatgggtttaaaaggcagaggggagggagatggaagggaatgaggaggagggagactgagggggctgcctttccttggggactggggaactcatgccctgcccccacccacggggctccaggggtgagagaaaggggtgaatggagaatccggtggctgggtgatggggaggaacagcagctggggtatttagggctgggggagtcgggggcagaaccgatgaatggacgggctcaaaaggggaaaggatacaaggaatgagagcaagagaaacggggaactgggcaacagggtgaccgagggaacagcacccggggtatcctaagacacagaggctatctataccttgctagggaccaggatgtgaggagaggagggaggatttagggctgggggactggggtgcaggatggatgaaggaacggggtcaaaaggggaggacgtctaaggaatgagagcaagagatgcagcagggagttagatcaggagagggcaggagatgggatggggctgcaggctgcctccaggttcaaagtaagaaacaggcagtagggaattgagagaaaataagaaccagggccagagaccaggtgaaggacgtgaggattggaggatccgagagaggcaatggcaacacgagggctgagacgggagggcagagtaggaccgagaattgaccaagtctatgtggttttcacaacgacggcgtgagctatcatacaggaatgctgtacccgttttgcaggtgaggaaactgaggctcgttactgacttgcccaagattccacagtggaagagcctggacgtgaactgcgtctccaggtgggtt

SEQ ID NO: 346109 - DNA, 1000 bp, Homo Sapiens; identical to SEQ ID NO: 161359

SEQ ID NO: 346110 - DNA, 1000 bp, Homo Sapiens; identical to SEQ ID NO: 161360

SEQ ID NO: 346111 - DNA, 1000 bp, Homo Sapiens
ggagtttatggaattattgaaggaaagccgcgccagtgccaagagatcatggcccagagctggcagaactgatcagaccaatgctgagcaaaaggcctgaagaagaccatctggaggagcatcccgagggctttccccaaagcaccagatcgccttcctttccgaggccacaaaggcgagaacctccagaaatagcatgaaacacggtgacttggtgacatccaagcctgctgccaccgtggtttccgggaaggcagaatcaaggcatgaagtaatccacgccaaccacgctcctctgagggctgagcaagacatcgatagtgggtgaaggcaagtgtttgtcccaggagaggcccaggatggttgctcccttgaagtcacccgccagtctgaaggcccaggggacttgagcaataccaagaactggccacggtcctgcaacagcccaagggctgcctgccgaacataaggggtggctgggtcctccatgtgggcagctcatgcagtcagctcagcagctctccctgcctggaatggtctggaaagtgggggccaagcaggaagagccacctgggtgacccccctccctatctgctatgctcctgtggggatcaggcaaaggggaaattggatccttgccaggtttccagtgaagaagaggctcccccaggatgcaaactcatttcatgacaagtgcctggcccatcaggcacctcagcaacttgtcaaacctgtctcctacaaggaccatcctgtgtgggaccctgccaagctcctaggctttggggcaacaccaggaggggaaggtcatttcttcatctgagatgtggtgattgggtccatgtgagaccaggagtctgggcttcaacccttttctgccagcagcgagctgaagtcctgcctactacgtcctggtggacaaacgctgaattttcaagaagttgcaacacccccgagagacacccatgcctgtgaatatgggcacaggtaccaggaatat

SEQ ID NO: 346112 - DNA, 984 bp, Homo Sapiens
ctaagaaataaaaaatatttttaaaatcaggcccacagattctcaatgccaactttctacaaaaacattactggtttttagcgccagatatacagctctcaatctgtttcctgtagggcggggaatacgggagaaatccgaggcctcactcacatccgtctggagatgtgcaggtgcctctgagttgtcattgatcctccgaacactgtcgtagtgctctccataccgatatgcgatgtgtaactccctcacgctgcttttctctgtaccacgaatctgccacaaaggggcattaagttgatgaatcactacattcaactgatgatttcttgcaaaggctacaattgcatcattgccagcaaaagtaccaggctttgccaaactggccacatgcttctcaaaaggaatgtcatcttctacaaagggttcaaaatcttcccgctgctttatcatgtagtccactgtctcctgtctgtgcttgagatgatttcgtgagtgtccctccaattgatcaccaagagctctgaacaagcaattgccgtcccccggcacctcccgcagcttcagccccagggcctgcagctggttggcgaagctgacgaactcctcctcgcagccgccgccgccgccagactccggccgattccgccgctccttggccagggcccggcgcgccgcccgctcgtcccgcttgcgctcggcctcggctttccggctgccgctgcccggccggctcttcgccgcctgctttcgggacatggccttagcctgcagtccccagcggcaggagggaaaggcgcaggaccccccagcgtccgcctcaagcgttgggaaggtaaaacagcgcgggcaacggagcccggcgacgactacgcagcaaccgcgcctgcgccggcgcccagcaccccggtcacatgatggaatccccgcctcttttgcggggctcggcgagcagacgccatagagagctggaggggcacccat

SEQ ID NO: 346113 - DNA, 1000 bp, Homo Sapiens
ggggcaataattatttattttaaatatctcagaagctttgtgttaatagaaccccctcccccaattttcatgagcattaaacattcaccattctcaaaacatgcatgacatacaatttagatttacattgttttaatcattccctttcaacatgaatttttagattctataacattaatttagaggataccacaccaataagaacttaaaaactgatgtgttgggtttatttcacagtccatgtctacaaataaaacatttacctgtattaataatttgtaataaatttattaatacactgtattaataatttgtaataaatttattaatacactgtattaatattgcctatttgttggtataaatccaatgttctgggttattccacaataatagttgctaacacagtcccaatgctgagacagaggttattttatatagttaaaaatagaaaagttatcttgcagtagattaggatctaatttataaatatatacagtctctggcttttattctattatgttttgctttggctacatgcagaaagcattttattcctattgttcttgacttcgtctgatgcacaggtattctagttggtaccttcaggctttattttacccaactatggggaataagatctttgattatgctgcctctctttacagctacttcgcctattacttttccaaagcttgctgaaaagaggtggcagggtagaaaacatgttgcgaatgttttttttccttaggtaaaacaccaccaacaatttttcaatcataaaaaagatcaggatttccctctaccacacaaaaacacttagactgctatggtgtctcaaaataaatgtgttgcattcatcactttttaccactgataactatttctaagaaggtgattcatattagaaaaatataacatgtttcatttctgtgccaacatacaggagactattgcaggtggcatttaggcagcttcaaatgccacctcagctgcacac

SEQ ID NO: 346114 - DNA, 1000 bp, Homo Sapiens
gtaaggcaaagtagaatttattgagtgacagaacggctcttggcagtgagaggggacccgaaggtgggttgctggccacgagcctgagtctatgggtttttgtgggctagaaatgggcaagtgcatgctgattggtctgtggctatgcttgacaaagcaccattcagaaataggcacgatagtgtagaggaccaatcgcggaagggtaggtatgtataaaataggtgaagggtaaggaccaatcaggagagagggtgccagacgagaatgggagctctcagtctggctcatggatttatccagaactcatagcttggttttcaggctttagactgtccttggcttgaaggttgagtttcaccagggacccctccctgtctgcctaggaatttacctgcctcctattgctatcactgtgttgcccaggctggtctgaaacccctgagctcaagtgatcctcctaccttggcctcctaaggtgcttggattataggcatgagccaccatgtccggccttgtttattttttaaataggtaatacattcacatggttcaaaattgaaaatgtaaaaaatggattaacagtgaaaagacttcctcttgtctttgacccctagcctcttagctttctttcctgacaactaatgttatcactgtcttgtgtatctctgcagaagaagtttatggatatgtaaactaatatgtgttatatatatatttatatatatatatttgtcaccttttttccacttagcaatgtatattggaaataaacatttgaaaacaacaatacatttggtgatcacttcatatcattacacaaagagcttcttcattcttttatatggctgcaaagaaagtatctattgtatcaatttgtcataatttatttaacatcctctcactctttgctataaaaataagactataataaattgtgcatactttttgctgtttccaagataaattactgtaggtggaatcactgggtcatagggta

SEQ ID NO: 346115 - DNA, 882 bp, Homo Sapiens
tatttaagatttgaggatataaggtgcctgagagtaggacaggggtcactaagaaaaaaagtctgtgattattttagctcagggaggctggtgatcacctcggcttactataaagcttttctactcacagcataatctctgcagtcatcttgacattccgttacttgggagaggatggtcagtgccagtcctgggatgttataaatatgtcaagggcaggcaacggggaaaatgtatgctctttcttcccagtccttgtaagggacaaatgcttgacactttcttcagaaagctgacatctgtcttcctcaagttcagcctccaaatagcctgcaacataggcctggcaggaccttctcttggctcacacctcctgttctttgggcctctcaccagggtcctttcaccactttgctcttgctggcattcagccatattttctccatctcctttgcaagatctcatgggaggttttctgaaatttagccacagtgtcaactggattcccctgctccactgcctatctgtaaaatgctgggcttcatcaggtgatctcctggattcttttcctgcacaccagcagctgggggtttgcatgttccccagtgaggagctggctcattgatgctgctaggtccaagtgaaatgctgcacccacagctccaactttatcagagagccaagggaggcctttgcagagagagactgggtggagatcactgtaaaggggtggcaggccagtcagtgtgggccaagtcagtcggggagggagcaagaagagcagtcttgatctctgggatgttctctgccctcctccccagccctggctgccctcacaagaaccaaactgtgtatctcaatcctagaatgcgaggaatgtgc

SEQ ID NO: 346116 - DNA, 1000 bp, Homo Sapiens
tcattctgggcttgtgatgaagcaaagggaagaggtggggagctggcaaggcaggggacaggtctcccataagcaccacacaatccccatcggcaagagatcctgcctctgtccacgaaggtccagacagggatgccccatacctctcacgaccaggaacgcccgggctgtggcagagcccaggaggttgtgagcgacgcagtcgtaggtgcctgcatccccagtctccacgttctccagccacaggctcccatcgggcagggtccggagccgccggctggcccgcaagggttgacccgcctgtagccattcaatggtgggtgtgggctctccagtggcctggcaccgcagggccacgtcatccccagatctcactgtcatgtcctggggctccacctggaacaccggagcactctgcaggacgaggatcaccactttcttcgccacgcccatctcattctctgccaggcactggtaccgtcccgcatcgtccctctcagtcctgcggatggtcagcgagccattctgcagctggtgccggaggtggctgccccgcagtggaaggccatctttgatccagtggatgtccggcactgggtctccacgcaccacacagtctagctgaatgctgcctcctacaggttccaccaggtaggagaaagcctccccttgtaggacaggagcctccttcacgtggacgaagctgaccgcctgcgtgcggcccactctgttctccgcccagcagacataggtcccgctgtcttctctggagacagcggcccgctgcagcgtgctgcctccatcctgctcagacaccccttctgtgactggccggtcgttgacagtccagccaatgcgaggggtggggctgccccgggctgcacagcgaagccacagcctgtccccaaggcgcaggctgcggtccccaggcagggtggtgaacacaggcagtaccaggatggtgaggtgcacgcggcggcgggcccggcccacggcgttc

SEQ ID NO: 346117 - DNA, 1000 bp, Homo Sapiens
taaggtatgtatgaccttgtttattatctatcatagacatcaagatgatcatagttaataccaatttaagctttatagaatactcttttaggcccaatattgatatattaaatgaaggtatcagagaatcttgtatttatggcatcaggttataaagatctattcaaaaccatttttgtcaaagtttaaacaatggaacaaaagtcaaattgtttctaaatgagacacaaatgattcttgctaatagtacaaattttgtcccatgggtaatactattgtctttttctttttttaaacaattattttgattcttttttagattcagggaacacatgggcaggtttgttagctgggtgtactgtgtgacgttgaggtttagggtatggatgatcctgtcacccaggtagtgagcagagtccacagtaggtagtttttcagctcttgttcccgctccccaccctacctccccagtgtctgttattcccatgggtcctcaggttaatagtaatctattttcaagtttttttctttacatgaaactactgaaagcaaaagtatgtcacacttataggttactctgtacatttatcattctattaataaacatcttaagtaattaagtagtatattaaggccataaaccaagtcattatctcctatcaaaggactactgttattcaatcatctagaaaattcattttaggcaggacacagtggctcacgtctgtaatctcagcactttgggaggccgaggtgggtggatcatgaagtcaggagttcgagaccatcctgaccagcatggtgaaaccccgcctctactaaaaatacaaaaattagctgggtatggtggtgtgtgcctataatcccagctactcaggaggctgaggcaggagaatcgcttgaacccgggaggcagaggttgcagtgagctgaaatagtgccattgtattccagcttgggtgacagagagaaactctgtcttaaaaaaaaaagaaaattc

SEQ ID NO: 346118 - DNA, 1000 bp, Homo Sapiens
tttttctttctttttttttttttaaaaaaaaaagacatttattcagcatcacgatcagactattacatttagcaatcaacagcatggggtgcaaaaagaaatctacgttaaaaccctttgttggaatgctttacactttccacagaacagaaactaaaataacctgttatacaattagtcacaaatacagtcctcgagttttttgcccatacacatgagtatttgtctaaaacatgtcttctttgtagcagctaggccctgccaccactgtgcttggctgagttcacaaatctattgtaacctgtagcttccctgtcacttctctggctctcctctcctgctaagctttgtttcctaattaaaatcttctgccactgccatagctactgctgctgctggaaccgccatagccacttggtttcgtggttttgcaaagtattggcctccaccgccataggggccagagcttctgcctccaaaatttcctcccttcatgggtccaaaatttgaagactgattgttgtaattgccaaaatcattgtagcttccaccacctccaaaattgcttccatcattaccaaatccattatagccatccccactgccaccatatccaccaccaccatggctgccaccaaagccaccacgaccactgaagtttcctccacgaccgaagttgtcattcccaccgaaaccacctccacgaccaccaccaaagtttccagaaccacttcgacctctttggctggatgaagcactagccatctcttgctttgacagggcttttctaacttcacagttgtggccattcacagtatggtatttctgaatgacagtcttatccacggagtcatggtcgtcaaaggttacaaaggcaaagccccttttcttgccactgcctcggtcagtcatgatttcaatcacttcaatttttccatactgttcaaaataatctcttaggtgatgttcttcagtgtcttctttaatgccaccaacaaat

SEQ ID NO: 346119 - DNA, 930 bp, Homo Sapiens
tgatggttgttccagttctttattaggcaaagaacagttttttgtttttgtttttgtttttgttttagtatttcctttaaggaaggtggctcagattgctaagccagccaggccctgcgggacaggctgcgcctagggtcacctgctcttcttcagcaactcagaaatattctccttgaccattgaatccagtgttgaaaagtcccagtcggccaactgcattagtcgatcatgggcctccctaaagaggccagagctgatattgagctccacccgcatacgccactcagctagcttggagctgttgaggaagacattatagttggctgccatgggctgcatcatctccaccacggccaccaagtcagccagtgagatttggttcccggtgatgaacatcttatcctgcagaaacttctcctcgaagagctgcaggctgttcttcacctcttccactgcatgctccatcttctcagctgaaacttcctcccctgttatctttgggatcagcaacttgagccagactatcttcttcatgggcagctgaaaggccgtgtgttgccaagccacgaactcatccacacgggcacgtgcgtgcgggtctggcgggcaccagtgcgatggtgcgctgtacttgcggcacaggtagtaaaggatggccgcgtttcctcgccaaccccgccctccggagctaccagcaacaaccaacgggcagcgagcaacgggcgcgcgctgctcccttaggaggcggtgaccatctgcccgtgtgcccagggcctctgagggcgctggatggctccgttgtgtccgggtggtctcgggagtggggatgttcccagtcttgagcagcactgtttctgcagcacagttgtcagcagttggggacagatgtccacagctgtgcttcctcatgcgactgctggcttgcat

SEQ ID NO: 346120 - DNA, 1000 bp, Homo Sapiens
ttttttttttttttttttagagatttaacttttgctctgattttccaattataaggtcaaacattattctaggtgtttctgtgagggtgttttatatgagattgacatttaaatcaatcagtgaactctgagtaatgcagactgtcctcctcgatgttagtgggcttgatccagtcaggtgaaggtctgaagagaaaaaaagaccgtcctcttcccagaacaagagaatcctccaacagatacctttggactggaccttgcaccatcagctttcctgggtttccagcctcctgcctcacactccagcttttggacttgttagacttaataataacaacacaagccaatccttttaaggaagtttgtctggagaatcttgacaaacacaaacatctactgagagttcctgtccaagttttgctcacaccctagcaagaggcttctggcttaccagttgagagtgtgaggttctttgcttgtaagacctgatccaccagcggtacaccagctctggcccagggcaagacagggaatttcccaatcactgagtaggctgtagccactctctccattaggcctgacttcaccatggggaaggggagaccctttcaagggtattctttcctggggtactctcagtcctaggacatcatagctctctttcatccctcttaaaagttaataccattatcagttaacagttttttatattaaaattatccctgttcaagttaatggtatggtttctgtatcctgactggatattaggatacagtatttactgtcttatttctactactttatgtttaaagtttttcataatatttaaactgaagttttgatcattcattaaatatttacacagaacaggacaaaggatgattttcctttgtctagttattgtaaggtagcgtccaagatttaccaccacatcatgattacagatggtcaccaacttatgttttaggattttttgactttatgatgggtttatagggat

SEQ ID NO: 346121 - DNA, 1000 bp, Homo Sapiens
aaaaaagacatttattcagtgtcacaatcagactattacatttaataatcaacagcatgggtgcaaaaaaaaaactacattaaaaccctttgttggaatgctttacactttccgcagaatagaaattaaaataacctgttatacagctagtcacaaatacagtcctcgagttttttgcccatacacatgagtatgtgtctaaaacacgtcttctttgtagcagctaggccctgccaccactgtgcttggctgagttcacaaatctcttgtaacctgtagcttccctgtcacttctctggctctcctctcctgctaagctttgtttcctaattaaaatcttctgccactgccatagctactgctgctgctggaactgccatagccaccttggttttgcaaagtattgcctccaccgccataggggccagagcttctgcctccaaaatttcctcccttcatgggtctaaaatttgaagactgattgttgtaattgccaaaatcattgtagcttccaccacctccaaaattgcttccatcattaccaaatccattatagccatccccactgccaccatatccaccagcaccacggctgccaccaaagccaccacgaccactgaagtttcctccatgaccaaagttgtcattcccactgaaaccacctccacgaccaccactaaagtttccagaaccactttgacctctttggctggatgaagtactcgccatctcttgctttgacagggctttcctaacttcacagatgtggccattcacagtatggtatttctgaatgacaatcttatccacagagtcatggtcgtcaaaggttacaaaggcaaagccccttttcttgccactgcctcggtcagtcatgatttcaatcacttcaatttttccatactgttcaaaataatctcttaggtgatgttctttggtgtcttctttaatgccaccaacaaatatctttttcacagttaagtgggcacctggtctttga

SEQ ID NO: 346122 - DNA, 1000 bp, Homo Sapiens
caccagtacataagcctttatttggggagggatgcctggggagctgcctccagctcctctgctgcacagaggcaggatttcttaaagcatcttccctgaatgaggaagagagtgtagactctcctctgccaatgctagttaggtgtgccagaggccaaagcaccaaagctcggtggagaaggtttgtgatgcataggagggaggtgttcacgtgtctcagggccacttgtgaatgagggcagggaggtgaggggggcctagaagctgaatgggcatgtaagacttgatcaaaacagaaacctggaccctgcatcatgtcctgtgacccgctctccactgtggtataatcctggagcagtcatttttcttctctcagcctgtttcctctcatcgggggaacataggcagttgtgtctgcctggggtgagcagaaagaggattacttctgtccacaggccacctgcctctaccggtcaggccgaatgaggcaggttggatgccaccaagtttccagcaggcttcagagctatcctagaatttgggtaagaggaagacaagggttctagtctcaggttttcccaggatttgtccaaggcttggggcccagccaggtcctctcctcttgtagatggcaggaagagagtgagacctggagaggtggacaggaggggctgggtttgggcccactcccacctggggagctggcgtcagaggtgtgtgtgtgtgtgtgtgtgtgtgtgtgtggccattgtcatttctccaaggctagaatgctggggaagctgtaggctggactggggccttcgggagggcaagaggcccttgagtccaggatgccttggtgtctaaattgccctgctgctctggaacagacctaggcattgcagcgggccaggctggggctggggcatggtgatggggagagaagcaggaagagctccagggagcagagggcaccacagtgcctccacccagcactgcttccctgccccctgacccc

SEQ ID NO: 346123 - DNA, 1000 bp, Homo Sapiens
gctgggccaggaagagttgtttatttttcagggtttgtttatctattgacttgatgagggagggttataggtacaaccagtttaaagatggaaattttgagagagcaggcagggatttagtgctgggtaagcctggtcaaagcggctcttttggggcggccagaatccagtaccaatgtcctcagcatgttcatcagctgctgggggagtgcgggacagcatgaaagcacaggagaactttctggatgatagaaatactctgtatcttcaaaggaggtgggttccatagtaatgttaaatgagttaaaactcatcaaaatgtaaaccagacctgtgcatttcactaatagaaattatacctccaattaaaaacatgttttaaaagacagatgggccggatgcagtggctcatacttgtaatcccagcactttgggaggctgaggcaggtagatcacctgagtcaggagctcgagaccagcctggaaaacatggtgaaatcctgcctctattaaaggtataaaaaaaaattagccaggcatggtggcacacgctactcgggaagctgaggcaggagaattgcttgaacccaggaggcagaggttacagtgagcagagatcgtgccattgcactagagcctgggcaacagcgcaagactccatctcaacaacaacaaaaaaaggacagatgaaggttttcaactttcaataaaggcagaggagcttgttacagattcgcctccccacaagagcagttagaaaaactggataaaaatgtgccccgcccccaatcaaaaacaattgttggaaggtaattggagacctcagtcaggacttgagtgaccaggcctaggaggtgatcctgacagtctgtagtgctttcccacatttggtgattggtcaacagtagagggctaagaggctaagaaactgagtatgaagtggtagttaagaggctggagagcctagctgaatgtttggcactctcacagggctgaaatg

SEQ ID NO: 346124 - DNA, 1000 bp, Homo Sapiens
ctaatgctggtgaatctccagcccctcgaggccaggcttctgaaagtcacctgggcaggccgtctggaacactgtctgggacaggaaactggctgtgaccttgccaatgtcactgttgcctcccatcttacaaaggatgtagccatacaggtttgcagcttggagagagatcccagcaaccaccagagccagccactttagcttcaaggaaaataaggtgctaaaaaaaaacacaatccatatcatggggcagattatgaggcccagccagaagattcgtgcttcagcttctgtggcagcaatgctattcggagagaccttcctggcttcaaagatccagtggctcttcccatcttcatctatctggttccaccatcgaaggcccaccaggagtcttccggttacattcttcacagaccagaagtccagggacaggaggagcagcaccatgacaaaacagcccacaaagctcttgctgaaccagtcgcagctcacgtaggtgacgatggcactcactcggaaaaacaggtggaaaaaggtggccaaggggtgtctgatcttggctttcctaaaggccagctcctcctcgtttccaaagtccagggacacatcctcggtatcgtccaccagggccgggttcccaagtggaccctccgagctggcggggcccctccgctgcggctgcagtgcaaagccctctccaccctcccgaccaccgggtgcagcccagccccaggccccggcgcatccctcctcctcctcccggcttctccagcgctcccgcaggctcccctcgtcccgccccgcctccagccccagcatccccgaggccctacctgcttcatcaccctcccaggagcccacctggcgcccaggcccggggctccagctccgcccgtcgccgctgaaggggtcggacgccgggcgggcggatgtaggcagcagacggtggacgctgagggtcggggcctgcgccctgtggggcagcctcagcgcagct

SEQ ID NO: 346125 - DNA, 1000 bp, Homo Sapiens
tcacacgcagtgcaggccgcagccctggggcagcgtggcctgccacaccctggagaccctggctggccaggctatggactgagagcttggtctcacgacaaaggggagtcccttgagggtttcaaggcagtgagtaaagtgacctcccgttttaaaaagacaaccctctatggggatgtagagcatgaatcctggctctcctgtgtgcgtcatgctcatcacccggatcccatttgcatagcccacgctcatctccttgcaaaagaggcttgggaagtggtctggagtcataggggcataggacaactcagacagcacatccacagctcgagggccaatcagattgagggctgtgtacttccaggtgacgtcctccaggagcaggttgctgtctttcggcatgtgtttcttaagccaggcccaacagtggacctgctggtcggttggagagatcatgaagaaactgcgcttgttcagtcgtgctatgctgcagtcattttcataccctccaccctcgttgagcatgccagtatgcacaatgtggcccacaggcacatccaggtcattggagaagaggtactgtagaacttctaatgcctgatccccagtggttgttatctcaaactctgtgaaagaggacatgtcaatgacacacacagcttccttacagcacttgacttcagactccacgatgtcaaaccaatctggcttatagaaagtcttgctctgctccaatgccaggaggtccttgtcagggggaacaaagtactttggcctctcaaatccatgtttctccatccacctggctccctgtgcatccagccggtcgtagagaggagaggtgcgtaactgcctaccggtctggaagtcccagtggggaaccttcagatcatacatcaaaggcatgacttccatgacccggtggcgcagaaaggtgcggctgctctggagggctccaaaacgtttcaggtccaattcccaaacgttttctgagggataa

SEQ ID NO: 346126 - DNA, 1000 bp, Homo Sapiens
aagctttttattttgagataattgtatattcacatgcatgtaggaaataatacagagagatcctgtaaactccttaccagattcccccagtggtagcatagtgcaaaactatatggtacagtatcacaacaaggatattgacattgatagagtcaagatatagaacagtttcatcattgatatattggatgtcatccaaataaaaatattttactctgtcaaagaccctgaggatgaaaagacaaattatagactgggagaaaaatacatgcaaggcgcatagcaggcaaaggacttattcctataatatgtaaataactttcaaaatttgctatttaaaaaatcaggccaggtgtggtggctcatgtctgtaatcccagcactttgggaggccgaggcaggtggatcacctgaggtcaggaatttgagaccagccgggtcaacatggtgaaaccctgtctctactaaaaatataaaaattagccgggcctggtgatgcatgcttgtaatcccagctactcaggaggctgaggcaggagaatcgcttgaaccccagaggtggaggttgcagtgagccaagatcgtgccactgcactccagcctgggcaacagaatgagactccatctcaaaataataataataataataataataatgtttgaaaaactagaaactaccccaatgtcctttgatggatgtatggttaaatatattgtagcatgtccataccatggaatactactcagcaataaaaaggcacacacaacttggatgaacatcaaggaaattatcctgagtgaaaaaagccaatctcaaaaggatgaacatacattgcatgacgccatttacgtaataccatgaactaacagagaggtggaaaacagattgtgattgccaagagttaggcttgagggtctgaggtgactgtggctaaaagggtggcaataagagtgtcttttgataatagtggttttaagtatctcgaatgtggttacacaa

SEQ ID NO: 346127 - DNA, 1000 bp, Homo Sapiens
aatgtataaagaggtttaattgactcacaattttgcaggctttataggaaacatggcgctgacgtctgttcaccctctcgggaaacctgaggaaggttaaaatgatggtgggaggtgaagggcatgtcacatggccagaagaacaaacaagagggaggtgccattcactttcgtgcgtgcgtgtgcgtgatggagtctcactctgtcacccaggctagagtgcagtggcgcgatctcggctcactgcaacctccgcctccagggttcaagcaattctcctgactcagcctctcgagtagctggtactaccagtacccgccacgaagcccagctaatttttgtatttttggcagaaacagggtttcaccatgttggccaggctgctcttgaactcctgacctcaagtgatccgcccacctcagcctcccaaagtgctgggattacaggcatgagccagacctcatgagaactatcacaaggacagcaacaaggggatggtactaaaactttcttgagaaagccacccccatcatccaatcacctcccactaggctccacctccaatactggagattactacaattccacatgagacttcaaagggaaaggacaaatatacaagctatatgagtaagtataaattatttggggatcccagaggttaggacaacatctaacggcctttccacattgagtttagttgtaaggttctctccagcatgttttatctgatgtttagtgaggcctgagcgactaatgtaagatttgccacactcattacatttataaggtttttcactagaatgaattcgttggtgtttagtgaggcaagaccgccgcccaaacgccttgccacattccatacatttgtatggcttctctccagtatggtttctctgatggtaaaccaagtttgacctttcgataaaagctttaccacattcattacatttataaggtttctctccagtatgcatcatctgatgattaagcagaattg

SEQ ID NO: 346128 - DNA, 1000 bp, Homo Sapiens
tacaccataaacatagacaacttttatttgtcaatttttaaaaatgtaagtttttaaagttattttggctgggcacggtggctcaggcctgtaatctcagcactttgggaggccgaggcaggtggatcacttgaggtcaggagttcaagaccagcctggccaacatggtgaaacctggtctctactaataaagaaaaattagctgggcacagtgtcatgtgcctgtaattccagctactctggaggctcacacaggggaatcacttgaacccgggaggcggaggttgcagtgagccaagatcatgccactgcactccagactgggcaatagagcgagactctgtctcaaaaagaaaaaaaatcaaatcaaataaagatattttgttaagctgggtatgatggggtacctgtagtcccagctgcttggaagactgaggcaggaggatcacttgagcccaggagttcaagttccgcctgggcaacagagcaagtcctcacctctataacaaacaaacaaacaaacaaacaaacaaacaacaaaataaagttttttaaaaagtgtttgctcactggcaatgcacaaggggctttaagtgtatcccaccttcatgctccacagagcttcacactttcccttcatccagaggacacctccagtggactggaccatcccttttccgtggttaaactaattcagcaagggactagggatgttttcatgaggagtttgggagcttgacgctggtggctgttgattgttctccaagctgtgtgggatcccatatccaaaatacatagcaaatccaatcaacatccagactccacattgggcccaggtctcagtggtcatctgcatcatcaggtaaacatgtgcagagatgctgaccagaggagaacaggcaacagggggaccttgaagtaaagaggagtgttgctctggggctgtctccagacggtgaaagtgaatcccacaatgagcaccagcagcaacacagccgct

SEQ ID NO: 346129 - DNA, 762 bp, Homo Sapiens; identical to SEQ ID NO: 161364

SEQ ID NO: 346130 - DNA, 1000 bp, Homo Sapiens
ttaaaaaaaaaaaaaaaaaaagaaaaagaaaaaagggtccaactgtctaaaagaagactagagatacatgaataagaaaatacgatgttttggaattatgtgcaaaatagtaatgctgcatattacccatcctttaagttttagcaataattagaaaaaatagtttcccaacaataaaagttataaaataatgtcatcatatcacctagaagagattatagatttttataaacaaaatatgtgttattatgaatatttgtatgtactctccaagaactaaaagatgaagttcccctttcaggatcccctgtgcctgagaaggaaactttccagtgaaagcctactagctagttaaaaatttcttaaaaaagaaaatcttcttagttgtatacttgggagcatcctttctcttgggcggatccctgttagacatatacaacttttaatgtttgcacctttaagtgtagggatggtctctgagtatgcccacattcgtatctaagatattcaatgcctgtccttcagacacttaacaaggactctgagttccaaatctcccttgagtgctgcagtgcatgctgacgctctttaaaagccatagcactcccttactgtgaaataaaactgctctgtctcttgctggttggctctcctcttagcaatgctgggcttgctcatgaaggtttcagagaccgtggacttgacggactccatggagttgctgtactggaagcagtcagacacatcaaagtcctcgacagtcacaatgtcctggatggtttgcagggtggcctccattgtcttctttacctcttcgttttcaatctttagagtggataagcgagactgcagttgttggcatctctgtaccagctcactctggacaggctgctgggcacagagctgggaagccatatcccccatgtggggctgaaactcaaacttcataggggggcagaagacgttgttgtacatctccatgaggcgctgcttgtcactg

SEQ ID NO: 346131 - DNA, 1000 bp, Homo Sapiens
tttttttttttttttttttgagacagggtctggctctgtgacccaggctggagtgcagtgggacaatcttagctcactgcaacctctgcctcctgggttcaagtgattctcccgcctcagcctcccgagcagctgggattacaggtgcgtgccaccacgtctggctaaccgagctagtgctccacctgcttcactggctggcctcatcatgctcccggggtggctgggagcccaagcagctgatcagaggtggagctggtccccaggctcagggatcccagactccagaggccacccctacaaccacaccagtacttctgcctgcactcacttataaagataagaaagctgagcccaggggaagatcatttccccaaactccaaatagcagcagacctgggactcatctaggcccaggagggtgccccgggagagctgccaggagatatgaactgtgccctgaagtccaaaggccagaggatgggctggagagggagggcctgggggttgtggggcaggcatgtgagcagtgcccccacattctgaaaggtcacggtgaattgaattcccctgaagttgcaggggtacactgaaagaggctgagggtccatgtggaccatgtgggtgtgtggctttcaaggacagaattccttttttttttttttgagatggattctcgctctgttgtccagggtgcagtggcatgatcttggctcactgcaacctctgcctcctaggttcaagccattcttctgcctcagcctctcaagtagctgggattacaggcgagcaccaccacgcctggctaacttttgtatttttaatagagatggggtttcgccatgttgaccaggctggtctcaaactcctgacctcaggtgatccactggcctcggcctcttaaagtgctgggattacaggtgtgagccaccacgcccagccaaggacagaattcttaaccctgcaactgctcgcttccattcctcctgacatcccctcc

SEQ ID NO: 346132 - DNA, 596 bp, Homo Sapiens
taaaatgtcacttgtctttatatttgcatggtatacattaatgaaaatacatgaagcttcaagtattgcagcaacactcatgatccatcttcaccttcgtcagagctctcgtcactcagctcctcatcgctttctcctttactctcaccactgctgtcttcatcactgttttcaccgtcttgctcatgattctgagttttctccatcagcaacatttcttcaataagtgtgaaaaactccttggcctcaggattttctggttcatagattaggatcatctgacataatttttttgccagctggtactctcgggccatttctgctctcagaaattctgccattaactctagtggggcctgagtattctttttagggttactatcttcatcatcatcttcatcattggtatcatcttcaccatcatcctctgctgattctgacaatttatcatcaatatcctgaaggcaatattcattatttttctcctgctttacaatgactgcatctttgctcacttcacctgtttctggttcatttacagtctccatcagctcacaaccaccctgactgtccagtgtgcacctagcctgtagact

SEQ ID NO: 346133 - DNA, 691 bp, Homo Sapiens
tgagacagggtctcactctgttgcccaggctggagtgcaatggcgtaatctcagctcactgcaatctccgcctcccaggctcaagtgattctggggggtggaggttgcagtaagccaagatcatgctacttcactccagtctgggcaaaagagcaagacaccatctcaaaaaaataaataaataaataaaaaataaaaataaaaaagaaaatttagggtacattagtgacatttttttgacaggaagtagaatttattggtgagtattaagaggggggcagcacattggaagccctcatgagtgcagggcccgccacttgtccagagggccacgattggggatgtacttgaccccacagccatctgggatgagccacttctcagccaccatgtcttcaaattcatcagcattgaacttggtgaagccccacttctttgagatgtggatcttctggtggccaggaagcttgaacttggccctgcgcagggcctcaatcacatgctccttgttctgcagcttggtgcggatggacatgataacttggccaatgtgaaccctggccacagtgccctggggcattccaaaggcacctcgcatgcctgtttggagcctacattggggtagcgcaaggtcagaaacatgaacatccattggaaaggcctgtctccaaggtccctcagagcaacccat

SEQ ID NO: 346134 - DNA, 1000 bp, Homo Sapiens
tacgctgattcaactatttattaaaattcaaaattcggaggcccccacatgcatttcaaatgttccccatgagcagccagggcaaggagggtcctgaaactgccgagagcgagctgtctcatcacgggtgcctttcactgtgacgctgagaaatcagctgggcccctcccacctgcggtgcgttcccttcctctgcagccacgctgggcgcctcccctgtgctgggagcttcagtccctttgggcgtgtcctgtctggaaggcctggccgaggtgggcctgttgccgccactgcacttcctggtccagttgctccttcaggctggccacctgctcttccagcacctttacctgctgctggtgggtccattcttgggactccagggcctgcgtggcctgcggccgggccccatggagacgctctgcctctgtggccaggtcccgctggtgctgagctgtcaggtcctggagccgctgggtgtgggcctgctccatctctgtcatctgggcctgcagctgctgattttgcctcagggctccgtccacctcctggtgcaggctgttcagagactggtccagctgctccttctcagcccccagcctcgccacatcctcctccctcttcagtgtctcttgctccatctgcagagatcccaggaggcagaacctgtggcctcccaggtctatccaatatagaggacaagagagctgcctctcaggtgatggggagggggtgttgtacatagcaggctcctcctcggtgggcccagagtgacggctggggtgcaggctcccagaagctctgcctgcttcctggaatgccatttcctctttattgggctgtttccctatcagtcgacctggcggctgtgcgcccctcatctccccgcgaatggttctgctccgtctggtttcatgcgtggaagccaggtccacctgttgctccagccgcagggcacacccctggggaggggctatctccaccatgagcaggggcctct

SEQ ID NO: 346135 - DNA, 1000 bp, Homo Sapiens
tctttttcacatctttattaaatacaaattccatatgaaagaaatttaaaattccaaacaacattaatgtttatttcattattacataaaatgaaaattataaagcaaccaaacaagtcattaatacacttagataatgaaagattgtatgatctcagtacaaaatacaagtagaatatacgtcaaatataacaaaatacactgtattgtagtatgtgatgaaatctccatatcctgcaatacagtacaatcaattgaaatgtatgaaatacaataaaatataaattcaggatgtttaaaatgaaataaaacatgaggcagatgaataaataagtacaatcatttaccatttaatatatcttgacttaaattttatgtagaaatattaaaagtaaacagcttgcatagtaattttactatgcaaactgtaaaaatgtataaacattttcccacagggagtgctattaatggtttgtggatgttagtactccatgggttcaggctggaagagcctacaaccttttccgaattaaaagagaagcaatttcttggtaaagcggctcatgcctgtaaccccaccacgtcgggaggtggaggctggtggatcacttgagtccgaggccaacctggccaacgtgacaaaactctactaacaatacaagaaaaaaacattagccaggcatggcggtacatgcctgtagtcccagctacttgggaggctgaggcatgagaattgtttgaacccaggaagcagaggttgcagtgagctaagattgtgccactgcactccagcctgagtgacatagcaagactgtctcaaaaaaaaaaagagcatataattttatatttacttttctacaatctaaaatatgaaaattcacgattgcaacctaatatttttctgattatatagaaatgcacgactgtcatcagacatccaaaaggtatcaaatgtctaacatgaaatataaaatttgtctatagccttagcggtctgcaa

SEQ ID NO: 346136 - DNA, 1000 bp, Homo Sapiens
tcaaaggtctttgctgtctgtctcagaaaaccatgccttaagaagatgaccgagccagacctgagggcttctctccagcatgagttcgctggtggtgattaaaagtggaacgctgactaaaggctttcccacactcaatacattcataaggtttttctctccagtgtggactctctggtgcacagtaagctgtgagctgtcactaaaggctttcccacaactattgcatttatagggtttttccccagtatgggttctctgatgtaccataagactagaattataactgaagaccttcccacactcattacattcatagggtttctcaccagtgtgaattctctggtgtataatgaggtatgagttttgattgaaggattttccacactcattgcatttatagggcttttcacttgtgtgaagcctctggtgccgaataagacatttactcagaccgaatgccttaccacactcactacacttaaatggtttttctccagtatgaattcgctcatgttcaacaagttgagagatctgattgaaggctttcccacattcactacatttgtatggcttttccccagtgtggaggctctgatgtcgaataagacatttactccgactgaaggctttgccacattcattacatttataaggcttctccccagtgtgggttctctgatggtcaatgagatttctattggaacagaatgctctcccacattcattacacttataaggtttcttaccagtgtgcagaaactgatgtcgaacaagatttttactccgactaaaggccgccccacactccttacattcataaggtttctccccagtatgggttctctggtggtcgaagagtttggagctctgattaaaagcttttgcacattcattacatttatagggtttctccccattatggagtctctggtgttgaatgagatgggagctgtgcctataggcctttccacactcactgcattcatagggcttttcc

SEQ ID NO: 346137 - DNA, 1000 bp, Homo Sapiens
ccttttaatttgtttattttaacaaagtgcaaatagactctaaacaacaaacacaaatagatataggtcaccttctgataatttcaggtggaaaactatatatctataaccttcttccccatttactatgggtctcaaccaagtcgacttgagtagtgtactgtcaggcacatgtgcaccttcaggaggatagagtgtaaataacatttcaattgctttggactttttgattagttcagaatatttttctttgccatctcatatgtgtttatcatatcaatgataaacatttagttagctcatgtgagtcaggtggggttcatctggtctaggctgggcatagctgggcagctatacgctgcaggttgtttttcagtctgttaatgtctcttaaccttcttggagcttgtgatggttaatactgagtgtcaactcgattggattgaaggatgcaaaatattgatcctgggtgtgtcttgatggaccaggtcccaagtatcatcaacttgtttctgagttgggaaatgaccacagtcactgaagaaattggggagctcatttctttcaatttttggccaatcttccctcttagcaaacattatttcatagaatttttttcggtccatccactcctctagctctgctaagttgagaatttgtcttgtcctccaaagaccacgtcgatatctaacacggtggattagtctgccatacatgttaataactgctttcatatctggtccatgatccaaagccttggtcattactctttgcaatcttttccgttcaagccatcccctgacatgtgcctgcatgacggtgaccattctaatcaattttggggtaatcatgaatttttttctttctcggaacacttggaagatttctatgtgtggtccaattcttttaactttactgtcaagtttatcagttttatttggagtaccttttatcctgggttgtgattttggttctggcttgataggttgtcgctcctttt

SEQ ID NO: 346138 - DNA, 1000 bp, Homo Sapiens
atgtattcgaaacaaaggtttgttatttattatccgccatgccaaaactagtattggtagtgcactgaccagtgaaaattaaaacatttcttgggagattattttttgacaagcattacacatgctaatgacaggttctgcatcactattgcttgtaagtccggcagagccatagcaatccccacaaagtcccgaatgttgggctggtggttactcaagtcagttttgctttataacttcttctctcaaaactgcacagtgcttaatgcttgaatctggcatttagaaaaaatatacttcagagaatcagacacattctgtaggctctggaaaacatacattgacttgctcaacccctttcccgtgccccagtgatgacaatccatcattctagctgacctcattgtcttctctcctgtagtcccagctacttgggaggctgaggtggaaggatgccttgagcccaggaggcagaggttgcagtgagccaggattgggccactgcactccagcttgacctttttccagattgcataaagcagctgtgaattcagattcaacacttcatctttcatgttgatgtggattcttttgatccccggaaagaaatatatttataatttccaaaagaactgtctcagaggtaagtggtatccaaatgttagttctgcatggctggggaggcctcaggaaacttgcagtcatggtagaaggcaaaccagaagaaaggcacctttttcacagtgtggcaggaagcagaatgaactcgggaggaatttaattagaaatcttcggctcgtgatgacgtaagggaaatttctgagtttgaagagtgctcatgagagcatctgttaggtctagggtgaggttccagcccatgctgaggtccgaggggagtgggtggatgaacgccagatagcttcaagaacactcacgggccataggcaggtgaatacggtttcttcagcagcttacttccattagctctctcacactctgc

SEQ ID NO: 346139 - DNA, 1000 bp, Homo Sapiens
ttcaatgaacataaaataattttattaaatataacaaaaattaaaacataacaaaagtatcacagtattatagtaccatttaaatataacatagaaaaatactacaaaataagaaatacaaagacaaaagctaggtaagatttttatttactatgatgggtgtgcttgcctgttcataagttcattccagtctggaacacaggaagataatgctacccgcataactgctgcacaattcagcccatttctttcctttgtttttaactgcgttaagatggaaaaccctagttcacacaaactagttgttgtgaatggtagcaatagcaggacactctttctacttaacaatggaaagtcttcctttaccttcatccaaaatgctgataaacttaaggtttcataatcattcttcaatgtatatgaagaactaagctgcaataattcattctcttcttcaggcaccaagtttagctcaattattgattcagggtgtcgaaaagcaaatggatcttttacccaactgttttcccttaatgtttcaaatttttcttctggaaagaaatggttaaaagtttgagacagagaagtgagatgcaacaatatctctaattttatttctttcaaaatgttttcattaataatattctcttcaatatgctgcaaaaatcttggaaacatgtaatagctaggacgattacttttaagtcttacttgccataacaataatgtctttcgaaatccctggatacgttcaacatgttggaatacatcactgtttttcccctgtagttttaaactcagttcattaagaatgctaaaaatatcagttaaatatgccaattttgttacccaagtatcatcttcaaaaatacttgccaaatgagattttttttcaatgagaaaaaagtgaatctcattcctgagctcataaaccctgcttagtattttcccttgagacaaccaacgaattttggtatgatatagtaagtgggtatgatta

SEQ ID NO: 346140 - DNA, 693 bp, Homo Sapiens
tgctctgaatttatttttagacatgttaacagtcttcatcaatgttcatgttctgtactttcagatcccatttttttccaagactctttcagcttgtatctacttgatgtgacattttgagtagagacttctctttctctctcctttttctttctcctctgttttctgcctcttctgtaatttgtcagtgtagatgattgtatacagcttaaattcctgataattaagacgattgtcacctgtaatgtcaaagtcacggaagagatctttgagttcctgtttttgaatattgaagagaaatctgtacatttcgaagttttttgcaccaattctcagatcccctttcaggtcaagcaggtcaaagacaggccgggaatgacgatacataaactgtccttccaaatggttctggtgggccagcagcatgcacaccagcatgtagaacttctcaaagtcgatctcgcccacagcgttccagtccagcatgtcaaacacaatgttgatctgtgcctttttcaagtcagtcacatgatgaaggaagtgatagaacagcacatcattcaaggtgttcttgccgtgcacgtccagaatatgaaaatattctgccaaagccttcacgtttctcacggataataagcagtatattttgtccagatagaggtaccacagaaacgatccttgcttcagtctcat

SEQ ID NO: 346141 - DNA, 720 bp, Homo Sapiens
tttttttcttcttatcgttaaacatttttagttttatttgttttaactgactaataacaattatacatattcatggagttcataatgatgtttcaatacatataaagtgagtgatcagatcagggtaatcagcatttccatcatctcaaacatttatcatttctttgtgttggggacatttcataggcaccaataccttaaattttaaatttagaatttatatatttttgacaattattagcactgtaggttttcaagaaaagatcccccttcttgcagacttgggactgtgcagggagcgctccggaggccaggacaaagggtatcagcgatgggctggtgttgatgtctcttccctggagatattagaagccaggtgctttctatgacaatgggctttttgggagccttcccaagagacttgtttccatctcacctgtctcagaaagtaatgggacccagcaaactgtagaggcctgggagctcctctgctgtggagtagtagactgatttcatcttgatagtccaggtcaatcacctcagtcaacactgtaactcccttcttagcctgttgatttaaagatagcaggagtccaaagtgtccaggtggcaatcttaacttccagtttaacggaattgctgttgtgtctcctggtggcagcgttcctccctctggaactaagacctctaggccaacagaacgtaacgtcatgggaagag

SEQ ID NO: 346142 - DNA, 1000 bp, Homo Sapiens
aaaactgtaaaataagcaaggctaaatatttattgtttggcaacacatagagatatatagagttttacatgtaaaattacctataaatgtcaacagcacattgacatggtaaatacgaagttcaaaatgggatatccctggcatggaatagagagctgggatggcggagggccacacgggaagctgcaatagaatttttgatgtttgcttcattctctaggtgatgtgttcactggtgttcatcttatcatgtttttaaattgacaagcatgttacatatacaccacagaatactatgcagccataaaaaatgatgagttcatgtcctttgtagggacatggatgaagctggaaaccatcattctcagcaaactgtcacaaggacaaaaaaccaaacaccgcatgttctcactcataggtgggagttgaacaatgagaacacatggacacaggaaggggaacatcacacaccagggcctgttgtggggtggcgggggagtggggagggatagcattaggaaatatacctaatgttaaatgacgagttaatgggtgcagcacaccaacatggcacatgaatacatatgtaacaaacctgtactttgtgcacatgtaccctaaaacttaaagtataataaaaaaaattgacaaacatgttgcattatcttttgtagtatcaaatattacataatacaattttaattaaataaaaaaattatacatatcattatttctgccaagatggctattcttccatctccttcttccgtgagtgctcttttttgcactgttgaattgaatgagggtagacctgatagaaggagaaagtattttgttttttgtttttgtttttgttttgagacagagtcttgctgtgtcacccaggctggagtgcagagcaagattctgtctgggggaaaaaaaaaaaaaagaaagaaatatgcaagtgctgtctgaactcagctcagaactaatgctcttcccagacaggatcttgcaa

SEQ ID NO: 346143 - DNA, 461 bp, Homo Sapiens
tactttgcagaaggctgtaaagctttattgggagaattttaatgaacaaatttccaacataggagcagcctgcatcatttcagcttgtcttcttttaactccgtgattgcttttcacctcatatacaagagctccggctggcatctggcaggtgcccctctgggacgaagcttcccagaggaaggaaaaggcagcaatctttgctgttctgcagcctctgctggtgatacccaggcaaacagggtctggagtggaactccaacaaactccagcagacctgcagcagaggggcctgactgttagaaggaaaactaacaaacagaaaggagtagtatcaacatcaacaaaaaggacatccacacagaaaccccatctgaaggtcaccaacatcaaagaccaaagggagataaatccacaaagatgaggaaaatccagcacaaaaaggctgaaaattgcaaaac

SEQ ID NO: 346144 - DNA, 1000 bp, Homo Sapiens
gcaagggtaacttcagaaatttattcgtatgtcttaattcacagaaacattggcattttacagcaaaacaattagcataatgagaaataagtcactgagtgagatgtggtgttttgtcaggtacacagctctgtctctgggaagaagcagggttctggcaagggtctttggtttggcaagggttgttccggacttgtaggaacatttggtggcaccatccagaaggatttacttgcagctgattttgtggggtttttcttggtctcctcgtgcaataagcacaacttcaactattttcataacatttctcttcagctatttctgtaatatttttctaataatctggaaaaacagaaagtaacagatcccaatgagtggacttcttggttctatatcatttctctatggatcccaagtggagctctggaggtgaccttcccctcttcccatctgcactactcagggaagctctggctaccatcttgccctgaccctgtttccctcttgaccaaggggtcctctttaaatggtggaataatctatgtggctatgtgttgggccctctggggtggttctttcccacttctgatgggctcaagaaaattttgatttttgtcatttatccagcttttgtttcatggtttgactgagagtgccatcctttactggtttctacatatgaaggagaagggttgtttatgagatgtttcaaaatttacgggaaacatttaacaaaaatggccacatgttgagcttcaaggcacaacataataaattcctgtgggttgcagtcccagagtatgttctcttgtccacatactcgggcgactggaaatcaatggaaaaggaaagcaatgggaaagtgagcacctgctctgaaattcagcaatacacttatagaaaaaaatgcttaaaatgccaagacttgggacccagaagagagcacaatgaaaggtagcctatattaatattaacatgaatataaatatgctaatctttt

SEQ ID NO: 346145 - DNA, 1000 bp, Homo Sapiens
aaaaaactgacaaaaattctttttaatttctttcaagtgaggaattaccaactacttaacagggtgcttagaatgggggattttaccagataagtggcatgctttttacaattaacaattgctgttatttactgagtatccactttctctgccagctcctgcgttaagcactttacatatactaattcaaatccttaaaaaagaaaataaagaagagaaaaggaaagaaaaataagaacatgtaaggctataaggtgcctcatctttgccaaattctacagactggccaggagactgcaggccactgcagcttcctaaggccactcaggacaaggccagtccgcaatttgtttcactgtgagacggctgcgcggtcagagcccagacacggtcatcagactcccggacttggattcagctccacatggtgtcaccctgggtaaaggatgtacatctctgcgtgcctgggtttgtatggatggcagcatggatgctcaggcaactgacccgtcaggactgcagcaaatgaacagaagctgggggagagcgcgggctggtgctgtacggagctctggcgcagaaggcgctcaccaggggtgcccagagccggggtctgtgcgccgcgggttggatccgggtcacaggcttgtatttcttctttcctttcctctcccagcagctgtaagcgccctacagtttgcatgggaaggcaacagggacttcccttttgcactgtctgcgggtaccgctgttccagccctgagaggacgaggggacgctgcgctgtggggaaagtccgggtggcaggaggtggcggggctcctggaggaggtgctgggatgcgctgctgtggctgcagagaaaggtcccgaggacgcaacccgtcccttcccccgaactgcgaaggagccccgcggggaggacgggcagggtctcccggagggaggaacaggggagcctggagtctcagggttgcggggagcagaggcgttctgggtgg

SEQ ID NO: 346146 - DNA, 787 bp, Homo Sapiens
tatttcagtttttctggagaaccttgactaatgcagatggttttagtttgctaggcctgccagaaaaaagcttaaatgacaggaacttatcttttttttgcagttctggcggctagaagttcaagatcaagatgttggcaggactggttcttccaggcttctctcctttgcttatagatgaccactgtcttcttgcatccccacatcatcttcaattctgtatatgtctatgccctaattttctcttcttataaggataccagtcacactggattagggcccaccccagtgacctattttaacttaattatacctctttaaagaccctagctccacatatagtcacattctgaggtactgagggttgacttcaacataggaatttaaaggtaggggtagggacacaattcagctcgtagctaagacactttgcatggagtccggagtctttcaaaatcaggccttgatagttcaaaagtaaatgctggaaatgaccttttagtctggccgtattctaagtgcattgcatataatttatccttagaacaacctaagaggcaggtgatgttctttccatttgcacattgaagaaacaggtgcagagaggtaaagtcggttgcccaagccacactgttaacatgagtgaaggtggcatttgaacccaggtggtcaagctccagagcccttgacatttccagcatagatcggaggactgtctgtccacgtcactttcgggatgaatttctgcccacacatcttgctaagcaggtagctgacttcagaatgc

SEQ ID NO: 346147 - DNA, 643 bp, Homo Sapiens
tgacgatgcaaaaaatgtatctaagtcccaacattgacagcagagggtcagctttaagcgcctacattttgatccgcgaaatttcccagcttttttggaggcggttacatagagaacacaggagcctctgccttggccgcccagatgctttgcattttgtaaacagctttgactaagtgctctggacttccaagaagttaactggagtggaaggcgagtcatattgtggatgcggaatggaagcttagacaagaaaaaactgtcagcagagcgcctctgctctcaccgtcacacccaaatgagccaggacgtcgctcagagcgcaaactgagatccacacagggacatcttcaaccgaatctttcttctgtctccattccggaccaagtctatgggtgtcaataatagccatttcaaatgcctctctgagccttgccagccccagaagaggctgtgggaatgctgcttccagcttcccctgtgcagaactccgttgtaaatccttctgagtttccaaggtggcagcagagcatagggatagctcctcaagctccagcatcaacaaggaagatcacattttaggacaaatactcatctacctgcatttaaacatccattttcgtatgtaagtgtacataagtat

SEQ ID NO: 346148 - DNA, 1000 bp, Homo Sapiens
gtatgtgtatttatactgtattcttacaataaactaagcttgggaaaataaaatgtcattaagaatatcataagagaaagcatttactaagtggaagtggattatcatagaagtcttcatcctcgttgtcttcatgttgagtggctgaggaggaggggctggtcttgctgcctcagggtggcagagaggaagacatggaggaagtgggaagggaggcaggagaggcagggacacttggtataactctgattgaaaaacatccctgtgggtggacctgcacagtttgaacctgcgttgttcaagggtccactgtgcttgaaagtgtttagtcagcagtcctgaacgacatgtaaacaatggttgaatgaaggagcaagggagcctaagggtggggagaggcgggtgtcggcaaggaccttcctccaagacagggttgctgcgaggggcaaatggtgactgatgattcacaagaaggcgtacctgtgtgacagcacctgtaagccaggtgggatcagtgcggcctgtcgtctgctgttgtcatgtggagctcagcaaacggtgggagtccgccttccaatcctgactctttaggaaaagcctggatctccgacatctccagagcgcctgaccaagcgtgagaaggcgggatgtagccggggtgtgtgtgtcggggggtggcaggatgctccccagaggcggagagcggcgcgtggggggtgctgcaggcgtcctgggagtttgggggcgccgcccttcctcctgccttgggcccaaccggtggatcctgtcgagtctgttgtggtccccttctaggcatagctgatgccctctggtggggccggggggggggtggtgtcccaaatctgatggtggagcagcaggggatcccctgcccttgcatggtgaacactcccatctttatcacatcagtaattcttgctaaaagcagatgtaattttgaaggtgggtaaaagtaacttgaaaagttggtgggcagatg

SEQ ID NO: 346149 - DNA, 857 bp, Homo Sapiens
ttatgttcacatcattattttatttagagttacaggggattaaaaaagttagcagggcaactatttttttaatgacactgatatggtttggatctgtgtccccactcaaatctcatgtcgaattgtaatccccactgttggaggaggagcctggtgggaggtgactggatcagggcgcagaattcccccttgctgttctcgtgatagtgagttctcacaagatccagttgtttaaaagtatgtagcacctccccaccgccttcctcctgctcctgccacgaagccgctgcctgcttcctctttgccttccgctgtgactgtaagtttcctgaggcctccccagccatccttcctgtagtccttggccggccgagctcaacagccttgggcggtaggatgtcctgactgtccttagcggctcttgccttgaaggaagagttgaggcaacacaggtagggaccactccgacatgtaggggctgccctccaagctccctgtcctgagttgtccaaacttctgtctgcctcagggctgctggctgtccagggacccggatgctcagcatcattctcttccaaaaggcccctccttggtttcctgacaatccggcctgtgatatttgaagcacgcagaaataccacttgcgcatggttgagaaaaaggtcatcgcctcacactgagtgcgtggtcagctcgcgctgcggtaacagatcaaagaccaggggcttaaacaatgggcatcgctttctcacaggtctggcagccgcaagcccaggatcaaggtgttggcggatctgaaggctactgaacgattgtcttcctggcttgtaggcggcctctccttgttgtatccttac

SEQ ID NO: 346150 - DNA, 1000 bp, Homo Sapiens; identical to SEQ ID NO: 161365

SEQ ID NO: 346151 - DNA, 829 bp, Homo Sapiens
tttgtttgcttatatcttattttatttgctattttaaggtatttctggagaagacctaaaggacagggaactactgtcttgcaatcctaaggagaaactccagaagccagagctggcttgcagcttagaagaaaactttcctcccatggaattgtgtcccttggcagtcctcataacgcccaggaatgacaaaaatctcagaatgacatcttgctggaaaggatgcagcgaatgtggcctccgtctttgtccaggaaatgctgggaaattcctgctccttcaaaaggtacagaaaaaacctgatttccaagtaggtgtttgtctcatggaagtcaatagcatgtcctgcactggggatggctaaaaggggtcgacatgttctatcttctcctggaagcggggtgtgtccttgttcccagtgacattcagcgtgtgcagggcccgtacgcatgcactctggcctccaaagcacctgtcgttgtggagattccacagcaggcagggtggagatggtgagccgcagacatcacacctgccccaggtcaggccgaggctgctcatcaggagccccgagacctcgaatgcaacgtcttcagatcccaattccctccctgcatggagcagaacagtgtctctcaaaaactcacgcccacgagaagtctcagaatgtggcttttagtagaaatagggtctctgcagatgtctttcattaagctgaggccatattgagtgagggtggatcccaatccagtaactggggtctttctgttgttaaagccaggggtcctcaacccctggggccacagacagtgccctgtctgggccacac

SEQ ID NO: 346152 - DNA, 703 bp, Homo Sapiens
gggattaaaatgtcagctttattgctagtccagatggactggaggatgtggctaagacccaaggcccaaatgagctttctgtgtcttctcctctgacttgaactcactcacccactcgcggcagagcagctggactattgaagtcctcccaagcaagggctggacccgccctggtgctcattgcctggaggaggcaggagcagacagagaacatgctgcttgcagtcaggtcagtcccagagagagagccaggaacaggctgagccatgcacacttgatacccttttcccaacgacaccaatccaagaggtccctcctcctctcacagagaggaaccagtgaagattgtacagagaaaatcgaaaagttccttcccaattcttccaagaggttgtcagttcctgttttatgggctgataggagaatggggaggggagatagttgcccccttaacagagccttcaattcattcaataccttttcatagaatctgaaaacttctgtgttacaagaagcagctctgacgtgaaagattgtatcaattgaaagtgaatttgcatgccccacctcgttcatgctatttccacctcccctcttctgtacttcttgggtctctgcttgttcttcaaggttcaaatcaaacatccccaccttcacaaaatcttctccaaccttccggaagagtaactgctctttcttctgt

SEQ ID NO: 346153 - DNA, 1000 bp, Homo Sapiens
tctgaaatgatttatttcttttataaatttttaatcaaaacaataaaacaacatgcttaattattaggtggtagttacacaggggctattgtttctgtgtattatttgtatttagtaaaggtttaaaggcataaaatagaagaaaatttggaaaaatatttggggtgaatgagacaattcaggaacaaatacagaaaactatattatcatatagcaaaaagctatttaaaatagagataagcaaactatagctcacaggccaaatgtggccttctgattattttttgtaaataaagttttattggaacacaacaatgtccatttgcttataggtagaatttctcaacctcagaactactgacattctggatgagactttttttggggggtgggggcagttgtactatgcattgtaggacgcttagcaggatccctggcctctgctcaccagacgccagcagcacccacccttcatactgaaaaccaaaaatgactctggacattgccaaatgcctactggggtgtaggtatgagaaacgaaatggcccctgtttgagaacacctggcttatgtattaagcgcttccacactacaaagacagagtagagactgtatggcttacaaagccttgcatgtttactatctggctcttcacagaaaaatatgttaactctgtttgccataaacgatggcaaaagatgcaggctaaactgcagagcatatgacaatacaatctccttagcaaagtttccacagattgctttaaaaactactccaatgtaaacaaaaggaagagataaaaataagcaatccacagaaacagaactcgaatgacccttagacatggtagatgctcaatctcactggcagttaagaaaatgcaggccaggcccggtggctcacgcttgtaatcccagcagactttacttttttttatagctgacttattttggatgctgtccttttccaactttggtaaaagggtaatgatagcctcaca

SEQ ID NO: 346154 - DNA, 885 bp, Homo Sapiens
aagagcaaaaaaaaagtaagtattcactttgttgaagacaaaaaaaaaaaaatcataagctgcatgcatagcattagtttggctctgaaagattcattcccccaggaagctagccaaatgctggacttttgtgaaccgcagcatggccgggagagcaggctgctggcaggtatggccgctctgcagaacaaagggagatatggtagggggacacataaataacagggacaggccggtcttcttgaaggtggagcctctcttgaatttggaaaatgcaagctctgagggaagcggggatgaaagcagaccacacgcatctagcactttggccaactgaggcttcctgggcttggaggtcctcacccggggctcttagcgcagcctgagcccagtgtgaagccatgggccagcccttcctgcaggcgggccctgtggccaggctcagctcaggcgaggggtggctgggccatgaggaatcagaacaaagcttcttccttcacacccggtcctgctcagcaggtggactccacgttagacatttcccccacgtcctaaggcttcttccaggcttgagccgtggacacaagtaggaaaagcacagagtgtgtcatcacactgtgtacctcatacaggtgacgtcctggagaaacctctgaaggcaggatgaccacaccggagaaaattctacagaaacagttttgcggtcacagcagtattccttcacagagccaggctatgtttcctgcagatgcatacacatgcttgcaaatgtactgtaagaaatcatcacaattcacaggaaacatatttatcctaagatgtgtagcaaatctgttggaaatttttaagcacagccaaaagacatcccaaaccacctatgaggtt

SEQ ID NO: 346155 - DNA, 1000 bp, Homo Sapiens
gagcatttaaatttttattgatgggttaataaataattgattgatggggaccgaaactaatctttaaaattgattgtcaactgaaaacctgcacaagatatcccactgtttaacaatagagaggagctattgcagctgctgtgacgactggcaatgtcctcttctttatcgcacctctaagaaatctgctggcaaatgacttcttggatactgtttcattaaggaatttctcaatggataaagtttttactattctaaaagtatctttgtgtcttcacagtaggtgctgtatttggtttggaggaattttattagtctaaaggacataatttcttccttctaggagcttacagaggactagaggatgagttacctgcagaacccatcactctatggaacctcccggccggtgtcctgcaccctaggattacacacatgtagtaacacaacttatttccacattctgtagccaaagcctaatgggtcagggttcatcagtttaccacacggcagtcatctcatgttgatcagggtcggggttcatcagtttaccacacggcggtcatctcatgttgatcagggtcggggttcatcagtttaccacacggcggtcatctcatgttcatcagggtcggggttcatcagtttaccacacggcggtcatctcacgttgatcagggtcggggttcatcagtttaccacacggcggtcatctcacgttcatcagggtcggggttcatcagtttaccacacggcggtcatctcacgttcatcagggtcggggttcatcagtttaccacacggcggtcatctcacgttcatcagggtcggggttcatcagtttaccacacggcggtcatctcacgttcatcagggtcggggttcatcagtttaccacacggcggtcatctcatgttgatcagggtcagggttcatcagtttaccacacggcggtcatctcatgttgatcagaagccttgacagcaagcctagatgtctt

SEQ ID NO: 346156 - DNA, 1000 bp, Homo Sapiens
tttagttcaaaagccttttatgtcaaacaatatagcagctaataaattgattctataaatatatctaatgtacatttaagctaatattaaatttctttgggtcttcagagtttttactgtaaaaaatagcacaaaataaaaatgcttaataaagaaagttgtaaaatacagaaaagcataatttttagataaaaatatatattataaaatatgctacatacatatctaagatgagaatgcctattttttcccttaaaaatgtgattcgatctcgtatttgggggcgggaggggcatgctgctgtgctgtatcaggttttgcctctttttctgcagcgtctttcaaaaactgaaaacaatttagccacgttatcccaaatgctaggtgtggacatttatttcctcatatatgggcggtgacttccaccattggggcaaacggacctggaaatgccgagatgtcccaggaagtctggagctgatggagcccgtgtccatctcaccaagaccttaaatataatgcagagtccctgctgcaaatccattcccatccgtgctttgagacggaaggagggaaattgcagctatttacagcaaccaccatctgagcaaggactgattcatgcagtacctcggggaagctaggttggaaacccttgtcaacatgcagtcaagtctatggttagaactggccagtgtgcgccctgcatctgcgggagggtccgggggccatttggaatttggttttttttttgtttgtctgttgtttgtttatttgttttttagccctctctctaagggctaaggattccatcgaggtaaggaatgggcgggagtgagtcctaagcgggcgctcccggaagagcggctgcgagcagcggggccgcagttcggcggtatggatcctacccctgcccgccccgagccgacccgggcttgatgaagtcccgggcagcccgcgaggctgcagtgtgtcacgcaccagctcccggcggcgtcct

SEQ ID NO: 346157 - DNA, 586 bp, Homo Sapiens
tctttggggtccagtagataagtttaatacagttctgtctcttcttggctgtttgactttgggcttgttactcagcctctctctgtgacaaagttgcctacctcagaggtttgcgagcttggtgtgggataaccaacataaggtgtttcatagggtgcctgggccctgacaagtcctggtaggtgctcagcagcacaggctctcttcccgccctcttcccccactccagagttgcatctgctgccatgccaggggaaaggatgacataggcaggagccttgtacgtccgaagaggttagatgttccacccacacactcagcattttcttcttttcctttggacccagtgctatgctgaagcaggcctgtactggttcatgagagctcacaggtttcatacaagacctaggctggcctccatgtggtgggcaccatctttccctcctcacccagagtactctgaagcacctcatgactctccagcatccaggcccagaaggatgaggctgagagagaagctcccctccttccactttctccttcggcctgccctgtcctcatgttcggcaccaggatctgtgttttc

SEQ ID NO: 346158 - DNA, 673 bp, Homo Sapiens; identical to SEQ ID NO: 161366

SEQ ID NO: 346159 - DNA, 487 bp, Homo Sapiens
tctttgagaattattattttttccattaaaaaatggtggagaggacgacccgcccgtagccacacaattcgcgccttcccaggacgcaaccgcagaaaaagcggcggtgtggacgctctggcgggcggcgtcctctcgttggttgccctctctctgaagccatcatagtcgccgccatctttccttcccggccgtcagtcacgtgggcagcacgccccaggcctccgactgctggcgtgcagtggggcggattccggaggattcctaagtgaaggaggctccgagacccgcggcccacgtcctgccggagacgcttgtctgcagggctgcattgcatccccgggcgcacgtggagctggagcagcgcaggctggggaagagcagagagggtcgggcttctccgggcgcgccatggggcggggccgaggacggggaccaatagcgcgcgcgtgctggtgggggtggggacaggctccaggcctggcat

SEQ ID NO: 346160 - DNA, 1000 bp, Homo Sapiens; identical to SEQ ID NO: 161367

SEQ ID NO: 346161 - DNA, 1000 bp, Homo Sapiens
gagacagggtctctgtcacccaggctggagtgaagtggcgcaatctcggctcactgctgcctcgacctccccagctcagatgatcttcccacctcagccccccaaggagctgggactataggcatgtgccaccatgcccagctatttttttgtatttttttgcagagatggggcttcactatgttgcccaggctggccttgaactcctggactcaagagatctgccctctgggccacggcacccagcccacactctttttctctcttttcaaaaaatccatacaaaacccaaatcatgaccaggtagcccaggaggtcttatttgcttagctctcagcttacccagaagagctgaggaaagatgcagccaggtcaaagtggaggcaagcctcaggacagggaaagtcaaaaccccctgcatatttccttagctcagcgcccaggagctgaccattttgaccctgttcaggtgttccctggccaacaggctgaagcagtggcttgatgggcattttcctcctcttctaatcacctaagagcaaacaccacctgcctgattatacaccgatggaggcaggggaaagccactcatagacgggccatagcaagggaaagggtgggcccactgcgggagtctgcaggtctgagcccaccccgctgaccacaagatggaacccttctgtggggccggactcagaccagtgctctgcctcagaacctggcagaagcttgtttacaaaggggccccttcctacagctgacccaggacaggggccactccatgctccagacccacctgcctccctgcggtgacagtcagcctgaatgggaaagggagtggaagcagaggtgaggacagggcatcactaggctcagacaggagctaagaattggctcggcctccccacagtccacagaaaggacaggtccacgcaatacaactccccatgttgagaagggagttgggaagaggagaaaaaaagggagagagaaaggagga

SEQ ID NO: 346162 - DNA, 1000 bp, Homo Sapiens
gcttaggcttacttttatttatttatgaacatgggtgtctgtcttgtcttcggttagaagttagaagggggctacagcagtgtcagggcacttcacccaacctgcaggtggctgctgttgcagctacaaaggccaactgctcagaggagcccacaggcttcctaagagcccacacttcacaaggaacatgaacacctttgcagtaaaatcaggactctaaccacaagggggatacaagtggtggcttctcaggccctgaggcaggcgtggaggggctgtgggggcaaaggcctcctgctgtgagaagctagccccccgcccccccccccaaaaccatgcagtggcgcttggtaagggggcaggtctcggtctctgttcttctcagaaaggtacagacagtgcaggtaccccccacccccatatgagaaacaaacaaacaggacagccagaggagacactgccccccccacccctttgtgcaaggcttggatcctgctgtgctttataccgtacagcagtcggaaggaaaatagtacttgatgtcaaaacattggagctgaggtctagcctgtttcctgaacatcatcagatcttcccgcatggggagcctgctagggaaggagggggaggcaaagacccgtgtgtgcccatctcggctgcttcaagttaaccaggacacttgggtgtaaagttttaatgggactgatccccaatgaaagggacttaggtcttacttccatatctgagagaatctctgtgtacccttcatcaggctgaggactaaggtgccatgagctgtaccatccttcctcttggtagggcctgcctccacagcttccctcaggccctacctggctcctggagggaaggggtcaggttggcagcaggttcacattagaagaccagtctgtggaagtcaccaccattgccacctgcaggattgcagccccctggagagccttcatcctcatccttgtcttcatcaaagcccctcccccag

SEQ ID NO: 346163 - DNA, 1000 bp, Homo Sapiens
gtcagtaattactttattgagcatctgcaaggtgcacatcattgtacatagcttgaaaatgtcaaattgagttttgtcacaccctctgtaaaggcttccctaatttccatggtttcgtggtttttcttcctctgttccaaggaacatgttattagtacctttactgcagcacttacttgtccttcatgtgttacgattgtaccatgtgttctctccactaggttttgaactcctcaaagatgaaatccatgcattgttcatctctgcaaccttgatgtccaaatacgtgtttgacagatgaacgaatgactgaataaatgaaggatggttcactttggttcctcctcccaactacctagtctgcatttagatcgaagtgctgatgctgagtgagaagacaacattcaaaaggcacaatggaaaagagaagtgtccaaaggcatagctgatccacagactagaaaatcagctccataatgaggaagaggctaatcccaaggcctcagaacataacagagccacagcaagatctttaagccagagttggggttcataaaccccaacctctacctcaaagcccagcgtagctcattaggaacaggccagcagtccagccacctgctgtggcttcacgtccaatgcagatggttctagagacccacaggcacagccacactagtagctcagggcagtgggtctcagccacctatccttactgatactttttgctttattgtccctttttaggtttcaaaactggccacccaagaataaatagacactaaacaattggatgtgaaaaagaaagacattccccaatggttctcaagaagccgtttggatgctgtgctccttacatggtgctaaggggctcaagctgccgtggatgcccttttcggacctttcagtatgcaaatatgtgctaggagggaattaagtttccatgggatgcagtaagcataatgttgtacatggatggctaattgttttcatcacacat

SEQ ID NO: 346164 - DNA, 1000 bp, Homo Sapiens; identical to SEQ ID NO: 161370

SEQ ID NO: 346165 - DNA, 749 bp, Homo Sapiens
cacctgaagaaagtaagggaggtagccatgtgcaaagctggagcaagtggggtccaggcagaggaaacagtcagtgcaaatgtcctgaaatgggagtgtaattgagggaacatatcaggcaagtaggactgaaaccaagtgagtcagggagaaagatgaagtgaggtagagggaggaggggggtgcagatcataggctttgttggccattttaagtcctttggcttttctctgaagggaatggtgagctatttattggagagttttgagcagaagaatgacataatctgacttacatcatacaagtatctctttggctctgctaggttgaggcatgcatttgacttgaaccaaagctctccttcagatgatcttacatttcacatctctgcattggattacgagacaatggaagaattggaccttatcttgaaatattccagattcccccttcatattgtgtccggaattggtggcttcttggtctcactgacttcaagaatgaagccgcgaaccctggtggtgagtgttacagttcttaaaggcggtgtgtgcagagtttgttccttctgatgtttggatgtgtttggagtttcttccttccgaggttcggatgtgttcggagtttcttccttctggtgggttcgtggtctcgctggctcaggagtgaggctgcagaccttcgcggtgagcgttacagctcttaaggcggcgcatctggagttgttcattcctcctgctgggttcgtg

SEQ ID NO: 346166 - DNA, 1000 bp, Homo Sapiens
gggatgcagcactttctttattgcccatccagggaacagccaagccagctccatctgcattctggctgcagcgtgtacattaggggactcaggggccacagtgtgggaccgtgcacactggcaaggcactggcggatgctggcaggccagtggacatggatagatgagaatgacaactcacagatgtcctagcttctgctggcccagctgccagccactggccatcacccttttgcccagcatgtgtgcattgtcacccaaaacatcttgaaacttgccattagtgaggcattcaacaaagaagtaagctaagtgagtaggaaacagtgtttcctggaatataccgcactctgcctgaaataggaaaactatgtttgccgggaagcagcagcagcaggaaagaagttataccaaaaacgacttgtacaccacagacattataaccctttcctcaaagaaacagtcatgttctgttgggtattatggacaggtctctggaaatttatctaataaagaccaacaaacttccccagcagtgcctctgagtaccgtgtgaattctggtgtcttgtggaagtcagggtgccttctttgcatccaaagctttgagggagctgggaagctttggttccattttaggagggctgtgtgatggtgacaaaggtgttctggtcatttctgctctgttctccgttctgtgaagtgaggtggatgtaatgtgctgtgggatggggtgctccatatgtgtgtgtagcctttactttccaacttagttttttgcatctctcttgtactgatgagccatacctctcagccttcatttggtcccaggcctgaccctttgctttcatcgtcagcttttctgtcctgctcgggcaggattaactctgttcttgccgcggatgtcaccatcactctggagtccagcccagtgcccacaggcccgatcagttcaccctcttccttctcttcaggggagaaactttctcgggcatcaaaaa

SEQ ID NO: 346167 - DNA, 948 bp, Homo Sapiens
ttacacgagaaatttaaacatggaagcagaaatacaccaagaaaaacacatgtcaaaccccacctgtatatctgttttcaaccattcggtgtcaaggcgagcctgggcagccaaacacaaagattcagagggcatcttttctccagcttcctcccagttctcaggctttaagagttcatctctttctgtcttccatgccaaaactatatcgctgcatttgttctggaacctgaccaggatttcagtcaactcattgtaaaactttgtgtcttccttcgaattagctacaagttcaacaaagttgtcatatgcagtagctaaattcttcaaaacttcttttcttaagttagcttcattattagattgcttcattttcgaaaattcctgatgtgagacctgaatatttttaagaagtccctcctgtgtctttagagattcttggactttagttgtaagacctccatagactcgatctagttcagtaacagaaagagcttcttcatttatcacaccatcttgagccagggctgtcaaaaacttgcttgtcatgtcaaaattcacagatttcaagtcattctccagaccctctctttccttctttacttcatcaagatttgacaataaggattttaagacatttacaacctcactgccctgcatggtctttgctggattagcagaagggatggcagcattcagctcaggctctggcttacacaaaagcacgatggggtcacgatgagacgggtaacattctttcacgtgtccatctgcttgcacagctttatctaaaactgttctgaagctggttccctctgctcttaaaggcttatacagttcattggatgatgtcctttgccagcgttccttaaattttgctcataaatcattatcggttgcttcttcttcatccaacaaccttaatgactttaaaaggaagcaaaaaga

SEQ ID NO: 346168 - DNA, 1000 bp, Homo Sapiens
atttttatattatttatttattctttgttagtttttggagtgtgggttttgttttgttttttgaattttttattttgttctactcggttttattcttattgctcaggcttgagtgcactggcctcttctcagctcaacctccgcctcttgggttcgggtaatgatggttccacgtcagcggccctccgcctcttgggtttgcgtgacggttccacgtcaccgaccctccgcctcttgggttcgggtgatgatggttccacgtcagcggccctccgcctcttgggtttgcgtgacggttccacatcaccgaccctccgcctcttgggttcgggtgatgatggttccacgtcagcggccctccgcctcttgggtttgcgtgacggttccacgtcaccgaccctccgcctcttgggttcgggaggtggttccatctcagccgccctctgcctcttgggtttgcgtggtttttctgcctcagcctcctgagtagctaagggaggtgtcttgagattatcatcggctgagggtggaagcggcccccgcagacgctcggcaggtgtcttgatattatcatctgctgagggtggagctgagggtggaaggggagtgagctgacgctcggaaggtgtcttgagattatcatccgctgagggtggaagcggcccccgcagacgctcagcaggtgtcttgatattatcatctgctgagggtggagctgagggtggaaggggagtgagctgacgctcggaaggtgtcttgagattatcatccgctgagggtggaagcggcccccgcagacgctcggcaggtgtcttgatattatcatctgctgagggtggagctgagggtggaaggggagtgagctgacgctcggaaggtgtcttgagattatcatccgctgagggtggaagcggcccccgcagacgctccccgcagacgctcggcaggtgtcttgatattatcatctgctgagggtggagctgagggtggaaggggagtg

SEQ ID NO: 346169 - DNA, 1000 bp, Homo Sapiens
aattcttaaataacttttatttcaacattcagttaaaaacattccatactgtaacaaaaatttcaatctttcaaaagtccaatacccttagtttgattcaagctccatcaaagatgaattggttagtttttaatctggagtttacaagtcatagttaatatttcaaaaagcctaacatagacgatatgtttgcccacaaaaggaataaaaagactaatgaaaatggtaaattatttgctttgggctggaattttagtacctaggtctgcctacatggtgccagtcagaagcatgatttgtgttgtacatgcctttatgtagcaaaatataattctttaataaatgcagtttggtaaacataatcttttaagacacaggacataggggagtaaaaagaaggccttggtgattaaaaagttggaaaccactgaattaaattaccttcaaatccctgtaagtatcctgtttatccttataaacattagctctcactgtacagcattgtaaagacaagcagaagagttagacttttttttttttttgagatggagtttcgcacttgttgcccaggctggagtgcagtggcatgatcttggctcaccgcaacctccacctcccaggttcaagtgattctcctgccctagcctcgcaagtacctgggactacaggcgtgccccaccatgcctggctaatttttgttatttttagtagagacggggttttagtatgttggctgggcatagtaactcctcatgatcaactcgtgacctcgtgatctgcccaccttggcttcccaaagtgctggattacaggtacgagccaccgcacctggcctacactcattactttcacagggttttttcccacatttaaacttgtcactcgactaggaagtcaagattgaaatggctctttccatgaataatttagttttggggttgttgccaaagtgatttataatgattttaataatgatagacatcccttaaaacattctcaa

SEQ ID NO: 346170 - DNA, 1000 bp, Homo Sapiens; identical to SEQ ID NO: 161372

SEQ ID NO: 346171 - DNA, 1000 bp, Homo Sapiens
tcacagacactgatgcaggcgggaggcggccgagcggcgcgggggctggctctgcagggaccccgtgtccccgggcgcgggcggctgcgaggcagcggacgacggggcccgcgccttggtggactccaggctgctgagtccggagtccttgttgtcactgtgcgcccgcgcgcccgcaggctccggggggccccctccgcccagctccttccactcgttgaagttgaggtcagtcagcgggctctgcaccaccacggtgtggcggcgccagctgctccggcgccgccgggtctcgggcgacagcggccgccgcaggcgcacggcgagcatgtcgtccgccgtgccgcggagccttagacgcagcgcctccatgcgcgagggccgggaggccagcgccgccgccgggggccgcagcgactcctggctgctggacgacgccgagccgggcggctccggggcgcggggaccgccccggcccgcgccctcgccgtctgggcggccccgggccaggcggcggcgcgccagagtgtcgcagggcatgaggtggtgcgagctgaaggacggccggcgtgtcaggcgccccccaggccccgcgcccgccgcgccctcagtgtccgtctccacgtggctcagctcgctacgctcgtcgtccgcctcatcccccgcccctgcccgccgaccgctagcgcccgagcacacgctgcggtccatggtggacagggtggagtagcccgacacaatggagcgcgtgtccgcggccggccgctcctccggcgccgccgggggactgaggcgtccgggggcctcgggggcgacggcgccaggcagcggcccctgcggccgctcctgagtccccggcgctgtggcccccgccccaggcttgtgcgcctcctgctccgagtcgtcgtcggtgctgctgcccagcccccgcgcctcccgccgcttcttgcgcttgcggttgacggccgagatgaaggagatcgccagcatctcccgggcg

SEQ ID NO: 346172 - DNA, 1000 bp, Homo Sapiens; identical to SEQ ID NO: 161373

SEQ ID NO: 346173 - DNA, 1000 bp, Homo Sapiens
agctattatgatcattttatttttgtgattattccccacctctaagtctctcagaggataaaagcctgtctgccagtctcctccggccccagttagtcatcttcccatcttccttcagtctcacttagagtccttatgctgcaatctaggtcaccctcccccaacacacacacacacacacacacacacacacacacacacacactacacgcggacacacatacagacacacacacaggtcagcagggcctcagacacagaaaaaagtttaattctgctgcggcggagggtcccggctccggtagggagggggatttggttttggattttgttcgtgtggggatttatttgggagagtctggtccttccagtgggacctgcccgggagaatgagtaaagagaagaaatcaggagagacagggagactagacaaaaccagggagggccgagggacaagagacgacaggacagagagaaaggagaggcaaatagggaaagacaggcactacagagagacgacaagagggcgggatagagacaaacgagggaaacagagaaagggggaccccaagccagacccgaccggaccaggaatgtgcgtggggtggggtgggaggctttggaggccgccgcgggacagaataggatctagtccagccagatacaagaaatgggcccctcgccccggccccgggtgacgggctgggggagggggctcgtgtctcagtgctgcagtgtcagggggccctgcccctccccgcgcttcgctgtgtaaggcaccggctccagcgaggtccgcgagcgcgcgaggggaggggtaggaggggggtcgaggagtccataggggaagggaggccggcagccggtccccgaaccccgccctgggcacgggggcgtggcctcgagccgcagcccgaggctgccccgccccctcccggggacaagggcgcgtctccactctggtccaatgtcttggcgctgcgctttctcccagtcccgc

SEQ ID NO: 346174 - DNA, 1000 bp, Homo Sapiens
ctgtttcataactctggtcactattttcatccgcatctgtcacttctgatgcgtctctaacatttataagatttctctggggagggatttgacgtatccatgccccacctctttctacatttatgggattgagctctccaccagccacccatgggctgatgtctttggaatatggatctagtaccaacagagtcagaaaaagagatggggtccaatgggctacagttgggtggtggtcctgggatacacagcacagtggcctctactgggggatggcagctttccaggagaagagtcgcaagcttgcctgtgggacttgtgtcttgtggagaggacagggctgcctcagcttggggagacagacagagtgttccgggtcccctctttccgccgcagcatgaagtctctgggggcgactggactcatggcatagaagacgttggcattgtcaggaatcaggagcacccggtccccaggaaggacttgaaagagctgatagtcacaggcccagggctggggcacattgtgcttctgcaaggctcgccggaccacgctgggggctttgtcctgactggtcagcaagatgcttcgatacaggttcccgtggtcattgtcgatgctgacgcggatgacacgggcctccgagctctgctgcgccgggagggggattcgagggctgcccagaggcaaagcgaagggccgggggctgggcaggtccaggctcaggggcagcttggtgctggggccctggggccctggagaggccgggggactgccagcaggagcatctctgcttctaggacttgaggggggtgaccctggggacacactggaggtgggggatgaggggtccccgggactcccactaggtgatgagcttttctctcgggcaagcttcgcactgagacgcttggtgaggctgatccgccgtcggatgcgtggggagctggggcaggaggcagctggtggctcaatgacccgggagagccggtagctctgc

SEQ ID NO: 346175 - DNA, 1000 bp, Homo Sapiens
ttttttgaattgatatattttcagctacctagttataaaactttaattagcctaaaatattattaaattttgataaatagaaattaaagtatgccaacatttcaattcatagtcctgtttaccagctacaaagtatgccatcatttcaattaatattcctgtttcaccagttacagtagatatatccagttgtggaaaataagaaaaatgctttgtttttaacagtagtgtttagaaggtaaaaatgtttttcagatagttttttcattgggaaaatattcaacagatatttcttggaattgactcaaattccaattggactttgtagctccttccagaattctcacatatctttaaaaactaactctgaacctggaagacagagtatacttaggcacagaattgccagatataacaaataaaaaatatatttgctaaattatcagagaaatctgaatttcagataaacaataattttaacataggtaatacttgaagtatactaaaattatttaccatttatgtgaaattcaaattttactgcgcatcctatagcaccgatattaagtaaggtattaccaaataataagttctgttaatagcaaaaatgagtacatgtactctgccacaaggagaattttcaaactctagcttaaattattgaatatttcctccatatgtggcaatgttaaaatattataattgtaagttactttttgacttcaaaaaagtaatttacctgataagattttcattctttttttccactgaaaatggcattccagcagaaccattaaataattccaaaagtagtgtgactgcagtgttcataagttgacgaatgagttcctgaaatatgtagtcaaccagcattacaaacttgaaaaatgtttctaataaacgtctatatttaggcagcttgaaatgtgttgtgtcatcttcagagagttttgactcaaaatactctttgatttcattcttttctgcaacctttagaaaa

SEQ ID NO: 346176 - DNA, 1000 bp, Homo Sapiens
ctcgcccggctgtgcgtttttattggcgcgtctgcagcgacccccagcggggagaccaagggtgtggccggggcgaccctcagcgcacctgggccaggttgtgcctcttgtacagcagcgcgcgtctcttctcgcgattgcgcacgaagacgcgcagccgcgcggtagggaaggtcacgggcgcgggccgcgaacaggccgggccctcctctgttagccacgggcactgcaggcagctggacgcgcagggccggccccagggctgggcgcacagagtgctgcgcaggaaggccacggcgcccccggacagccccgcgtagcagcggctcagccggaccagccccttgcgcagtcctctctgcaggtcgcgtgcaccctcgctgctcaccgggtactcggcgctcagcatgatgaaggctgtcacaccgatggcccagatgtctgtctgtggaacagccccctggccctccaggagctctggagccatggtctctaggtagtccttgaacttgtctgagggcagcaccttctcctggctgaggctctgtgcattgcccaggtccacgaccttgagcaggttgtattcggtgatgatcatgttctcggacctcaggtccaggtgcaggatgtgctggttgtgcaggtactgggtggcactcaacatctgccacaggtagtccttcacctcggattctgagtaggaggccctctcggccaggcaggggagcagctcgggcccagagcacagctccaagatgagcaccaggtgccgggggctgaggtaggctgcgtgcagctgggccaggtgcgggtggcgcaggcccttgagggcctcgtattcgcgcagcactgctgtcttgtccttggggtggtaggggatgatcttggcggccagcgcccgcccgctggccttctcccagcattgccgcaccacgctgaagcggcccctctggatctgtgtctggaatgcgaaggtctttgtgctgggcaggggttgggc

SEQ ID NO: 346177 - DNA, 1000 bp, Homo Sapiens
tcagcaccaggggtctcgggaggctcggccgcggcagagactgtcgctccgctgccaggcgctgtggatgaggctcaaggcatcctcgaatttcttcttgttggaggcttcctggatcgccgtgtgggggaggtccactagtccaggcttccacggggctagagcgtagcatgtgctcaaaacccgcttgtgcagggctctcatgagcacgctcccacactggcactcagcctgatagatggttttccacccagagttcagtgcagacagcaatcggtccagttcagaagtgcagctcaggtagatgacccagggcgggaggagctgctggctgtcctgggagaactccaagacgcagtactccttgcccggctcggtggagacggcgctgatgtcgcccagcttggctgtgcccaaagagcggaagaagctggtctggcaatcctcatggcacgtaaagaggcggtcatccgtgaggaccaggcagcagggtatgcaggggctgggagctacgccctgggggatgacccctttggacacagcctggcagagatgctgcatccactcggccatctcggcctcgctctcggcacttagctccaggcagggccggtcggagagaatgacctggaaggcgtggggccgatccgtggtgttggctctccggcagccaccgcactgctccccccccatgttcaccgagagcagagggatgacgtcggtgcggtccgggtactggtagaggatcccgttgatgctgcggccatgaacctgaggcaaaggacaccaggggctgtcatctacggaaggcagggtgaagaagggcctgagcaccacgaagcacgtcttccagtgttccttgcccaggtaggaggtgcccgccttgtagtgcagcatgccttctttggtgatggtgccctcggggggtgagcagtggcagggcgtggggcccagggactcgtctgtggggtcctcccagtgcacaaggccgtagaagcgc

SEQ ID NO: 346178 - DNA, 1000 bp, Homo Sapiens
ttttcattcaggtgctctttatttctgatattccttggtaaccatccttgcagggataacattctcatcactgtagaactttagcttctctttccgactctgtaggacacgggtccctgaagttctcattgatgtcacctcaacattttcctccagccttgccccctgctgttatgtttttttccctcacactgagcacttccctgtgcttcctttaagttgcatgtggcctggacacagtcactcatgccagtaatcccagcactttaggaagctgaggcaggaggatcccataagcccagctgaggcaggaggatcccagagcaacacagagaaaccctgtctcaaattgtctttaataaaaattttggaattattaaaaaatgaaataaataagaaaagagaaaaatagtttgcacctacatagtagattttagtgtcccagtgcctggaagagaactttggatttctctaccccgctaggcacgccttccctagcagcaaagatggagctccagttcctcagacggtgatgagccacaggaagggcagggggtgggaccaatgaagatcctcttgggctgcctgacttccctcagtgtacacatcagctcagcccgaagtagggcgaagatctcccaatcgacacgaaccaaggaattcaaactctcctcaggggcaggatacgtctccaggcttaacttgctcagcccactggtgtggcgcaacaggtccttcagggcacccatagacatacaatttctgccaaagtagaaggtggtgagctgggagcagtggctcaggccaggcaggatggcactgagttgggagtagtggatctgacagccctccaagatgagggtttcgagagaggcagcaattttctctagcagagctccgaggggttcaagactgatgcggaacagcagcacgtagctgagattcagatgctttaggtaaccgaggcttgggtactgggagagacacttcatgtcttctt

SEQ ID NO: 346179 - DNA, 1000 bp, Homo Sapiens; identical to SEQ ID NO: 161375

SEQ ID NO: 346180 - DNA, 1000 bp, Homo Sapiens
tcctgctccaggagtttttattgaacattctggtggggtggggtggggttgggaggtgtcctgtcagtcagtcatccaccaatagcctgggggtccgagactcccgaccccattctgggcccgtcttttggcctccctgggcagcgcccaggacagagggggccgcctgcggggctgagtgggctttgtatggggggcagcatggaaggctgcccgccaaggacaggccctgggttgagagggcctgggaaggtgccgccaggctagaggtcgggaagggcgcctgagcagacacgccagcatccgctgctaggtgctggccagggctggggccttggagccccgctgcttgttcatggcactcaggagctgctgcacatatgaggtcagcaggtcatccatcttatagcccagggaggtctcgcacagcaggcggctgccacggcccaggctccccagcgccatgtggaagtaggtgctgccgctgctccagctggagatcttggtgaagggataggtggtgagcaggtccttggtcttggggtggatgagcagaaccccatgtcggttgatggcgatgaggatgacgtccgggtaggaaggctccgaggtttgcttcacctcgaagaaggcggatccgaaggtgggccaccggcagatccacttcaggaaggccaccttggcctcctccactgtcttgtccttatgcttgtcataggctagaaggatgctctttttccactcctccgaggacatcaggcgtgtgaggttctcaggcaccagttccctcaggatcttggggacactagccagctgggaccggtcgttgttgaactgggccttgtagatgaggcccgccaggtggatggcatcctcccgcgaacacttgtggaatccgcgcaggtacttgggcagctcctggtggtaatggagtatggtgtctgcattcacatccttccctggagatatgttgagccacaatttccgcatgaagtacacc

SEQ ID NO: 346181 - DNA, 1000 bp, Homo Sapiens
tgtacaaacaaaaatcactttattcacatgccagaacagtgtttgagtagatagttttaagggcaatacaatcaatttcttgaactcagatttgaatttttaaaaaattatattcaagctctaagtattttacttacagaattttgcacatggctcactcctttctgcacaaaggtaaaataatatctttatttgcttaattccccattgttttgttgtttcaacatgattttgtaccctcagtctttcaacgttagtcaaacgttacattttctttcactcttacccttttttgagcttcatttcctctctttatgttctcgagtatagcttcgaggtgtagggtattcattcccaagatccacaacaattacctccctagaaaatgtcactccttttaaaggtcttttttggctttcaacaactgaaggagttctagtgacagatgtgtgtattttctgcaaaccatcatcctcttcttgaccagtttctccagcattctcaggctcttgcttctcatttatttggttctcctcttctgcctccatgtcccttctgttttctaagggtgtggccaacacttccttactctgtctctggacaagaatgccaggcctcatcggcacattcaagttcatgacttgcattaagatcctttcatggtcctctggattgcttgtcaccactttggcagctgcacagtctacacctccgtttgcatctgtacaaggcactttctttgtctctttacctttcctgccttggaaactgtaatcccagctacctgggaggctgaggcaggagaattgcttgaactgggaaggcagaggttgcagtgagctgagatcgtgccactgcactccagcctaggcaacagagcgagactccatctcctgcctgcagacttctttgctatggtggccagagggtgtccactcgtggtgacaggatctgcagcaacttgggctccagatggtccagggcatacgtgaatccccaa

SEQ ID NO: 346182 - DNA, 1000 bp, Homo Sapiens; identical to SEQ ID NO: 161376

SEQ ID NO: 346183 - DNA, 1000 bp, Homo Sapiens
aaagagagtcttgctctgtcacccaggctggagtgtggtgacttgattttagctcactgccgctttgacctcccaggttcaagtgatcctcctgcctcagcctcccatgtagctgggaccacaggcattcaccaccacacctggctaattttttgattttttttgtagggataggggtttcacttagttgcctaggctggtcttgaactcctgagctcaagtgattctctcttcttggtctcccaaagtgctggaattaacatgtgtgagccactgtgcccggtgtcctatcacatcgttaaattttttctgcatagcatttattgctagctttaaaaaatatttgtttagagtctgtctccattcccacccctagaatgtaaatatgatgggaagagagaccttctctgtcttgcttactcctgaattcctagtgtctagaacagtgtttggcacataacaggcactcagtagatatcaagacaggcagtgggttcgaaatcagggggtcttagatctggtcttggcattgtccctaagtcactgtttgtctgtgatcaagatcctttccctctttgggacttgcttttttcatctataaactagggggttgacgtagatatctccaaactcccttgtagattcattacaacttcattaagctacaaaggaatccttgacatttgcagcaaaagaatccctctatgcctttcagtcttccaagccatgctgggggtggggggacttttcttgtctaaaggcagtgcaaagctagcactagcactggacagtgaagcccttgaaccatccccctatggcaactgttgcccaaatatccagtacctggcttgttcctgggcttgtttcgtggcttcttccagagccagtcttgctgcttcctcttctttttgcctcctctcctctgcctccagccgagccttctcttctgcttcctgtttccgccgctggtactccagtcgttcctcttcagccatttcca

SEQ ID NO: 346184 - DNA, 1000 bp, Homo Sapiens; identical to SEQ ID NO: 161377

SEQ ID NO: 346185 - DNA, 1000 bp, Homo Sapiens
gtacatcaaaatgagttattttaatgaatgaaaaacattaaatctaccagtctacagaaaaagaaaatgtgtatttgacatcgtttaaggtggctcttacatcaactccttacttggaaaactggtatttaaatgtcaagaattaagcttttctcctgtcttcccagcattgacgatttcgaaaaatttttgatactattctacgtaacactgctttagctaagtaagtatatcttcttagttccaagtatcctatccagcctgctctccagtcattcctgcttaggactccctgtggctgggtgaaacaggactctttcccttgctccagatgagagaccaaagctggtttggaagtgggtggcactacaaaggccacagcctcatagttctccagcatcacatccctgtacaaggccctctcggcaggcaccatgatggcccattccttcgtagtgaagtacacagccacgtcctcaaaagccactgattcctggggcctggttgttaaggacacagctgtcatcatctgacctcttttattcctttctgggtaaaggtaaaagtctcaggtgctgaaggtaaagaaaaaaaacattaacgataataactttattgaccataagtcctacaaacaacctctgacccatctgttttgaaggctatatcaataaccgttcattagttattgcttattatcaatctcacaaaggcgagatagcaggcatacagagaaatgcaaaaaggaggtagaatcatccacggaatgagtgatgaaaaagtggactgagaaaactataatttcagctaatccatagaatacatcacaggacaggaaacagaaaaggaaactaaggtagacagtggacagagtgttataggcagaaaagaaagttggaattctaaacagttaagatccctgaaatccatacagtacagataagaatgagttatgtagtacagataggaatgagttatataaaagaaatccattaaacac

SEQ ID NO: 346186 - DNA, 1000 bp, Homo Sapiens
tcacacgttcgctgggctgtagcacagcaggtgtagctgcaggttttggtcccagtggcgcagtagcaggaagagccctcgggctgcggccttgagggcggccaggtcaaggccgtcaggcaagtgctgggcccgcagccagcaatcagccttggccgctgtcagttcccactcgtcgaaggcagcggcgcatcggtgctccagccaggcgagtgctacggcagtggcccaggtccggccccgcaggtcggtgccgcccagcccttccgccccctcggaggcctcggtgtctgagccccgcccactgtccacctggcctggcccctcagagcccgagctgggggacgggctgcaggaggccgtggcactgtcaccctggccaacaccagggcccagaagtgcccagggcaatgaggccgaggtggggctgaggctggcgcggtgcacggcaaagggcgaggcacggcagaggcgctcctgcgagatgcgcacagcggcgcagaagggcgcgtccaggcggaaggagcctggtgcctcctgcagccgcaccaagggcaggtagtcatggtcgctgccttcactgttgttggcctggcccgggtcagggctacagagtttgtgacggcggcccatgctgagccgacagggaggacggggaggtgggcggcgaggaccttccgtgggagtggcagggtcccccaaagcacgcttggagttgccattttggtccgagtcccaggcgcctgctggagagcctctctgaagtcctttagagtagacaacagtgggcagaggagctgcatctagatggctgtgagaggcaggaggggttcctgggggctcagcgggctttgtctgaagggctcgaagccagcacctccgggcatggccccggtcagctgtggtctctgcccctcctcggagggccagctgctcattgtcccggaccacagaggctgctgtcagccgatggagtgcttggtcccaagcagcttctctt

SEQ ID NO: 346187 - DNA, 1000 bp, Homo Sapiens
ttttggtgattgttataatttttggaatggttcataaattttccaaattcttttaaatttgtaatactttcatcttttttcttttttttttccaattgtgaaccattccatattgcatctttattgcaaaagtcaacatgcttcttagaaattcagattgtaattgataaaacaaacattacatatatgaatttaaatgtataaacagttagaaattcaacaatatctcctattatactattacacaagttcacaattttgtaaaaactataatacaggcatactatacatcaagaggaaccactattccttttcacatgatttttttcttttttgaaataatgatccatcaccaaggacccctttcaccttaacaagactgttttccaatttatcatcttagctggtaacaacatttcttcaatgttacataaagaaattgagggaaattttgcaatacttggggttacctttttatcttggacagtgatccactagtatatcaggctgacctagtcaactggtggctattattgctgatcagctacttaaaaagatgtcatacacattaagagggacagaacttgctttagatgctgtatgttatttctgtaaatgaagatgccaagaaaacatgtatggcagttattcacttttaagtgaaattctaacagttgaagatttgatggtggaagtaaatcccaaagggggcaggggatatatataaactattttatgctaacctgaagttttccagtattataattaactcacttcaaattcatctttgagtcaaacatgttttaaaattctttgaaagcacacttttaaagtatttttagtcctgtttaaggtgtactgaaaacttatagaaagggcctcaaaccttactgaaaaaactgtttttcactttaacacacttctatcttctgcccccaatactaaaaagtcaaattttcaactttttactgagagtgaaataagatgtccattttgaggt

SEQ ID NO: 346188 - DNA, 1000 bp, Homo Sapiens; identical to SEQ ID NO: 161378

SEQ ID NO: 346189 - DNA, 658 bp, Homo Sapiens
acgagagaagtcatattttcaacagaaaaaagtaggataaaattttgtaaatagttgttcagaattcagaaacatatagctccattatactcatcttcattacaaacatcataataacctttatactacatttgttcagtagtaagtctctgatgttgaacacaatatgacgaattgttaaaggcttttccacatttttaacacttgtggagcttctctctactatgaattgtcttatgtctaatgacgtgtgagaacgagctcaatactttgccacattcttcacatttgtagggtttctcaccagggtgaattctcttatgattagtaaagtctgagagccacataaaggttttgccacattcttcgcatttgtaaggtccctcttccatatgaattctcttgtggttaataaggattgaggagtaggtaaaggccttgccacattcttcatggatgtagggtgtctctccagtatgaattctcttatgttttctaagggccgagatccacataaaaccttttccacattcattacatttgtagggtttctctccaatatgaattatcttatgtttagcaaggtctcagaaccacctatagcctttgttacattcttcagatttgtagggattctctccagggtgaattctctttt

SEQ ID NO: 346190 - DNA, 1000 bp, Homo Sapiens; identical to SEQ ID NO: 161380

SEQ ID NO: 346191 - DNA, 1000 bp, Homo Sapiens
tcacaggatggtgcagaagacactgcggttgctgtggtaaccaccttccacccgggctgtgatcctcgttgccatggctgtcaccttctgcccattgtgggctgccgagggacgtctgagagaattttcaaggtggggccgtgctggtgggttcaccaggcgccacgtatcagactttttcttgaagaccaggaacttgttgttttgcatgatgcattctcggttgtttgagatctgctgaaagatggtcttactggttttgccctggaagatgatgttttcctgcaccagggccttggcacggccccgcacggcgatgccgtaggcccggaacgagtggatccggttctttattacacatgcagacatactcactttagtgtcggacctgggcagcagctgcagcccgctgccccggttgccaatgatatcgttttcaatgacgatggtgctgtcgcccttggtgataatgccgtggcctctgttgtcatagataccattgccccggagctccactttgcactgggcctcaaccttgaccccactttgccggttgcaggagatgctgttgttggccactcgggtgggttggctgctctgggccacagtaatgcctctgtccccattcgcgtggatcacattggtgatgacatgcagtgcctcgctgctctggacatagagtcctgaggctccattgtgattaatactgttagactcaacaagagctatggtgatgggccggcgcagtgggtcgtcctccttctccagctctgtctcccagaggatggcgtccccatcctcgctgaagttctcttgagccctgtggcctcgaggtaactcgctggagccatccttctggctaaatactgccactccatacaggccattgtagctgacgtggttgctggtgacatgggggaggctggacgacatcatccacacaccacagcccttgttagcgtagatggtatttccttctatgaggcctttgccttcgtct

SEQ ID NO: 346192 - DNA, 1000 bp, Homo Sapiens; identical to SEQ ID NO: 246635

SEQ ID NO: 346193 - DNA, 1000 bp, Homo Sapiens
ctgaggcgtcagggcagcaggcggccgccaggaaggattcagacaactctgcctgggagtgagggctctgctcagcggcctagacctgggcacaacggaacaggccactccgtttctcatcacagacctgaaggcagatggcctgggcgtcgggcttcctctgctctctggcggggcgattttcacggtcaccaggctgcggacaggctgtgggggtggcgggcggtccaaagccaccgcttcacgtaggccaggggagccttggagaaatcaggcctgatgttgctcagcagcggcagcctgttgggaaagcacctccaggcctcggggaccatctctctcaggacgcggatgcgggcggggaccatctctctctggatgcagatgcgggtgtagtcccagctgggaggagtggtgcggaggggccggatgcggacccagtgcttcctgtggaagtaggtgaccttgcagttctcctggacctgggagctgaggaagggcctggactgcagaacccagtgcttttgggcggggcgcagctttctggcaagcggcttgggccttccagtagacactgggctgccagaagtttccgaaatctttaaaaatactcctatcacagccaaaccattttcttccagtgctgcatcctcaaagttttcaaatttgactgcgttccaatgcactaagtgcagcatgtgatctctgcacgttggctccccttggccttccaacatgaggggaaacagtttgaggccctcaccagatgcagatgtgagcaccatgtttcttgtacagcctgatttatctgtagaatcttcaaattccacgaggaaagagtacccattattccagacgtggaggcaggtggctgggtcataagagatggtcagtggttttaagccgggatcataaacactgtccctccaccgaatgttgatgggtgactggcgatcgcccccaggaaccaggtccacgctctcccagagtggatgcactg

SEQ ID NO: 346194 - DNA, 1000 bp, Homo Sapiens
tcacaatacggcctcacaccgtccctgggaaaggttggtctcctcctgctgcatcagatggatgatttcattgtacatacggtgaggagcatccaaaccccagatgaaatccacgtgagcccattcaggaatattcttatggtagatgaggttggtcacctcagagagcagcattttcacgtcttctggatttgaaagccagtcctgacctcctgtccacattgctgtagggaccgtcatatctctgactctgtaccttacaggagttggctgattgcatttttccagatttttggtctcactcccccagtcaaatgcccggagttcaccagaattcactgcctggctccagtgtagaatattttgcacagatgttccagcaagagtgtgggcagcatatacacttgctcggctctgtaacaaaccatgagtattcatgttcatattgttggtgttgaatccacccagaagtaacatgatattactacaaatctgatcaagaatcacctggccacaaaggtaaataacaagttgtctgagaaatctggtctgatacagaaattcttttttgccaaacaatcccttgatcatcatatctggcagcaacaaaaatttggtcccggggctttttgcatgcttaacagtggctatgggtgctaaagcaaaatacattttgattttctgagccagctctggcatggtggaaaatgcaataaagcccatggtggtgccctgtgaatagccgacataatagatcttttcctggcccgttttctgcaaaataaagtttatcactgcaggaaggtcaaacctagccatctcatcataactgaaagcccagaactcatcttggtctatggagagtgtcttgtgttttcgagaccaggcgtttcccctgctgttccccatccacacgtcaaaaccagcatctgccagaatgaagcccaggctattgttgggcaggttggaaatccagttgctagcacctccaactaggcca

SEQ ID NO: 346195 - DNA, 1000 bp, Homo Sapiens
agctttcaaattctctttattaaaaatcttttcttttctcttttgtaaaaacaaacactttgcagtcagttatacagatcaggaaaagtagtgacaatttataggacactcaacaaatttcaatactttacaagttcaaacttaacttagtgttttggtttttctcataaattcaaaaaacaaactctggtccagttcaagtataatctaattatctaacaggtcacagcctcggactgtccaagaatgggaaaccctgatactaacggctgctgctcacaccatcagattttccaaattctttggggatactgtctagatagatgctattttgggtgttaacaatgaaaagacaattatacaggccttttgttgtattaacccagggtaaatatgaatctgttgcttaagggagcaattgctcttcagcatccttttttgggagacactttgaaatggttgacaaaacactgaagaaaagctttaaaaaataaatcaatatttacctggttgccattaatactgcattgtgtgtggcacacatagaaataaaaagtgcaaatcatagggtcggtgaaggaccatgccaatggaattgtataaaaataaataaaaataaatacgtatgtacacacaagtatagactcttagatgattttaaaccgaaggttctgattgaaggcagatagcgccttatctctctccctcccaggggctctccctagctctccaatatgaaggccagtctatcacaagagagccataacactacacgaccatctggatttccatggaaatgctgctggggatggggggtgggggaaggccagggtggagtggaatgagctggtaaaatcttctcccactttgctaggggataaagtgtccagtctctctgataatgtacagttctaacctctgataaaaattgtgggctatttccagcaaagttcagcaagaaggccaaagaactgcccccacaattcccttcagtaggaag

SEQ ID NO: 346196 - DNA, 1000 bp, Homo Sapiens
aaatagccaataatctttattttgcacttcccccacccctcacccctctccaaaaaccactaacgcgcatttttgtgcatgtgaaaatattgtataaagtatttagaatgatctcaaattaatcaaacaaaaaaacacatatctcaacatagatgctttgtttcttagcggggatagaaaaattctggcctcttgaacaacgagggcaatgacaccctgtgctccgaagaggtcgactccatttccactgatttgcaacttaacattcatggcagaaaaccgcatttctctaaccacataatgttttaaaatatgactaattcatacactaatatcaatttacttggcatttaaaaaaatcacattttctagtaatatatttgtattaggttcaaagcccatattctagcatccaacagatccagcacatgggcctacactgggattatttcaaaatcaagtaaaagtccgtatttatcccaaagttgctaaaatatgctaataaagttaaatttgatgtttttttaacattaaaaataaaatatttggtttacctctcagacatctataacatataataaatagtgggcagtataataatataataaagttttgtgataccctgaaatttgatgagttttcttaaaaaaattcataatatacttcatttcagccttaaagcacaatattaatgaacagatttgtagaaataaaacaatataaagacaaaatgctacagtatatgtgggttttttgttgttttttttttttactttcatggaaactacatgtccttttagtaaaagtctgtcaaagaaatttacaaaaacaaaatagacaacaaacaaaacaacttcaagtcataaactctaaatttaaattgccttgttttccttccaactgctcgggccctttccccaccatgtttccgggcactgcgcaggctgagctcaagggaaatttctttgaacgatggctttttctctagccttgtttctgt

SEQ ID NO: 346197 - DNA, 1000 bp, Homo Sapiens
ctaagctacacttgctgctgctgctaccacaactagtagacacgtacttgccagcaaggccggaataacatttctaatccagggactattttctgtgttcgatgaggttagaatgctgtttccaattaacccattgtctagctccagagtaagacagattccactatatgtgatgttctcaactgtgccaattttgtattccggcagcatagcatatacaaagtttggatggacatttccgtcaggcctccttagtttaaacattatttcctggatttctttgttaggacaccatttcagagaactgctgttgactaaacataaggccctattataccaggatatgatagtagaccctggtctcagggtaattaatacgatctgttcagggttactagagtttagatagtcagtgagtttagcaaaaaataaaccaattctctctctccttttaatgaatgagtagaaactgttttttgtgcgcagagtgtaagtgtggcagggactacttctgggtagcttcagttcaatggtcaaaggcatctgagcaaccagacccccggaatcagtggcacagagaataaattcctgaggggaatattggaaatccagttctaggggatacccatacaatatttgatgagtcatgttaaattgcagccagctttctgggcccgaaggatactcatttactgattttatttcaagtgtcaagtgagttgagttgccatcttcctggtcataaaatgtgtcaggagggatcgggaaatgaaatgtgtgcccaacagttgctgttatcaattggattgaattaacaactgttggaaatgtgttgggttgactaagaatatgcatcatagtttttgagcccatattttcaggtaactcaaatgcatttgaaaatttagacacctcagaaagggacagttcagataagtcatgtaattgagtaaatgatggggtctccttagaatatgactgagttttgataatcacatca

SEQ ID NO: 346198 - DNA, 1000 bp, Homo Sapiens
gttccgtactaagaaaaattcttctgccttgggatcctgctaatcggtgaccttacccccaaccctgtgctctctgaaacatgtgctgtgtccactcagagatgaatggattaagggcagtgcaagatgtgctttgttaaacagatgcttgaaggcagcatgctcgttaagaatcatcaccactccctaatctcaagtacccagggacacaaacactgcggaaggccacagggtcctctgcctagaaaaaccagagacctttgttcacttgtttatctgctgaccttccctccactattgtcctatgaccctgccaaatccccctctgcgagaaacacccaagaatgatcaataaaaaataaaaattaaaaaaaaaaaaatgaccctatgaaatcgcaaaaaaagttgttgagctggccttggaaggtaaatcaagtcagctgtccttcctcacgcattttccctcactctgaggaaggtggcatcctggatttttcctcctttatatgtgcatgtctagagtggtcatttgtccaggataattagcaggcaagtctctttaggcatagggagatatcaaaacaacatatttgaaagtgtctgatacaagatctatagggtgtatagtgagaagtagactatcacatcaggatgagcactgggctgtacgggtccttggtcttcccttcctgacgactgacgctaagcacagactcactgtcaggccccgtggggcaggtggaggtgatgtcggccactgccatcatctgcagcagagtctgaggcgctcctccatcccactgcctcctgtttcccacagcagctacagtctgcgtggaaaaccctgcttctgggcagtgaagtttttcaaatgctttgtctgtataatctccatgctcctttacacattcatattccttaaacttcatgccatcctcaaaggtcaaagtttcatttggtatatccattgcctcttcctcttggaggatgttttcatcag

SEQ ID NO: 346199 - DNA, 1000 bp, Homo Sapiens
ttttttccttttcattctttattgcaactctgattcaaatatttttatactgaaaggtgatatattgcagtgcttaagaccatgggttctagagccaaaatgcgatttttccagactgctttttacttcggcttgacaaatagggaaactgaggcagagggctaatggtaacatgctcaaggctacatctagtgaatggcagaggcaggatttaaacccacccattccccagtagcaccccttgcactgtggagggcttggtaataagccatggtctaggagatctgttggtgacacaatgcaccagagccctctccactgtcagaaaatatacatgcaggttcacatccctctaaaaccttgaggctcatgaagtccacacataattcctatgaagagattaattttataagtaaatcacaggtgagttgaatttcacccttgtgaatgcttacaaactcatttttgtgtgtgtgtttcatcttgatttaggtaagtggaactgtcctgcaaaattttcaggagaaggctccttccagatatatgtagttctgtttctggactctctccatctttgttcatttttcctgggaaaaccaagcagcagacccttgctttacaaaccaaatcattgaatctccccaaatgcaaagtcatttagatgttggtaagcctcaggagagatttgtgatagaattattacatgctggagagtttgaagctacctctggtggagagggtcctttgagaagtgtagttaacacagaacagtcttctaggtcttctagatttttgactatctttataaggctttccactgtgtcccaggacagcatcttggaggcattggctctgaacttttcctctaggtcctcctggctcagtggttttctccagtgcccatagaaggtatcagagcgatctgtgaaggtggctccatccttgagggtgacacttatttcacagtacagtatgttgaagcttggcaagttgtccggag

SEQ ID NO: 346200 - DNA, 1000 bp, Homo Sapiens
tcattttcccgcattggaacgcccttcaatggacagctttacctcctgtggaatgaaagagggacggagcagcgcagcccgtgcctcctccccttgcatgctgtatctttggaagctcggggctggccagcaggcctgagcaccggactcaggctgggaaggctctaccacacgggagccctctcctgccggctggctcttcccctcactgtcacatagctctctggatcccaagaccgtcctctcaggcctttctcgggggggacccagctggcttgggggagcacagctggcctgagaaactgagttactgttcaagctctgtaaactgatagagatgcagacatctcccacctgtagccgatggcagggcagagagaagagttgtgtcgtccgcccagggctgcaagaggaccaaccctggccatatacaaagaaggggtgctcggggggcacttcgatgctcactttgctctgctgctcaccaaccacaaaatgcagcatgacaaatccaggccattggctctcctgaatgtccacgaccgtgctagagtcaatcttcagccccccgctcacttcggcactgcgcacaaaatcctgggtctggaggtcctccacccgcttcagctctcccgtagccagctggatgatggcgcctttcatgaaatgggaaggcaagtgagaggaggtaatggggggcggcgttggctccttgtctgggaaggtggctctggcctgcacgtccagacttgatgctaccaggatctccgagcccacaggcagcaggcctgagtcagttccagtgggcaccaggttgccattggctacaaccattgctttgggtaaaggtctatgttttactggttcctgatgggactgagggtagaacccacgggcctgacttttctctgccagctctgcagggttcctggctgaccctcgcccctcaccctgatggtcgggggtatgatgggataggttgagggggctgggttcctcc

SEQ ID NO: 346201 - DNA, 1000 bp, Homo Sapiens
tcagccccagccgaagtcctggcccgtcatctggtagaacctgcggttgaagggccggtagaactcctgcaggcgccggaccagggcctggggcacgcgtgggtgtggccggcccttggacttgcccaggcagcggggacggctgccgccctgggccttcttgaggcaggggaagcccttggtggcgttgaagtagaagtgcttgtccgtgacgacccgtttcaggcccaggaagtcctgcacgcggccgacctctccggccgggtcgctgaccagacgctccccgctgacgaacaggaagtgggacagggggaagtagcgcagccagtggtccaggtgctgggcgtacaggccgatgcggacggcgctccaggctgtgtccacggggcccaggccgtggcggaaggccagggcgcggaagctgggcaggcccggggtcttggagagcgtctgggcgtagtcggagatggcccgggtcacggggttccgcaccaccacgatcagcttcgtgtccggggacatggcgtggatgcggcggggggcctctcgcgtcacgaagtagctgggggtcttctccatggtgatctgcccatccagggttcggggcatcagactcctggagaagcgtctgggtcctgccacccccactgactccccaactggccttgggcagggtcctctctgcaggcgctgggtccaagcttggggatgagcagccaccagcgcgggctgcttcagctgaggctgccgcacccccacgtccatccggtaccaggcgaggccgcgctcgtagcacctgtcgaagaagtggggctcagagcccagcgcgcggacgtcggggtgcagccgcagaaactccagcagggcgcgcgtgccgcccttcttcacgccaacgatgagcgcttgcgggaagcgccggcggccgggaccgctggccaaaggcaggccgggtgctcccgggcggtggacggagctggacggctcggagggcgcgggggcc

SEQ ID NO: 346202 - DNA, 1000 bp, Homo Sapiens
tttttttttttttttttgagacagagtcttgctctgtcgcccaggctggagtgcggtggcaccgtctcggctcaccgcaagctccgcctcccgggttcataccattctcctgcctcagcctcccgagtagctgggactacaggcgcctgccaccacgcctggctaattttttgtgttttttagtagagacggggtttcaccgtgttagccaggatggccttgatctcctgacctcatgatccgcccatctcggcctcccaaagtgttgggattacaggcgtgagccaccgtgcctggcccctattacctgttttttaactaaattttactggaatgcagccacaccccttcagtctgcatattgtttacggctacttttgtgctgtaactgtagtgttgagttgttgcaacagggatcttatggctcacaaagtctcaaataatactacttggccctttacagaaaagtttactgcctatgctctaggattaaaacacagtatttttcttttctaatttctattttatcagatactcaaatttacaaaattggtaaaatggggaaacataggaaattatagtaagcatttatatttttcaattccaaacaccactatatcaactataatttcatttcttttttgtctgtttgcatttaatttttgctgtagcaagaaaacttgcacttttttttttttaagacggagtcttgctcagccacccaggctggagtgcagtggcaccatcttggctcaccgcaacttccaccccgccaggttcaagcaattctcctgcctcagcgtcccgaggagctgggactacaggcgtgcaccaccaccatgcccagctaatttctttatcttttttagtagagatggggtttcaccatgttggccaggatggtctcaaactcctgacctcaggtgatccacccgtttcagcctcccaaagtgcttggatcacaggcgtgagccaccgcgcccgacccatttttaacatt

SEQ ID NO: 346203 - DNA, 1000 bp, Homo Sapiens
ttatgttaggtcatgaattctctgatgtcgagtaagctgtgtaagctgtttaaaggccttcccacatgtcttacattcatagggtttctcgccagtgtgaacactctgatgtcggctgagtcctgaggcatagaaaaaggctttcccacattccggacattgataagttttctcaccagtatggattcgtttatgttgactaagttgtgaaggacatctaaaggccttcccacattccttacaatcataaggtttctcaccagtgtgagttcgctgatgtcgaattagttctgagccgcaagtaaaagatttcccacattctttacattcataaggtctgtcaccggtatgaattctctgatgtagagtaaggtgtgtacgctgtctgaaggacttcccacatgtcttacattcatagggtttctcgccagtgtgaatactgtgatgtttggtgagtcctgagaaacggacaaaggcttttccacattcatgacatcgataaggtttctcaccagtatggattcgttgatgttgagtaagttttgaacgacgtctaaaggccttgccacattccttacaatcatagggtttctcaccagtgtgaattcgccgatgttggattattgctgagcgaaaagcaaaagattttccacattccttacaatgatagggtttctcaccagtgtgaattcgctgatgttcaattagtgttgagcgagaagtaaaagatttcccacattctttacaactgtagcgtttctcaccagtgtgaactggccgatgttgaattagtgctgagcgaagagtaaaagatttcccacattccttgcaatgataaggtttctcaccagtgtgaagtggctgatgttgaattagtgttgaatgagaagtaaaagatttcccacattccttacaatcatagagcttctcaccagtgtgtatttgctgatgttgaattagtgttgagtgagaagtaaaagatttcccacattccttacaa

SEQ ID NO: 346204 - DNA, 742 bp, Homo Sapiens
tttgtaccaggtcattctttataattaaactcacagtatccaccccctcgagccggccccgcctccttcctgggaaggcaacgccccctgtcctccggggctccgggtgggtggccccagcccgcggggcggtgcgcaagcgctgccggggcccgcccgggcgtcaggcctcctcgttcggctccgcccccagggcctcgagcatgcgccgccggaccagggagcggcgcaggtgcaggcggtagtcgcccagcaggaggtcgtcgtggcgcacgatctggtgcgcaagcccgcggggactgagcccggagcgcagcaagcgcgagcgcgtctggaagtccgtgaccgcgatgagccaccggttccggcgcccagcagtcccacagatgacgttcatgttctcaaagcggatgctgctcacgcgcccgctctccatggcccctggtaactgggcctccagggcttgcagcacctccaggtgggtaaaatcctcctcgggcaaggtctccatgcagaggcagaggggctgggaagctggtggtgtggggaacttccggatgcacgggagttctcggtccagtgcctcgtactctgcaatgacctgccgcaggtactgctttgaggatttgatgggcctgcccaggctccgagcctgcatctcctctggggtctccaggtccataaggagggctcctgaggacagagaacccagtgtcagctgccctgagccctcctcagccat

SEQ ID NO: 346205 - DNA, 1000 bp, Homo Sapiens
cacaataatctactaaaaatattttgctttgtcaaaaggctttgaccccaacatttgtacatattatcctaaagataactgctcaacagttcgtgcaaaatgaagacttggagggaaagtgtagaaaagaaaactacattgaagtagagaaatcattgattcccatgcagactgcatgggccaaactccaaattatttggaaactagatgcattattttaggtgttctacatttgtgtaactttcccaaaaatatgatttatttattttccatgtggactttttcatgcgtctctcagtctctctgtgtccatccagcgacatggtcctcaccgagggccccgggcaggtcatgtgcggcctctgagatgctcgggttggtcttgtctgtcaatgtcccaagagcaggcgcaggaacttatgcagagctaacaggagcagggacaagagtgggtctgtggtgtagctacggccggtgcccgagccgtgcctctggcgcagcaggaccgcctgtcccgatggcggcgacgctgacgaggcagcagcagctgccgcgactgtggtggtgggcgtgtgggccgccgaggctgccgcggcctcggggactgcgggatcgatggcggcgggagggctcccgggcggcgggctcttgtcgccgcggccgggctcggaggtggtacggctcgcggcgcccgcgttgttggcgttggcggcgctggctgggccgtggcgacgcgggccgctgctctggatgtgggacacggcctcggcggcctgcatgttgggcggcgcgaagcgcgagagcacgcgcagcatcgcctgggccttgtgctcctgcgtgtcgtcgtcgctgtagtccgacacgcggcactcgtacacgccctcgtcctgcagccgcacggcagacagccgaagccggtgtgagatgtcattgccctggacgcgtacggtccagacccgcaatccaggcggaggataaagggttgcagcggagggcgcag

SEQ ID NO: 346206 - DNA, 1000 bp, Homo Sapiens
tcaagtatccgtgatcatcacgacttgtatccagagacccgtcacaggcttagtgctggcaaagtagatctgtccttgtctcaaacccacagtccagaagccgagttctgaagagagtacaacgttcccctgtcggttcacagattccttgcacacgcccacatcccacacttggctggtgcccacgcccacctcccagtaatggcggccggaagtgaagcgaggggtgcccaggacgcacagggcagtgtcgaacctctcagcttgctccttcctattctgtctgaaattcccacatcggacacgcctcaggtcttcagaaacgatgagatcgttgttggctgtgtccacatccaaggtcatatccacttggaactttctcatccttggattcatctgcagaacagctctcaccttgggctctagttccttgatcttggacaccagcgcccccagctgggcagcgggcctgatgtcatttttctgcatgaagacatcatcgcctactctttgtaaagcactggtatttccctcagaagaaactggggcactggcagtggatggattgatcacagaacagatactcaggatgctctgatcatcttgacttccacgtttatgagcaaaaaatggacgccagggctcgcaaacaggaatctcgatgaatgtgttgatatggcacccatcactaacattgtaaaaggcaatggacctcatacctacatccaggaaaatccccactctgtgcaactggggactcacccagagaggagtcataggcacagtgctggcagcaaagacctttccttctctgcaacccacagtcaagaagccgtgttctgaagaaagctcaatcttcccctgtcggttgacagattccttgcacacgcccacatcccacacttggctggtgcccacgtccacctcccagtaatggcggccggaagtgaagcgaggggtgcccaggacgcacagggcagtgtcgaacctctcagcttgc

SEQ ID NO: 346207 - DNA, 1000 bp, Homo Sapiens
tcaccagggaccagccagcactgaccacacaacccccgaggtccggggagaagcaggtccggagaaggcaagatgtcctggtgggcagaggagctgtttgcagggcggcaggactttggcatcattggaagaccaagaacactcatgtccagtgtctgaaaagctgagggcagctgtggtctttgtggcactaggcctttgcgacactaggccagactggtgctccctgtgtcctggggctacctgcagttgttgggggcaggccacttcgggccaccaagaggcatgaccagtgtgacatgggagcatcaatgaatggccagagggctcagccctgtcctccagcactcctgccaagggtaaaggattttccctccaaccacactgcatcctgtcatccagaccctgggaatgagtgaatgaggtgtgcaaagggaccaccgcaggtgcatgcgggttggcacggtacagatctaagaggtaggcatctgggtccaggcgatgctcattctggcctcccacagaagggcccagtgagcctttgaggtcgaagaactcccagggacccgggctctgttcctgtttcccacagtggaacttactgatattccctccaacttcatagaggaggatgttggctgactccatggacctatggtgtagaaggaggctgtccatgtcctcactgtcttcttgacccttggaaccagggctgaggtgctctgtgaactgcctcaggacgtgggccactttggtgctgggggtgagaggcaccttcaaggggtccttgataggccagaccacctggatctttgccaccttgggagtcgcctcgaggccgtcccccgccttgtccctgtctgcgtgcatcctccgcagccaagtcttgaggcctgcgtcgcagagctgggggcgcctgctgctactgtcgttcagttttcgcacctgggcgaccaggaaagaggcgaccgtccacagcagatcctggtagtgcaccatt

SEQ ID NO: 346208 - DNA, 1000 bp, Homo Sapiens
tttcagtaaaagtaagaatcatttatttttacacataagtgtaattttatgaataattttaatgtagtaggcatctaattcctagatattttgtcttcttaatctatcaaggtccattaccccaatttatcaatttacaggattatttcttttttccctttcctggttttccttttacatccttctttcctttcttatcttttggagaggtctttcctttcttttgtggttttagtagttcaccgaatttcccaaatcctctctgtaccattgttccacgccaccatgcctgaatctttgttgccattatattcctgtttctgttttccttgaggtatttccatatggcctcattgccttcagcacacacttcttttgggggttcttccatgggattgtccatcagtgtcagaaccttaagattcactagggaatccaaattctctggaagatgggtgagcaagttgtcctccagccgtaattctttcaaagctgaaaagattttttcgtaatggtggttcaatcttagaagaaacaatattaacttgtcacctaatcctgtccacataggtgagggatccaattcttgtgcttggcaaatggcatctggaagttgcttaagcaaattgtgccggcaatcaagaacttctaggttaggcattgaccccaaggatacgggcaggtactccagatgattgttctctatatatagctctttgagactctgcagtttcctaatgtgttctggcacataggtaagtttgaatccctggtcttgcccaatgtataatttctctaaagacgctaaagaaaggacttcctccggaaaggaaaggaactcatttcctgttagtccaagtatcttcagttttgaaagtgagcccaattctgaaggtaactgtcctattttattgtcatccagtcccaggacttcaaggttcttcagtgcacagatctgcagcgggcagtggtgcagatggttctggcttaggtccaggaa

SEQ ID NO: 346209 - DNA, 1000 bp, Homo Sapiens
tcattgcagcttcaaaggacacatgtaaatcaaaactctgtcatccagaacagttgacactgtggtattgttaagctcactgctcacaaaagctgaggtcagttggatgcaattatctgtggtggagactcttccacaaacaatttcactggtgttcctctctggcctcagcaaaataatgaggcacttaggagcaaatatacaacccaacaagccatggctggatgccaagattgcaaatatttccacagccattttgaacttgcctttggtgctcaaataaacagggacaaaagacatccaaatgatgaaaaagacaagcatcccaaaggtgatgcattttccttcatagtaattatctggtaactggcgagccacaaaagttgtaagaaagcatagcaaggctaagaaggcatcaattccaaacatcgagtacaaaaactctatggaaatttcattgcatcccagaatgatctttgtattttgagattccatgttcttgtataccatgggaggttccaatatcaagtaggctgtacatatgccaatctccgctagaacagagattagcacaatgattttccgataaagggggtgcatggatgtaagttgagttttggatttggaaattctgtaggctaaaaacagtgaactagtctttccaagaaggcaagacaggcaaagagaaaagcccagtgccagagtgacctggccagccatgcaggaccagttgtgtggcttgtcaatgaaaagcatggacgacagcagcatgatgatcagagaaacctgaatgagaaagcccagctgccagtcactggcgttcaccaggggagtgtgcctgtgtatcacatacacagctgtgactgccaagaccacaaatgccccaaagacagaaagaatgacaagtgtgaatcccagggcctcatcataagcaaggtattccacctctttcagcacacactcgctcttttgtgcatttgaccaatagtcttcaccacat

SEQ ID NO: 346210 - DNA, 1000 bp, Homo Sapiens
ctacaaaatcattacctctgctctctgtgttctgggaaaagcagttgatttttctatggcataaacatccaccaggtaaagacatgctccttgctcccggtccagaatggctgcggtctgaattataccagtatgtcgtccaatagtaaagaggcgtccaacagttttttcttcacaacgaactgaaacaatataatactccactggggcctcagatcctctggggctagctgcttctattgatatcacgtttgtgccaatgggttctccttccttcaaaatagttatatatttgggttgagtaaaaacaggtccatcaaggccctgaagaatgatggtcaattcagtggtcgatttcctcctttcaggcccaaggtctgttgctgaaactatgagattgtagatcaactgtgaaggcaccaacgctgaagccactctcaggtctccactataacgatcaacaatgaaggtgtctgtgtccccattgatgatctcatactctatttctccattagcaccttcatctgggtcagcagccataattgttgtcagaacggaaccaatcacagctgatgggtctgcagcaagggcgttttgtgatataaacattgggacattgtcattgaggtctgtaaccaaaatggtcacgttcttcaaagcataccgtctagtttctattggcacagcttgatcattggcttttacagtcaactcaaagagattagcaaattcccgatctatttcagcattagtatatatagtccctttgacttcatctatggtaaagtggttgcctcttggcatctgttgaatgattgtgtaggatagttgaccattaatgtctgcatcagggtcatgtgcagtcactgaaatgacagatgtaccgatgggaatgttctcaacaatagacttgaaaatatctccaggaggaaagctaggaggattgtcattaaagtccctcacgtgaataaccactgacattgtagatgaacgaggaggt

SEQ ID NO: 346211 - DNA, 1000 bp, Homo Sapiens
tcagaggactgttttcttgctacccacagaaggagtgatccagttgtactctgcttgaaccaaaacaaaactgttctccccaatcttcctgacgtgcacagtctcaccactgttgctcctggcaacagcatccgaagcgggctcactgaaagacacttctgtctgctggtggcaatactgggtgtgcaggtagcgaaggccagcggccagggccatgcccagggtggctgacaggcaaagcagaattcccagctgaggagttctgagctggatacccagaggggcctgggctccctctagcccaatgtcaggccgtgggttggtctgccgagggtatcccactccaccctctccatttcccttccctgctctgagctccttgtgctttgactgaggtaagaagctggcagaggccctggatgcctctgactggtcaccagcagcaggtagcccagaagtgccagaggtctggaggacagggattgggttgcttgccctgaccccattccctgtgaaagtttcagaggaccagaggcactggggataggtaagctggacggtggacagaggaggctgtgtcacggtcctgttagaggccttcgtcttgtcctgttcacccccatctgaggacaggcaagtttccagtgaatcaaagctgggatcatcctgagttctgtgatgggtgctaaggctggaagcaaagctctctgaggagactctcttgagggccacgagcctctccagcctgtggacctccagggacggctctagggtgggattgctgtccccgctgggttgctggttgatgctgccttcagtggctgtgtgtgaagatggttgggacagagtctctgcatccccaggaaactttgtcacccaaatactggcaggaacaggatctaggttgtcctcctctgcagctccaggaagggcaacagcaaagacatgtgtgtgctgctgtggaagagtgatgggggtcctgggagctggagcagctcct

SEQ ID NO: 346212 - DNA, 1000 bp, Homo Sapiens
tatggtctagttcaaatgtgcctttatttcaatggcaaaaaagcattaatcttatataattgttgaacagttacatacatcttaagaacagtaaacatacatcctaaatagcaactcataaagtgtatgttaaaataggcccaccagattatacaagatgaaatataaatgtttgttggtaatttgaacaaatatccaataaaatattaagaaaccaaggttttagggtgttagttcctcacattccacacaaaacttccaatgctgatccattatgtggcatgggagaaattcttgatcactgattaatagtatttcatttatttgtagataacgtgggctgctttgcattgactctctggaagttccttgtccaaattttgttttctcaaacattgatttgtttggttcctgtactgggtcatctaaacaagcaacttctggaagacaaggttgatattgctgaggtactgagtttggttctggaagtatgggtgcatcctcagaaacataccttaaaagctccttcccaagatacgttaccttactccaagcataattccaggtcacataactgttgcctcccagaagatccttgagccaggtgactgggtttttataaatctgaccactttctaccttaagtttaccattcaataaaatactggctttgtgggtagtctcctgtgttttgaattccagaatgttatttcctgggttaattcttcctagtaatatcaaatcttttatctgaatacatttctttttaggagctgtactgtagtttaaagccttttttattgtatcttgttgcccagatccagaggaagaggagatctgactgtcatctgcacatggaacaacagaaactgattttttaagatatggtttcatctgatgcactgtatcactgcctaagacagcaatcccttgatgtgccagagattctgatgcccctgtaggtgattgctgggaacttgtttttctgtttcctcttttg

SEQ ID NO: 346213 - DNA, 1000 bp, Homo Sapiens
tgtttgcttataggtggttattctatttgcacaaatagaactgtatggataatgaatataaactgttaccataaatcttctaaattatatgaatgatcattacaaacaaatgtgcttagcacctattttgttgatagcccattgcctctgagaatctgccttttcctaagacaactgtttgggttacctctcccgatttcgtattctggccaccaaaataaaaattttcaatagtaacaaaattaggtgtccttttaggacgagggaagttgagtgatgtataaaaacattcacccagaaaccaggcttctgggcctagagtccttaagtgactagttaaagtgattgaaaggttccagtgtttcccattgcaggaaattacttaatctcttagagccttcttttccttcttataatattagagcattacataattataaaagtaactatggtttctaaatccttccctgctctaaaaatacataattcaaagctgctaaaaataaatacttttaaaattggctgtgacatatgtgacatatacatatataaacagagtttcactgtgacaaggggaggggctatacaatgttttgtagcagaaatttacaatgcatcggtatcaagatgcttttgttcctgaaaaagtgtttcagggtggcattcaacctgaaggcaaagttctgggaagcccccaggcacttcagtggaaacacagggcagtgttttgggggaccacatcacagctcaactggggacccagcggaacttgtaacccccgttggctgttctgatggtgaaggcattgccctgggggaaggcgagggtgcggatggtgctgtggctgcggatgcgggtgctgaaggagccgccctcctccagctcactgtggctcaggttcaacgcgctccggctgcagtctgtgcgcagcccccggaaggcgccatgcaggttcccgggcctggtgtcagtattcgcgggctctggcagcagtcggggc

SEQ ID NO: 346214 - DNA, 1000 bp, Homo Sapiens
gttcccaagtcatctgggcatttatgcctctgccccatccctttacccttgggccactgccctgtcccacgccactaatctcaggtgcccgcaagccttagccatcacttccttttcttcttctccttgtccagcttggcctcctcggcctccaactggtccatcctgtgtttcatgctcttcttgcccagtggggtcttgaagtaccagtccttcagggactcctcctcctccctgtacactggatccagcttcaccagttgtcccaggaactcagaggccaccaggggccgcttggacagttgcaggaaccgccgctcactcagcaccgattggatggcttggagaatgtgacccggcgtgtagccatcggagaccttggctagggcactgatgtccaggtgctgggtcggctggatgccccgggcctctatcatacgcttccagagcacatagcgggatgcgtagtcaggccggggcatgaagaggatccgctcgtagacccggcacagaccccgcatctcggccagctgtggccgggaggttgtcccaatcagcatcacacggtctccgggagtcagcagccgcaaggccttggtgaggtccttctttatccgctttgggtccatctccttgtcttctttgggggtcttcttatagaaattcttctcagcatttccaatccaaatcacagagggctgtaggagtcgggctaccagttcagcacctgaaatcatacccagtaggctgatgggtgacgtgacctcaaagcccccctcctttgttgccacaggtctgagaaccgcaaatgccaaaagctgggggctccggaccttaaagactatatgcaccatcatctgtgccccattcctgccaggatatttgcccagcaggttttccggcgacaggtcgaacaggttggcgccagtttctgtgcacactgccttgaccagcatcttcttccccatgccagaggggcccaccaggaggatggagcgga

SEQ ID NO: 346215 - DNA, 1000 bp, Homo Sapiens
atgacagcagaagtctttttattcaaatctcccaccttacagatgtccagaataatcaacatatttcaaagggtatatttcaaaaacgtactagcaactcagccagccactgtcacatggaataagaagacatgccctggccattagaaccatgctgtcctcgctcttgtgtccctccacgggacagacatcaccttgcaagacaactcgtgccactgtccccaacagttttccacagagttcttgtttcccttcatctgaatcttctctgtgcaatttgatgtcctgaactatttctgacggttgcacacaagatctcagggactggaccttttagttatgagaccagccctcttagacagcagacagtaggtacagtgcttgctctcccttctttgcatccttccagagttgccttcatcctcatttcctgcatctggtaaagtctctctgaaaatgtgaaaccgacgacagaacatggcaagctggatggagaagccgacaacccctcccccactctcacccaacgccgggccggtcctgtttcggatcctgcacactgtggaagcttcttgcttccttgttttggtgggtgaaatctttgctgttcaaaaaggtgtttttgcacagaaattttaggacgtgtttattctagtaacgtagtgttttcttttttcgctatatttacatgtggagaactccagggaggcccccaccagagatcccttaaatgctggtctctgtccctgcttctcggccccgctggccttttggagccatcgtgcttcccagtccgcaggcaacaatcacagcatcacctgcaaggggcagcaaagtgaaccgcggacccctggagtgacgccttggagatggaccctttggatttgggaacccctctgacggccgggactcccaggattcccttccatagagggagtccacggtggtcgcagccggcggctgagtcctcttgcgggtcgccaggagggggctgcggtga

SEQ ID NO: 346216 - DNA, 1000 bp, Homo Sapiens
tcagaggcagattgggccttccggttcatctgcagtttgagctggttcagcagcagccctgaagtctggaggtatgatagcatcagctctcacgtgatgaagctctggttcctgtttaaatcctaaaggaatagcaatttttgctctttgagacgtgcagaattcttttgaactcctgttggattcagggatcacagggatcagcttgactcttggaagcaggatgtattcattcagaggcagcagtagcagctgcgtttctgtttctgggagagctctgatttgctgtttctttgcagcagcatgttcaggagagtgagatttggcataggctttcacatggctttcttcttgccatttctgaatctccaagactcttatttctaggcaagaggaccttagaagggggcagcgggatctgagaccacctctccttacggtgaaggcaaacccagagtctttggtgatgccccaaggccacaggaagacggaggagcgccggcgtcgttgtgccgtcagcccagcccaccaaaaaggaccatcctccctggacactccaaaggaatcagaaacatcataatcttccagttcctggaaaacctgggcaggagtcagccggaacccagacctgagcaggtagacactcttatcaactgcggcgacgcacacacagctgccccttgcagccctgatccgcaggtcgacaacctccccaggttgggtctcatttgctgaatacgtcactgaaacctggttttcgaagaaggtctcgactgcaaactgaaggctgtcggcgaccccttctccattctccctgacatagaagaccagcaggcgaccaagggggaccatgcttggggtcacggccagacgaagagaggtcacacacacgtcgacctcagcttctggggctggtgggggctctgtctcagaaaggtgtgttaaacgaatcggtttctccagggcaggggccgcccgcttgcttcgctgctgggtgatg

SEQ ID NO: 346217 - DNA, 1000 bp, Homo Sapiens
taggtcttatatccattgatatttattccatttctggtaatgctattaagttcagattcaacagtatttgtccaagtgctttccatcctgagtatacccaaagccacacataataaagaaaattccaaacagaagtaattaacattcttctccacgggccattctggtccatgagatccctgatacccaaagaggtctctggtctacacactgcatctttcactagtttctttcattcatgactctaaacattgttgttttcttttagaaatgtttttcttaagtgagttatttactttatgactatcatatatattttggatccaatgcacgcaaaagacatttcatcagctttaatgctgtctcctcaagtaatatggacatgatattaggagagtttcccagaatttatgtgaccattcccaactcagcttctcccctgcttttaagacaagctatagttaggttttcctatcaccaccacagtcctgactttggtaaatttttctctctcacacttagagattccatctcagaccttggcccttcatctttagcaggtgatactgtagtcaccggaccaacccccagccttgatctctctgttggaatcacagtgacgttttcatcacaggcaggcgatctggaagttaagtagttgagaagagagatgatcccagcaaacatgtaaaagatgtcactgcaccagttaagataataggtccataggagatctgactccatggcatccctagtatgccagtgaacctgtgccacaaacaggttgaggcagaggagcaagcaggtagctgagatgaagctgagcatggataccttcagatccaagttggtggtcatgcttcctcgattaaggatccaagagctgaagagccagccaaggccagtaagtatggtaaagacagagatgagaaagaaggccctggaatattggagataatcctttggtatttccggttcccctttattttgggaacctcag

SEQ ID NO: 346218 - DNA, 538 bp, Homo Sapiens
acatttgtcctttctcccaaatggctcagccagcaagcttctgtggggtcagtctcctgccacgatgctccaagcgccgaattttggggctagagcaacccaggtctttatctgactctatcgtagcttgacgtctcttgggagcacgcctgggggctggcttctctgcttcagcctttgttggggtggccaaaggagcatccccatggacccggtagccaccaaccaggcagtacgtctccccatgccagcctacctgagtttctccacaccctcggtagagaacatggtagtgcccaggtgtgggaggagaagtggcaggcactgcagctgctgcgctgccctcccaggggacagaggacatgttagagacaatatagaggatccggtcagtcattctctctcagccaaccaaacagattggtatcttacagagaaatggtagggaggcttctctaggacgcaggtgtgtagtcacgctgccatggaaactttggaagcttgtgaggtcatcactaccctgtgaagtcacctaagg

SEQ ID NO: 346219 - DNA, 1000 bp, Homo Sapiens
gggaggccgaggcggaaagatcacttgatgtcaggagtcgaggcgggaagatcacttgacgtcaggagttcgagactggcccggccaacatggtgaaaccccatctccactaaaaatacaaaaattagcctcgtgtggtggtgggcacctgtaatcccagtgacttgggaggctaaggcaggagaatttcttgaacccaggaggcagaggttgcagtgaccagcaaggttgcgccattgccccccagcctgggcgataagagtgaaaactccatctcaaaaaaaaaaaaaaaattcctttgggaaggccttctacataaaaatcttcaacatgagactggaaaaaagggtatgggatcatcaccggacctttggcttttacagctcgagctcacaaagctgatttatcaagttgtaaatcttcacctgttgaattcataagttcatgtcatattttctttcagacaattcttcaatttgtttacatagatcagcgatacgattattccatttcttcggatccttgtaagagcagagcaggtgatgggagagggtgggaggtgtagtgacagaagcaggaaactccagtcattcgagacgggcagcacaagctgaggagtgcaggccacctctaccgccaggaaacggattctcccgcagagcctcggaagccaccgaccctgctcccaccttgactcagtaggacttactgtagaattctggccttcagacctgagcctggcagctttctccaactttggaagcccaggagcgtggcccctgtccacagatgcacctggcatgaggcgtgcccagagggacagaggcagatgagtttcgtctcctccactggattgtgagggccagagttgaactccctcattttccgttccccagcattggcgggttctgggactggtggctgtggtggctcgttggtctttgtctcttagaaggtggggaataatcatcatctcaatctcgcaggctggaatgctgtg

SEQ ID NO: 346220 - DNA, 1000 bp, Homo Sapiens
ttgtctaatgaaatgtgtttattctttgctaacagaacccagactggcaagcctgttgctaaccaacctgccaggagacctttcaactgggcaaaatgtgctttcactttgttccaggtcaaatgggtaaagtagctggaaagtattgtgtgggcaaatcagacatgttgaattgctaatgaagtaaaaacaggagcagacagaattcctggaactgaaatagcttcgagatatctggttagaaacagtagtgatgtgcctacttttttctcaaccctctacgccctcatgattcatcactgaggtcaaggatatcctatgaaaattggagtttttgtattccatgaaggcttttgttgtatctgtgctgtcgatgaattctaggtcttttcagtctagtggtagaaggcccaatttcagtctgacttagttttttttctctctgtctcatctctcttctggcatttagaaatgaacaggttgatatgcttgtgtgttagctgctgtgcttcggacgcaaagatacaaatagcgtctgtctgtctgtctgcattctcctccagggagagatttttcctttccttttgtgcttgcttcactcttgaatgcagcaccttctattttttgtttcctatcttccttggtgggatgtaagcttcctcaggatggggactcttctatgataatagctgtatccttagcacctagaatggtgcttggcacataatacgcattcaagaaatagtctagtgcagatcaatctcccagtggaaagagatcaacttctcccgctgtgctttttcctctcaatcagtgtggctgtcacagggactgttcccaaggctctaaggtgttggagctgctgcctccctcaagcccagcttctctggacaccccgatgccttcgggtagtccagcctcagcgcatccctatctcttttcttccttcttacatgtgacgatttctgcttggaagtggggaggtcactgacagctccat

SEQ ID NO: 346221 - DNA, 1000 bp, Homo Sapiens; identical to SEQ ID NO: 161384

SEQ ID NO: 346222 - DNA, 690 bp, Homo Sapiens
tagatgttcaatacatatttattgaatgggtgaatgcaggatctacttttccattaggcctagtagacacagtgccagaggcccagatactgttagggatacatgatagtgttgttattttcctttacaaacaggaaaaaaaaataaatataaaaaaatcaatatgtaacaatgaatccagcctagatgttattctttatgccaatgcagtcgtaaaatataatttttttttaaaatgaagtgacggccaacctagccatgagaattctaatgcagtcctgaatgagtgaggcttctgtgtaagtgcccagttgggtacagggtagatcgtagacaagatccatttcttcccatctgtgctttagaagtagaagtgcagagcaggccatctgtgacaccacatgtacccagtggctccttcctttcatgtccacggcctctcctttgcgccagggatgattggaccagcatgcaaccctgaccagggacagccaataggagctgctcaggggcatagagccgggcaggaaatgctgtgcccaagaggtgccacaatcagcagtgccaatccagaaggactgaagctagtgaccacaagatggctgccacagctccagtatcacatctcactgggtaaaccaatgggaaaaaatatttgcctttttcccagcacccactgtgaaaacctca

SEQ ID NO: 346223 - DNA, 1000 bp, Homo Sapiens
agggtaatattgatcatttattcattttccattcattcaacaagttgtagagctcctactgaatggtacacctagttctggtgacatgaagttaggagggaacaaagcaagaagcctgctccaggaaaaccttcactctcatggaatatgcagagaaataaatgaggaagatgatctcagaaagtgatacacgctacatggaaaacatacagaggggttggggtagtaatgctttctgtatgggtggtcggggaggtgacatttgagctaagcttttaataatcagccatcctggcgagtccctgatgcaggaatgagctgaagtagggcaggccattttggctgaatgtcggcagccagggagaaatgacagaagctgcagtcggggcatgaaggatcttcaaggccatgggaagtgttcaaagtctttgctccagtgtctcccactccacgtaaacccatcggcccagggggtcctggtaatccacgaggtccaggcacaccaggatagccatcacctttgagtcctggagcacccactggtccccgagggccttggacaccctttggtcctcgaatagaaagtccaggttctcccttaaatccaggtatcccaggtcctcctctatctccctttggcccaggtggtccaggaattgatgttccaggcattccaaaagggcccataatgcccggttcaccctttggtccttcgggccctggaagtcccctctgtccttgatttcctttgctccctttcttgccttcgtcacccttggggccaggctgtccttttccaggtggtccttctgggcctcttgctcccggaagccccgcttctcccttcttccctgcagctccatcttctcctggtactcctggttgtcctgggagccctattgagcctggctctccctttggaccttgtactccaattcccactggtcctcgagggcctgtaggtcccatttggcctacttctcccttggaaccaggtaag

SEQ ID NO: 346224 - DNA, 961 bp, Homo Sapiens
tttgtttaaatgtccttcagtttatttcaagtatctttttttttccagtttctcctggacaagctgaaaaagaccttactgaaaacgcaaaattaggcatgagaaaaacttctgttcccccttcttacccagtgataagggaattcttcatgccctacaatggaagaaggaacaggcttgtgagcagctagtacatcgctgtagctgcatcgtcacaggcagtaagaacatttagagtgtgtcctttctctcccagctacaccgcacagtttccaacagtcttggccactgcaacctcctcatggcaaattggccacaacatggctggagaacaagcaggcgaggaggagtgtcagatggaaggccttctgcaaatgggcagcctacagaactgtgatgggtaggagccaggcttggttggaggctgtgtctgtgtggaccagcacagcagttccatgtcaccaggtgcaggactagaggggcttctgtcctgtgctgtgcatcttgatgacctaggccttctatgtcgatctcgctgggagctacaggccggagctgttcctgttcggccatcttgccagcaatcgagatttatttttataatgaattggttcacataattatggggtctggcaagttgaaagatctgcagggtgaatagacaacctggaggcccaggagagctgataatttagttccagtccaaaggcccgcaggctcgagacccagggagagccaatgtttcaggccaaaggcagaaaaaaagtcaatgtcccagattgaagatcatcacgcaggaagaattctctcttactcagggaagggtcagcttttttgttctttcaggctttcaactagtgatgagaaatgtgaagccagagagaggaaggtctttgatcttcaaatcttccttattgaatttattttgctgattgagtttagatgccagccttcattccct

SEQ ID NO: 346225 - DNA, 1000 bp, Homo Sapiens
tatgttttatagatactgtgatttactgaaaatgaaaataacatcctattacatatattttaagtaatacgcaaagaaaatacaataaacactgatttggctcaatgacttgcctactggaaggatttttttaagttttaaaaaaaatccccagtaaagtggtcaaggatacttgatgatgttaccattgaagaagcatagtattttctaagcaactccaaggctctgttatttcttgcttgtagggtcttctcagttctcagttcattcttgatgacactgagctctccgcggatctttgccatttctaattcataatatgatttcatttcttcttttaggagcacatttccaacctcggtttgatgctttaacttcctaacagcttcttttagatttctgttctctaggttcaatttgtggatgacttctttggcttgctggagctgttcacttaagttttttacatttgttgctttttcagacaggtcatttcttaaagcttgaagttcatagtcactttttgaagcatccgtctctgtttcttgaaaatttaggggttttgtgaatatttcttttttgtagtgcaaaagttctttttcagcattttcaaattcctcttctatttttctgtatttcatattaagttcttccagttcttcattcaaaagattcaggcaaagttttggagacattctttccataaatttctttcttatgtcttgtcttagtagagctggtaagttatctgtactgcaggtagagttatcttctgtgctgttaaagctttcttctgttgtaacatccacattagatgattcataggatgcagaatttgtgtctgtttcattctttgaaatgtttctcttgttctctcttaaattttgttcttgttctatttcatttagttggaaaatatattttttcctcttaaatttactttcttcctgaaactttctactggacaaattataaatttcttccattcccttgctgctat

SEQ ID NO: 346226 - DNA, 1000 bp, Homo Sapiens
ggagtactggaactaataaatttggactttgttctgcaggtagtttagttacttacagatcagctttatactattgaggcttgtttttaagctttttgtgggggtgaggagcaagtgtagtgtagtttttagtcaggatagtttagccctacgtatgtaacacacaacctttctgggatctttagcgaatgcctggttttcagtcaggactctccactgtggctggatggaaattagatatttcccaatctcacgctaattttgagaattgttaggcttagtgttccgcaatgtacacaatggggtctctacatagatttctggatttttttgtctaccttcctccttgttgatactttgtcctgaaaattcaagctatctcagtatcaactccaatcttcctctcctcaactcagcaagactctgatctcctgcgatgggatccagagtgctcacctcagaaaggcagggcgatcggaggtctcactttgtttccctgcctcagcgatcaaattgtataaactttttccctggcttctggaaacactgatagccaacctttcggtaaaatttctaacatatgtacttagagctttaatatgctaagtatttaatatgctaagtattttctttaaaattcatttcaaaatatttttgcaattttgccgtgatttattttttggctcatgggtcatgaggtgtatgttccttaaattaatgcattttggaaattttttgttacctttatgtacttgatttctggtttaattcatactctatatgatttcaatcttttgaaattcttgagacttgatttgtgatccagcctaacatgcgccccagaacacatggtaaatgttttggggtatactttaaaagaacatgtattctgatgtttttgaatgtaatatcttatgtcttattcatatttatagtaccaatacacagcacatagtagaaacttaacatatattgagttaaataattcaaaggttttatc

SEQ ID NO: 346227 - DNA, 1000 bp, Homo Sapiens; identical to SEQ ID NO: 161385

SEQ ID NO: 346228 - DNA, 790 bp, Homo Sapiens
ttttattcatttgctgcttgtgaacattgatgcttcgtgcctgttgggggggtggggcataggaggcctcttggcgacagcgaggggagggagcacgaagtccaggggggtaggacctctgcaccggagggggtggggcaggctggacttggggccttggggggccgggggtgctcctggctcctggtggttcccgagggctggcttcttatccttccatgtttcagcatgtgtttgggccttttccagaacagcactgacagaatgtgcagcctggggcatctgtccactgggcttggtgatgccttttataggtccttttaatttgtccttttgacacaaagcttgactcatggaaggtctgcagttgttagagaatcagatagaggaagctctacgttgatttctcggctccttagaaaggatccctccaaggacagccgcctctccacacccgggctgtttctccttcaagtgaattgctgcccagcccacaccagaaggtcttccgctcctctccctgtgaatgcagagatgctttagccatgctcagcaccactgttctgtttaatattcacaaactgcctgtttatttcttcaactagttttctagtagtttgagaaacccattaatctacatgacaactcaaagaatgacttcaggagattagaaaaaaccaaaacaaaacaaaaaggcggggtggggggaagtttggctgggttctggtggctcattcttataatcccagccctaggggaggccaaggcaggcagatcacttgaggtcagg

SEQ ID NO: 346229 - DNA, 1000 bp, Homo Sapiens
gattgtgttccaataaaattttattaacaaaatatgacagtgggggggccacagtttgccaaactttgccttggaggacatgcagaggcaccctcagaattcagtgaaaacctgctcccatattgctaagactcatgaagtataatctctcatcttctttctctttcccctgcccaagccctaagttagggttcccatccatataacaaagacttctggtcaggtggcatttgctatctctgagattccctgcccatgaaagccacaaagagatttcttcttttacacaccctgaagcatattatggccccagcaaggctaactaaatcaaactgtggtttaaaaacaaaacaaaccaaccactgtgaaatatttatttttgttttgtagtattaagcatgattaaaccagtgcagaaaaatactaagtacattgggtaaaagatgagctagctgttctagtatttgctttttgtaatccagttaagaccatgagcatatacaatatcatcactaactcaacaatgtagctgcagggtaacatgtggataccctgtgtgctctactggcctccaaaggcattcaggggatcatcaaagatgttggacaccttgtgttcaaatcttggttcaggtgcggcctgtgcagatcggctttttggtttggttgtcttagcctggataccagtggagaagatgtcatccatatcatcatcaaatatagacttggcttccactttctttttggacttttcttttggttttacagttaagtcagcaaagatatcaatgttatcatcaaataaattagattccaatgttttctccttctctctggttttctgagagggtttaattgcttccgtagcaaatatatcatcctcaaaaatatcttgtgttgttaatatgacatcctgctgactactggattttgtctcattcttcttgactttctgatctgtaaagaggtcatcctcatcttccaggagaggaaagggattt

SEQ ID NO: 346230 - DNA, 1000 bp, Homo Sapiens
tttttttttttttttgtttttacaccaaggagactgcagtcaaataaaacagatactacacgcactcgtcggggcagccgtactgcagaagcacgttgatgcactcctggctggaggcctgccgggcgtaggtcagcgctgtgttcccgtgggcatctcgggccatgacgtccaccccgtaccagatcaggagctgcgccaggaccacattccccttgcggcaggccagatggagcgccgtgcagccgtctccctccccacaggtctcgttcacctcctcacgggagccatgtgccagcagcaggatggctgtccgcaggtcctcatcagcggtggcccgcagcaggtgctggcccagggacagctcagtgcagggtagtggggccagaaagagcttatgctcatatttggaacggatccaccgttccttctcttccctcgttgactctattgagggtttcgtctgcccctggctgctcccttcccagatgctgttggctaggtcattgccaatagatgacataaccttcctgagctcaactggccagtcatccagctccagagatcgcacacgggaaaggcgggtgccaagactgcggtggattcctgaacattcaatacacatgaggactcccaagttcaaactggcccacttaggattctgggtctcacagtccacgcagtgggagttcccacgcatgttttggatcgactgcagggccatggcctcactctggctggtcagctgggacttgcttttactgctctcgcatgactgcaggctggccaggatctggctctggatggcttggacccaggcatcccgctcctcatacgtcgtggctttaaagtggcacgtttggccagtgacggacacaatcataaacttttcttcttcttcctcagcagtgctggacaggccatcatcttttaagttgttggtgcttttcttctttaggtgtttctttttattggcatgaggggaggggggcaggttgag

SEQ ID NO: 346231 - DNA, 627 bp, Homo Sapiens
cacctttttatttatgttcctcattcttcagaaacataattgcagtttttattaactttgttttatggatctaatatttaagaagaagtctatcttttatgtcacagcaagaaggttaatgcacttacagattcccctgcaatacatcttgggcaaggctgggctgagctccttccaccattctgagaaatccctgtacttagcctcccctggccactctctggccttggtgctgggaggcagcctcttgatggaagctcccggtcctctgggccccaggacgccagggcacaggcattcacctggtggcagccacgctcatgcccactggcttctaatctcctgcatacccgtttctcatagaggagagctccagctggcatctggcaggtgcccctctgggacgaagcttccagaagaaggaacaggcagcaatctttggtgttctgcagcctctgctggtgatacccagacaaacagggtctggagtggacctccagcaaactccagcataccacgtcccccggaacctgcagatcctccgccctccgctgtcgccagcggccgagcgctaagctgtccatgcagccccagggtcaaaccctcccggcatctcaggcctggccg

SEQ ID NO: 346232 - DNA, 1000 bp, Homo Sapiens
ctgtcttgaaaaaagcacctgctgcaccataagcccagggatgtggcagctgcagcgggcttggctttgtgaggaaccgagtgtgtccacgttggggggaacatcatacttgatacacacgtttttatttgcacaaagaaaatgctatttttggagccagagttttcatgtctgattgatggcgattttcttaagaaccagaactgctggcagaaagggagcacccacaagcttagatagccgatgtcttatcagagggcagtttgtggttcctgatttggaaattaacattctccaaacattccagtccaatgaaagttttatccgctttcccatataaaaactcttcccacgagagtgacttgattctcacaatcccgttggagtcgtgtgtgagtcctacagtgtgaggttcagcattgccatctccaagtgctcttcgtagggaaacagtttctggtcatgacgaggttccacttcccatctgatcccggcccggcatagctcggtggtgaacagctggcacgtctctgggttgcggacgataagggccacgtagacttgaggagcccgctggtgctcccggtaggcagccagcctccgcaggaccgcgaccagcgacacgatggattctgggcaatacagcacgtctgctgcaatgacaacatctggctggatggcagagagctgatggaccgtcgcgacgtcccagtccagctgggccactgtcaccctggggctgtctaagttggcagagatgtctgcctctaatgagaggccattgagaaggacattccctcggagcttctcgaggacctggctgtgacagtcgctgaagatgtatgcctggaggcggcacatcttgcagatggccaggcctgtgaggctggcgccactgccaagctctaggacagtcctatgagagaaggctgccgggttctcgatggcccattctgccaggtagagggcagcatctcatgtgaccaggcctgtgatgcca

SEQ ID NO: 346233 - DNA, 1000 bp, Homo Sapiens
gaatttccccaccaatcagctcatgaaggcttcttaaaatttggtcacttttgtgtagcaatcatttttatgccttttccttgagatttttttttctcaaaaataccaggatacagatccttttacgcatactggggttgcggaacaagtcacacacagtagttttggtctgtgctgcatccagctcctcctgcatggtggatcttacaacctctatgttcagggtttcttcagcattctttattccatttgtgcgtgcaacttttctaagtgcctttaagccctcatctagtttattggtgattatcaaccaccgagcagattccaccagccacctgtctgagacatggccacctatgatgcctcccaccagcattccagtcagaagtaggaattgaaccactgatttcagtgactgataatcacataccaggtcccacttagtcacaatggtcgaagggaagtagctttgatcatatacccagccatccacacagggttctgtgtctgcctcacttgtgctgtggatagtcccattcaggtgaagaagctgccactggggatggacaaagcgacgacacttctctggcctcagatttgagtctagtgggatagagattctcaagagggcatcttcactgaggattccagtttcattaccagatccagtattattgtccagcatgtggacccagcaacgatgaccaggaatggctgcagcaaagttctctagcagtatatgagggattaataacatgagagagggaagaataaaaaccagatgaagcatctgaaatctcccaaggcctccaacttgactcaagagctcctcaaaggccattgattgtgaacacgtgacccccaagaggaggcacaatggctttacggagataagttcaaagggagaaaatatttccttttattaattcaaattaagcttgtattgatcctcgcatcaatttctcatccatgggcccggactcaccagtgcaatacagcc

SEQ ID NO: 346234 - DNA, 1000 bp, Homo Sapiens
ctactgattttttaggaatagagctgctccacactgaatccactggtcttggttgcccccacatggaacatcaatattggtaaccacacgatccctttcagcacttgtgtaaacaggcaaagagatgcactcatccggagaatatggaccacatgcatcctgtggaatccagcccataaaacaagggagcactgatgacacgctgggagaatcaagctgattttcagaaagttgatttccatcaaaactacatccttctagtaacaagccactgatcttaatttgtagctttgcttcttgcagtcgacctttccatgaggctacaaatttaaggctatccacagaacgacccactgcccttgcagtttcctggcgaagagcattaagaaatgtgtctggatggaaaagttctgataggtcaagtgtttcagagagaagagcctgtttttcagctttatctacccagttctgtattgcaagggcacgggcaacaagacctctcaggtattgtaagggatcttctgggccttcccacttgctctgccatgcgagaggacacttttggtttaataaagcacttgccaatttttgtacttctgaactcagtaaagtagttcctctgatgactttgctgagagcagcaagagactggtggacactttgtactaaacgaatagcattaaattgttcaagaatgatgaatgacagtattggagatccttgtcgatcgttaggaggaggcactttctgatgtattaggtttgaattctggtttagtttcttccagagattgaggacaggagaaagttcattagaccagatttctctatcaaatttggaaccagctgttatggatctgcccaaaatcctcaactgtgaaataacctgagaactgatcatgcgctgagatgagcgagcgatattggcaggcagaccaaagaaactaggtttgtcgtcctctggaattttctcaatgacagcacgatagtccaaaatgctg

SEQ ID NO: 346235 - DNA, 1000 bp, Homo Sapiens
atgtctagttgtctttgacatttaatttcaattttcataggaattaatcatggctctaacatttacattgatactgaccatgtgtttatcttacacaatgctcataatgttagccactgaatgcaggcaaactagagaagtatgatgcttttatttatttagcatctatgatgccatatgagatcaatttcttcattaaagaaaaacaaaccagcataagaaaaacgaattaaaaattttttttttctcagtggcagaatcacatagctgtttcgatacagatttccagtaggtctaaaataccgttttgggaattgtaaagattccattacagaaatacacagaacagaggataaatacaatcacactagtttatcagatggttgcactacacatcctttgccttacttttcctataagaaaagttcgcaggatcaaataaaaaattctactagcagcatatgactctggtttgggaggacaaaaccctgaaaggaaaagataaaatcaataacctggtacacgtgcagtgaaatgctttgtctctgcagaagtgtgcacgtttgtgaatatttcacataaggtaagaaatttctaatttcaaaaaaactgaaggaatctgaacacctattcttcataaaaacaaacgattgcttttcaatgcctttttcccttggaacatacgctgctttaagaaaggtggcgaaagcttcaatgaacagcgttttgttattcatctgaaacacttggacagaaaattggcaaatttggtacatggttcaagaagtgaaacattacagattttataaaaccaagttaaaacatgcacattttctactgccaaatggccaataccttaaattgtctttaaaagactaaggatcttagggggaaaagccacttctaatacataacagtaacactgcaacaggagtaataattaagttaacagaaagtattaaggaaaaacaaagtaaccacttaaaaaacaataaacatt

SEQ ID NO: 346236 - DNA, 1000 bp, Homo Sapiens; identical to SEQ ID NO: 161386

SEQ ID NO: 346237 - DNA, 1000 bp, Homo Sapiens; identical to SEQ ID NO: 161387

SEQ ID NO: 346238 - DNA, 1000 bp, Homo Sapiens
aaagagaacaaaataggcattttactgaaagatactgaaatgtactttcaacatgcttgtatttaattttacagtcatttgggaatcttcttaacccgtgattggagggatgcaagagattttcggaaggtagactgcacttctaactgaagcagcctgggaatatctgggtacccacccagctgggcccagagtgaatgcatagatgtcttctctgctattgggtagcttgaagtggacagatcaacattccagatggcctctgtctggtcctcttgttgcctaaatttcttgcatatgtcagaggttctgtcctcttccattagtaattttaagaatggcttttgaacaaatgtggtagaggcaggtatctgcttttcttcgatgattaaggggataggttgactaagattcaattcatgtatctttttgagctggttgaatacgtgtatcattttcttcaggcactgattccgtttctgccctagagacttctgcttctcagtccagacctgcatcacctttttcccgtagtcatcaagtctgctcagcatcatgtggaggttcctggcctcatagcctttcccagtattttggatggcttttagtcgtttcattatgttgttcttcaataactgttcttgagcctgttctaagttcataggggactccaaagcgtgggtttgctcagaggtaagagtgacagctgacacccaggcatttactggggtgatggggactcccagtgcctgggcctgctgaggggtgagagtgatcccctgagcctgcgcctgctgaggggtgagagagatccccagagcctgggcctgctgaggggtgagagggatcccctgagcctgcgcctgctgaggggtgagagggatccccagttcctgcgcctgctgaggggtgagagggatccccagttcctgcgcctgctgaggggtgagagggatccccagggcctgggcctgctgaggggtgagagggatctccaatt

SEQ ID NO: 346239 - DNA, 677 bp, Homo Sapiens
ttggatcattgttcccaatgcctcctgccctcctgcatttattttttacacactcatcctttgccatgtggctttgcagctcctcgtgctagaggagaactgcctttccccatctgatgctggacatggccatatgggttgctttggtggatggaatgtggacagagcagcaggtttctgatctggatgagacttcaagaagcaccacaatctcaactcatgcttgttctcctctgtgaaaacaaagggatgttgctctccttcaaatgcagccccaagtatgcatgctgctatctgccttctctgtcattgataaattacacaagcagcgcttatcagatgaagcacctacttatgtcgaatgaatggcagcttcctggagtgaatggtgtctgtgcctggagcaggatttgcttggcctcctgagttgtcttcttcagcatcccccaggtaatgtccagggcctgtgtcatccaaggaagccacatcatccgggattgtgggtcctgtagggtcattttcttcattttggtaccgggttgggtcctagccatgccatggtatggtttgatgcctcgtgctggaatccaaagaggacctgacggggtgtgaacacaagcatatcctctttcccacattagcaaatcatttggaccacaccatatattactatttac

SEQ ID NO: 346240 - DNA, 1000 bp, Homo Sapiens; identical to SEQ ID NO: 161388

SEQ ID NO: 346241 - DNA, 525 bp, Homo Sapiens
ttttgttttctgttctgttttaatgtttcacttacagcttagtgggaagataacttggagaatcatctttgctacgaataagatcattacatttatcgattgcttcatgaacggagaatgtgtctccaatactataaagtatggctagattcttagcaagcagtttgcgggtaggaggccctggggagctgttcaacaaagacaggagctgttcaacaagagtcttctgtttctcccttacatcattcctgctggttgccaacaagagcttctccaagtatctcaaccactcaaaaataaactctgccttctgaacttcacctagttgattgtatgcttcttcattcagcagtaagctatgagctaattccattccttgcagcaatcctcccagctgatcacagttcttctcgttaaactttggtcaatatacctaacaataaaaatctttgggggtcctcctcagctgagcgtgcgtcccggtccagcaacgttaccggctgctctgctaaccctagcagagtc

SEQ ID NO: 346242 - DNA, 1000 bp, Homo Sapiens
tcatgggcgccgcttctcctctacctgggtgtagtctgcaaacttcctccccacccccagttcctgtgcctcgaggtccttcacgagtttagcgcgcactcgtaggagccgcgcagcgctccctaaggcctcagtgagtggagacgctccggggagccggcagcgggaaccatcggccgcccagcagggtgcggctgccggcagcctgatgggcagctcccaggaagcccagggcaaggagcgctcctcaaccctacgggcccaccgccagttcctcgccagcggttcccacagcacagcccggccacgcccggccacctcccagcagcacttggctctccggccgagggtcttccctggcagcaggtggagccagccaggccctggggactgcggggcgcggcgcatggggcggccgacctggagcgcggagccggtccgtgggctcccctggattggtcgccggcgcacccctgactgtgactctgactccaggccgcgcgtgggacgctccgtcgctgtcgccgcgcccgccgggtctagtggtcctaaacatttcacaattgcgctacagaactgttgaactgttaagaaccactggacccagcgcgcgagtccccaacaccgtcggttcgccgagctgcggagagaggagcccccgacgcccttgggaccgcccgcgtcgcctgcggatcccggggaccggcccctgcgcccagatccccgctggtcgcgcaccccctgccctgctgcagccacccggccccgacgccgtaccggacgccttagacgccctcgcctggcgctgggggatcccagccgccaagcccagccccgccgcgtcctcgctggccccggcgtcccctcgtcccgcgggccccgcgtggcagggcggctgagctccgagcggcggtggccagcgcggcggcgccttttatgcggcgcagccgcccttcccggcgccggaatgtgcccgcgccgcgctggcccgaccggtttt

SEQ ID NO: 346243 - DNA, 1000 bp, Homo Sapiens
tcatgagcgccccctggtgtcctgagcgccccctggtgcttctgagcaccctctggtgttctgagcaccccctgcttcttctgagcgctccctggcagttctgagcgccccctggtgtcctgagcacctcctggtgtttcctgagcgcctgctggtgtcctgggctccccctggtgattctgcctgccccctggtgtcaacaccccttagtggttctgagcagctcctaggttccttagggccccctggtggttctgagtgcctcctggtgtcctgagcaccccctggtggttctgagcgccccctggtgtcctgagcaccccctggtggttctgagtgcctcctggtgtcctgagcaccccctggcggttccgagtgccccctggtgtcctgagctatccctggtggttctgagtgctcccttgtgtcctgagcgccccctagtgattcatagcacctcctagtgttctgagcgccccctggtgtcctgagcgcctcctggtggttctgagcaccctctggtgtcctgagggcccctttgtggtcctgagcgccccagtaatacacggccgtgtcctcagatctcaggctgctcagctgcatgtaggctgtgctcgaagatgtgtccctggtaatggtgactctgccctggagcttctgtgaatattttgtgttaccattgccagcgttgatccatcccatccactcaagcctttgtccaggggcctggcgcatccagttcataaagtagtcggtgaaggtgtatccagaagccttgcaggagaccttcactgaggccccaggcttcttcacctcagctccagactgtggctgctgccaccaaaaagaggatcctccaggtccagtccatggtgaggagctgtgctctgggggcttcttctgaggagggatgtggttgttgggtgatgctctcagggcacaaagatatagggacagcccctcttcaccaggaaagaaagtggctttgttcatactggtt

SEQ ID NO: 346244 - DNA, 1000 bp, Homo Sapiens
cacttagaaacaatttaatgatttattacattacagtggcatcacaccagcagtcaataaggccactctagggaaaaatctttcagtatttccattacacattctgtttacaagaattcacaaactggtaaaattcattctaacaaaacttggcaaataaagctttggactggaattggcatttctttctctgcttttccttcccactgtttctttcttttatactatagtattcatattttaaaatgttttaacttatttcagaacattaagatagcagttacatttttaatagttatattattttaaaatgactctaagataaagttttagagaaactatattatggatagggctgatttacattttcaaattttctaaaatcagctttcgttttagagctgatttttttttcatttctggaaaattatcaggtttaatcaaatacttttaaaatgattattatatattgccatctttaaataggtgttttgattcttcctacagaaattaaaatgtattcagtggaactcacattttaaaattctatgtttctgatgaactctaacattccaatgttgccttctaagcaaactgaaagctgccttataccgaatgaggaagagcacaaatactcggctgaatgaggtatcgcaaaagactgcatgcactttggagaaagacttaagttattgtcatacaatttccattccttttagctttttcttaaatatatgacaaatacctacacaaagagtggtatttcagtcaatatagtaaatttattttccagactgaccttcagcttaaatatgccagtgtgtgatttaatccataggcacctcatgaacacattattgtcagattggttacagatgctagtaaccgtctttaaactgaactcaaagaatgcaaaagcggcaagttcagaaaataaaaggcgagaacaggactttaagtgcattttaaacccacgggctagaaatcgtaccactgttaa

SEQ ID NO: 346245 - DNA, 1000 bp, Homo Sapiens
agattggaaaatcatttttatcaaagcatagcatggcagatggcggctgcagaactaaggaggaagtctgctcactaacagatgacacagcagggtcttcacacttcctcaatgcggaatctccacctgaatcactgccagtgaaagaatcagaggttggggggtgtggtacttataactgaggacagatgtatctcatcgttggactcatgagaaaaccgcccagaatccccagtctcatggctgccttcactatttgctgaatgttctgtatcagctgcaacaccaaagggtcttgagaagctggttgtctgacctggggagctaggggagtcttcatcactgattaatacagtggtgcctggctggtaaaagcagaccgctggagtaaatcttctttgaggctgctcaacttgtatcttctttgagtcttggaaaaaaaaccactttttcttagagttgtttttaattataggaccatagctattaattatcaggtcagttcctccctttgcatcaatgaagctgtttggcatgatcattggcattaaagattcttcatttcctacagctccttccaggttctttcctacctcatttccactagctaaggaggcactggtacgaggtaactgttgagttccattctgtgccgtcttggaagcagatgatttcctggctttacttcggtatatcaagatgagaacacagatgaggatgcaggtcaaggctatgccaacacctacagcaatgccagtcattgatttttggtccagatggtaatatcctgaataaactttggcatcagcagaatctaaacgcttgggcctctgatttgattcagaggtttcctttggaagtactgccagctccacagaatttgaaaagggtccttctcccacctcattggatgcagatatcttgacaatgtacacatttcctgctaccaagttttctagcaaagccatggttattgccccttcacggtgtaagacctgcc

SEQ ID NO: 346246 - DNA, 1000 bp, Homo Sapiens
agtgtgtattaaaatgaatttatttacacagtaacatgatgccacggagtacacagcaaagtaccacagcaaaccaaagggtggcaccactgctggcagagaggacctttcaatgatagatttatacaactttacaatatgtaagtagaggggtgaagctccggaaagagcaaaaacaagattttcaaatacagagtgtgggcagggccagagagaattaaagagagattggaatgaggactgtcatgattcaaatcaccaagtagaatgaaatcttgcttctgtatttgcctcatgccaaaatgccctgcatatcctcaacagaaaatcccaacccagtgtgttcatacatcacactctttagttctaactggtaaaggaagggataaccaagtagtatttggagcaagttcctgaaacagtgtggtttaacctttcaaaaatgaaccctatgtctggttcaacattcaagttatcatgagtgcggacacacacatactatccacacactaacgggcaaagtgggttttctgtactacaacaatattcgtagcaaaatatatgactctgtacttctgctaggttaaaaaatgtccgacctcttttgattccctgaaactttcttgatttaaaaaacaaaaccaaaccaaaccaaaccatgggggtgaatgggacacgtcaagataaaaagctggaataaacccagagactttctggagtgggaaacatgtaatgggatgttgggaatgcaggcccttgcagcccacctaggtggggaaagcttctagcagtggttgatgcaaaaatctattctaattttaaacagttgcagggagggggtgtttaacggctgtatagcaccttgtaccttctgggcacttacagatattaaatgatggtgatgatgaatggtacacaactctgtaggaaggtttataaaaacaattacaatttgttaagaaatttcccaagagttctttaaacaaacctatttaaacta

SEQ ID NO: 346247 - DNA, 1000 bp, Homo Sapiens; identical to SEQ ID NO: 161392

SEQ ID NO: 346248 - DNA, 1000 bp, Homo Sapiens
ttttaccagttctcgattttatttaggactcaaattaacaccaaccaaacatatcactaactcacttattttcacattttcaaagttggattgtgctgcaaatccatacatttgtgctcactacacattttttttattacattcattgagaggctccaaagcatcagtccaataaacatttttccagcccgataaccatccttcgtaagaactaagaggtaaaatcattcacacaactattttttcccttctatccttagctcataagcatttgaccaaatgccaatgtttttgccagttcatgttgtccgtgccttatcacaagtgacatgtctacaggacacggtatccactgactttgcttccttggtcccaagaaaaggtgttgacaaattccatagtttggtaaaatgagtgagtctgcaattgtgggaggcattttgtttttagcaatgaatcacattacattgtacctaacttctcaagcacaatctgatactaagatgatgaagatagttcttaaaaactctttataccagatgatttttaaaaatccacatacttttctacctaacatagatgttgtagggtgaagagcctatgaggcttgtttggcactcctgcttcatttgataatttctccacgcaaacaagacatttaggctgagaaagagaaccagcaagaatctggatgagctgggcacagcagctcacgcctgtaatcccagaatttagggaggcagaggcgggaggattgcttgagtccaggagttcaagactagcctgggcaacacagcaagactatgttctccacaaaaagggaggaaaaaaatctatatgaacccaaatttgaggcaggtgctgtattgcctaattagtggccatttgggtttttttgaccagtggttttgtgagtttgatgatattctggacttagtaaaaatgtgagaaagtaaacaactgtaaaaattaaatcgattcctggacagtgggaaaaaaa

SEQ ID NO: 346249 - DNA, 1000 bp, Homo Sapiens
tcatccaggcatcccgttacctggctggctcctggcctcagcatattcatctccagcctgatatccaggcttcaagccggccccccaggcctggagggtgggccagcgagagttccacagcaccccggcctgcctattcctaaaaccattggccccatggaaccctggctgtgggtgggcctcggggaagaccctggctcccaggacaccattcccataacctaaaccaattttctgtggctcgaggccaccattaaaacctggttctgctcccggtccatagccatttggaggctggtgccctggtaacttgccattctgcactgcggaagggggctgggatttcaggccccagccaccctctttgtccgaagggacccctggagtgggaagcctggggaggagcatcggagcgaccctcgcattgcagggacctggccagggcccattttcatggccgtgtcctgacttctgaggcttcaaggtccctcgcaggcctggctgggctccttcccacaggaaggctccagctccagcccgttcttgcaccatggggagacagggtacagcttgggaggggaaaagggtggaggggtaggcagtttctggcttctgggccttcataacccccaaatagcctggcatctgaggcttcatccccgctcctaggcctggctggactcccggtccatttccatggccatattctggctgggttccagccccagggaaggcccctgctctcagccttttcccatatcctggcttcagaggcttcacattccctccaaggcctgctccaaatccaaatcggttctgggctgtcaagactggctgagcactcagcccattcccattccctaatcctggctcctgtgccttcatgtcccctctaaagcctggctgggctcccagcccaattctgtactggaatcctggcttctggggtttgacggcccccacatagcctggtctatagccattttgagtggtggggcct

SEQ ID NO: 346250 - DNA, 1000 bp, Homo Sapiens
tactgttctaatttactgtattttcacagcttgttgttatatctgttacaatacatctcacaccactgtatttttttcacaatttttttggctatgaattttaaaaatcaacttgtcaaagcccattcttaaacatcttgcagcctggtgcggtggctgatgcctgtaatcccagcactttgggagggtgaggtgggcagaacagcctggccaacatggcgaaacctcatctctactaaaaatacaaaaattagctgggcatggtggggcgcacctgtaatcccagctactcgggaggctgaggcaggagaatcacttgaacctgggaggcagaggttgcagtgacctgagatcacgccactgcactccagcattgttcttggtgctttgtgtgtattagctcatttaatcttcacaacaactctagaacccccattttacagttgatagaaacagggacaaagagggtaggtatatcacttggccagcgtcacaccctgctatgaagcactcacatgaggcaacgtaaagcacacacaatacttagcacctataaactgcatcaattaaaggtcatccactgcagttccaaagctgtaatttttggtattttgacatccccacttcacagacagccttggaaatattttctgtggtttttgaactccagttttagctctgacttacacagtcgttttctcctaactacttcctgcagcattaagaattgtttccagctgctggtttctgcagaggattgtccttggagcgtggggtgtccactgtggttccagccgcagccctggtgcccacacatgaagatgccctctgaagacagtagtctcgatgggtaggacttaaatccaatgtaggaactagaaaaacagaccatctagctgggtttccaagcttttttgtgggctgcaatacacttggatcaaaggaaatctttcttgaaggttaaatatgtaaaacagttaaaaagtagtggccggtctgg

SEQ ID NO: 346251 - DNA, 1000 bp, Homo Sapiens
ttagaaagctctccggtgggtctcgtcatcaaccaggcttggcagccacagatctacagcttcctggcccagagatagctgggccacaggaggggtcagagctgcccgtggcactggttgtgaactggtgaaggcttcctctggtggggaccctggagccctgagtaccaggaccaaggggtccatgcatgccccaagcttttttacaaagttgttttcagagacacggaagtcgatggtccgcactttctcttcctcattggagttcccacactgtggaggaggggccaggggtacgaatccacgggcacacaggtggatgtaggcggccgccaggttgcaggcaggctggagctcctgggtgccacaggggacctgcacacacaggctgaggaatggtgtagggtctaccacccggaagcagtccctcaagctggagtgggggccctcgaagaaggcccagcaggcggggagctgtcccgggcaggcctgctcctgctgaggcttctcagtggccctgcagtcaccacccacctgccaggccaggctgagctcctccaggctgcgggccatagagccatccggcaacatcagctcattgcctgcttcattgtcattggtgcccagaaggccagcggatatgccgtgctgccagaggcccagagtcaggctgcagaggccggtgggcacgtcacaggagacagacaccccgtcctcgctggccagctcaatcctggagacgtccttccttgtcgtggcaggatgcagcttgaggtccggacaactgtcccccggcagggaggagttgtacagcctgtaggcctgcagactggggtagaggatgagggtcttgtggttaagttccacgaacagggctgtgagccccgagcctgtccgactcagcgtcagcgagaatgtgttgtgagcaaagtcctgggccaggaggatgctgccgcactgggtgctgaggtcccatacccggccgtcgaaggtcaccacg

SEQ ID NO: 346252 - DNA, 1000 bp, Homo Sapiens
tcagctcaacctccgcctcttgggttcgggtgatgatggttccacgtcagcggccctccgcctcttgggtttgcgtgacggttccacatcaccgaccctccgcctcttgggttcgggtgatgatggttccacgtcagcggccctccgcctcttgggtttgcgtgacggttccacgtcaccgaccctccgccttgaggttggagctgagggtggaaggggagtgagctgacgctcggaaggtgtcttgagattatcatccgctgagggtggaagcggcccccgcagacgctcggcaggtgtcttgatattatcatctgctgagggtggaggtttggaaggtgtcttgagattatcatcggctgagggtggaagcggcccccgcagacgctcggcaggtgtcttgatattatcatctgctgagggtggaggctcggaaggtgtcttgagattatcatcggctgagggtggaagcggcccccgcagacgctcggcaggtgtcttgatattatcatctgctgagggtggagctgagggtggaaggggagtgagctgacgctcggaaggtgtcttgagattatcatcggctgagggtggaagcggcccccgcagacgctcggcaggtgtcttgatattatcatctgctgagggtggagctgagggtggaaggggagtgagctgacgctcggaaggtgtcttgagattatcatcggctgagggtggaagcggcccccgcagacgctcggcaggtgtcttgatattatcatctgctgagggtggagctgagggtggaaggggagtgagctgacgctcggaaggtgtcttgagattatcatcggctgagggtggaagcggcccccgcagacgctcggcaggtgtcttgatattatcatctgctgagggtggagggtggaagcggaacccgcagatgctcagcaggtatcttgatattatcatctgctgagggtggagctgagggtggaaggggagtgagctgacgctc

SEQ ID NO: 346253 - DNA, 1000 bp, Homo Sapiens; identical to SEQ ID NO: 161394

SEQ ID NO: 346254 - DNA, 1000 bp, Homo Sapiens
tttcatggacaggattttattaaaattgtacatagatctcatatttaaattaaaaaatggactttttttctagtatcaaaatagttatttttaaaataccttgaaaaactttaatacaatttttaatatattaaatattcacctgaactctcagccatttatctcccatctctctttgctagaatcttgccttaccatcactatcattcttttgttttttttttctttttggcatctttaatgcttatcccagaaaagcattaaaaataaaatatttttctttaagtccacaatttaaaaaaaaaaaagaaagaaaaaggaaaagccattgacagtatttgacatgacattgaagattcttattaaaccagcctcatcttgtttgcccacatccaaaactctttagtaaatatcagttcttgccctgaaactggtaatactgacccaatagcatcctctagtggccaaactgtagcaaagcacccaatgatgcaggaaggttttcgaccttgggttatatggaccttgggtgttggaagtctagatatggagaccccccaccacaaaaaaaaaaaaatttttttttagagattacaagacaacgggtttcctggaaacccattctcaacatgagctgcctacagttgcttggcaaagtcccaagaatgccagcgtcacacaatactgacacgctccatcaaaagctggactccggtaaggttttctttcgacctaaagaaagagtgtgatatttgactctctgaaaggtgccataagaagcctgctcccctggaacagtcctttgtgacatgcccagtgcactgcctctcggggccctgctggctttacgagggaggcggagagagctgggggctgaccagacatccctctcgagccggctgcccaggcccctggccaggccctctgggatcctgagggcaggaggtgagcctggagcctgcccgtccatggcagggctcagcccgccactcaccaggga

SEQ ID NO: 346255 - DNA, 1000 bp, Homo Sapiens
aaaattttcaacatttcatttatttcaaaatcgattttattgcagccaaaacagtagaattaactgtacataataaactattatatatatacacattttaagttatagggaataaagtttattttggcagatagtgttaaacaaaattaaagttgcatacattagtaacataactcaacatccttaatttggtatagatgtgacacattttcttgctctcctgtgttctgctaaatcaccatacctaaactgctttataaaactgatatgctgaaatttaactttactgttttcgcttacgctctgattccaaacaaaacttttcataagcttcttctatctctgggtccatctcatcatcaatatcatccaagtatggatcaccagccccggataaatctgttccattttcttcataatctggaaaaaagtcctctctttcaagtaattcttggtatttctcttggtaatctggatcagctgcagtgaaaggaacaccatcagatgtataaaatgttggttcattcataaagtagttaggatcattttctggtgttgcttctctatatgttgaagttgcatggactctaccccagttacttgaccggagttctacaagcttcaagagcatctgttttacatctctactgcagtttgcatctaggacaacgttttcaattctctgaataatttcttccatatccatctttcctttttccttccaagcatcttccaaaactgatcctgtcaactgaagaatatctgctcttgtaacctgtccatttgttcccttgatctccaggttaagataaagttctcccagaaagaatacaaatgcatgaaatcgttttcgagtaacttcatccccttttgcagcttgatctttaacttcatattcagtccgacatctttgaagtagcaattggcggaagttgccactctgtgggctaattgtcagatgatgggacaggtaattacacaggcgagctcccatataaga

SEQ ID NO: 346256 - DNA, 564 bp, Homo Sapiens
gacacaaattaatttttttaacgtaaaataacactaagagttcatctaaacatttgtcttagaaattcaggtcgatggctatgaagggaaaagatgctgttagaacagagggaagtgggtgacctctccgaagacggacgtgctctgacggagggctggagtgttcctgcggtagccaaaccttccattgaacccatcgatcggtttcagatcagcattgtagtggtcatgcccagtcacctgctggagagaatgccctgtccctgcccaatttctcctgttgaggtatctttgtccttgcccgaagatgtggatgtagtctactatccagccatcccttcctgtaccgccatgatcctgatcagttttccgcaaaaggggcggaaccacgtgactctggaagtagctgcgggcgtggtagtcctgctgcgcgttgtagggcggaatcgccgaccacagcttgggcctagagcgcccataagcgcgggcagcggtgctcacagccaccccgtccaagataaagcctttctccagtcgcaggcgacactcgctcaggtacgccat

SEQ ID NO: 346257 - DNA, 1000 bp, Homo Sapiens; identical to SEQ ID NO: 161395

SEQ ID NO: 346258 - DNA, 1000 bp, Homo Sapiens
attcagaaaaaagattttattcttctgctgaaatgtttgaaagtgaaattattttgtagagcattttccctttaaactgcaaagaagccccaaggtcattggtacttggaagtccagggagaaagagcgctgggttaatgatggagaaaagataggtgggcagactggggcgtagtcccttggtgtggacgccccagcgtgctcttatttcagtgctcaccctgttacgtgtgtctggggccactgactttctcctgcaagctgtggatctgaatttaactcaaatggggacatgggggcaggaaaagggacctgagagttctaaggggtggggatgggaaaactggtaaagaaggtggtttgtgggttttcagatgcacctagtagagggaagtgctggggggaccagcctcccgggccaggctggctggagctgccttaactttcccacctctgctcagcccaccagcttgtggacctgtggcagcgttgtgttgtgagaggcacgtgcagatttgggagtgctgcaaaccaaagtgttacctggacgagtaagcccagtgtgggagtgtgggtgtgtgggtctgcagtcacaggctctgtctttgcgatgggatgccatgggaaacgctaggattttacctggtttattaaattgctgagtggctaaaaagattcctatgggtggggctggcttatttctcttaaacgatgcccttctgagggtacatgtggtttttaggaacacaaaagattccaagtccctcatgacaaacacaattccggatctcttcctggaggccttgcaaggcggagtccaggctgctccctaggagggccctggtgactcgagcttgttggcgatcatctggctgaccttgtgcagggcctcctggaactgggggtactcgtcccgcacgcggtccaggatggtggcgatgagagccagtcgcttgtccaggcgctggcgctccagcactagggactgcttggagcggaa

SEQ ID NO: 346259 - DNA, 1000 bp, Homo Sapiens
tttttttttattttcataattgagattttattggttgaggatcagtacagacatttcaatttgtacacaattcttaacatatgtaatgaaattctaaaaagccatgtattgtaattaattcttttttaaagttattccagtgactttccagcttaaaatttggaagcaaattttccttaagaggctatcaagtactggtatcttcacacgttggtcagctgttacatacagcccacctgaatagcacatacggccacaactgaatagcacgtacactgcatattcatatttgtaatctttcacagcacagtaacaatgttattaggaaaacaggactaccaaaaccaaagatgttacagagtgcacacaattctgacagggagagccatgatcagagtggttttctttaggaaacaattctactaaaaaacaacatgggaatagaagtaatttaaaatgttcaagacattaaacacaggactgactccatattgccatttaatatgctttgtattataggatataaaaactaaccccccatctatggaatattaagctgacacccgagatagtcagagcctcccgtaattcaatatcccacactattttctggttgtaccaaaaaagaaacagccagcaaatgatttcacctcttaaaaaaaagcatttacatttaaaaaaaagggatgaggtgggattccttccttcttaaaaatgtttctagagctactaaaaaatttgcatttacagaatagctgataaaaatattcctctggattgtacaagaagggagacagggaccactgataagacatggtatatggtattaatcagacttggcttctttctctcctgcttcatcagaggctggactctcctcagttttcgtttccccattttctgcaggtaaatcttctttagtttcttggttagccacttcagtctgttttccctttgctccccttttcccttttgtttgcacttttttgtctgaagattt

SEQ ID NO: 346260 - DNA, 1000 bp, Homo Sapiens
ttttgttttgtttttgagaaagggtctcactctatcactcaggctggagtgcagtggcatgatcatagttcactgcagcctcaaactcctgggctcaagtgatcctccagcctcagctccctgagtagctgggaccacaggtatgcaccatcacgtccagctataacattcagttttgagcaaatattgatcaatgagtccaacagtcagaaaaatgagctgaaaactagaggtcaccaggcctttatacatctgtctctctgtctgatggccccactaaacatagcataacagctttttcttcccttatgccttccaaatctcgtacaaactcttattttagacaagtctaacctagaactggagaaaaaagtgattctgggaaatgtagttaatgtaacacaatttttacactcaaaacactggatccaattcccagccacgagcaaggacaaagaataaaatataaaaatagtatattaaattaatttctgctgaaattactcactagacaataaaagcttttaatagtaaaaatttatcatctcagaaactctaacgtctcttagcaaaaaagaataggaagaaaaatattgagtgggcaagttccattatctgccatgtagactaaaaacaaaacatcaacaaaaatcaatatttggtttttggtttgtcaatattatattggtttgtcaatattataacgactacccatttaaagaacaatgaacattaattagaaaccacttttttaaaaaagaccactgctgcctatacagaaaaaatatttcgtgtcctccatgatccaaaagattttgtaatggaaatcatatttacatcagaaccaaaattaaagcacctcatactaaaaagtatgtggctagagctgaaaaggtaaatttatcaccttcaatgttcctatcagaaaacactggtaatcaacgagccagcattctactttaaggatgaggcactgatcttcatttctagtagagatttt

SEQ ID NO: 346261 - DNA, 1000 bp, Homo Sapiens
aattttttttcttcagtccacatgagtaatctaaaagaaacacatagacagaagaatctctttattatcatctttctaccaagtcaacatcaagcattaaaaaaatgtaaaacaaagtgaaaaccatccttctctgattcatcgtagacccagaatctgccagtcaccaacacctatcttcattttctctattacggccaacttttatctaagagatatcataggggcatatttaatagagtttgtcattttgtgttttatgaattttagaggtttttttgttttgttttgttttgaacttttatttgcattttcttttggctgaatttgtttgtctcttaagtttatgtttcttctggggtatctttttcttccgtgcatcctccttttctgcttttggaacaaggtgtttcttttcactaagcatcatctggatgtggcaggggagtttgtggatgggttcatctgcccatgagttctgtaagtcaggtggtacattatgggtgccttttccctggatgtgctcaataaccagggaatctacatctatacccttaagttcagcataactctgcacttgtaagcaaatttcagtaccttttcggggccactgatggtgagtccagccccaatgtctgtcttgcgtacagcgaccaactccactttctaagactgaaatggtacacataatttctgtaaaagaaaatatttcagatacttggtggcttttcatataggcatacctgtgatggcctgagcaccttcacagtttacagtgaacatgagggtttcatccttctaacatgcacgacttcgtgggattttctgggtcatagtgaataatgttcatagatcaactcaggccacacaagaggacaggttttctttggtctttaaaaggaactgattagagaatgtgcaactgcactccagcctgggagacagagcccgactctgtctcaaaaaaaaaaaaaaagaaaactcgtgagaacgaatggca

SEQ ID NO: 346262 - DNA, 1000 bp, Homo Sapiens
ttacttacattcaagaagttttctgccagggtgtattttttcatggcttctaaatgaactgggatgactgaaggcttttccacattctttacagtggggtttctctccactatgacttctttcatgtattctaaaggaactggaacaactgaaggctttaccacattgtttacattcatacggtttctctccagtgtgagtcctttcatggatttgaaatgaattaagacaattgaatgctttcccacattcgttacatttataaggtgcatctccagtatgcattatcatgtgcatttgaaagcttgcaagagaaaggaaggctttctcacattgttcacatttataaggtttctctccagtgtgaatattcatgtgtccttttaacgtagttcgataaatgaaggctttcccacattcgttacattcacagggtttctctccagtgtgagttctttcatgtactcgaaaggaaccaagccaactgaaggctttaccacattgtttacattcatatggtttttctctagtgtgaattcgttcaggtacttgaaatgaactaggacaactgaatgcttttccacactcctcgcatttataaggtccatctccactgtgcattatcatgtgtctttgaaagcttgcaaggtaaataaaggcttttccacattccttacattcatagggtttctctctagtgtgagttctttcatgtatttggaaacctgtaagagtactgaaggtttttccacattttttacattcatagggcttttctccagtgtgagtcctttcatgtctaagaacagattgacgataactgaagggtttcccacattgtttacatttatagggtttctcttcactgtgatttctttcatgttttttaaatgactggaaataactgaaggccttcccacattccttacatctatacggcttttctccataatcttgacactcatatggtttgtgtccagtgtgagatctgatgtgcctt

SEQ ID NO: 346263 - DNA, 1000 bp, Homo Sapiens
attttttcatcagccataatagtaatcaaagacagagaaatgaaggcttttacatgtcataatttatattttaaaattaacatgcttctagaaataaaaaaggaaaggaagaaagaaatatacaaactaatcagcctggtcaacatggtgaaagcctgcctctactaaaaatacaaaaattagccgggtttggtggtgcacacctgtaatctcagctacttggaatgctgaggcactagaattgcttgaaccttggaggcggaggttgcagtgggtcaagatcacggcactgcccttcagcttgagcgacagaatgagactccatcaggtgcaggggctcatgcacgtaatcccagcactttggaaggccaaggtgaacaaatcacgaggccaggagctcgagaccagcctcaccaacatgaggaaaccgcaccacaactaaaaatgcaaaaattagtcaggcgtggtggcacacacctgtaatcccagctactcagaaggctgaggcagaatcgcttgaacccaggaggtggagggagcagttagtcgggatcatgccgctgcactctggcctggtcaacagagcgagactgtctcaaaaaaaaaaaaaaaaaatttaaacgcatagaagcagagagtaaaatgatgaaaaaaaaatcccctatgaggttttcttctatttaggagagcttcttcattatctttcagagattatattttcttccatcttccgcatcctcctgttcttcagccaataaatgaaaaaagatacagagaagacacatttgctttttatccactgcacttccactcactattagtcaatgtggttacagctgagaatagcagttttctggcagggcagccacttctcagcaataaacagcacactgaaaaaaaaggataaatccttcataaaaagctaatgaactttttttttcctggaaactttaaaatccctcaaaaactgtttattatacaggtgaattttgatagtcat

SEQ ID NO: 346264 - DNA, 1000 bp, Homo Sapiens
tcataaggtttcatcagtatcaattttctcatttgagtaagttgtccacagaaaggcttccccacattcgttatatttgtagggtttatcattactatgagttctctcatgaacaagttttgagccacaagtaaaggtcttcccgaattccttacgttgataaagcttctcaccagtatgaaatctctgatgaacactaagttgatagccactaccaaaggccttcccacagtctttacattcataagacttctcattagtatggactctctcatgcttaactaggcttgaaccccaactgaaggccttcccacattccttacatttgaaaggtttctcaccggtatgaattttctgatgttgagtaaggtgatagccacgactaaaagccttcccacattctttacattcatagggtttctcccctgtatggattctttcatgttgaacaaggcttgatccacaattaaaagccttcccacattccttacattcatagggtttctcaccagtgtgaaatacctgatgtcgagtaagttgatacccactacaaaaggtctttccgcattctttacattcatgggatttctcaccagtatgaactctctcatgtttaacaaggcttgaaccccaactaaaggccttcccacattccttacattcaaaaggtttctcaccagtatggattttctgatgttgagaaaggtgatagccacgactaaaggcctttccacattctttacattcataaggtttctcaccagtatgaattctttcatgttgaataagacttgatccgcaattaaaagccttcccacattccttgcattcatagggtttctcaccagtatgaaatatctgatgtcgagtaagttgatagccccaacaaaaagcctttccacatattttacattcataaggtttcttaccagtatggattttctgatgctgagtaagctgatagccacgactgaaggccttcccacattctttacattta

SEQ ID NO: 346265 - DNA, 1000 bp, Homo Sapiens
gagacggagtttcactctgttacccaggctggagtgcagtggcacgatctcaagtcactgcaacctccacctcccaggttcgagtaattctcctgcctcagcctcctcagtagctggaattacaggcacccacgaccacacccgactaatgttttgtatttttagtagagatggggtttcaccatgttggccaggctggtctcgaactcctgacctcaggtgatccacccaccttggcctcccaaagtgctgggattataggcgtgagccaccgtgcccagccacctgcaggatacttttaagttcacctcaagatcgtgcattaacaattttgtaaggtgcttagctcttgtctcactactaggaagaaaagagtgtccaatcttgcattatcaagccagccatgaaaattccatttaagggagatggtggggacaaagaagcatggatgagggtcagacagagttctgtggtaggaaagtgagaggctcccaggagctgaaggatgttagagatcaactgatgacatgaggatattagctaatgctgccaaggactctgtacagactcctcagcctcccaggtagctgggattacagacacatgccacggcacccagctaattttttttgtagcgtttcagaggggagtctctctatgttgcccatgctggtctcgaacttgtggcctcaagcaatcctcccatctcagcctcccaaagcactgggattataggtgtgagcaaccgtgcctagtctgaactgtgaattttttaatgcaaaagctgactgagctacttgagccacagcccttagagagttacacataatatgcaaagaaggaatgcaacataagaaagggtattctacatcataacacttctttttttttttaaattttttgagacagagtttcgctcttgctgcccaggccagagtgcagtggtgccatcttggctcaccgcaacctccacctccggggttcaagcaattcccctgcc

SEQ ID NO: 346266 - DNA, 680 bp, Homo Sapiens
gtggggagggtggagggctctttattgtggtgaccacgggcatcagtaggagggtccccgggatccggcggcagctcctcgccagcccccctgggcgccctcacgtgcccaggagcagcccggagaagctggagcccgcctggatggtgaggacggccccggagccattgtccacaaacacagaagcgtactgtccagcctgcagctgcagcagcccctgcacctgtagcgtgaagaccctgctgttgctctccaggcctgagacggcctccaggcacgtgtggcgctggcacagggactcaatacagatgagaacacacaccacgtcccgggcccgcagccgggccttgccctgcagctcactgtggtctgcggagagagccctggggagggtggtgcatggggggcggggtgggggctggtggggaggggcttcagggcacacatcccaggacaggcccaggagtggctgctggggctggggagggggcgcctgaggccaggcgtgcagcagggaccccatgcccagtccaaggccccccatggggcaggggataggtccctaacaggacccgcacccggggccggcgatgccaggcgcccccagaaagctcagccccagccccgtcacagcacacggcactgccccatccggctcacccacgtgcagactggcagag

SEQ ID NO: 346267 - DNA, 1000 bp, Homo Sapiens
ttacctgtgtatggcctgcccggcgggtgtgtggtccacctccagccctgcctgccgcaggatgtcgatgactgtgttgttccccagaaagtgaccggatgcccactggatcctgagcactgcgcggcaatggtccacgtgtctggccggcgttcctatccatcccctcaacctcaaccattccacacctttattgttttcttcctttccctctgccagggcagggagaatggtcacctccacccaggtggctactccttgcacaactccaggaggcgccattcccatgtggcctgtgccccagaactgtgtaatgcggttcctgcgctcccgagcccatgtttctaccaccctgccctctctgggcttggtttcacagcaccccacagctgctccgaaggcaaagaagcagatcttgtcctcgttctcccgtagaagcgccatgaccctcttccccatgcgctcattcctcttgtagatgagctcctggcggaagtagctgtcaatctcctgggccgtcacctgctcgtgtggcgggagggtggtgttgataaagttgggcagctgggatgtgtcgtggttgaagatgactgcgctgaggtctccgcagttgtagtgcttgatgaggtcctccgtggtgtaggaggcctgcaggctcccggcccgcacactctcctgctgcagcagggtttggttcagggcaaacagcacctgggagaagttgagcccgttgttgaggggatggcactgctcctccacctgctccacagcccctgtggtcttcttcatcttctcagcctgctgggccaggtagaggtcgagcacgggcacaccacggaagcgcacgtccctctctgtgagcgagtttaccatgagcatcacccagacgggcctcttgcgctcccagttgcccgcgatggcattgaataggtagtcagcatagagccccttgccccgctgagcgggcgtcatccaggagggcatcatcaacttcacgtag

SEQ ID NO: 346268 - DNA, 1000 bp, Homo Sapiens; identical to SEQ ID NO: 161399

SEQ ID NO: 346269 - DNA, 1000 bp, Homo Sapiens
gagagaggatcttgctctgttacccaggctggagtgcagtggtgcaatcatagttcactgcaaccgcgacctcctaggctcaagagatcctcccacctcagcctcttgagtatctgggactacagaccctcatcaccacaacacccgtctaatttatttattttttgtaaagatgaggtctcactttgttgctcaggctgacaagtattatcttaatgttatagaagaaaagtaattctggccatatataggtattattctttgcagtggaatatcatttcagaaatttgtgccaaacataaaattagttttctagtagtaaaaagtaattaaactctttaaattattattacccctagtatactggggaatgagtgtgtgttccaaatgaaaaaaacttgggatgtctaatgagatgctgttttctgtcgcagaaaatctatgtaaaatgttttttctcacgtgtacactgttgatatttgagacagcacatgttaacacttcaagaagtaaaataaatgtgttgattatatccacagttttcatatttattaagtatatattttgtttttaatgtaatgcctattgaaaaacctgtaaatagttgtttcttaaaattgataaatactgcctaagatttttctgtatattttcatatttcaattttcctgtgaggttagaatgaacacttttagctaagacatttgggcctccaaatcctaaacctttcagaatgttagtttattatttggtttttacctaaattattttctgcttattcaagatccttaggtctatccagttacatttttatttttttatttttatttttttattttgaaacaaagtctcactctgttgccaaagctggagtgcattggcatgatctgggctcactgcaacctctgcctcccaggttcaagtgattctcctgcctcaacctcccgagtagctgggattacaggggcataccaccacacccagctaatttttgcatttt

SEQ ID NO: 346270 - DNA, 1000 bp, Homo Sapiens
gagagaggatcttgctctgttacccaggctggagtgcagtggtgcaatcatagttcactgcaaccgcgacctcctaggctcaagagatcctcccacctcagcctcttgagtatctgggactacagaccctcatcaccacaacacccgtctaatttatctattttttgtaaagatgaggtctcactttgttgctcaggctgacaagtattatcttaatgttatagaagaaaagtaattctggccatatataggtattattctttgcagtggaatatcatttcagaaatttgtgccaaacataaaattagttttctagtagtaaaaagtaattaaactctttaaattattattacccctagtatactggggaatgagtgtgtgttccaaatgaaaaaaacttgggatgtctaatgagatgctgttttctgtcgcagaaaatctatgtaaaatgttttttctcacgtgtacactgttgatatttgagacagcacatgttaacacttcaagaagtaaaataaatgtgttgattatatccacagttttcatatttattaactatatattttgtttttaatgtaatgcctattgaaaaacctgtaaatagttgtttcttaaaattgataaatactgcctaagatttttctgtatattttcatatttcaattttcctgtgaggttagaatgaacacttttagctaagacatttgggcctccaaatcctaaacctttcagaatgttagtttattatttggtttttacctaaattattttctgcttattcaagatccttaggtctatccagttacgtttttatttttttatttttatttttttattttgaaacaaagtctcactctgttgccaaagctggagtgcattggcatgatctgggctcactgcaacctctgcctcccaggttcaagtgattctcctgcctcaacctctcgagtagctgggattacaggggcataccaccacacccagctaatttttgcatttt

SEQ ID NO: 346271 - DNA, 1000 bp, Homo Sapiens
ttaggacgggagcggggacagggatagggcgagggcgggcaatccaaagtcatcctggaactgggcctgggggatcggggcggagcctgggggagtggggtagtgggcggtcggaggatactggtgagtgaacacagctgcaatcagggctgtgaaagatgtacggagggtgggcacttcccatcctggctcctcaacggtcctggcgtcgaagtggaggtgatgggggatgccgtactggaggcaagtcataatgtccagggatgtggctgttcttgggtgagtcatagtggccggggggtaggcccggaggcagagggggctgggagcccacagagtctcggtttttctgggtaccaactccaccactctgatgctgtacgaccccacttctatcctgagctcatggatcagggggctgggctgctcgtaggtgccactgtctctctgtggctggggttgccgccgcctctggctgtcccagaactgaggaggctgcctggggggagatcctgagggagggcctttcatctccatgtagctgctctcccgggggccccctggcaagctgggcaggtcccggatggtggcatatgggttctcactgctcagggaagccacactggccccgagctcctcttcagagatgagccctttattgtagaatgggcctgggccattgctgtagctatagctgtagcttcggtccaggcggctgctccccctgtccagaggccctggagggggctcccggcggtgcttccagtcagcaggcagggtggtgtggttatcatgcccttgggccccacctggccgctcagggttctgcaggctggcaaagagcgggcctggaaccttgttagggggtggggggtttggggagcactgcgacagggtgtggtagctggggttggagtagtagtgactgtagctcggagggacatctggcatgacatactcggagccgtccaggcgcccgctgctgtaagccacagccagg

SEQ ID NO: 346272 - DNA, 1000 bp, Homo Sapiens
tcagggcagggtggtggcgcggccctttatggccaggactcggcgaggaaggcagggggtgagtccagggacgtaattccacaactttacccggcagtcactggaggctgtgaagatatgcttggcattggtgcagatggcattgatgggactgtcgtggcccttgatctcaccgatgggtgtgaagttgtccacgttccagaccttgatgacacccgcacggcaggcgctgagcagcatggggcggcccgggatgaaggccagggcgcacacccagtccttgtgcgcattggggatttgctggatgagctcctgctggtctaggtcccacttcttgatgccgttatctcgggagccactgaacaggatgtctccctggatggcgagacactcgatgccatcgtagtgcgggggctcgaagttgtgagtggggccgatggtgcccgtcacacactcgcccagctcgaacatcttaacgtagtggtccttggagccagtcaccacgaggtcatgctggctggccgtctgggtgaccgtcaggcacatcacagggccgatgtggccagtcagcttgccgacaggctggaacctgctaagctcccagatgcggacggcattgcccgaggcggcgtacagcatggtgcccgaagggctgagggcgatctggttgatctgatgctcgccctgagcactggtgatggcacgggtggatgtggcggcacaggcatcccctgagatcacctggcccgaggacgtgagagtccgaatgcacttggctgagtcccggatgtcccacaccttgatgtaggaggtggacacggagaacacaagccccgagtggctgcagtacttgatggagaccacgttgttggggtggccctttagagctgcgatctcctgtcccgtaaccaagttccacatcttgcagcttcggtctttggaccctgtgaatagcaactcatctgtggcatccaggcagaggatgggcttggtgtggcct

SEQ ID NO: 346273 - DNA, 1000 bp, Homo Sapiens
cagcttgccacaggcatggctggagactaggaatagagccttgctcactgacccatttcatgtctaggcttccaactgagactacagtttcattacaatctatatgcgcccataggtcctgcctgcggcaatgacatctctcgggtcagtaagggccacttggaacaggaatatcacccctatatggaagaccaggtggaggcttatcaccttcacagtaaggtactcactgtccacgtcaagagccaagccaaggtactgttcctccaatgagtaaacagcactgctgtagggctggcctaagtcaggcagttcaagataacctgaaggagtcgaataacatctatccagtgagtcctgcaagacttcaggctctttcacctccagcagctccctgctgagcctggggcatggtgggttttgatcttcttccccttcttttcttccccttcttctttccttctttgatcttcttccccttcttttcttccccttccccttcttttcaatttctcccacgtcaagagaaaagccaacatgtttttcctccaatgcataaaaggaacttccatagggctggcaggagtcaggctgttcaagacaactggaaggagttgaataacatctatccagtgagtcctgcaagacttcaggctctactacctccagcagctccctgctgagcctggggcatggtgggccttggtcttcttcctcttcttggtcctttttagttctgtccacgtcaagagccaagccaaggtactgttcctccaatgagtaaacagcactgctgtagggctggcctaagtcaggcagttcaagataacctgaaggagtcgaataacatctatccagtgagtcctgcaagacttcaggctctttctcatccagcagctccctgctgagcctggggcatgatgggtcttggtcttcttccacttcttggtacttttcaatttcatccatgtcaacagccaagccaacacgctgttgctcc

SEQ ID NO: 346274 - DNA, 1000 bp, Homo Sapiens
ttttattcacttttcacccatttatttattcactcaacagatatttattgaatgctaagtgttggagatacacagatgacttggtctttcccttcaaaacatcataggaaaatatgggagaaatacatacaagtaaataattaaaaagcaatatggaataaattccactagaggggcattctgccaattacctgatcagcactccttgaagctatcaaggttatcaaaaacagggaaagagaaactatcatagccaagaggagcctaaggagatgtgatgacaaatagaatgtgccatttcagctgggatcctaaggctcttgacatagttcttgggtatcactactggttattcagggcctaggggttcttcagttagcatgtgatgaatgctgccaggaccgagtcctacccttcaaggcaacagattctcttctggccaagggtgtgtcgaggaagccaagtgaggtttcatcccatttgggattggagtaatccctggcaacatcctgagcggagcaaactttctgttcatccaatgccaagaaagagacttcacgatgccggtaagagttggacttgtcatggtgtctggggggcactggcgctttcccctcctcctcctcatggtcattttgattttctgggggaatgtttagagcttcctcctcttcatcatgagggtgttcactctctacaaccagagcagagtcgacttcgtgttccttaaatgtgattttggtgctcctgtgaggctggttggagttagaagggttgtgactatttgaacaagtgacagcacattcctccagtgagtcctgagggacttccttttcttcagtcttctgcacctctctgggggcaggtgattcctgtactttctcaacctcctcgtctttgtcgtcttcatcctcatcttcatcttcatcattttctgggctcagcttgtgaacaaggtgctctgccagcctgtgcccctcagccagctgctctcggaggt

SEQ ID NO: 346275 - DNA, 1000 bp, Homo Sapiens
tcagtagcagtgggctgccccagctcccttcaggctgcaggtgatatgtccagagggccccacatgccccagaatgggatctccagctgccaagagggctgatggcccagcagaggtctggaaaggtgcctctgggccagaggggaaggacacatgggactccatagcctgacagcggcagagccaggaggggtgctgcccaccatgcttccagccctctctgcacacgggacagaacaaggtgcttggggtggagtgtttgatgatgagggaagaatgggagctccccttcacagaggacatgaaggtggccttcagaggccttgggggccgctcgaaggaggagacaatgtgcttgggggtcactgacccctgcagggtggacttggacaccggggatgggaccgagggggtggaatgggctgtggaggctgactggggccgcagcaagaaggagaactggggcgtcaggaaggtgggcaagctggagtccagcagcctggaggctgaggcagtgacagataacaaggaagatggggaggaggcggccgcaggcgtgctgtccgtggtatccagcacagcctgctccctgctgggcaccaggtccttctggacatggtgggccaccaggcggatgtgctggtcttgctggtctgggcccctgctggtcaggaagtcaggctgctgagtcggcatcagatcactgaagtgcaggctttggtagacctgaggcgagatctcagccagggccttggcaaacaaactggccacattagtctcatcccagacctgtccatggcccagaatcctgttaaaggacaaaggctcctgtccaccctcactgaagggctgatgcttcatccagccatatggcaccctggtggacaggaacctggtattctgcaagcgttccttgggcttatacgccgctcccaagactttgctcacctgcttgtccctggactcccacttgttccagctgtcctcaatgtcttccagg

SEQ ID NO: 346276 - DNA, 1000 bp, Homo Sapiens; identical to SEQ ID NO: 246639

SEQ ID NO: 346277 - DNA, 1000 bp, Homo Sapiens
ctatgaacattttaatgaggggttggacataagacagaaaaataacattctgagagctcgtttggaggttctagcaggggagcgcagctactcttatactcttgactgaagaccgatcgtcctctatcggggatggtcatcctcttccattgagcacacagcttctggagggacgcacatggagtggtgagggaggaaggggatacccgcctagtcagccagatcagccgaatcaaccctgatgatcaatggggtgacacatgtcgcagccagatcaccctcacatcccaaaaataacactcagattgctttttcttttttaagatgtagacttttcttgagactttcgtacaaggcaatggacagataaccttaacctcccagagaaaacacacattggccacagaaaaaggcgcttctccgtatacctgccatagttatcagcaactttgaaatggcttctcagactctcaggggttggcttgttgtgtttgcttttgcaaataactcaggcttaagtcctgctactttcagagcctaggggacgcttaaggactaccatcagtttaacacagtggcacttggagcacatgctacttatggtggtgaggaggggtgctggtgtgagggtctgaacgcttgcttctcctctggcagggtgtgagcagccagaggccactacctgggcaaggatgcttgctcagtgtccatggagggacatgtgatccagcaggtgggcaggaaccaggcccctgtggccgcccaactctccataatagaatccttggtcatccatgggcccgtaaaccatgaccacgtctcctgccctcagcgccagcctgcccttcccctggccccccatttgcccatccccaggatcatagtccagagctgctatcatgatctttggagtccacagtgggagtctcttggagttcccctggagcaccagggaggaaccctgggggatggtgagcccctgaaagtcctcgaggtgggc

SEQ ID NO: 346278 - DNA, 1000 bp, Homo Sapiens
caacttgcaccaaagctttatttgctattttcatagtctgaatgcaacatctttgtacatgcaaaggtcatcttgttttattgcagtcgaccagatttccaactgctcttctgtgcatatgaaacttctttacagttacaaaatataaaagcacttgtagacgtccaatactctgtgaggtctggtaagccccatttgtttttacattaaaaatataagtttttctagatgacttctcagtcacacggttagagattctttctgggactggataaagtgcctctcgtctgccttccgttcagaactcctagagcttgtgaattcctaaggcaattgcaagaacaccgcaggcaggaagcttaactttcctacacaaagaactcgagctccttttctatcgtgactcaaagatctgaggaaggacccagaagaaaggttaggaaaatatatactatacttgtgtgtgtgtgtgtctctgtgtgtgtgtgtatatatatatatttccacgccctgccccatcttacaaagcatttggaggatcacgatcatctgggaagtgcatgactttaggatattggtatgatttaggaaacagcacagtacaaaattatcttccataacacaatatattacttttgtgaccccccctatttacaggatctataaggctatgtggaatgagattattaaaaagctcaaattcagctgggcatggtggctcaggcctgtaatcccagcactttgggaggctgaggcagtagaatcacttgagaccaagtttaagaccagcttgggcaatatagtgagatcctgtttctacaaaacagatttaaaagatcagctgggcgtggtgatgtgcgcctgtcatctaggctactctggaggtggagatgagaggattgcttgagcccaggagttggaggctggagtgagctatgattgtgccactgcattccagcctggccaacagagcaagaccgtgtctcaagaaaagaaaaaa

SEQ ID NO: 346279 - DNA, 1000 bp, Homo Sapiens
gtctttggccacaattttcttattttcttgttccactccacctcgtagcagaaatatcacggattctgtaggcgcttcctggttctaggttgtggagctcctcagggcttggaagtgagtggaaagaaatgttcaacttctgtttctcttctctttccctctcctcctttcccctcatgttcacacttctacctttcccatggtttttgttcgaacaacccttaaactcaatttctctttggagacttcccttagttttcttgtcaggtgattcctcattgacggctgaaggtgggatgaacatgtggtttgccttttttgtatctgctgcttttggatcaatattcttcatttccctggagaagttgtcttgcagctcctttagatgcttgtcaaaataattccattcagtccaatgatgctggtacaactgattgaggttgtctttccgcttcttcatgctgcacagggtctcgctgatgacatcagtatacgttggggtgcagtcaggggtgctcgtggtcttttcccttctgactatcaacacattcttgccgtgctgctgcagactggcatagttctggagaaagtacacaatcagagggctcttcccataaatgttgaagaggtttgaagtcagctcagggcttttgcaggcagcacacgactgagggtggtagaatttcctgctctgggctggcttctgggagaaggctctcttaccagcaaacaaagaaaactctctcccctttgtcagtcttcttctgtacaacattaattcttctctgcggaatcgctctgggtctagttccgagtagtcccagctgtcatagctctgtgggctaggataggtgcctgaaatccacaggctcattgtgttacagatgtcagacttgaattcgtgcgtgtcgaaccaggattttaagagcgcctcttcagagtgggacttgggtacacgaaacaaaagtaaggcatagtgctgggctatccggtcaaacag

SEQ ID NO: 346280 - DNA, 1000 bp, Homo Sapiens
tttcattctttaaaatgtttactaaaaagaaatatcactgagaaagggaataagaagaaatggagctcaattatgaaacctcgtctttggctttcgagaagacaccactgtgtggggctttagtttcaccccacatgtgattttcttgctgttaaaatgtccatatgtgacgtggaagccccatggttgaagaaaagtggacttcaggtaataataaaggtggttttgttaatctacaggtttccactcccgggccatctctttagtataatgtgaaaaaatgtccgcttttattttcatttgtcttgctatcctttctagtttttgactgtttcttcacaacatggttcacattttgttctcatggtgtttgttgttttgttaccccttaatcatgtgtttctgagacggttgtgccaggcatggctacatgggcaactctggcgtctcaggtggctgctcttggcatgactgtcctgaggacggctgcgtgggggactccggcatctcaggtggctgctctcggtgtggctgtcctgaggacagctgtgtgggggactccggcgtctcaggtggccgctctgggtgtggctgtcccaggcatggctgcgtgggggactctggcatctcaggtggctgctctcagtgtggctgtcccaggcatggctgctcagaggactcttgttcctcaggtgtttattcttcttgtcagaaacctcaactccaatttcattctcgccacccatatccactttgtggcccagcgcggtccattttgtccactcccaggaatctgtcacttcctgtctgggtccctgggtcccacccctgcctgggtccaggactccacacagatctgccccattgaacatcttctccgacaattctgccttgatttcaggtattgcgaagtccacgggcttctctgccaattcagcaaattttggcgagtgagatgaaaaagacgtgtgggagcagatgcgggagctgacagccaggg

SEQ ID NO: 346281 - DNA, 1000 bp, Homo Sapiens
ttatattggatttttagcagattcagtagcagtaattgcatcaagatgaggtgaatctttagaataagttgcgagaccagatgcaactaatatatctgccaaattgtttttctcatgaatgacatctactttcagttttgtttcagaatgatattccctaaactgaaaaactaagtctggtttacttaggaaatctcgaaaaaagattttggcttcttcactccaatgttttcctttagcaggtaagataccatataaaatacatggataactcagccttggcaaattcaaaagttcctcaggaacaactttaagatttataatttctgaataacgtatataaaaagaaaatccatagtcaaccaacacaagacataaagactgaggtgagacttcagaaatttctactctattccactgatcttccgatttatatttgaacaaacaactagaaccgggaattatgaactcctgaggcaatgtttgtaaggtctctggtagatcagaaagcaacataaaaaggtatttcattatgtcaaagaaatcttctaactgaatactgaagtctgatggatcagaaacagcagttgcaataccagaatactgcctatcattttggaattgaacccaagtaaatgattttattgtgcatgatgatacaggagtcttagattcaatgttgtaaacaatttctgcaagtctaagtttgttttcttcaacaggaactgtattcaaatttaagtattccaaaagtaacaggtcatctaccaaaatttctacttcccaaacagcatctaaatatttcaggaaaagaatatttatttccaaatcagcaaataagcactcaaatgatatgttcttagaattttcaaaccaaatccatttacaaggtacagcttgtctaggaatgtttcttatttcattactaagcagcttggtattacatacaggtactatttcatagataccacaatctactaaaaaaacaagtactttatca

SEQ ID NO: 346282 - DNA, 1000 bp, Homo Sapiens
tttaaaactactcctttgtgaaaggatactataaactttctttccattattgtgatatacaaggatagagttttaaaaacaaagagaaaataaaaataaaaaccccccagacaagggggggggacaacttggagatataaatattaagatcacggaaaaatcacccgacagccgtagtttcttcttcaaagtgctggggaagtgggggtaagggaggggcgggtcagttctgaggtttggaccataaatacatatatatgatatgcgcatctatatatgtatatagagataaaaagacttctgcacccccaacccgcccccaggtatgagggcaaaagcaccacagagacagctcgggccaggcccgacgctgaggtacgctggctccctggcacctagatccagcggctgtaggggccagtgaccttcgtgtaggcataggaggacacggtgaccgccgagtctgtgggcacagccagtgcctgccgggtggggacgacccccttcttctctttctgctggggctcagcaaccacagtgcccccccacttgcgcttcttcccgtagagcttggcctcctgctggcccaggcccagccgggcagcctcctcctgccgtgcccgtgccctctccgccagctgcttcatcttggcttcccagagggccagcccgtggttgggctggttgaggttcttgtgctggtagaagaccagcgagatgcgggtggggtggcagcggttgggcttcttaagcggcgtggtggcgtgcagctcccgccgggcacactcgatgaggatggagccgtgggctggggccacggccacgccgccgatgttctcgtccaggaagttgtgttcactgtccgaccacagctcctcctcttcctcctccgcaccaccaccgcccttctcctccttcaccgctcccttgctggggggctcctcagccggcccctcctccaggctgaaggggtcccacagcttctcctctgacttcagag

SEQ ID NO: 346283 - DNA, 1000 bp, Homo Sapiens; identical to SEQ ID NO: 246640

SEQ ID NO: 346284 - DNA, 1000 bp, Homo Sapiens
tatggccccttccttctttccccgagccatagctcacaccccaggctcggggctggcctgatccactagaagccagtgaaccctggtaccaagcagtcagtgtcatcttcgtggtaaagcaacgggtatcggaggggccgccggatgtgtgtgtggctggctgatttctggaagtaagtcacagcaaacttggggaaggtgtactcggccaggccatccacatcctcctcaggctcctccgccatggggactgtgtccaggtcaacctcaagcagcttctgggtcttcgattccagatcctcaaagtgcggcgaggcctggccctcctggcccccaatcatggcagggaggaagccgaacaccttctccaccatctccgtgtcagtgacggtgtcgtagatggatctgcgcttcttggcagggagagcgccttggcttttctgcccctcggccgggatgaccagcggcgccctcagatggctcttaaggcaccccttcaaactccagggacccccaggaacccagctgcacaaccactgctcaggaccacttggtccattggccttcctttgctggaagttgcgccgggcagccatgcccctggcatgggcctgaatgaccaccactgccctcctcttggcctggacttgctggcgcaccaggtatcccctgcacagggcctgcagctggactgtcctctgccgcatggcctggtactgcctcgccagcggctggctccgggcaatagcctgcaggcgctcaaagcccacgaggatccgctggtcccgcggcccagccgccccagagagctctctcaccagcttgaaattcctcctgttgcagtagcctctccaccaggcctgcagggtcacagctgcccgcctctgcctcaggaactccttcctgtatctgtagccccgaaggactttctggatgctgagcgccgctctgtctagcacctggcttctctgtacctccagcagagtgtcctgatgatctc

SEQ ID NO: 346285 - DNA, 918 bp, Homo Sapiens
tcagctggagactaacggcgctggggcctgctgggccgggatatagtcgtgtttagctaagtgtcgagagcattaagaagaaagtcctggttggaggcgcaaggcctgcagcaccagctgtggaatccccaataatgtgactgcacagctccgtcctcaaacatttgcaggtgatcaccactgagggggcacatagctgtaagtgggcgttcctggggcccggtacgtgggcacagtgaccgggtggggggcgacaggagttggggagtgagcagtcagcagggtacctgctgacatggccatggtggtcccagccaccatgcccatggtgaccccgttgcctctaggaggggggatgggagcagggtacaccgttgcaggcatgccgttgggctgcaccaccgtggtgtggtggatgacgtgaggaggtgctgcatacagcggctgtgtgtagtacgtgccttgctgtgcatacgggctctgctgggggtaggcacttcgcacagggtacacggcagtctggtaggggttcggggaggaggagtacggtggcacagccccgctggtgggggaacaggacactttgtaaggtgtgccaggagtgtaacctgtttggaaggtaggattcgctccaggatacatgttaggagaataggcaggagctgctgctgcatagcccatgggaaaaccagctggataaccaattcctttggcatttgcatagggaaccccagaagatccaggactataaacaggattcatgatttcaaaaacctccgagccccgcgtctccgccgcctcccggacgccgcgctcccgctcgctcggctccgcttggcccggcccgcctctccgcagcccgcgctccccgccgacgccgagctcatccagaagcagcggaaccaggaagaaccccat

SEQ ID NO: 346286 - DNA, 1000 bp, Homo Sapiens
cattctaaaatgttttattagccttctgcaggctctgggttggctttctggacatgtttcccaagttggttcaaacacactattcttggtcttgatacatttgtgatatctgatgtaattgtagatgaaaaagaaaaaatattatgggaatccttggtcttttttgttgctttgaagagtcccatgaagttagttacaggaggtaataaagtcaaagaatcttttggttgaattttaggttttaattttcttcggtgctccttccctcttttaaagataggaattatggatggtcctccattcttctccagacttaaggaaggaagtcccaccagtgtttgttgcatttgaaattcctttaaaaatgctgggttaatacttgcatctctgctgatattattttttatacgaatgaactgattaggtttattcctgcattcttttaataggatgcggaaagcatttgcattgtatgttaagtagccaagagcagaggaacaagctgcacgaacctcttctattcccgagtacaaatgatagcagagccgttggattgttcctaatgtggtaaatgcttctgggataccagctctagaatgagccaggcttgctattaaattccctgtcaagacaatagtagaagtctgaactgaatacagactatcaactaaaatagtaacacctcttgcagacaaagtaatatggtccatatctctaatgactttagccagtacaacaatctgaaatgctgccattgccttctcagtttcaactgttgattcaagaaaacgttcaaaaatagatatggtcattattccactttccaatattaagtattgttgaaagcgattattgaaggcaaaaagtgttaatgcatagcctgctcttaagcaaatatccttttctgttgagtgaagaagataaaggacatcagcatattcaaatccttcattttcatgtaagtctttctgtaacacatcattccctaggacaatgcatg

SEQ ID NO: 346287 - DNA, 1000 bp, Homo Sapiens
caaggtttaataaattttatcttgataacatcaaaaacaagtttagcttttacactgcaatataaaaaatacattagtcttcacattagttttacatggaaatatataattatttgaatatttaaatatagcttttctttaaccaaaaaaaaaaaaaaaaagtgttactcacagccctagttacataaataatttaaatgcacaaatgcaaaaacacacttcacacgatattgttcacatactgtagaactcaggacaattacaataaaaatctacgcaaaatactgaacaagaacaagattaaaatactcattatggtcgtaatttgactttttactattaaaagaatttaatgcattcttgaacacacaaaaacatcaattgttttatctattctgcaaattaagccaacatttatttagacaaaggggcacatcttgtatactaccaaattctgaaagtaatttccaatttaatttaaattataagtttcaacaatttcaagttttcaagcttgtctaaaataatgattacaagaacttagtaaacaaaacatttcaaaaactttaaacaaaatcatcagtactgcactgtacttttatgtctggtaatataaaatttaaatataaaccttctccctgcccccaatgaaaatggtacttagaagggcttccaatgtgaaaatggtaacatttttacaacttgaaattttaattacttgaattacaggaactgttctctctgcatgatgtaatcacgatatgacacatcataggtacatagtacacattttcatttgatctcttgcttttaaacttacactgaaagactgtagaatgtctattaataatatttaagggaactatgtgtctattccatagggaaaaaagacaccaatacccacaaatatcttatatatcagctgtttgtttacttcctagtcagtaggacaaagctttgttcctaaattaaaattggaggattattttgaactactggc

SEQ ID NO: 346288 - DNA, 1000 bp, Homo Sapiens
aggatgtggaattttatcattgttttgtcaaaatgtttatctctcccaaggctgtgctttccttgtagtcctctaggaggataaatcctggattaggctttagcaaagcagttttataattcaggatattcttattgtatttaaaaatcttgcaatctgggctttacggtttttctatttaggttaaagagaggtatgtatttaatttgtgtttgaggctgggtgcagtggctcacgcctgtaatcccagcactctgggaggccgaggcgggggaggatcacctgaggttaggagtttgacaccagcctggccaacatgatgaaacccagtctctactaaaaacacaaaaaaactagtggggcatggtggtgggtgcctgtaatcccagatacaccggaggctgagacaggagaatcgcttgaacccaggaggcagaggttgcagtgagctgaggtcgcgccattgcaccccagcctggccaacaagagtgaaactccatctcagcatcaggccacatatccttgtaataaatctgcatatgggtctccgaatctgcttgttgaaatatcctcaaaagggtagaggatctctccattgttacagatttcacagatgaaccccttctggctacaaagactgcagctgtacacgtgtgaggtggcaaatttaatgaccttgcccaagaatggagccagctttccctctattacctgctgcaggtcggcaagtgaatacaggtggatctgttgaaggaggtattctctggggaaaattctgcggcggagatcctctgccaccgctgcccggcagctgaacaaataggctcggagcgacttcagccgctgccgcagccgcagcacggcggccagcggctctgcgtggtggtacagcatggcgttctcctgctggatgtcgatgagcggctcttcgtacacgtactccagaaactccttggcctgcttcgacaccttatactttgaagtatcccagttgtggact

SEQ ID NO: 346289 - DNA, 1000 bp, Homo Sapiens; identical to SEQ ID NO: 161400

SEQ ID NO: 346290 - DNA, 1000 bp, Homo Sapiens
taacttagaatctaatctttattaacctgggatatcacagaaaatacttgggcctgccacttgtatttctttgtcctcaatactgaacactagacacatttgaaaccttcctcagaaggaaacaaaccaactggttatgcctgggtggtggcatggaagatgcccattgttgcccaatttgctaataagtattttgaaattagaaatgaaacatgaggtccaagcctgtccagttccctacccaacccattcctcctccctggaaaaaagaaacccgtatcatcttccaaatttctgattcatcactgccacttaaaaatgaaccgttttgaattttaaaatgtgaataactcaagtatcttttcttttgagatgcccggcctgagcactaacttcaggcattgctgaatgcagtgaagaaaccagagtggtgtctgctgcctcctgatcttttacagctgacagcacagcctatttctaaatactactagtttgtgaggcagagacaccctctgaaggaaccagacagactatggaggggtacagtgtgaagtcactggaaaacttcctcaccctatttctttggatgactgtcctgagttaaggaaggggcccaactgttggcagcctcacagcttgggctgggggcctttgagttgggtccctggagaaggcactgtaagccctgaccaggagcgacagggcccccagtgagatggtggaagggcaaaagtagagacctgcgatggtgggatggggaggcctcggacttgggtgggctcctttctcttaagcgagggcccaccttggtgctgaggggactagctgagctccattgagtctgtgctgggggctgaagcggaatccttctggatgctttcaaagagggcagcaagttcagggttggatctgatttgggaagagaagtcggccatgatggggcttttccccacctcggggatggtcagcagggcagccactgccctcattgcagagcgct

SEQ ID NO: 346291 - DNA, 1000 bp, Homo Sapiens
aaataaacggaagagtcgttctctgctcctcgctcagaaggtttcaaaggtcgtcacactgaagcccgggggcgttcatctccccagcggccgggagaagggaggaggttggagggcggagggagggagcacacaaaagcgggccgtgctgagagggctaatgtttcctgtttgcctggagccccctcccctgcctcccctcccccagccccctcccagcactcgggcggaagtgagtttgctcctttggagattaaaaggattccgaattccgatcagtcccaataaccggcgtactgaagagaagaggaggaggaggaggaggcagaggcggcaaagcagagaaagagggggcgcgcgcgcgcgcacgcaacccgaactgggggagttgtgcaaagccccaggaggccggggcacggcgggagcaaagctcggtaggcgcagcgcggccgaggccacccgcgtccggatcggcgactcctttcagaaagaagatgacgcgggcgcgagccggcggcgttggccacgcggctcccgagctcgccgcgcggggctgttgccggttccactgattccagcgcgcccgagaggagcctccatccccgaggctcgggatcggaggggggaccaaggcgagggcgaaatggcccgatgacaaaggaaatgtgatcccccttctctgccaaggtttcagagaggacggacgtgaggaggaggaggggcgcagggcgcgcgcggagctcggatagcattgcacgacggcccgcgcggagcgggtacatctaatatcttcctgccgatgaataattcagggcggcccgcggggacctgcggccccgcgcgctaagccgaaggggaaggagcgtgcgtgaggcgcccaggccaggcgaggcgggggcacgagggctccgggccgcgtggggcgcgcgtgcgtgttaagcgcgggcagccgcggcccggctgggcaggcgcgcggaagactcgaggcgcgtgggacgcg

SEQ ID NO: 346292 - DNA, 1000 bp, Homo Sapiens
tatagtgaaaactgtctatttttattgccttttattttcaacaatgattacttgaactaaaaaaaaaaaaaaagcagactttattagctaatggttactgaaaagccaaacctttccagcccacttcatattctcttttaaccatttcagggcagaacaatgttccaaactataaacctgttccttattaacattgacagtcatgtgtttaacgaaaagctttggatctgatatacgagcagccataattaacctttctactgcagcttgataatcatcattgctccgagactggttgtcttcacaccttttcaaaactatctgcagtatctgtgtagaagttccaggactctgaatactactagcattagataccatgaagatttcaatagctaagagcatttcaatctcagataaataagatggaattagaagaagttttcggtataaatttccttccaatggtgggtagcaacccaaggaaagagcacttttgtagtgggctctggctttgagccataaacgactccttcctaaagaagtaattaatcttctgagaaaggaaaaatcaatagggatgctctttgaaatcatgaattctgccacagaggatgacataccaagactactgctttctatacaggaacctagaagcttattaaaaagaaggctatattgtgagacttccacagtttcttgggaattttgaaaacctggtagattctgcaaaacttcaaatgtctgtctataaaggctcttggctaagatttcatgtgcaattgtacagagtaaattatgtcgattaagcacatccagtctatcacaaggccacagaggcgtattgattatccactctgactccctcattacccaaatggcaccatctaggcttccactttttagaaaaatttctgctgcaacattcacaatttgacatcttgatgctaacttctcaggccctataagtccttttaaacttgtaaagtgtatttttaattca

SEQ ID NO: 346293 - DNA, 1000 bp, Homo Sapiens
gagacagagtcttgctctgctgcccaggctggagtacagtggcacggtcttggctcactgctagctacgcctcctgggttcacgccattctcctgcctcagcctcccaagtagctgggactacaggtgcccgacaacatgcctggctaattttttgtattgttagtaaagacggggtttcaccgtgttagccaggctgttctcgatctcctgacctcgtgatccacccgcctcggcctcccaaagtgtagggattacaggcgtgagccaccacacccagcccagaatgctttttctataaaaggtatccatgtatttcaccagtcagagatgtactaggtaaggaaaaaacaaaacaaataaacaaaaaaaatcacctcaagttttggaggcaggattgacctgggtttgaatcccagatctgactctttgtcatgtgataagctagagtctccaaggctcaatttcatcttcaaaatggggatagacaccaccttccttgggtttaaaggattaagaaagatgatatatgagatggtgctcaaaaagatcagtctattcctttcaacatgcctgtaaatgtatttctagggcatgtaaaagccaagtcgctcacattcagaaagagtaggcacttctaaaacaagtcccgggccaggtgtgcacagccatctgcacaggctgtgaacagaggcgtgcacagctcctgggggtagccctcatgctcccgcaggatcctctttaacaaagctgattcataaaagctgtcacccattacgcctgtgttctataattttgtgagccttttcacatgaaagactacccaagggtaggccgggtacggtggctcacgcctataatcccagcagtttggcaggccgaggcaggcggatcacctgaagtcgggagtttgagaccagcctgaccaaaatggagaaacctcgtctctaccaaaaatacaaaatcagccggacgtggtagcgcatgcctgtattcccaac

SEQ ID NO: 346294 - DNA, 1000 bp, Homo Sapiens
acaaagtaatttaatttttatatttctcattttctaagtcttcaatatatggaggttgcacctggtcatctctgatgttatgcacagttgaaaccctctgttttcttgtgaggtccagtgcaggccattcatatgtgtggaagtgctttgaaatactctaaataatttgaaatatgttctgcatattttattgttttcattatcttggttattataatccagccagtgaatgttcaaagaacataaaatcaaagagaaaacaggcaccgatcattgctgctttgactgttacatctagatctgcaggaacatgaattccgaaattgtcagcatttgtgaagacatcatttacaaatcctgaccagtactttgaaatcttcccaattgtaagcttttcattaatggttttcacctcaaaatccacatcgccaaaacagccacatgtcacacaaggaccaacaattttcaaaatatcttctttgtttgcattttggattgtgaatttaggcagaaaggggtcccacttctgcgtaacgtaaccaactatagtaccaggaggggcttggatttctaactcttgtaggtagcaagggcaccagcagctgttacatctcaagggcctgttcactgtaatgacctctcgacctgagttatctgtgatcctcagggtgcaagatcgcagagtggaacagaaagtacgattgaagcagatgctttcctccactgcaaagtaaattctttgtcccaagctgtttttaatctcatatttgttggaggtctcagtaccaagtatcattccaagcagctccacctgctggtgtataattatcaggtctaactggcttaaatattctagaccaggagggagactgactgttggcaggaaactgcttggcagagggagactcagctgccatgcttggttccctggattggaagaggcaggaaggctttggtctgggtctggagctccaggaagaaaaccaggcagacctcttct

SEQ ID NO: 346295 - DNA, 1000 bp, Homo Sapiens; identical to SEQ ID NO: 161401

SEQ ID NO: 346296 - DNA, 1000 bp, Homo Sapiens
tataattttaattgctttacaaaagatgatttacaaaaagacaccactgcaaagtagaaataaatcattttaatgtctattttttcacttctattaattgattattgatttctacacaagtgtatgcatctagtttgacttgcttcatatttattttccaacacggtgcaatcttcagcatgaggtgcacgaagtaccttgtcctcaaagagctttatcaactcgaacattttcgaagagctctataaggcagctcagcatggcagttttttactgaaatctcttatctggaagatggcagaagagacccggaccttcccgagcccactggttgcttgtattcatatcacagctcgcttgagtaagtggtaacgacagaataataagcagattgctcctccaaacccagctgggtgagatagcttcatttttggaaaatcaactgaatcatgaaaaccttcctaatggtataatttgttccagagttcttttgatacttaagaagggaaatattaatccttgtgcacagtcttttattacaagcactcttatttatggtattacagagttttcttctccagccgtcattctctggtgaggtgactggctgtaccccatgcagaatcgaaagcatgaagaaatctcctttcttaatcagagctgatgacagccctctcatttcctgccaaatggatcagaccacacttttaaccctggtggctgcacatcctcttgaacaattccagcccgatttatagcttgttccttcttgtactcctccaatctcattaggggccggaagtagatgggatagaaggcggcgccgatcagggagatgaagccgccgaaaatgagcgcggtgcgcaggttccgggacatggcgtcaggccccgggctgccctgacccgccgaccgcccggcactctcggaaaccaggttaccgacggccgggccgtgaccccgctcggaagaggtggagaggctttcgcttccgggccag

SEQ ID NO: 346297 - DNA, 1000 bp, Homo Sapiens
aaaccattactgtgactttattataatagttaacaatattttagtggtatacaatcatatcacaattactcaagctatatacaaacaggtatttatataagtctacatttaaaaaagaaaaagcaattaatgacctccccaaaatcacattatcatcaacaagatttttttctaaaagttacggccaatccaataacaaaaaaattcacagttattctgcagacattttaaagatgcaggaattgtattgcacattatataattataaaccataacaagcagttatatattttaatctagtttttcacaaaatttacattatcatgcaatacttcactgtacacagaatgatggaactagaacaggttaacttacaaacttttaattatagccacaaatttagaattattttaaagttatatttcaaattattatactaaaaaaacactccagtgtaataaaacagacacaatcataatttgttcacagatcaaattacttttttagtgttcttctttgtctttgcctttcttttccttttcatcctgtagtgcagtaccgagctttttgataagaactgacagaaccttgtccagtggatccatgactcctctttgaagccatttaggaatagtagtcctagcatgatgaaagcccaatttttgaagaatataatcaacacctactggatcaatctttcttccagtccaagaaattaatctaagagtaggttctagatgccatgtattgcacataaaatctctccagtccacagtagtataagtgatgctatcttctctatctttatcagaggaattgtcgtcatgtataataattggacttttttgtcctggtcgagtagataaaatccgaggtggaaagatggctttttctttttctttaagataagctgatactaaatcatgaagaaacatgatgagctcagcatccatagtcacacaaatgtggtcagtgaactctgtcaccacactacattcta

SEQ ID NO: 346298 - DNA, 1000 bp, Homo Sapiens
tttgaatgaaaaaggttcagggaattttaaatttttatatctgtgacagatatccttaacatttgccagtgattccagttctgactttacatacatgctctctacctcctttagtagatattttaatgaggaggtataatctgaaaattttgttaggctttcatttagttgtgctaaaatatccatctcttcatcttgtaattacctaagaacagtctcttgctcattttggagaaataacctaagttgctcaaattcagacttgacttcttctgccctatgttttacctttttcttcagttccagtgatttcctggtttgcatagttatgactttttcaattagttccactctctccttccacggtgcattgtattcctccagttttttcctatgataggaggcagccttctttatgggccaaacacagtgatgctggtgatcagtggacaaactgcaccttggacataaaagctctaggtctttctgacagaagaaagtcaaaacctgattatgcttcttacacacatgcttctcttcctgcctcttcctcttcttgcttcttatctggagttgcttagcaatttcagtcaaactacccagctggggattgcttataaatttcctttctggacagcaaaagtggcaaaaagggcaggggaaactatcatgtagatccttccaggacataatgatgcaggagagacagaagttatgcccacagctgatggtcactgggtctttcaagtagtccagacagatgggacagctagcctctgctcggaggtcagccagggccgtaacaaattccactgagacttgaacaaagatggtaggtaaggtaattcttttattttagcaaggcctagctctctagagctcaagacccagtacacagtggatatactccccagaccttgaaatctgatcaactatcagttttactgacttggcatgttgatggcagcttctagaaacttgttaagccctcagctcctta

SEQ ID NO: 346299 - DNA, 1000 bp, Homo Sapiens; identical to SEQ ID NO: 161403

SEQ ID NO: 346300 - DNA, 1000 bp, Homo Sapiens
atcacaaagaggacacatttttttaaattgacaactcaatctctacatacatacagtattgcatgaattataagtggatccaacaatcatattattgatacaaactcatgagcatttgcataaagctattgctctaggttttggtgtgttttgtgccagctactttagtgaataaactaaacataaaggaactcagctacttgaattcatgagaatcagctttcaaaaaaagcatatatatcatctcatagaatacttaatatgtcaaacccaggaaaatcagtaactaagtgacaaaaggaacacttttaaagaaaagttggtgataaatatgttaggctaaaatactaagaactttagcaactggaccgaggaaccagaaagtgtatgcacactgggaattttaacaaaagatccccatgttctcctgcacagtgaggaccacattccaaaagcagaattctgggttgctacaatgtcatctctcctacaaaccactgtttcaaaggtgaaagaaacaagaggtaattcacataaaaaggttttaaaattcttcccactcaaaataaaataaaaataatataacctgtatcaaattataaagaaattctattaaaatgttgaccacataaagcagtcagaccatttgccttcgctgactgcctcagagggcagagcatgtgtcacctacaaggaaggggagagaggggtagagtccctactctcccccggcctgtagagtcagggtggagaggagccctttggcttccctggggttttgtttcctcacatagggaattgagggaggtgggctagatggctttaagagactcctcaactaaaagaatcaaagtcagcttgagatcccatctctgaacagacatatagggtggcaaaagaaatggattaaaaaacaggtggatgacgtctttctcaccttttgataccatcactcagaactaatctgtactatagttgaagaaaatctttgcctggtact

SEQ ID NO: 346301 - DNA, 1000 bp, Homo Sapiens
taatgaggtacaagatatttattgacaccaaaatacatacaagtatttccgaacaagatgaaaatatctcctggtttctcacacagagacccatactactcggaaggcaggatatgccagttttcctttgtggaaaagtgtatccaggcagcaaacttaatgaggagtgggcagttttgtccttaaaaaactgcagggaagggttctttccagggagtggtagttggtgctccaggtgctggcagggacaggacagctgattgatagaagtgagggctctaacaaagttcactatttacatcaaaatgacttgatgggggctctgggcctctgggccttgttaaaagatgatgctgaaccatgtcttgaaaccccaccagcattaggcttaggtactaagcaagtccggactgtatccctggctcagtgactgaccaatcacaacacgtgcccagttgaatagtgactgtaacagatcaccacttttaatgctcccagaagaaatgagcacacaaaaactagctgagaaaaaccctttcccacatcctcctctgcctatgtgggcactgaggcaactgccctgactgtgaaagttcaccccttgtgaataccactctttaaatccaaattgcttcattgagatcttaaaaggaatcttgaaatccagatgattgggtagaaaatgtgacatggaattttactctagcgtcaaaacaacttttaaaatagtcctgcttattcaagttagtttctcctccagaaatctgaaattagatttgataagttaaagattatacaaacagggtggctttcaataatttaattagactcatgccaaaaaaatgagcttccaggaaatattaaatattattcttaaagcaatttggacacagacaatcacacatacataaggaatggagacaaaaagtttctcccaaaagtgccagtgttttgttttgtttggaaaaatgacaacacaattagaggtaaacaatatttt

SEQ ID NO: 346302 - DNA, 1000 bp, Homo Sapiens
ctctaatcttgacgtcacactttatgtcattaagttgatcttcaatctctgatatcctttcttctgcttgatcgattcagctattgatacttctgtatgcttcacgaaggtctcgtgctgtgtttttcagctccatcagatcatttatgttcttctctaaagtggttattctagttagcaattcctccagccttttttcatttttagcttccttgcattgggttagaacatgctcctttagctcagaggagtttgttattacccaccttctgaagcctccttctgtaaattcgtcaaactcattctccatccagttttgttctcttgctggcaaggagttgtgatcctttgcaggagaaaaggtgttctggtttttggaattttcagcctttttgcactggtttttcctcatcttcatggatttatctacctttggtctttgatgctggtgaccttcggatggggtttttgtgtggatgtcctttttgttgatgttgacgctattcctttctgtttgttagttttccttataacagtcaggcccctctgctgcaggtctgctggagtttgttggagatccactccagaccctgtttacctgggtatcaccagcgcaggctacagaacagcacagattgctgcctgttccttcctctggaagcttcgtctcagacgggcacccaccagatgtctgttgacccctgctggaaggtctctcccactccggaggcacaggggtcagggacccacttgaggaggcagtctgtcccttagcagaacttgagcactgtgctgggagatctgctgctctcttcagagccagcaggcaggaacgtttaagtgtcctgaagctgtgcccacagctgccccttcccccaggtgctctgtcccagggagatgggagttttatctataagtccctgactggggctgctgcctttgtttcagagatgccctgctcagagaggaggaatctagagagacactcttgctacagcaa

SEQ ID NO: 346303 - DNA, 757 bp, Homo Sapiens
ctgacagtgctacagtgatggaggcatcccaccacactctagaaacaaaaagaagacaaatgtcaacagatgcctcgattctgctatcatcaagtgtgcgtgtgcacatggcttggtttgaggcaggggatgcgggttccatgatgagagggatgattctcattagcttgttctcgatgctgtctttgtgcgccacaaggttaatacaggaaatatgaaaggcgctcagactgccaggagcagctgctcgtgggtaggtcagccctgagcaaaccttccttaggtccagaccatgactgtcctgccaattgttcatagtgagaggtgacagcgtgctggcagccctcgctcgctcttggcgcctcctcgacctccgcgcccactctggccgcgcttgaggagcccttcagcctgccgctgcactgtgggagctccactctgggctggccgaggctggagctggctccctctgcttgtggggaggtgtggagggagaggcgccggtgggaaccagggttgggcgcacacttgcaggccagcgtgagttccgggtgggcgtgggctcggcaggcccccgcactccgagcagccggcctgcgcccccagcccgggggcagtgaggggcttagcacctgggccagcagctgcagaggggggcgccaggtcccccagcacagccggcctgcccgtgccatgctcaaattctcgacgggcctccactgccacccagccgggcagggctggggacctgtaagca

SEQ ID NO: 346304 - DNA, 1000 bp, Homo Sapiens
gtgtaaaattttaattttttaaacagaatatgaaacaatattaataataaccaccacaacaataagaacaatgctgaagcaacctcttccaagttatcaggacaagaccatgtgatccaaacaggtatgttcaagttgttttttaagtagaaggaagcaaacctcattttcaaatatacaaggagagacccatctcatgaaataatttcgataagcaagaaatgactggagaagccatgacttttaaaaaattgatagtaagcaaccaatccattataaaattgttagacgattataaaaatgattatagaattacatgctgtaattcctcaaggaagaatatggtgggtgagttcttatatatgtaacattgataaatgtgaatgatgtcttacaatttaaattatgccaaaagaagtaatgtgtttttgatggtgttatcagattagattcttccagaaaggttgaaggatctttcggaaagattcgaacattaaacaaaccagagaataaggtaatagatagccattgtaggttcctggatggtatggcagattatattactctcaagaagcatttgttccctccccacccccaacgctgcctgcatgtactaccccatttcattaatgttggacttcaccaggtgactttctttgctcagtgtagcattagcagacttggttctgccattactgttacaagaataatggaaagctgaccattcttcttctttagttccaaaagtaaaaataaaatgagtgttaagagacagaatacaagccacagactaggagaaaatatttgcaaaacacatgtctgataaagggcttatatctaaactagacagaaaattcttaacaattaaaaaacaatttaaaagtgagaaaaagatctgaagagacatctgaacaaagaaaatacacaagagacaaatcagcaaataaaaagattctcagccagttgcggtggctcgtacctttaatcccagaactttggg

SEQ ID NO: 346305 - DNA, 1000 bp, Homo Sapiens
tcagagcgcgtccgcagggcgcgcgtagcgcagcgtgtagttggcgcccgcgttgttgtcccagtactcgccctgcgcgcagcggtagcagacagcgaagtggaccgcgacgccgcgctcgtcggcgtcctcttcgtcctcaggctgcaggcccgggggcaggcacagcgagaagtggaagcactcggcgcctggctctttcttggcatccccggaccctggctcggaggccccagacggtgcctctggctgctgtggctccagcggctcgggctgcagctcagccggcacgtccaggaaggagcgccactcggtaaaggtgtagcgcacggtcacggccctgggcccagggcagctgagcacccggccggagcccttcacctcagcgcccgaggccgtcgagcactgcacgcgctccaggcacacgcgctgccgctgcagacgctcggccgcggcgctcggccccgggagctggaagagcggccggagccgggaaggcggcgctgaaaggggcgcggccactgccgccgcggccagcagccccccgagctgctccaggtcctcggcacgcatagggaagcttcgcaggcgcgagagcacggcgggcggcacctgcggctcctccgcctcgctgaagtgcttcacgctggccaggcttagccccagcgtgtccgcgaactgcacccgcttcttgcacttggcgcagcagccgcccgggccgagctgtgcgtcctccgccccctcgccgcccagtgccaccgcctgttgctgctgctgctgcaggaacttggccgcctgcaagatggggtcggcgggcaaggaaaaggagcgcgcgcggcagcggcggcggcattccagcagctcctcctgctcctggggggcggcctcttccttcggggacaggggcctatcccctagctgagcgtcaggactcggggtctccgaagcgccaccgccgtcgccgccaccctgcacacaggggaccaccggggcgggcagc

SEQ ID NO: 346306 - DNA, 1000 bp, Homo Sapiens
ggaacatactgtttattcaataagaaattaattttttatcgttggatttgaataaattttcttctcccaagcaatctgattggcagtacaccattgcagcatatactttattattatcatcattattattttccacaacatttaataccaagtttccttctctcacatagaatattacccaatagaagtctccaaaaggggccatagcacattcataacaaagatagaaaagaaaactttcaatgtctgctttccaatatgatgattcaactaaaacaaagctgaatttctcagctatgaaactgaaaaaatgaaaatcagcccatgtgtacatcacggccagccatgatcattaacacctccatgaaatgagggagaaaagagagaaacaactgcttcttcttaccaaacttctatataacttcaaattactttaaaaaaatttcctaaaaggcattctgctgcctttctgaggcatgaacatttgggtgtcttctcaagaccaaccccgggcaagcaggtggcgcctgtgaaatggaaaacattcggaaaacagcagcccctcttcagctccatgtacaggagactttctgatttccaatcttggctcaggtcagaagaaaaaggggaaaggttacattcctggaaagaaaatacagcctatttgagggcatgcctgactttcagtccatgcactagtcctcttggctcgtagagttttcagtgccctgaaaccatgatccctctgcctccatggtcctctgagtgtagttattatgtctgcaaaccagtaatgtcacaagtcaaagggtctggggcttcccagggaaccactatgactgagtatattctgatttgagaaacctgtgacaagtcttctcagcactcgccttctaatttttggagccgatgcctgggttcccagcatccaggtcacagtagctggaaatcatgcaggaagggcaaaaagccagcagcccagaatggactgtctctgcag

SEQ ID NO: 346307 - DNA, 1000 bp, Homo Sapiens; identical to SEQ ID NO: 246641

SEQ ID NO: 346308 - DNA, 1000 bp, Homo Sapiens
acatgagataaataagaatatttattatgcatgttttatacagtaacaccaaaataacgctcaataagttacacagctgttttctagaaacatggcaaaagaaaaaaaacagtaggaataatatgtattactcaaaattgaaaatatggtcatcttttaaacatttgaattcatgatttctacgtaaacaaaaacatcataaatatctagaaataatcttttttaacaatgcactagatactatctaaaggctcaattttattgcacatatttggtttaggcttatttgatcaatacatgcagaaaaataaattacaaacgtgaatttttaaaaggaatcaggatgtcattttgtactacaaaaattagatgagggttgatacatttcacagcttaatcttcagaaaattttcttcagctattgcataaaatcactgattaaaatcatcacacatggaagctaagaactattaaatacagtaaaatagctctgttggtacatttaaaataagagaacaggcatcaactattctttgaattgataccaactgtcttctttttatttatttttgagacagggtctcactccgtcactctgcaggaatgcagtggtgtgatcatggttcactgcaccttgacctcctgggctcaagcatcttccccactcagcctcccaacagcatgagccaccatgcctggctaacaaattgataccaactatcactcttctcagctacctaaaaaggtggtcttcacaagttttaagaacattaaatgacaatattggcacataatcaatattttatcattttatatttggaaaaaaacgggaagctggggtaaaccagtttctaaataaagctaatgaaactttaattcattcaaacactatggtagttatgttgatgataagtaaacattattatttatttatactgtttcctgaggtgatccagaaactactgttattatagtagacttgctactatatacatttact

SEQ ID NO: 346309 - DNA, 1000 bp, Homo Sapiens
ttacatgtcggcatctccatcataggctaaggttaaaggtttcagtcggttgttttgccttctttggggtttctttggctttttgcaagctagataaatcatggagacaataaagatgagtaacacaaatgccccagctgctacaccgtaaacccaggtctttagtctcccatctggcccaaatggctgtagaaaccaggtccttccccgtcctgctgggttactggagggttgggttggatgtacagcccgactggttttcacatctcctcttttgtcctccatggtgggtaataccaccacggggataagtgtgcattgctcaagggtgctgttagaagacatgacttcagtgtacccttcttcacaatggcatgtttttgtctcgctacagtacgagtggggttgactacacggtgggttacaagacctgtcggcatcaggctggctcatcaccaagcagccccctgttacatttataccatctgacctttgacaccacactgttcgggaagagcccttccaagcactggccatccatttatattcatagcactgtccatcataacatgattttgtttctaacatctgctctgggcacagatgctgattctctagttcttgtataatcaccggtctggatctgacctgtattccaccaaagcctagatcctcaccattcacacaggtcagctgacacaggctccaggaagaccagtccttcaaataacagtcacctgggcaaggctggctgcaggattcctccagaaccatatttttattaccatctataatgagttcaatgtcagcacagaattcctcatccaccactttgctgaaatcatcagctgacccatcacttactacacaagaaatgttccttgttctggtcccttctccacactgggcctcctgcacttggcatggagaccactggccatattgccaccgataacaaggcttcactgggcagggtttggactggtccatcagggaaggg

SEQ ID NO: 346310 - DNA, 1000 bp, Homo Sapiens
agttagggctgagaaaatattcagtttattaaatattgtgaatgggtggaatatcagatacatcatctcaatatgtaaatatcctatcccatctcaacatcaaatttagattacctggatttcttctttgcttttctctatgattacaacagagatcattatgtattttattagtttcttcagtctttaagatattttttgaatgatgttcaaataaactccaagttatctccaactttttctgaacaaaatatttccattcttaagatacaggcttgtaattcatatacttgatgctactcaatggcgtcttatctgtattttcttctcacatttgactccagagtattcagtgcggcaggaacacacattgggaaatatgcatctgcctccataaagacattttgggttgcaaattggtatttgacaccgcactccttcccaggaggaaggacaatggcatatgctgggcgcaatgcattcaccaccgtttttacatttctgcaagcagataggtgtgttgcatcgtttcccactccaaccagaaggacaagagcaagtgcttggtcccacacattttcctccattcatgcacgtaggatcacagatgcttttttggaatctcctaccagtgtatccttcacgacagacgcacacattatttctcatgcagtggccaccattcttacagggagggtgacagaaagcattctgacagtgttccccaaagaatccatttggacagaggcaagtatttggcttattacacgaaccaccattgaggcagacagggtcgcacaaagctgtactacaggtgggtccataccagccaggtttgcactggcaaatatctggtgtaagacactggcctccattttcacagtgcctgttacaaaccattgtttcacaccttggtcctacaaaaccataaggacaagtgcagagattcccagccaagcatgtgccaccatgttgacaaggtgggttacaatgttcttca

SEQ ID NO: 346311 - DNA, 1000 bp, Homo Sapiens
cattactcatgattttttttaatttaacatatatagtacatgtaaacaactggcataaaattcataaaaatacaatactcctatgcaatatcactttattcctgatacatactttcattttctcattaatatcactggcctattttaacactatattttttttgccaagcatttttagaggcttatctttttaaagaaatacagccccaactttgttttcgaaaatgttgtagcaatagctattttgatcgcttctttgcccatccttactttcctcatactaaagcaaaaatatttgtaaatgctaacaatatgcaaaacactgagctttaatactgttttgtacgcctatggaacctgctaccaatctgcattgccatcaaaggtgtggatgctccacagtgcttgggctgcgagctgtggccacggctgcatagcagggaccttcaggcctctgctccaaactggctcccctaatatatagccatattttgctgggggttacattcataaacactgctacaaaaggatccttctggaaaaagctaatttatattacttttaatggttcccagcaaatgaagcagttataatagtatttttaatgcttttttcctatacagaatttctacttattacatgtgaacttctttggaaggaaattactgggggtgagaaaaatataaaataaatgtaaaagtataatttttaaaaattgtaactgctggatgtacacaatcagccacactcaggtgagcaacaatcacagataagcagcgcgcacctccctctccctgctcatgtcaactcccatcctcagcctcaagtgtccaccgcccattttcctggactgttgtgcatcatcgctcaaatgttgcttttaatccacaaatcaagggctgcttccctattttctaaaactagcaaaagcctaagaaataaaaacagtcaaccagcaaatgagaaacagtggccacaaatctgaagaacgctgccagag

SEQ ID NO: 346312 - DNA, 647 bp, Homo Sapiens
ggacattttgcggggtgtgtggctctcacggccatgctggcctgtgagtgtccatcctcccacacaccagaggacccccatcctgctgatctttgtgccatatttctttaatatgccagttgagggaacacaatggataaaatgacttgcatcccttcatcactgtcttggaaaaatacaaagagataaaggtttcacaggcacagaggccgctggtgacccacttacccacgactctgtcactcttggagctttgctgtcctcccgaggtggtggagaggtcctcggggatcggcatgggctcatcgccctcatctggagtatcgcttacaggggggctttccttccctgaaacttgggacatgtcttgaccctcatcagcatccatggtcctcaggttatgtggatttgtgcgtcgcgctttggggccaagactgatcctcgggtgcgaagagcaacctcggagccggggctccctctgccctgccaggcttgcccgcctcgccgcggccgagcgtcccgcccaggctgggatgcgccgcgcggggacccagggggcttgccgcagtcaccgccccgggcgcgggccgcgcagtcacttgttagagtgtcctgctaacttggccgcggagctcttcccagctttc

SEQ ID NO: 346313 - DNA, 1000 bp, Homo Sapiens
aaaggatgatagccacagaacagctttattgtcatgaaactaaagggggacttcatcaggagtgttagaatggatgaaatgaggtttcttccctaacttaacattctgcagaaaattcctgattcaggtaaaaaaagaatgagattagtattacataaactgtgagttacttgaagggagatggtcttaaacaaagtaatctgttataaaactaacatcctttaatgggaaaccctgacccagatacagctcatacaatgctttctgtctgcagcttggcctcctcaccacacattccctcccaacaaagcataacctataccccaaaacacttttggctattgttagaatcatactgagctctcctttagggaatcagttcatagcaaccagatattccctttttgttcattttctgataataaaaactgcagtttttaaggttgatgaaataacaattctgtgttaaattgtaaggacactgaaaaccactagcattaaagtaggaattgtgcaagacattggagccttgattaggtatcatgcactacagtcaataaaagaaataataggaaaacaaaatgtgcacaagatctgaggtctttcactttgctttcatacccttaatcagtttacatcttatgctttgtggggcaatcaaaccaaatgacttttacaatttcatccgttttaagtggtaatgttaaaataactcacttcggcctaaaattactataatttaacttaaaaaatcaaaatacttataatactaaatgattttaggaataagaatttgatttataacattgtcagttggacatttatctaaacattcaatatacaaagttataaagaaaaatacttctaagatatttaagaaaatgcaatataatagatcataaattaggtgcaaaaacaagacacttacagacatttccagtatatacatccattttcaaatattaccaaagtgtaaacataacttaagataatcatcctt

SEQ ID NO: 346314 - DNA, 711 bp, Homo Sapiens
ttactttaggagggctttcaatacagatgaggaatagaaggtattagtgagatagggtgcatatacattttaaaaagattatgctcatgtaaatgataaacataaacctgtgctatataccccgagaaacttccacaaaagccacctagtttaaatctgaccaaggaaggcattcaacatactcagcaatacatttaaataaataaataaataaataaacaatgacacgttaccaacaactcctcctcttgatattcaataactggttttccatctttactgtttttcaattataggattccgaacaaccatgaccatccagaaattttcttctggttcattaaagaactgtctgttcttctgcgtatgtaaagattttgcaggttttgatgggctaaaggtccttgtaaactgtacaatagcttcacacaatccgacatttctaatcttctcattcttttctacctcatttggatgataaaataaaatcttattttcctcctctccttcccgcggccagaagcgcgggttgtagatgaagaaactcagcagcgccggcaggaactgcttctcctgggccgccgagggcccgctcccagccccggccgccgctgcagccatcccggccgggtccccacctcgggagcctcccacagccagcccagagaaagcagccacctgctagaacaccgcacttccgcctccctcgcc

SEQ ID NO: 346315 - DNA, 1000 bp, Homo Sapiens
tcatatcatctgggtgttgatagatgccgccaacatcctatgtccatctctaaccagaaaagctggcttgttttgaggagccagcctctgactctgatgcatgtgattgtattttggctcattggcggcagtcaccctacattgcccgagcatttggtcatcacagggcacttctgtcatccgctttagctgttttatgctgcttccccgaattgcttccatgagattctcatgagctgatctctgtggggtagaaggtcgggaactgtcttccattttcttctcttgcactgacctcagagaattttttatttcctttagaatactgtttggctgtttcttgacctttttcccttttttctttttttgtccattttgtaatgcccgttgggcactctcagtctggacttttttggggagttttggggatgaccagggtgagtgcctgggagatacataaggtgaagagctaggtgttcctctttgccagactttggtcctaagattgggtcctccatcgtatccctcctgctgtttttgctcctgcaaacgtttttgcctctgtttatccatatttcttgtcaaaatgctcgtcatgctcattcttggtcctgggagttcaaaatggtatcccagcctcagcagcgtcgtgttctccttcagcagcttgacaatctccatttccacctggctgcccatgatgtgcctctggttatggaaacgcagctccgtgagcaccgtgttgtgctggagagctctcatgatggccaggatcccctttcccgttatgaagttggactcgacgtttacgttggtgatgtgctcattgactttgagcatctctgcaatggccatggctgcactgtcgtcggcatgcgtgttggccagactgaacgtcttcaccacagtgttgtccttgagggcttcagcaaagcgggtaagggtctgtgttgtgatgttctcaatgttgttcaaattgacttctgtggtgtcagggtca

SEQ ID NO: 346316 - DNA, 1000 bp, Homo Sapiens
gagacatagtctcactccgtcgtccaggctggagtgcagtggcgcgaccttggctcactgcaacctatgcctcctgggttcaagcgattctcctgcctcagcctcccaagtagctgggactataggcacatgctaccacgcctggctaattttttgtatttttagtagagatggggtttcactgtgttagccaggatggtctcaatctcctgacctcatgatccgcccgcctcagcctcccaaagtgctgggattacgggagtgagccaccatgcccagcgatgtttagatgtttttgcggaagcaaaagtttcttgccctaaagctttagaactccattaggtattgaagatgactctttggggctataaaataaaatgcagtaaacatactagttttatattgcatgcaaagtccaaatagttgagaaatgtcctctattagatttcacaaaacagaaagaattctgagccaggcacaatggctcatgcctgcaatcctagcacaagagactgaggtgggagagaatcacttgaggccaggagtttgagaccaccctgggcaacagagcaagatgccatctccacaaaaaattaaaaaattacccaggtatgggccgggcacggtggctcatgcccgtaatcccagcactttgggaggcagagatgggtggatcacgaggtcaggagttcaggaccagcctggccaagatgatgaaaccccgtctctactaaaaatataaaaattaaccgggtgtggtggcagtcgcctataatcccagctacttgggaggctgaggcagagaatttcttgaacccaggaggtggaggttgcagtgagccgagattgcaccactgcattccagcctgggtgacacagcgagactctgtctcaaaaaaaaaaaaaaaaaaattacccaggtgtggtggcctgtacctgtagccccagctgctctggaggctgaggctggaggatcgcttgagcctaggagttcgaggct

SEQ ID NO: 346317 - DNA, 1000 bp, Homo Sapiens; identical to SEQ ID NO: 161405

SEQ ID NO: 346318 - DNA, 1000 bp, Homo Sapiens
gggtttaagagcagaagtttaataagtgaaacaaagaagagagctttctggtgcagaggaagagatcccaaatggtttccaggttcatagcaagatgcagttggtttatagatgagcttgaggaagtcatgtctgccttatatagggcacagaggattggttaaaccaggtgtgccctttatatagtacgtgaagaggctggccaccccaccctgatcttttattatgcaaattgggtctctaacaggctgtcactatgttgccttcttttataaatatgtatagatacatacacatacttttttttctttttattatactttaagttctagggtacatgagcacaacgtgcaggtttgctacatatgtatacatgtgccacattggtgtgctgtacccattaactcctcatttaaattaggtatatctgctaatgctatccctcccccattcccccaccccaaaacaggcaccagtgtgtgatgttccccttcctgtgtccatgtgttctcattgttcatttaccacctaagagtaagaacatgcagtgtttggctttttgtccttgtgagagtttgctgagaatgatggtttccagcttcatccatgtccctacaaaggacattaacacatccttttttatggctgcatagtattccacggtgtatgtgtgccacattttcttaatccagtctatcattgttggacatttgggttggttccaagtctttgctattgtgaatagtgctgcaataaacatatgggtgcatgtgtctttatagcagcatgatttatattcctttgggtttataccaagtaatgtggtggctgggtcaaatggtatttctagttctagatccctgaggaatcgccacattgtcttccacaatggtttaactagtttatagtcccaccaacagtgtaaaagtgttcctatttctccacatcctctccagcacctgttatttcctgactttttaatgattgccattctaactgg

SEQ ID NO: 346319 - DNA, 1000 bp, Homo Sapiens
atttttttcacattcaagttagcctgagttgactttcattgttcccctatctacccatagtccccatacaataagaagaaatatttgctttcatattacagcataaagagcacctaagctttggcagctgacttgtagtgggtcagtgtgtgggcagaagggtcagtggcatcgatccacttgggcacccagtaatggctcagccagtcagcctggcctgggaaatggtgttcaaggatttgatggtagtagtatcctttggttttaggagtattgaagggaaatttctgggctgcatttgccatcattgcatcatcaacctgatgttcaacatatttctgtaaaatcttaaaccaggaattcttaactgaagttattccatcactgaagacttcttttggtcaccagagaatctctttgagtatcagattggagtcctcaaatgtctctctcaggagatgtttttctatctcattctttggaattctcatttctgttgacagatacaagtaataggaagaaaactgatgatctagaaatgggactctcagttcaaggctgtgggcagcagtagtttgatctgcatggagaacatcaaacaaatagagttccctcagaagcctctcactctcctccttggctttttcagaaggagccttgtgaaaatatatgtaaccctgaataagttcatctgatccctctccagaaaagatcaccacgctatctgtgttcttccgaatatacttggaaattaaatacatacttactgaagcatcagctgttgtaatgttgtaagtttccaaggaaaatatgacttcatccagagcctgaaagccttcctcagagttaaagagaacttcatgatgttcacttccaatatgatttgccacctttctagcagccagtaaatcagggctgtcttccatgccaattacaaatgtctggagaggatactgtacttgggcctctttgagctgcttcaacagggtagcagcaacaa

SEQ ID NO: 346320 - DNA, 780 bp, Homo Sapiens
tacacctattttcatatttagtggtataaaaagttggtcatgacattcttatctttctaatccccacagcatctgtagtaatatacagtatcagatatactgttatctatagcatctaaatttgtaacatttttatgcctaataagtgagatatatacacatatacacacacacgcacacacacacacaaagtcatgcatcactcaatggtggggatacagtctccgaaatgcatcatttagtgattttgtggttattgtgcaaacatcatagaatgcacttacacaaacccaaatggcaaagccacactacacacctaggcctatagcctatagctgtagtataacctattgctcctatgccacaaacctgcacagcatgttactgtactgaatacagtaggccattgtaacccaggggcatttttgtgtccaaacatatctaaatgtagaaaaggtaaaggcaaggcatggtgtcccatgcctgtaattccaccgcttttggaggccgaggctagaggattgcttgaggctaggatttcgagaccagcttggccaacatattgagatccattatcataggccaacacagggtcaggatcatcaatatcactgtcttccaccaccacatcctgtcccactggaaagtcttcaggggcaataacaggcatggagctgtcatctctgtgatagcaatgccttcctctggatactgcctggaggacctgcctgaggctgtttcacagttaacttttttcatacaagtacaaggatcacgctc

SEQ ID NO: 346321 - DNA, 1000 bp, Homo Sapiens
ggtgaaaaaaaatcttactcttttttacgtataaagcacagaacatatacagaacataaacagatgtatagtatatctgtggtattaaaatttcatgtgattaagaaaaaaaatctggaattatactagggaaggcactaatgaaaaaaaggctaaaaaattctgatctaccttcttgggccatgccttgtctggtccaagaaccggccagaactcggggaagggaacaaccaggggagagtctagagtccagtctcaggatcccctcaaagtatttccaaagccagccccccaccagtcagctacagtcctttcaccaaaactgcccttccttcccccttgcctgaaaatccctcattctgtttctgtcattctttcatcttaccttgttcctactgagggcgcaggtcagctcttccccattctccccctggggcaccccagttcccagggcatgaaagacttgaggtgcctcacctctacaccttgggctaagacatagccctagagctcctggaagaacccaggagggaagcccaaccacaggaggcccccaggaagtgggggtactgctgtgggacaagcttctctttattggggaagggatgggatcacaaataatctctgcttagaagtgctctagggccatggattcatgtaagggtggggcagggtggactgaagatctgttggcagggctcacggagatgagggtaaggggagagatcatgggttcatgagatcccatcttgggcaatacggttatcccgtggtcttcatatgccacagagtcctccaatttcaggggctcccgtgggatggtggagccaatgaagaccaggtagatgatgccacctgaagaccagtttgccccaaccagcaatgaaggtgaagatgcggggggggggggcaggtcccgggacggattgatggcatatcctgtgttcatgccatggtacaccctgatgatgaccacgaggatgcctatcaccagtgcgtg

SEQ ID NO: 346322 - DNA, 645 bp, Homo Sapiens
atcagttaatagtatttattattatttgtggtcaccaatgccaattaaaacaataattaaatagaacatgatgaaataattcaatggtaggaaaaaaaaaaatctggcctacaagtgaacatggaaagtaaaagtaaatatttagaaagtgaaatcaggagcggaaaaaagctccagcatctcaccatggggtcttccaaagccagcagtactggagatgtttattgttcaaagatggacttgcttgggttgggattctccaactagagccagaggggagattctcgttccgaccaaagggtaaatgaacccagcacctatgctggcccggacatcactgataggtaagatgaagtcacttggcacaccttttttgtcaggttggtgagacagagaaagatcggtctttgccatgcagatgggcaaatttccaaaaccctgctgagtgtaacgatctattttgacttgtgcctcaggacagagttcgatatctttggctccatagacagcctgggcaatggtccttatcttgtccacaattggaagccaccatccaccacgccacatagcaagtgtcctcagtgtctgcagaccagaaacaactcccttgtgtctcagcactgggccacctgctgaaaccccaaa

SEQ ID NO: 346323 - DNA, 1000 bp, Homo Sapiens
cccacatatagaaatacaaagggtgagaagttaaacagaaaatttaagactcgctgttcagcaggaaggaactatacgattattttatccccacaggaatgccagttattaacaaaataaataaaatgaaagatttactatggactttcaacctaaagacgaagaacatatggttagccaataatagtaaacagttcatgcaactatgtaaataataaaagaaagcaatattgcactaaaaggggaaccttgtaggactaattcacctctttcattgactcaaagtaaccagccatttcctgtatgcactggcaaacctggcttgctccacgttccgacaggtggacaatacttgatcaatgaacctgtgctccatttctaggcctagggagtctggaactggcgtccgcttcaggcgtttggtttcctgggaatagccttgcttgctagagtcattcagtccatctacttccattgcttgagacagctgggagccatttaagtgatgctgaaggtagaaaatatgccgcctatgacaccaaagggtttcatgtcctgggtaggaatcaataagatcagtgctgaattcaacttcttcttctagaagatggggaagattaatccttggttcttctgttgaaactgctgcttcttcatcttttggaggaactagggctggctcacttctcaaaggattttgctccatcacagaactgtctatcacagtttggctaatcaaagacttaagcaaaaactggcggtagtgaaatccactgtggtctgaaacgtgcatagatgcccaatgtttagtagaagatagttcatcaagaagaatcttgacatctagcttggccaagtgctgtaaaacccagatgcgatgggaccaagcattatagttgcttgggtatctccctgctgcttcaccacagacctccatctcttcttgtatgagtcgctgtgccctttctgtgggaattgttcccaagtttcctttggtcac

SEQ ID NO: 346324 - DNA, 1000 bp, Homo Sapiens
tcaccagcgcagctgcaggggcatggactgccctgcccgcaggtaggtgatgttccgagagcgtaaaagctggtaggtgatgtcctccacagcttccagcttgcgcagctcgatcagggcgtcccctgctgtggccagtgagttggtgatcagctcggccaccttggagtcgccctcagcagagatgatggccgcctttttctgctgctcagccttttccaccacaaatctggccctctctgcttcctgctgagctatctgtttggcttccaccgcttctatgaactccttcccgaaggtcagatatgtcaaggacacgtcgtccagaatgagcccaaaggtggctgctggctccgtaaggtcatcgctcacctgcctggagatctgctctctctgggtgattagttctccagcttcaaagcgagccaccactgacttgaggatcttgttcgtgatggacggcggcacacgctcatcatggtcctctccgctgctggtgaagatgtgaggaagctggctagctacgggccggaagatgatgcgcagtgtgaggttgacattctgtaaatctttgctaccggtgatgactggcacattacgtggctgagaacggcagtcaaagatattgatttctggtactttttccgtgtagccacatggacaatgcatgtcaaagcatttgattttttgctggtcccgcttaattactgcatccagttgcttccttttttcattttcttcttgtagttttctttgtagctgtatcttttgatatttcatgtgatctacactctgctctagttcattagcacgtttctcattttggattgacagtgatgccagtttcttactatcttgttgcttcttctgtaagacctgaactctcagctttgcagcatccacctttttacgaaactctttctgtaattttaccttcattgcaacatcagaaagatctttgttttccagctcctgtagctgcttttgtgtttcagttagt

SEQ ID NO: 346325 - DNA, 884 bp, Homo Sapiens
aaataaagtacatgtacccctacacaagtatcactgcgacatttcaggaaccttggagctgggaacgccccttcctccctgcccgcctcttctctagcctcctcctgattgggcttgggctctctagaaaagtgcttctggcattgtctcgctggaaactctgtaggtgtgctggttgggctctcagtgtttatcatgtccacacccttctgtccctgggagctgtggacaaggggcgatgagcctgctcagtcattcatgtccagcccaaactctggatacaactctttggtggtgacacctcggatcacagctagtttgcccatcagcatctgccccacatccttgatgtcattgtactcgtgaagctgggtaatgtggtcctccagttcatccacactgtagccttcagatacgaactgggagatctccttgtccagcatgtccctcttctccttcagtttctgaatgtcaaggtgcagagactcctcgctggtcccatcagcctggccagacttgggcaatggcctctcaacatggggacagtaaagcgtcttctcaaaggttgctggaaggaaaggggatcggaaggccccgcggcaacttcgggtaagtcttggttcagtcctcctgagccctggggtccgaggcccccggatcagggggttcaatggcgcaagagggtccagcgcgggagtcggagagcgacctctcaggtgcaccgggccaggaactctgacccggagtgtgaactggcgcacagaaagctgcgcgcgcacccaaggaaagccggccccgcccctctcccgaggtgggcggggacagcggttgcgtgcgcagcttttgttgtgacgccacaggtccctctggccacgccgctgcat

SEQ ID NO: 346326 - DNA, 697 bp, Homo Sapiens
tatatgaaggggagtttattaagtattaactcacacgatcacaaggtcccacaataggccgtctgcaagctgaggagcatggagagccagcccgagtctcaaagctgaacttggagtccgatgttcgagggcaggaagcgtccagcacaggagaaagatgtaggctgggaggcgaggcctgtcgtctccttttcacgtttttctggttgacattcgctggcagctgattagatggtgcccaccagatgaagggtgggtctgccttccgcagcccactgactctagtgttaatctcttttggcaacaccctctcagacacacccagcatcaatactttgtatcctgtgaccttgggctggccctcagctgggagccccatgtccctctgggcactgctgtgatggggcagggtgtgatgggagcctgtgtgtgggccctggtgtgatgggtgcctgcgtgcatggggcagggtggacgctgagcccacgtggcacgcccacgcccaccatccttcactctaagccattagccacagggaaagcgggtgggtgcagggaggcccgagcgtcactcaagggcgcagggcagcgtctggcccaaggccagcgtgtcactggctgggaggttcccctggagctccacgttcagtccctcaggtcacaatacacacctatcctgctggcctgacgcaggggcc

SEQ ID NO: 346327 - DNA, 793 bp, Homo Sapiens
tcagtacatcacagttcttattttcttttggtccctctctggactcacactaaattcagttataaaccaccagcactcaccaatgaagagctggctgttgagctgtaaacgaacgtgcccatcagcaggggcaggctgcatcttctgaggaagctgatcaacttgaagagacgctcctttaacatttctctctgccctcacgtggtgccactgattgtcattaaagggagtgggtgactgcaccgtgacctcacaaggtccattccccacatcgaaggaaaatgtcacttctgtgagagcattttgttgagttaaagcttttattgctaaataatgggtaccctgtgacttgtccagagtggccagcctaccccgcagctcaatcctgatgaagtctgtgatccccaggttctccataaacaccccagaggaaactgtggtcttaaaaaagaagcacacgtcagcagtgagttctccgtggaaagcagggaaatgaaggtatgaagtctcagtgttgaaggaagctgaattccaaaatgactcatcttgtccgggcttgtgttgaactccttggctcaagccatcctcccatctcagtctcccaaaaagagaagggaatatttcaaaaatcacactttctcttctccatactttcagaagtcttgtatctccgcggcagagcagtggccccagtgtataatctgcttcggaatgtggttggcctgcgtctgtcatcacaatctgagtgactgggaggtgctccttttgggaaaggactattgtgtcactagtc

SEQ ID NO: 346328 - DNA, 606 bp, Homo Sapiens
tcagcggccagagcggtccaggagcacgaagagcagtcccagcagcaggagcggcgtgaagaccagcagcagccccagaagctcaagggccagcaggctcagcagcgccaggcggcgggcacagggtccccgctcccgcagggtccagagccgggcacccaggcagggtggacagggcaggaagggcaggcagccccggccgcccacgggccctgccaggaagcgcagctggtagcggtgctccagggagccccagggcccagggttgcggtgataggatgcaggggcctctcggcggggctggcgtgagggcccgtcggcctgtagcagctcctcctgtagccggcagatctcccattccagcacgggcgtcttctggcggcacagcgggcagcgcacccggcccaggtcggcactggaggccgagcccagcagcctgtgcaggcagcccacacacaggccgtggctacagttcagcagggccaggcggcgctctctgggcccgtagggctctgtgcagatcgggcactcctcctcttccccctgccctgctgcctgctctctcccctcctccttccaggttggaagggcccaggcaccctccat

SEQ ID NO: 346329 - DNA, 1000 bp, Homo Sapiens; identical to SEQ ID NO: 161406

SEQ ID NO: 346330 - DNA, 1000 bp, Homo Sapiens
aatttataaagaaaaagagatttaatgaactcacagttccacttggctggggaggcctcacaatcatcgcagaaagcaaaggaggagcgaaggcatgtcttatgtgggggcaggcaagagagagtgtgcgggggaactgccctttatacaaccatcagacctcctacgacttactcactgtcatgggaaaaacccacccccacgattcaattaccccccacgacatgtggggattatgggagctacaattcaagatgagatttacgtggggacacagccaaaccatatcaacacccataatggaaatgcagaagagagctgtaaagtttgcttatcttctttttcttttcttttttctttcttctttcttttttttttttttttagatggagtctgactctgttgcccaggccagagtgctgtggcacgatctcggctcactgcaacgtccgcctccagggttcaagcgattctcccgcttcagcctcccgagtagctgggattacaggcgtgcaccaccacgtctggttaatttttgtatttttagtagagacagagtttcaccatgttggccaggctggtcttgaactcctgacatcaggtgatctgcccacctcggcctcccaaagcgctgggattataagagtgagccactgcgcccagtcaagtttgcttatcttctaagtttgtgggggatatttgtcttttgtaggggatgcggtttggttagcatctgaaagtccttccgacacttaagaaaccaactatcttgtgagtcttttcattataaaagtcccaatggagagacacttgctcttccagtacccttaatgtccattatgggtcagctgtggttcccgtccatgtcatcttccctctggacctgacgaacctgagctaatggatcagcttctgtctgatatattgcaggtatcattttcagaaaactggataaaccacatggatgccacgagaaggtgtcaggagagccagcaatcct

SEQ ID NO: 346331 - DNA, 844 bp, Homo Sapiens
gaattcagttatttatataacgtcccttgtaaaaatgaaagaataaaaaccgaaaaagaggggcagggtaaaatttttttaaaaaaaggaaaggaaagagaggaaaagaaaataaaataagacgatttattgcttctcctcagcatcctccttggtgtcttccttcaccgagagagcttctagcttttccgccactttttcggcatgatcgtttttgcctgatcctgctttcttttctctctcttcgatctctttcctgcattcttcaaactttgttttgaatttctgtgcattctcagcattcaggaagcggatggccagcagctctggcttggggcactcgtcggcgaagtcagcgtgggtgttccagacccaggcacggtcgctacctgcgttgggcttcagctccatcatcggcgtggtgtagtggttggcacagatcttcagggttttgtccctctgcatgaggaggcggatggcccctttctccttgtgcttcaggagcttgacgtcaccagtgcctcgctccttccattctgggagatcgttctcggaggcaaatcgcaaccattttgcccgcattttaaaaagttcctcttcatcttcttccagcgttttaatttcttgctcaggaagagaaactattggctcaaactgagggtcatggttcaactcgtctgtattctcagtggaagtatcatggtcctcatgagtgtccttggtggccgccatgggggcgcggcgggggcggcggctcagctgggtcggtggtcgctggctccgtcgtcgctggctccgcggcctctcggcggctactcgtagctccttccctccatgtctggcg

SEQ ID NO: 346332 - DNA, 1000 bp, Homo Sapiens
tcctagaaaactttttttattcatcattctatgtgtgttttaataagtggtgattattcccattatgggaatccattattaatctaattttctaatggaggaagacagaaaagataattaccactttctgtggaatactcaacttacgaccaaataatagcaatctaggaaatttagaaacagtaaagatttttggtttatatttcatgtatagtgttgctgttccaagcttataaagtaaagctgtctgcttcctaaattccaaaaattaaaatactcccccgcctcaccctgccaaccagtgccctttggtttttgtttgttttagaacaaggaagggttaaatggttgctgattatggatgtaccattttgatttggggaactttcacacacagaaatcataccaaatggccagatacttattttacagaacagtttaaatattacacattggcaaactcaacttattccacccaccctggtggagagggagaaaaaaacccatacctataaaactacttcacttgacaggatgtgcctaccaacaataagtagtttaaacaactttcaccaattaagatgtctagtttagattttaaaatgggaaaattatgcatttaaaaagtaaatatagttgaaaatgtaagtcagttacaatttgaacctaatgagccatgcaaggagcaagggttaataaaccaatgtgctttgaatttgttcaagtactgatatttctgtatataaagatttagcatatatatatataacagctatcacgagaagtgaaaaaagatttttccccaaaaatgcaaatattaaaactaagttaaaatacatatagttagtattccacacagcataaaatttgacaaatcaaagtttaacatgtcccagttgaccatgtgtgaatatgcaaagcaggtattacaaccagtatgtccaatatttaaaaccagtttgtaattgggggaacttctaaatccttaatttaaaaacac

SEQ ID NO: 346333 - DNA, 1000 bp, Homo Sapiens
ccatgccaggcagttaatgtgctgacatagtaacaaggtttgaaggaggaacatctcatgcacgtgcgtggaaacccaattgtcatgtgtatgaactacaaaaggatcgggaaaagaacacatttcctcacaacaggaatacatgagattagaaagaaaaccggaatgaggtagatgcatgaatgcacagacaaggatatgtgacaggaagctgggtgacattttgcatctgacatagcagtacacctagagagcccaaggaaatccacccccaagttaccagaggcaagaaatgatcttggcgaaattacaggacacacgttaaagccacagactgcattgaaagagaacacgggtttcaccgcaaacaccatgaacagctgttctgtcaaccttgacggcaaagaccagatctttagtgttaactctaaaagagcatttgtttgggagaaaattatagaactgaagatgggaaagagtcaaggacggcaggaagggatgccaagacaccacgtcccagctgggagcagtgacgactttatgctacgttctgagttaatgctgcattcaatgggatcccttcataaaagggatctacttcaatgggatccctcatgaaacccaacaaacgataaatgaacgggcaagacatggcagagtacttctaggtaaaggtgccagacttgcccctggtagaggtcaaccttctttatcaaatgacagctgtacaaaacacatcctaacaactcgaaaagagaaaaaggatccgagaagaaagtagtgatttcagacacagattcacaactactgcaagaactgaggcccacagggcaaaaggaatcactatgtaacaagtgcttttggctcctctccagcctgggggtcaggatgggtgcctgagaagcccttccaagttgtgtctgctaggaagctctgcctcagccttggtgggcccacgagaagggcacacttccttgccaggccctcctagtgtccctgt

SEQ ID NO: 346334 - DNA, 1000 bp, Homo Sapiens
tttttttttgagacagagtctcactctgtcgcccaggctggagtgcagtggcgctatctcggctcactgcaacttccgcctcccggattcaagtgattctcctgtctcagcctcccgagtagtcaggaggctgaggcaggagaatcacttgaacccgggagacggaggttgcagtgaaccaagattgtgccactgcactccagcctgggcgacagagtaagaccaggccaccgcgtgctgactctctcaccaagcaggagcgggcccctccctcacgcggagccgctggcacggacagccccgggaaggtcaggctgagcgtcctttcctctgtgcacccacggagggtgctcccattggctttctcagatagcaccatctcagggtccagctggccatggcctggattaagtttaaaatgctgggccagtccccacttccctatatatgactttttacaagtctgacacttgaagcttttgggcctcagggagcagcttgataagtcaaagagcgcctgcctctccctctgatgttcttccacactgagttctgaatcatcatcagaatctggcagatgaccgtcggccaaatcatccctttttatgaactcagctttagctgtatacttggcaggtcgagatacctgtctcaacgtgtcttcacttttaacgatggttttagtttctcagtatgttttgtatgcaagttggaaataaataaacgtcctgaactggatgaaacatgttacagtcggcgaactggaggccaacgaaggggtcaacatggtgccctgtccatttggagccttgggagctgggactctctttgcagggaccacctagagggctggcagtggtctctgtacaaacccctgagcaggaggctgatgtaggaaacatgactgtggctcggttctcacgaggggctgtaccctgagcagctgggggctggtgacgtggagtcccaccaggcgggaattcccccggggcggctggct

SEQ ID NO: 346335 - DNA, 495 bp, Homo Sapiens
tggacttggccaatcctgcatccttacacttctccagggcctcccatgtgctgcagagacccactgtgtcaaacatgatctttccctgtgcatccgtcagcaaaagctcctcccaggctgcaaaggtactgggaaatgaaaaaggtaaagatccatgtagctcagctgaagtttcttcagtgacatttcaaggcctctttggaccaattctgggcgggaaaaggtgccccacacctttgtggtatagaatatatcttttctcttcacagtgccgttggcaatcttctttcggatggcctgcccgatgccttcttcattcaggtgtgtataagctgagtcaatatggcggtagcctacatcaattgctacctggacggcttcttctacattactcatagcaaccttcctagcaacagaggtgccaaaccccagaataggcatgaactttccatcattcagttttacagaaaggagtctgttaaaactcatcttctt

SEQ ID NO: 346336 - DNA, 1000 bp, Homo Sapiens
gtagatatgaggcttcactatgttgcccagctggtcttaaactcctgggctgaagcgatcctcccctttcggcctctcaaagtgctgggattattggcttaagccaccatgcccagccaagaactttgtctcttgtgatgcaccccagaacaaaacatcactgcaaaaacacaccaaggcatgagtttcagtcctaattcccatttatccaccatacactatgtgccaggcacaacgctaagtgcttctatggatgagcttcccttaatctcagcagtaacaaccccaggcaatggggcctgttgacagatccatttgccaccgaagacagtaaggctcagagagggtaagtggcttgtgccatgtcagccagctaaggaggggcagaaccaggatgcaaaccccagctgcctggctccagactcgggttcccaaggtcccactacacttggtcactccactgcattctggtatcctggtctttggcagagtccacgtaaaagaaggaggtagagggagtgagagggacttcatgcaataaagtttcccggcgttacactgccatcgtaattgtgtccccgaccaggacctctcccttctcatcctttccgtgatcagccctggaaaaccttccaaagaactgtcctccttctcccgggatctcagagaaaattcgcctgagttcagtgtccacgtgacccaagctctgaatgcggtaacgtgcacggagagataaggatgtcaccatgagcaagcctcccagacagcatcaaggagcaaccccaagactgggcagggtgggctctaatgccgcccacggcgaggagggctgcccgtgctgcctaaatgggttcagaatgaaggccgctctcccaacttcaacccggggccggccacggagcctcccgccgcccctaccctgcgcccccgggacccccggaccccagcgcccgcgtcacttactcctctgccgtcgccacctgtctgggtgccggtctcc

SEQ ID NO: 346337 - DNA, 1000 bp, Homo Sapiens
tcagagcacgtgcggccctgagcccagctccccctcgtctccaatgtccacctcgtcctctggctcggtcagcacgaagggaccggcgggcaggctcagccgagcctcggcggcggtggcggcctctgaaccgcgggggctgccctcggggctttctggcccgtctggtgctttgggttcgtcttggcttttccgcagttgctttttatgcttcatccgccggttctggaaccacgttttcacctgcgtctcggacaggctgagggccgtggccagctccactcgttctggcgtggacaggtagcgctggatctcgaacctcttctccaagcccgagagctgcgagtcagagaaaaccgtgcgggctttgcggcggcggcagtgcttccccggcagctccgcgtgctgcgggtgcgggaacagcgctgggactggcatccccgaggtggtgaggaaataaggatgatggtggtctcccttatgcagagggtgatgggcgtgaggagccaagagggtgggtgtgggcatgagggggtagccatagtctagcagaggcacccgagaggccagagagctggcgaaatggtctggggccacctctctcagcggcttgggcttgtgcagcaggatgtcctcgatgaagaaggatgtgggcctctgagaagacgccgggtgtagaggagaggtgaagttgagattcatcttgagcggagcacctgccacaggacaagggccgggacgaagtggaggacgcaggcagagtctccaagcctgctcgaaagccggcaaccaccctccgaggctcgaatctccgctgctctctcccgggcctgggctaccccgggcgctggagaggcaagaagacaagctcctgggtaggttgggtctctgtgttggagaattggcagcttggagaggggggccgggagagccaatgacgaggctgccagaggcagaggggagggtgcgggaggctcggggcggggcggggagctgtccg

SEQ ID NO: 346338 - DNA, 696 bp, Homo Sapiens
tcatacaaatggcatcatcacagcagaggaatggcgtagtccttgaatggcagcatagggcccctgctgaaaatagtgatggtatcgcggcatgtggaatgaagggaatgtggggccactcccttgcatggagctggcaatggccgatggggtcaaaggcattcccagtcggctatatggcggcagagaaccctggatggggtgaggaatgggtgttgctatggatgctgtgctggtgccaagagcagtcagggactgtgggtgctgaaacccaggaaaactggaagaagatgatacccaggagctgagagacaaattatcagatgttgtaaaggctgaccctcgatttggggttgtctgactctcatcccccaagacatcttcttctcctccataggtacggatgggtgaaggtgcattggaatgcttttgaatcaggctctccacactttccctctcaaggtcagtgagcctggaggaatcccagaatcctttggcaaaaggattgctatctattttcagcttcgttattgtttctggaaggatgaaagttctaaattcttcagacttcaggttgagcaatgaggctgtgtggtctttcttcttaatgatgtgcacccttggctggtacttatgcattgagttcaaaatgatcttgaaaatgtttagagcaacttctacaactttgatcgtcat

SEQ ID NO: 346339 - DNA, 1000 bp, Homo Sapiens
ttgacgaaaagcagatttttattgaacagaggtataaatgtgtttcattttctaataaatctctttcacaaatcaccttgctgtttcgctcttcttgaatgatcatttttacacaacactgtctgactgttttggcttctgccaaggttagcgtctgttcacaggctgagtctgacttcctcctcccacctcctcctagtctggccttccaaaataatgctcaccattctatcacattgacttcagttttgaaaagaaaagttatcttacaaagtagtaggtacaactctgtaatatgtaaagtgaggcaatgatagaaccagttttaaaaataaccttccatgatgattttcattcgcacctacctgcttattagtaagaatctttttacatgtttactgcacgccccaatttctcttctgtgaaaaacttctgagtatcatcacaccctccaacttctcctctcacctatattgagaagggtctgctctttatcctaacatctatactaggtaattttcagaatattccttcaatcatcaaacaaatttttgagacccttgcgctagatttcactatcttaatatgaaaaccaataatcacctattaaaatacaatacaggccgggaacagtggctaacacctgtaatcccaacattttgagaggccaaggcaggtgggtcacctgacgtcaggaatttgagaccagcctgaccaatatggtaaaaccccatctctactaaaaatacacaaatcagccaggtgtggttgcagacgcctgtagtcccagctactcgggaggctgaggcaggagaatagcttgaacccaggaggcgggggttgcagtgagccaagatcgtgacactgcactccagcctggacgatagagcaagactccatctcaaaaaaaaaacaaaaaacaaaaaacaccattaataagtaaataaataggccaggcgtggtggctaatgcctgtaatcccaacattttgggaggccaa

SEQ ID NO: 346340 - DNA, 1000 bp, Homo Sapiens
gcaatatatcatttattgacatattagaaacatctaaaaggtgtcattacatggattttgatacatctttgagcacatcatcagcttgagactaggaaggaacactgtagagaatcagttcaagcagcacatgatacatctgaggcaccaacacacaaaaagaaagaaggtcagacacaacctacatttgcaaggtaccatttacttgatgaagttctaagagagttgacaatgggctttttaaaaagaaaaaaaaaagctttggaaagtctagaaattaaaccaaaggtccagactttaaactttagtctcacattctgtaatatattttgataaacagtccagaaatgcttaagcagttgaattaccgaaactacagtttgcagctaacttataagtgactccaggatttcaaaaagacaagttaacctctgatctagaaagcatgtttgaatctaaaatatacttttaaaaagcattcttgttaggttcattgacatggacaaaattgcgtatttatgcataatctatgagaaagtattttggttgttgtactggtatagaacagtctaattcggcgaactcatcgtcaagtagtgatgagataagatactagcctgatgactgtctattgaaaggctgatgcaaaggtcatgactgactgatgcaggcaatgagtggcatgagagtacctgatattacacatttgtgcaatggaccggctatcctgaatgagcaactcatcatgtttggtgtgtcacctaagctaattactataaatagaccacattcactacttaggaaatattgggtttccaaatcttagctaaaggtttagaaaaaaaatgctcctatgcagtgtcttgctatactcacaactgaatactaccagcagagatcagttttaagtgacactaacaacagctggaaaactatgtaaaatgtgttctctctctctctttgcgtgtgtgtatttgcatttaatgagctgctgagaatg

SEQ ID NO: 346341 - DNA, 1000 bp, Homo Sapiens
ctaccagaaaaagaagcgacttcctagatctcccggaagtccctttcgctcccagcgcttcgcgtaccaggaaggggacggcgtcctgttggtctttcttctggcttctaggtcatgaccatacatatccttgtccaggtttttaccagacctataaatactctgggccatatctttatttaccacctctccaggcttgatcgtaaacattataaattttgtcttctccacctgcaaatccactgtccataccgcggaatcgcccccggtccttggggttggggctgccgcctctggctccttctgggccaaggccactgggtgagccaggtgctggcaacacaccctttgctccttcagctgcccatgtagctgtgcctgctgctcctcctcggcactgactaaagctgagtttaaaaaggccaccatggcctcccggctcttcaggtcctccaagatgctcggcatgggctgaggcgcctcctcctcctccttactgcccagttcatcgccttccccagggagagccatgaggctcatctgggactgtagctgctggttctgctggctggtagcttccaggcgctcctgagtttccttgagctcttggtgggccatctcggccactgctttgccctgagcttcctgctgctgcagctggtccatgagctgggtctgcagcagtaactgcctgtgcagcgcctccttctcagaggtcagctgctgataggctgccacctgctgctgctaagtggccacgtactgctgcaggtgacccaggtactggcctcgaggccgctgcagactctgagcctgttggctctccagctccaccatctgcttcaccttggccagctgctcctcgagctggtgattctgggagagcgcgtggctgatggtggtgcggtctttctgcacggaggacctgcccgtctccccctgctcctcccagagctctgctttccactcccgcagcctctcgtcctgctgccggttcagg

SEQ ID NO: 346342 - DNA, 1000 bp, Homo Sapiens
ttaatgatattcatctacctctccacaaattggatatggactactgacaacagctgatttgacaactgctggatgctcagcaagcacactctccacttcaaatggcccaatacggtacccagaggaaataatgacatcatcagctctgccgacaaaccagaaatacccatcactgtccatcattcctctgtctccagtgacataaaaatctccccttaccgtggcagcagttttctctggactgtcatattcagagaagaaacagaagggctgtgtagactttagtctgagggcaatttccccttctttgccaggtggtagaacattgccattttcatctataatcacttccgtctgtccatagctctcatgtagctccagcccagtttgtgccctccactgctccagcacctccggggtgagggcctcccctcctgtcaagcagtgccgcagcctcttgaatttatatctcttaaggtctttttgtagaagcatccagtacatggtgggagggctgcacagggttgtgatgggataagtggtaagtgtatctaggaaggtgtcaatgtcaaactgtgccatctgatgcataaaaacacaggctccataaagccaggaagaaaatatacttccacagacggtgaacccaatgctgaagctgctctgagagtgctgggccatcttaggagagcctgtcgtcccactggtgaaataaatggccactggttcttgacttcctgtttccacacagctgtgctcttcagaggcggattgaaataactcctggaaactgagccacctgttccggctttgtggagacaccaggagtttggtcttaaagtcaggacactccagtgcaatggactccactactgggaccacctcctcactggccacaatgcacttggccttggatgcttgcagccggtagaggatatattttgctgtcagctggattgttcctggcatgaagacaatccctgggaaggacactaaacag

SEQ ID NO: 346343 - DNA, 561 bp, Homo Sapiens
ctagttgtccatcttcctccacctcagggcgtgggatgcctctaggatggccaggaagatcttgaacaccatctgcttgacattctctttgctgatggcctggaccagtgagaactcagactccaaggtggccgtgtagcccagcctgcccaggatggcgtccagtttgtgtctggaaagcatagatcgcacccagtaggtaaagctcccagtgtacatctttagggacctgatttccttcctccagggaaacagaagcaggttgacagagatcagctccaggaactctagtgcatgcaccagctcagggctgacttttgggacagggctgggatccccacaacagcagccacccagagcaagggccacttcctctggcagacagagccatggaggggccctcctgcccaggagccacctggccctgtgggtgagggctgcttgcctgcagacatcgagccggccctcccctgctctctcctggtagtagctgatgatgttgcccaggagggtctcacccagagcagcttcgcctgggcctggggattgggacctgctcat

SEQ ID NO: 346344 - DNA, 684 bp, Homo Sapiens
tcacttgatgacgtggctgactaccacccagggcagcggccgagcccatagtggcgtcagtgccgccggcgtccggttctgcccttgtggtctgagccggggcctgccctggaggccgctgtgggggaagggtgcccccctggagcctgggtgtcctcgaaggcccccgcggtctgtggagctgatcccagggaagttggttcttttcggcagcaccatagctgtcatatgacaccccgtcacggccagcacccctgcagaggggggggtcacggccagcacccctggggagcaccggcgcaccttgatgacccggccccggaagaggctctggtccagctccacggcggcctgcacggagcccttggtggcaaactctatgtaggcataacccttggggtgtccagagaacttgtcacacaggatcgtgactcggtggacctccccacagcggctgaagtgggcctccagctcctcggcggagcccccgtagtccacgttgcccacgtagacggatctgtggtcagcctccaccttctcctcgggggtcccagagagggggcagcccacggtctcagggctcagcagctgcccggccgcggtgccctcctcttcctcggcctgttgctgcactcctggaggccgtggcgtcccctcggcctgctccatggcacacaccttcat

SEQ ID NO: 346345 - DNA, 675 bp, Homo Sapiens
ctagagctctgcagccgctcccaaggcaaggggtgcagagtaggggacagggcgggagcccctcgggctgagagaacccctagaagcatcagccgccccgcgctcctcactgagctcctggctccctttccctcctccgttccgccgggaaagttcgttcttgtgacggcaaggagctggggcgccttccctggtgagggcacagcagccttgtatatgccacgagtggtctttgatggtgctgagagtaaggaaatgggagatctccaccatcctcatggagtccttcacgtcctgcttattggcaaatatcaggactgaagcatcctgtagagcctcatgggccagcattttatatagctcctcccgagtggtcagcagccgatcccggtccgtgctgtcaatcacaaggatgataaactcagtgttggagtagtatgtgttccagataaagctcagagcctcaggtctcactatgtcccacatgaagaagtgggtcttcggcagaatgatctcctccacgttgctgccaatggtgggacacatatggaccacctcattggtcaagaaccggtagagaatggtggtctttccttcattgtccagtcccacgatgatgaccgtgtgctcctggttcccgaagatgctcattaacttggcgatcagctgtcccat

SEQ ID NO: 346346 - DNA, 1000 bp, Homo Sapiens
ttattcccattttagggttgtgtggagtcttctatagtagtggctggaatgctgtgtggcctgagggggttcctcctttttgtctctgtcccatagaaagggtaggctgatgcaggcagagagattctgtgtcttccctgaatcctgctcctgctggaagggagtgctttccagaatgcccgccgagcgcctggtccaggggatgcacatggagaggaattctcctacatgatcagggccgaactctgctcctgctggaggggcagcgctttccagaatgcccaccgagcgcctggtccaggggccgtgcatggaaaggaattctcctacatgatcaaggctgaatcctgctcctgctccatggaggggcagcgttttcccctggtccccatgaacttcctcccgtgttacttgtattatatgcgtggggtcaccatgaacttcctcccgtattgtttctataatatgcgtggagtcgccatgaacttcctcccgtgttgcttctataatatgcgtggggtcgccatgaacttcctcccgtattgtttccataatatgcgtggggtcgccatgaacttcctcccgtgttgcttccataatatgcgtggggtcgccatgaacttcctcccgtgttgtttctataatatgcgtggagtcgccatgaacttcctcccgtgttgcttctataataagcgtggggtcgccatgaacttcctcccgtattgcttccataatatgcgtggggtcgccatgaacttcctcccgtgttgcttccataatatgcgtggggtcgccatgaacttcctcccgtgttgcttctataatacgcgtggagttaccatgaacttcctcccgtattgcttctataatacgcgtggggtcaccatgaacttcctcctgtgttgcttcgtccgtgccaccaaatgctctgttaggatgcaggactgtccgctgtgactccctctgcattttcccacaggttttattctctccacttgtc

SEQ ID NO: 346347 - DNA, 471 bp, Homo Sapiens
tcagagcaggttattgcgctggtaggtcaagaccggctcacacaaggtatagtgcgtgtccaagcgctggtggatggccagctccgagtcgtctgcccggtgctccacctggccccagtgtagcactcgtcggagcatcgtctccatggagcagtcaaacacgatgacgacgctgggggcctggcccacgatgcgctcaaactccatggcctgcttcacctcctggggaaagccatcgatgaggaagccccggctctccgggcgggacaacatgttgtcactgaccatatctgggatgatgcccgcgggcaccaggagcccctgcagcgtgatgtcacggatctgccggccccgctgcgtgctcctttgagcctcctgtctcagtagctggtccagccccacatggcagaagccgtacttggtcgccatattcttgcactgtgtccctttgccacagcccgggccccccat

SEQ ID NO: 346348 - DNA, 1000 bp, Homo Sapiens; identical to SEQ ID NO: 161408

SEQ ID NO: 346349 - DNA, 1000 bp, Homo Sapiens
tttaatcatacacataaactttattcatcattgtctttatgttatagtaggaaaattaaggcatttcataaaatatgaaatcaattgtacaatgcatgatacagtcaaagatctggacatggaattggtgtcttaactatcatttctcacctttaatcaataaacattattcctcttgaaagatgatgaaaaattactcatattaaatacagtaaaaataaacatcattaatcaaacactacatttctaacctctttacattcattaacagtgtggaatacaaacaatgatggtttttgttatggctttgtgtttctttaaaatgctaactaggccaggcgtggtggctcaagcctgtaatctcagcactttgtgaggccaaggtgggcagatcacctcaggtcagaagttcgagaccggactggccaacatggtgaaaccccgtctctactaaaaatacaaagattagctgggcatggtagtgggtgcctgtaatcccagctactcgggaggctgaggcagaaaaatcgcttgaacctgggaggcggagattggagtgagctgagattgcgccattgtactccagcctgggcaacagagcgagactctgtctcaaaaataaataaaatagaataaaataaaataaaatgttaactaaaatcgatttctaatttgggaaacataataactaataccatttgattttaaaaagaattgtatcttaatcattaagctaaagacatagcaagaaaacaatgacatggtcacttgaagggtgtctcagccaacttttcatcatctaataagacacccttaaagtaattccagcagaaagtctcagaaattcattgatcaacctccaaagcacatcagggaaggtgctaatacagtggataacaagaacaataaacagcagaacatgttatttaaatttttgagataataaaacaatacagaagtaggaacccttgtgaaattatgttctggttttgggtaatga

SEQ ID NO: 346350 - DNA, 1000 bp, Homo Sapiens
tcagctgccggtcccccctttgcccgcctttgccttggggggtgccgggagaccctcatcgccctcgctgtcagagctgcagccgctgacgtcggtgatctccagctccgagtcgctgtcctccttcccaccaagggcagcctctggacccccagcccctggcagcgccaggcgaggggccgctgccaggcccgaggggcgctcggggcccaggccctcccctgtcgaggccagcaggggcgtggctgtggggcctccccctgcccctgacgagggcaggtggcccagggaactggccagagggttggggtagaaatgcggggggtagagagagggaggcagcttggggaaggggcccgtgaggtacgggttaaagttccaggggtactcagggaaggcgcggccataaggacccagcaggccagggggcttggaatagctggtggcaccagagcccaggaatgggaaagggctgtccagacgcaatttatctgtctcggaggtgaacaggggtgtccgggcccctggctctcccaggcgtggggcagagaacagggtttgcagggtctcaggggtgaggggaggagcatctggccctggggcccccccaaagggactgggggtcagcaagagtggggagccagtggcagctgccgccatgtccagcagcgggtaattgacaagcacgactttgctgaagttgaacttgtaggtgaacctcttccctttggtcttgtggagaatccgcttgttgtagtagtaacgcagggcccggctcagcttgtcgtaattcatgtggggcttgcatttgcgaataccccacagccgggccacctcatcggggtctttgatgacgaattccccgtagtccccctgccaggctatgacgccctggtactcctccttctgcagcagctccaggataaagtgccacagctggatctgcctcgagccaggggatgactctggcttgtaggcccaatccgggaaggcaaacccg

SEQ ID NO: 346351 - DNA, 1000 bp, Homo Sapiens
ctagaagttccgtggtaaacacacatccaaggagcccacatcccagggaccctggggagtgactttggaggagtgtctattagtcctccgatgctcccggtcgccgacgatgcgcggatggagttggagtgagggagccagagaccagccccagtttcggttaatcagtccctttccagtgggattcgcaattccccgggtagttctctcccactgttccccttccctggtcctctcgcccagggtctcctttcccacttctcgctggctacctgaggcctggttcctaacagaaccaagagcggtggccgcgcctccggccagtccgggctgcgcgcccctcgcctgccgaccgcggccgccccggctcctccacctcccccggtgacactcaccacttccgtgtgcgcctgggccaggcagcgccccgtcgctgcgctggctggggtcgaccggcaggctcgctaggcggccagccccgcggggccccagcgtgcgcgcgcccagggctgaggaggggtcgcggcgaggacagccgggacgaaaatccagatagacttcatggggcttgtgaaatgtgaaccgaaccgtgaaggacactcccagccatctgctttcattctcaaaatcaccttttgaggtgagattaggtgatttgccagtgtttacactattacacagcaggaataggaagttggaggtccaggtggagcagccggccactgccatcacagctgggccagggccctggctgaagagttcagccacaataaaccagggaatgtggtctggcccaatttcaaagaagaccacaaagaccaagatagccccaatacagacaaagcttatcccattacactcatctgccctttccactagaaatagggaaactatagtgaagatagtattaaccacacccacaccaatggtgacacagatgggctcttgaacacctgcacccttaaagattcctgttgagtaatagaacacagtattgatt

SEQ ID NO: 346352 - DNA, 1000 bp, Homo Sapiens
tcagaatcccgccgaggaggaacgatttggcagcgccgcggagcgttttttggcctcggaaaggcggtcctctgcggtcccagctggcgggccactccgccccgcgcggggcatgtcccgctgtgcaccgggaaccggcgtccggtgcagacagcccctcgtcctgggaaacgggctgctgccagaaaggtggtcactccccgccccggagccccggagcacgcagcgggtgtctcttgcgaaagcccatcggcgcccgctgtgcattcgggaggcgcccgtccccactcgcggtctttccaaggtgccgcgcggggggttgccgatgtagggttggcgcccctgctcgtcgttccacctcaccgattccacctcctccccgcaacccgctgggaactcctccaggggctgggatggagctaggtctgtccgcttccgtccgcgagcgccgggtccactagatgtctgcagcgagcgttggacttgacggtcaacttgggatttacgaagtcggtagcaatgggaatccgggttcacaaggacgttttcctggtagctggcaaaggcaatgtccttccctggaaaaagcagcccgtgcgttctggaggagctcttggctggcatctgtgggaccctctgcccctgcccgcaacttccccaggcttggatgtttgcggcggcgccagatgagtgaattgaattacgtgggcgttccagaggagagcaggcgtcttcagggcggtaaggccttagacagcggcagtgatacctggctgacacaagagccgggcccggccacgcccgcctggctccaggcatcaccgccactccagggccgcggggctccgatcggtcacctctgagccactcgcccgctgctgggctgctctccccctccacgccccagcactgtgggtctccgcgctggaccttccgccggcctccaagagcctcccgccatcgctggcgaggccatgcaccggaccgccgtggtggcacc

SEQ ID NO: 346353 - DNA, 599 bp, Homo Sapiens
tcaggagagggtttgccctgtctgtgccgctggggatgccgtgaaggaaagatagttaaggtatagaggaggcttcatgtcactttctacagaaacttcaaagtgtggatgcaatttgggaaatgttctcagcagatggaggcaccaggaggagtagctaggacagtgcagactcacacatctgcttctctggggggtttttgttatggcttgtaacactgtgaatggggtagtataatcctgtagacagtaataagttgcaacatcttcaggctgcaggctgctgatggtgagagtgaaatctgtcccagatccactgccactgaaccgagatgggacccccgactgcaaactggatgcagcatagatcaggagcgtaggggcttgccctggtttctgctgataccaggataacccattgctaatgccctgacttgcccggcaggtgatggtgactctgtctcctacagacgcagacagggaagatggagactgggtcacctggatgtcacatctggcacctcggagccagagcagcaggagccccaggagctgagcggggaccctcatttccatgctgtgtcctggctgggactgac

SEQ ID NO: 346354 - DNA, 798 bp, Homo Sapiens
ttaaattctataactctttacttcacaactagtggttggaggaggtggcatattggctcttctcacataaatatctataacagcggtgcctgtcctgggcttggtggatttgccatatttcaagttatcatcaattatatgcacaacaagatggtactgctgctgtacttcagctctacattcaaagttgaaaggattcttcacaattaattttggagtatttgaacctcgagttgggtcaaatccaaaatgatggttctcttttccagaaaccatctcaaaacgcatttcaaaatcttgtgactctccgtcgtggcagttcagggtgaagccattgacatttgtcccaagaacaacattgtcaaaaatgactgtcttatatagagagggtgtgcagacaggtgcttcatcattctcattttcaatgtcaacagtgatctggatgacattttcagcatttggcacttgctcaaagagttgtccagaaccaactgggcctgagctaggagcataatggattgtatcaggaggctcatcaaggtcccgacacaagagttttgcaactactgtatctttcgcaatttcctccttgagtgtgtgcctaatgaggtactgatcacagaaaggtgaattgtcattaatgccatgggtataggcagttactagaattgctgcacactgccagtcacagtcacgagccttaatggagaaggactggacacttgcaaacccagctctctccacgtcaagacgtgtagcagtaaacacagttccacgctctgtaacaaaatagcacat

SEQ ID NO: 346355 - DNA, 1000 bp, Homo Sapiens
gaagtaatttttactgggaaaaaaaaacaataaaacattttttttccaaaacagtcaaaataaaagaccattacacaagattgcacaatcatttacaaatgctggcaattaaaggtaagtagcctagtctcacagaatccttgtctaaatagtttactccatattcaatgcactgaaaatgtgattctcagagctgtcgagattcaaagtttccttggctggattcaaagtccccttggccaagctcattgcattctataattgaatcatatcagacctcaggtaggaacttttccaccaagattcctacgttgagagcagtttaaaatttcacattcttcccatttaccaccagcttttttcatagtccggggtataacattatccaatatccttccccattaatcacacaatttactctccttttttccaacataacttctacagtgttcacattcttttcaaccactgctgtctttaatatacaatagtatgatttatgtgtaaatacagaaacacacgtcttcaaagtggggataaaaaaaagcatcacctgctatggatacaggtatggtagattattcagggagccctggaaaggactttttgccattaacactagccataaaaagcaattatgaaacttaaaaaaagaaaaagaaatcaaatcagatgtgtgtgttttattctgcaccattatgaattaaacaggaataaatctaataatgtgttctagttgcaacacgaaatactgaatgttaatagcttacaaacgctgctctgaacattcagttctcttctgagacacaggacacacaaaagaattcaattttcagactcttcccctgggcctagtactcacacgtgccacagacggacatgtttttttcccagaggacccgagtctgcaattctgattagattcaagcttaaggcaccaattagcaagtgctacatgctttattaatgattttatgcacctgtgaggtctacttaggac

SEQ ID NO: 346356 - DNA, 1000 bp, Homo Sapiens
tcagtcatctttgtcttttactccatgtttcaggatgcttgtgaattcgatgtaattgaaattcccctttttgtcaataggtgcttctgtgtacagctcatccacttcctcatccgtaaactgatcccccacggttgtcagcagctctctcaggtaatcttcctgaatggtgcctgttgcttcttcatcaaagcaagcaaaagcatttctgatgacgtcttcaggatctgtgccatttaacttcttaccaaacatggcgagcaacatggtgaagttaatgggccctggtgcctcattcatcacggcatcaaggcatgcatcagtgggattcttccctagagaagcaagcataccatgcaaatcttccttgctgatgaaaccatctctgttctgatcaatcatgttgaaggcctctttgaactcctgaatctgtgactggtcaaacgtggcaaacaccttggacgttgcacactgagggcgcttcttggtggtcttgcctttttgctcaacatggtggttgcttaattccggcaccaaataccagaaacggaaccaccctgtgcgagatgacaagcgacagcgaggagcgcggggcatcttcaccctcctagaatctgcctctgattcttggaatttggggaaaaccacaggtttttcatcatttctcaaaactactagtttgcagcagcagttctgtgaaggtggggaagaagctgaggacaccggtgccatgtttctgttcttattcacatttctctgttctctgaaagcaaaataatgcaaagccggtctgcaggacagaggaggagagcaggctgaaggcctatccacctctgcacgcatcaggcggcttctgcatcctgagacacccttcctgaatcgacacttgggcccagcctggcactgggccccatagacgccaattagatggacgtggtctccacactgcaggtgttcacagtactcacttgctcctgagcgtctgctcttcttccccgct

SEQ ID NO: 346357 - DNA, 525 bp, Homo Sapiens
tcagtttgattcggttggggccgcaactatagcttggctgcgggcagggccagcctcacaggttgctgagttccagtagggtctggtcccaggtctgatgaatctccacgtttcctccttggcactggccaacgtctcttctaggtcatcggtggttttctccaactttgccacagacctttcgacaaactctgctctggtctcagcctccttcagtttctcctccagcagtttcatctccttttcatatttctcttctttggtggaatactcctcctctgaggccatcagggacttgacggtctggtccatggtttgaagtttctcctccaactgtctggcttggctctcggccacaaatggaggaataagagaaatatgaagttttgcttttgcaaacatactgtcttcttgtgtagaccactcattggcacaactctgagtcccggtctttctggtttggctgtggggctgttcccttgtgctgtaccgccaagtctcctgccaaacctgcgctgttggcat

SEQ ID NO: 346358 - DNA, 1000 bp, Homo Sapiens
ttatttcgttttcgttccaataatgctcggcgacccccggccctgcgccccacccctgcggcggtagaagccgagcggcggcgcgcagggcgcgtccacttccgcaacgttcgtctgcattcgcctcggctgcaaccccggcccgggcccccgaggaggatgcgcggtgcaggtcagttggtgccggccacccgcagcctgggtgcgcacgggatggggactggacatgggaaaggtgctccaggcccgaaggccgcgggccagcgccggggcgggttcaccccgcaactcgctttccgccctctttttcccgcggagcctcagagaggacctggctctggccagtctgcgcgcgctgtgggcaggctttgcgcgcagagccgctgcaaatcctcggtctccaaacgccccctcctcctgggttgccaagccgctaggtcgccgtttccaacgtggctgcgcgggactgaagtccgacgactcctcgtcctcagtaggagacacacctcccactgcccccagccacgcgagactaggcccggggtcgcagtgggacagaagagtctgccgctctgacttgggctctgagttccaagggcgcccggcacttctagcctcccaggcttgcgcgctggcgcctttgccatccgtgccgaagtggggagacctagccgcgaccaccacgagcgcagcggtgacacccagaggtcccaccgggcccctgggcagggtaaccttagcctgtccgcttcggcagctttgcgaagagtggcgcgcagctagggctgaggctcttgcggacctgcggtcgaagcaggcggctgagccagttcgatcgccaaggcctgggctgccgacagtggtgcgcgctctgttccgccgcggccgggccaggcgctctggaatagcgatggggggacacggcctccaactttctgcagagaccatcgggcagctccgggcctctgactcccagctcaggcagaagaacaggctctgg

SEQ ID NO: 346359 - DNA, 1000 bp, Homo Sapiens
tcactggcacacaagcagagatctcttgctgtgtttgttcttccctttggatctcctggtcctcccttgcagagaagcgagtgtgccagtgttcatggactcctgatctgtcgagttcatcgaagagaggtttagcagggagctttgctgttcaggatggtggtttttcatcccacacttgtattttgattgatgaatcacaagtacgttgggaggcagggtaccttcaacttttctgacgttgaactcaggcttcattttgttttgctcttgggggaatttccagtggtctaaggtgctttcctcagtggctctttccaccaagtgctcgtccaactcgggtacctggaggcaagggtggtctctcttgagctctccttgcgttgctggcctgtctgtgtcttcagcgccaagggctcttggttccctgcctcttgacacactctcactgtgtctttcccattcactcttctggatgtaaaagaggacataggcctgttgactcaggacagaagtgatgctacaggcagtgacctcggcatcatccattttataccactggccttcttgagctttgacataagagaagtaatatccgttgtgacaactccacccagcgtggaccagcacagcatagaggacatagacaagaggtcctgtgttctgctgagacatgtatggctgcatgtcaaggcactcaggatattgcacattcttggcaagtttgttgcctgtgacatcgcagaatctcttcaagacaaggatgaggaccttggcagaagtgtgtaaagttaacgtgttggaggccggcgccctctggagacaaagaccgcaaggataggcattctctccattgagttcttcgggcttcaccaactgttccaaagcttgcttgacactctgagctgcctggatatccagggcgatgtccaggtaagggtcaaaagtgtctgaaatcccgtggcagtggagacacttgatttgagatctccagcagcct

SEQ ID NO: 346360 - DNA, 303 bp, Homo Sapiens
ctactgagtccccgtgatggtgagggcagctttgttcccaaggatggagccagagaagcgaccagggaccccagaagggcaggtgtttgggctgcagatgagcatgtgtggagcctggcctggggtctgctggtaccacctggggtagtgactggtagagactgagccagagctcagggcacaggtgagtgtgaccgtccctccaggagaccctgagagtgatggctcctgggtcaccacagactgagaatccacccctgacccataagcaaggagcccaaggagaagcatcatgcaggccat

SEQ ID NO: 346361 - DNA, 681 bp, Homo Sapiens
tcagcctgacttatgtttcctgctggccatagcactggcaccagttgtacaactggcaatggccctgacccctgcacactccatggcattagtacccctattccctgaaatcctggcttggactttgtcctgattttctctcaggacctctttgcacactgaactgtaggaccagaagtcaacgtgaataattttgtccacaaaccccaaaatgtacacggttttgggttcagtgtggtcatgagggccccacagaaatttgtagcatataggatccctgttgggcatctgcctcaaattcagatattgttgctgcaaaacatcttcaacgaaaagctttctgggactttcagaaatgatgtgcttcccctcagcatcttcaactctctcagcatattccagatgtccttctaggctctcagaggctttgctgaggacctcagggaagtgatccatttgctgttggatgatatgcttcagcatttctgccttttgtgtgggttccttcttctggttctcgagcagcaggaacacctccaactcagccacattactgctcaagaggtccctgggcctcaggcctggcagtgtttcttgtgggctctgcttcaactcttctgagccccaagctcgactctgctcaggggccttgataagaatgtgggcaggagggcaggacat

SEQ ID NO: 346362 - DNA, 801 bp, Homo Sapiens
tcatgatttttgtactggggtgatagaaaccgctctccacttaaagcagaactgaatgctctccaccatgaccacattgacgatatcatctacttgaggtacgtatccatcaggaagtttcacagaatccaaggtgaaaaagatagtattctttatcaccccacttcttccacgtatgtgagtaatgcggaccgcttccgcatgaatacaacgagtgggcttcacagagcttgccttgaagtttaagaagcctggttcagtggaatattcaacttttaaccagttgcccttataaggcacaaaatcttcagaaacaatgtccatagggaaataaatgatgttactaatataaacagtatcttcacttatagaagtaacacatccatttaaaactctgatttttgagtctgagggtccatcatcgttaagagggtgaggcacaacatccaccttgattgctctcaatccataaagtattttatcttcttccacaaccacattaactttttgtccaacttttagaggcacgttgccagtcacaacatcactactgaagtagatcgactcatcaatcacgccataatcaccacagaaacttgtgacaactccctgcacagttgtcaactgggtgtcacagcccccaaggtggtctctgtcaacaccatcccgctttagatggacaggagagtttgggagttggttctcagggacttgttggggacgcaggacgcctacccatgcacgcacagaagatggagccgccgtcacgtgctgtacccgccagagccaccagatcctcat

SEQ ID NO: 346363 - DNA, 1000 bp, Homo Sapiens
ctatttgccctgggaggacttgggctggccctcgtccccggccccatcctcatcctcgttttccggctcctccaagatggtctggagcccctccagtgggggtttcctggcttcctggcctctcacctggatgaggccctctggaccccagctaagacctcttgggaacacccagacagcactgctcatccgggctggggaggagccccaggggacctctatgggccttgcctgacctaggccttcggggcctgcaggggcactttcaccttccccagcggcaggggctccccttgcagcctctttggtggcagaagcggcctcggcagcatcttctgctccgggaccagcctcgctggcattcccctgggctggggaggcctgggcagcagctgggtcttcactctccactggggccgctgcccaggccacaccctgctggctcctcgctgggaaggctgcccatgcctccatctcccggatgagccggagcagccccaggaagccaggtggcctcttctccagctgcatccctctcagggtatcctggagtgcctcgctggggcgggcccaagacagcacctgctgtagtcgcaggtaattggccaaggctgggcagacggcccccttctccacagccctctgcagcaggccttccaggcgcaccacgaaggcaaacagcccctcctggggcccctgcgtgcaggtcaggaacttcagcctcgaagtcattcgagtgtcctggttcctaaatacctgccccagcgccgccaggcagtccagcgcggacaagttggtatcttcctccaggaggccgctcacgacttccagggccgggccgcccaagctctccagcagccacctcttcttctccctttccgacgcatggcaccacagctgcagcatatccttggcatgctccacccagctctcaaaggactcttcctcgcagcctggctgctccctcctggaaaagggtctcaattcccggtaggccctg

SEQ ID NO: 346364 - DNA, 1000 bp, Homo Sapiens
tcatcctcttgtaggattgcaggggattgcaccacaggtccttacataggatctcagcaatcctgttagatcctgcgaagttgtggtcagagaaccagttgaagaattcaggctcctgttgtggtggttgcggcgataggcctccacttcataatctggataccaatcaattggagtggaatgagaagccctgtattctgtgatgttcaccagatattccttggtaatcactttattctggaagtaagggttactctgaaacaacaacatgatcttgcacaggtgaactggatgcttcacttcttccacctccaggtggatcatgtagctcagcatgtcttcatcttggtcagtgatcagggctgacatctgggggtggtgtgcaattgaaaaacgtcttctgctctgaactcgcttctgctcttcaaaaagatgccccaaacgtctgctgctcggcatcaccaagggtttctctgccgcatgcaggacaatagtacccacgcctgctccggctttccacagccacatttgtccgtggcaactcccaacattggcccagaagccagggacgctctggatgatggcgcctctgcggtctaggtggggcttgcgcctccgctccatcttttcccgctgccgagaaaaggccttcctggcttgggcattaaccggctccagctccacctgaacggccagcagctcctccagtgcagactctggggtcatgggcccagggccaggctgtgcccgctgggcctccacctgcccctccacgagggcctcctcctgggccaccacctccacctccgccattatgtcatctgccaccagcactgcctccaactcccaaagccgcctgctcactctccaccccggccgcccctcctgtacagcctccatcctgaaggcagtgccctcctcggcaccgcacacaccaaggcctgtgctgctccacccacgccataggaacccccacgccttccgtccccgagcctcctcc

SEQ ID NO: 346365 - DNA, 1000 bp, Homo Sapiens
gatttcccaaaacatcgacttcaaatttaaataatctttaatatttgctgtgaagcttgatctgaaaattaggaagaatggtgctatacgcactctgatatacagcatgcttgccctgtggatcttttctacaaattctacccagccgtgtaaaatcggctttctcaggggttacaggccagaatcagtatagtagggctgctaaaatctagcggcaacaccaagtctttacactgatcctaaatatttattattatcttgagctcaaagcagagccaacagcagaaacaacacgaggaggaagaagaattaggcataacacgagttctctaaatgtcatttaggggagttaaaatcctaaatttttcttaccaggtagaaagatgggagggaagcaccttgctattcgtatctcaacattatttgtaaaatcagctgccactgaaagattggttcctttccggcagattcattggaaagggccctgttcggcttccgccttcacccagcatgggctgggcgcatcttggagccccagggctctcaaacctaggcccaccctgcccgtcccccttatctgttctcccgggggttgtagcgcagcccgtgcggcccctcggagtcgtagctgtcatggtgcgggagctgggcccactccggcgggaaggtggccctgctgtacacgaagcactgcaccgcggtgggcgctggcggctcctctgcgcccggggcccggtcctccagcagctgtacccgcagcaccgtgcgctggtacagggccgggcaactctcgaagtcatccagaaagcgcagcatccgctcgtctaccgcgtagacctcgccctccacgaggcgccccgagccgggcaggtgcagcagccacgggatgttgtgctcccccgcgatcaccaacgggtagggctccagcgtgcggccgcgcgcccgaaaggctgcggagccgtgggcgccgtcccgcaggaccctgtggttgggctgaccc

SEQ ID NO: 346366 - DNA, 1000 bp, Homo Sapiens; identical to SEQ ID NO: 161411

SEQ ID NO: 346367 - DNA, 940 bp, Homo Sapiens
atttattttttcatttgggcaattttttttttctcagatgtcgtcaggtccatcacagctcagcattatgaaataataaaataaccaaatcctttcccaatcggtagcagctccatgtgtatccatcttttctcggtttaactttgattgtttatgcatgggcagcatgtactgttatgagtagcagagctgggatttgaatccagagagtctggaacacacatctcaccactacaatccttacacttttccatatgtagggcttccctatttcctgatatatcaaaagctcttggagacaatggataaatggtagggtgaagacttgattcacagcacataacgtggaaggttgaaagtagatcctcataaccatctgtttggataatacagaatttcttctttcttcaagaccctccagagatagacaggaggaagatttctgctctccgattacataaaacgtctccccattcccaagatcctggagcctctctcccagcgtcagctgtggaccgcgggttttgcagaacgggaattcaggcactgtgatctcagccagtgaggaggtcagatcagggccccaggtttgcctggtggacatggactcctctgacacttcgtctacacttagaaacctccaagcaggcacaggccaggcgcaggtcactttcttcagccccatctccccaggcagccccagaggcggcggcagtgggctcccaacttcatgaatccgctggagcacggagatgtggcgtgaaaacatgtcacactcctggagacgtgcatgaagcctcctggtggcctcagagtgtctggggccaccggtcctttgagattttaaggaaaacagtgtgttttctgctgtctccccctgacacagcactctgaaaatcaagccggagcacctgcagaacctcagcactgtccagagcat

SEQ ID NO: 346368 - DNA, 775 bp, Homo Sapiens
tttattttttcaaataaattttattgtgcatatttgacatttacaacataaggttatgggatgcatttgatagttactatagtaaagaaaagtaacatgtctctcatcttgagtattttaggagtccaaccatgggtcagtgaattctggctaattctggctgtggacaggaagtcctatgtaagcacatgtcagcatccaagggtgcctcacagatggagtggaaggagaggcagttttcattgaagagggagggtctggtcaacagataggtatccatccacaaatttagtatgatcaatgggatgtccttttcagggcagattagaatggtcctgtctcgggacaggtgcctcagttggtggccttgaacctggcttgtagacctaactgtgcaagaatagaccacaggaaatggagcagttgtgaaatacgatgaaatacgatgcctggggctatcaaagcacgatttcctcctgggcctgctgctgtgtgcagccccactctcctgggcgagaggacagctgtccgtggacagtcttttgggctcctgcctattggatggactgactctgccgctgactgagggtggaggggaagggaagaggcgtgtgggtgggtgtgtgtctgtggactcggggaggggagggtggagttgaaggaaaatgtcaggtgttggagcggacaggcgcacggagacgctggttgtacacgtggcccagatcggagccagcaggcctcgggtgctggccacgggaatttgcagcatgaccat

SEQ ID NO: 346369 - DNA, 1000 bp, Homo Sapiens
gtagtggagaagaaaagacattgtctggggaaaaaaagggtcttgggtttgaatctggatcctgctgctcatgagcttggtgatgtgggctaacctgcttactccttctgaattttctcatctgtaaaactaggccaatatgcccttctcctacagtgctgtgaaagttaaataacataatgcaattaagacatttaactgtatttggcatgtagagaagctcaaatatatatttctttgacctgattccccattctctaaacaagagctcaattaatatttgctgaataaataaatgattgatgagatgcgtggatgggtgggtgtatggatgagtaggtggatggatggatggatggataggtgggtggatggatggatggatagatgtatggatgggtaaatgaatagatagatagatgggtagatagatagatgggtgggtgtatggatggatgggtgagtgaatggatgaatagatggatgggtgaataaatggataggtgggtggatggatggatggttgggtgtatgggtagttggatggatggatggatgtgtaggtgcatagatggatggataagcaggtggatggatagatgagtggctggctggatgaattggaagatggatggataaatgggtgggtggatgggtgaatgggtgtgtgtatgtatgtatgcatatatgggcagatggatggatgggtgggtggatggataaatagatgggtgggtgaatagatggataggcaagtggataggtagatggatgaatagatggatggatgggcaggtggatgaagaggtgggtgggtagatggataggtagctggatggatgtgtggatggatggatagatggatagatggatgagtggattggtgcatgaatagattggtgggtgagtggatggatgggtgggctgacgaatggatgggcagatggatggatagatgggtggctggctggatcaattggtggatggttgggtgggtaga

SEQ ID NO: 346370 - DNA, 775 bp, Homo Sapiens
ctatcggatggcaatggctttgcaaagatataaaacaccatacatccttttgccttgacttccactaagttttagtctaggttttccagcacaaatatcttcttcctcctctttcttctctctccctccaactttcattttatggctcctgtattcttccccttgtttagatagtctttttatatgggtgtcctccagttttttcccattcttaagttcttttccttcatttttcttctcagtttcagacatttctgagatttgctcttgttcatcacatttattcattttaatcctctgaacctgtaactttattggggtgcttgtaaacccttgcccatgtcgaagagatttaatctgtttccaagttcgtaatatactgtgtagtagggagaggtcctttcccctttctaagtcatacatctgttttgtattacttatttgccaataataatcttgtaaagattttctggtcagctggttaatttctgaattttcatttgacaatttggtagcatctgtcagtgctttcagcatgaggtgatgaacgaagtagggctttcacatcttgacacttctacaattaatcttttccagggagaacgtattccggtattacttgtacaattttttaaagcttctcataaagcagctgagatacattctgttgctgcctgtcctgaaaacattcataaagttggagaagccttgcgcataatacttgctcttgattgaagagatgatgatggctgaattgcaaacccacaatgttgag

SEQ ID NO: 346371 - DNA, 1000 bp, Homo Sapiens
ttgataaaagaaagaatgaatttaatagcctcaaatggctttaatgtagcatctaggaaggtcacattgacatcttctttttggtctcgacttccctggacttttccattgaaggaatttccttgatgtggacacagctttcatctgaagtctactctggctgatggctggccaccctctgaccaagaaccagcctccctccttacctggtgacattgcgatttctcttctgggtcagggaaggcttttgtagcagcattttgacttctcaaatagggttgacttcctggtttccacaggacgtttttcgttgcagacagaggaagggacctacacacaagaggtgggagagtggaggggagagagtgctggggagactgcagggggaattgagcgacatctgtgcagtcaggtcgtggaggaataagcctcatcgttttcacttactaggtccctctctctctttctttctcttactccttcctttattaaacccctctttatcacgttttccttttctactctctttcattttcctctttctccatttcttgctcagataattaaaaatgtgttccgtatatcaggtactgtacagggtgttagggaaacagtgataggtaagaataagctcttccggatttcgagtgtggtgggaaaacaagacatcttgatggttggaattctggttctgccctttatggtttgcgtgccttgggcttaacatctctaagcttcagattcctcttcaataaaatggagatatagatggggcatccctaatttgaaaatctgaaatctggaatgctccaaaatccaaaactttttgagtgccaacatgatgcctcaagtggaaaattccacacctgacttgacataaacaaactttgtttcatgcatgatatagttaaaaatattgtaaaaaattaccttcagactatgtgtataagtggtatatgaaacataaatgaatttcatatttagacttggatcctatccc

SEQ ID NO: 346372 - DNA, 559 bp, Homo Sapiens
cggctattttttttattaaaatttttatttttattttttgtagagatgggggtctcgctatgttgcccaagctagtctcaaagtcctggcctcaagtgatcctcttgcctcagcctccaggatgttgggattacaggtgtgtgccaccgcacctggccctcgtcagtttttggaagatgacagcacaacatgtcaataaccatagtggccggcgatcttgtatctttcttgctaacagaagtctggtttcgtgtggggaggcagcatgctcagcctgggtcctgacaataggatttccatctgatactccaccttcccagtctctgttgcaactgggggtggccgtgtgatgcggttcatgctcggccttaggtggagggccccacttggctgaagtgtggcttcccaaggccttcttggtcattgcaccgacagctggagatccgaggtgttgatcactcagcatcgcctcctccacggtcacctgagaacagattccaggacccaggggagggttgcggctaatgagcagaagctcgatgtcagacttctggatcat

SEQ ID NO: 346373 - DNA, 1000 bp, Homo Sapiens
ttcaaagtattttattacatttaattaaaggtactatcaacagaactctatgtaacaggataagaccaatcagtactgacttcagccatatccaagggcctgtatccaacaaggtaggaaaaaaaaaccaacaatcataaaccatcaggatctaccttagaaagccaagtggcattctcaagtttctgtattgaccctgtactcggtctgagacattaatccagtcacagtgggatgtattagtgattgcactgactccaatttggcccacaaagaggaagagcaattctatcacccataaccaccctggccaatgaattgaggctgacttaagtgccatccagagctgaggtggtgtcactgatgactgcagctaaagtcaagaacaaattccttatcaacatttccaataggatgactctcaggatagtgataactgcctgcagtatgcataaatgaatcagttacgctttcaggaagctcctctggccgctgttgtttcctcaagagctcagtagcagcctaagaggtgcctatctttttaaaggtcactcttggagtactcaggatatttcaccttggtgactgcaaagtccacatagctggttataatggaaaatggcctgagtactacaggagtaactaagttttcaactaaacctgtgcttttatttcttttcctcttgcggttgtatgttgtttcttttagactacatctctctatactgcagtagtccctgaatgggagacttataaactttcctagttcaattaaatgtatattggtattaacaacacactttgatgctaaagccataaaacagcagtacattaaatgtttagaggctccatccacaggtcattttaattttcctttcccatgcaattatcccctaaaccagcccgtgaaaggcctttgtcctttctcttctagaaaaccatgttggtcaggatccaattttcattaccacaactttcacatctgtgaattttatcctac

SEQ ID NO: 346374 - DNA, 1000 bp, Homo Sapiens
cacagatattattctgttttatttttgtaattcctctgtgaaagaagtacatcagttacctgattctacagatgaggaaactggagaatagagttaacctacatcaattacagactggcagggctggagccccagagcccctagcctgcactctgcaatgattacgaaatgctgagagctggtcagcttctatgtcaagaaattaatgatagcgatgatgtaacctagaattcagtcactgggtatccctaaatcctccaacttcctactctaagatatcaatcagaattggtcttcactgccccctcacatgtggcagagaacccatgctcctcccagtctttgtcctgggtggcctgcaccctaagaccttgaatgactttttcttttttttaattattggttctcgccttgcattttgtctcctgtgttggatctccctgttttgcagatattatcttcacttatggagaggacaagcaggggtctacagatgtgaagtgacacctgcttgctgcatgtggttgggtagctgggatgctgcacaaatgtactgttgggagggtggaaattcagccatgcactgtttgccagatcaggaactatgagatgctgcatccaaccagaatattctcttatttacttgtgcaaaggggtgtcttctatttgcacaaagacaccttataggctagaggtggccctcaggaacatattcgaggtcacacatccagaaagtctgtagccagagtggaaagccaggtcagcttccatcatctggtctcatgtgcccttctttctcctagtgctcagctcctggaatgggagagggagacatgggggtggaggggagaggggaagaactgcctccctgttctcaactttccaatcaccctcttcagcctacttatcttctgtttccaataatgaagcaatctctttggtcagcagcccccacccccattcttttctaccacttgcagtatgagttctaaaaatagca

SEQ ID NO: 346375 - DNA, 1000 bp, Homo Sapiens
cacttttaaattaatttattgtaagcatgcccactttagacttcaaaaaatcctgaaaaccaaaagattataccaatatctgccatatgaactaattcaggcctttcctgcatatttttagtgatattttatggaaaatacttgctctatttatggaaaacacttgcttattttccatatttttatggaaaatacttgctctatttatactagccaagagctctcttatccatcaggtgactgtagttaataacaatgggttgtatgtttcaaattttcagagagtaggttgtaagtattctcaccacatatagacacaaaggtacctccaggaagtgatggatatcttaattagcttgactgaggtcatcatttcacaatgtatcaaagcatcacattgtataccttgaatatatacaacttttatttgtcatttgtttttcaataaagctcttctgatttggagagttggcctcccatcccagctggtgacctagaaggagactggaggggtgggtataacatagtagtaaggcacatgggagccaaatagaccagggtctgagtcccatctctgtttcttgcaggctgtgtgatcttgggccaattgcttgacctctctgaggctcagtgttcttttctggaacaaaggtcgggctttcgtgactatcccgggagaaccaattaaggccaatgcaaaatgcacagaagggaggtagacactgtccacccaggttaggccccacctgctccctgccaccaaccaaaagaagagtgggacccctgcacttgccaaactgctctctcctctgctctgcacaggactcctgcagcagcaggatgtctcccaggtccccagcggcctgacccgagcgcagtgtgaaacagcaccagatgatgatgaggcccatatcctgacccctccagggctcagtatttagcttccctgtgcttagttttctcttcctggaatgtctccactccacccgcaggaacagcc

SEQ ID NO: 346376 - DNA, 712 bp, Homo Sapiens
aggggcttttaatagctgtttatttaataagtatatttttcatccccatctgtcttatcacaaatcattcagtgcaatagcaaaattcagaaaagtaaaattgtaagaattgtacacatttatctttatttcttgcatatttgtcacacaaggggtgactgtgtatgctcttccttcttcttttactctccgtctcctcccttgccataataagctataaaaatcccagcctgaagccaggcacagtggctcaagcctgtaatcccagcactttgggaggctgaggcgggcagatcacgaagtcaggagatcgagaccatcctggctaacacagtcgaatctcttgtctctgctctttgcagcattaatttctggttcgtgtttagtgagccaggaagcagtcatgggtttggaaaggtgatgtctcaactcgggttttaaatagcattctttttcaacactgttaggtgctgtgaacacagagctgtctctttgtgttaaagtggggacaagcaaagtagcagaggagagagtcgaccgaggcgggagggaggtggcaggtggaatgaaatatcgggcagtttcatgtgcggagctgatgtcgccggcataacaagaaagggttgcacagaacaaatctctattgttccctgtcatctttaaatgagtgtcaaagtaggcaggggggctttgaccgttaaccgcacaattt

SEQ ID NO: 346377 - DNA, 771 bp, Homo Sapiens
tttcctagcgagaaggaaacacagtttattacatgtttctcattgtccataagaagaaaacataccagctataaaggggccatgaaggtgttcccgccattgagatcaaagtcagatgaaaatatgccttcaatctgcagctctggagagtcattccattccacagtctctctctccagtgttatgaagttcaagttaggggtgaagattcctgaaggccctggtcctaggtcatagttgttcctgctcagccaggtgttgatggaggacagaggattaagaggaagccttgagttacagggaccgaagcagctgctgtgtggattcagatctgggcgataccgccccaaggctcgttcttccagcatttctatcattctctctctctgtcttataggcaaatgagatgatgtttccgggtcaatacatgacgggattaactgtcttcctgatgtgcgtctagtctaggctgtttttcttgttattgttactgagacgagaagtcttcttccgaccgaaggttcttctcaatcgaagggttcgtggtctcacggcttcaaggaatgaagccgtggacggcagtggcgagtgttacagctcgattagagagtgtgctgcggcaagatttattaaagcgaaagtgaaaggaaagcttccacgtgggggaaggggacctggaagggttgctgtttctggcttgggtatcttatgcttacatccccttatgacccctgccctcttcctttttctgtcctatagaatcagcttatt

SEQ ID NO: 346378 - DNA, 1000 bp, Homo Sapiens
tcgctgttagtgatatattgttatatacgtggcacattagacaatgattcagattctggtaactggaaaatgacagttcctgggcgtgatcacaagtctacagaaaaccaacaatcgacatttatttctcatttctacagagaagtgagagtcttgacatgcgttaatacatccagtgttatgattggttctcttgggtggatatttgtccggaatgggaaactaaaaagcgattcatcaaatgatcatgccatgtgaagctggtgggtaagtttctaggagggcctggtattactgagtaaagcagggtgctccttttgtaaatctatagtcagacaaaatagacaagaaacaagctcattaccccaacttttagtttattcccacccaccccccacccccaacacttctacctcagagaaactattgtctagatttgagtctttgaatgttttagacagaaaaatggatgaaatttgttctttgcacatgctcaaatgggcccgttgtctacaacacgccttggggaagcgttcggcctggtattcaagtatctccgcggatctaccccagccattagagcagatagagctcaggcagcgccgacccgccccttcccctgcggccggcgcggaccagtcgcgtccactcccggccgccgcggggcccgggctccttgaccgtcctccaaggccactcggagcgcagcttccctgagcccagagcctccccgcgctcccagcgggcgcccgggggctcgtgtcccgctgctctcgcccaagacggccggtctcggcctgctgccggtccttgctgggtctgcgccgctgcccgggattccctggagagattcgcggcgtctcccgagaggtggcgcgcggtgagggcaggcgaggtcccggcgccgcggcctcctgccgggtaggaagcccggggagcgcctctccgccgccgcccgtcgccccggaagtcgcgccctgagattccgggcactttcttt

SEQ ID NO: 346379 - DNA, 704 bp, Homo Sapiens
aagataatagaatacttttattgtttatacagatcagttgataatgaagacaaaatatttagcaaatacaatttacttttttactcaacaagcacaaattcaacacatttcctacattgcagtgtcatacacaaccttctctcagaacatcttattgtacttatttgcctacagactaattcttcaattagtctacagctttgctgctatggtctgaatgtgtctcccaaaattcatatgttagaaacctaatcccactgcaacagtgttggaaggtggggcctttggggaggcattcagttcatgaaagctccactctcacttatgcattcatgctgtaatcaaagggcttgatggaaggcatctgtctctctgttcccttctgccttctgccatgtgaggacacagtgtaccagccttctggtgggtatggcattcaaggcgtcatcttggaagtcgattgcagtcctcaccagatgctggtaccttgatcttggactttcaagcctgtgcctacttgaggtgatctctcccctccatgtccctcgccttcccagcagtagagattggaggaaaatatgagaaagagacctaagatagatggtgaggaagagacctacatttaacttgtttgtgccatagtataaattttgagaagattttggagacattaatatttattccatatctatgccaagattttc

SEQ ID NO: 346380 - DNA, 1000 bp, Homo Sapiens; identical to SEQ ID NO: 161412

SEQ ID NO: 346381 - DNA, 1000 bp, Homo Sapiens
attaaaagagtattgtattgagacatgaataaacacatcaaaggaaaagaacggacggtccagaaatatacctgagcacacttgggaatttaatgtatgataaaggtggcatttaaaccagtgagaaaaaagatacatttgtcaataaatgatgttgaaacaaccaggtagctctctgggagaaaataaatgagattagatctgtgcctttcacacactacaccaaaataaatgtcagatgaatccgatttgaatattttttaaaaaccataaacctacaataattctttttcttccacatgagaaaaaaactacataaagtcaaaagaaaaggacaatttacacaaagttctaggatagacaaaactcagctatagtgatagaaatcacatcagtgatgtgatttggggcacaaggaagttttctagggtgatgcaaatgttctatatcttgattgggcagtacatctcaatagagttgatttttataagaaagaaaactgagtgcaaacaccagcaggtctgatgttttaaaaaagcaaaatctctccataagaattgagagccctggatcctgacctgccccaaccgcttacttctccagtggtgacctttctcagcctcccctaagcctagatattcaaggctgacttcctacagcatgagggactgtcttcacagagttgaggtctgtgcatgatacagtattactttgctttagtctttgtaccagattcaagcaattctccaatctttgtctccgggaggagtcagttgaccggttgagtagttggttcgttggctggttggtagactggttggttggttggttcccaaattggagagattgaaaagcaagagatttctctatggcaaaatcttctgcttttaatccatcagccaatcttgttgattttgcctccaaaatatgcatcaagttctccgcttctctccatctccgccgcgctctctcatctgaccacttcattccactcatacac

SEQ ID NO: 346382 - DNA, 899 bp, Homo Sapiens
agccagttcaggttaagcctgagcacttttatatttgatttaatgaagagtggagtgttgtgggaaaatgtgataggacaaaggatatgaactaaggatagtaaactggaggaaacatagcaaggcccattccctcaaattcctctcagcatccttccgtcttctgacataaggatgctcccttcctccagttatagggagggcacctcttctgtgagggtcttatgacgtgctctggcgagaaaggggaggttagagagtccttcctgcaatggctgcttctcaaattccttcagcttaaaatattcaatatgccaaggtgccatattttggggtagcatgttttgaaccccatcaaacccaacaggaccaggcaggaccatattcttgtgaaatctgcaactggggtgatacaggtttagttctagaatccatttctggatgaggatccatttgcctgtctttcttatccctgccttatttagaaaaagatttgagactgcatcagacatgggttgttggaagaacagggccaactttgactgtttttgactgaacttgaaaggagatcccagttggtagagatgtctcagatgttatgggtgccaggcctctcccaagcagtgttgaagtcagccatcactgtaggagctctttcacccagaagagtctcagaagcagtcttgactggatcagtttattgtcctaggcttttcccccttcttctattccagtctcaagaagccaggtcacgatcataagatgaagtcccacaataggccgtctgcaagctgaggagcaaggaagccagtccgagtcccaacacctcaaaagtagggaagccaacagtgcagccttcagtctgtggctgatggctggagagcccctgacaaaccact

SEQ ID NO: 346383 - DNA, 448 bp, Homo Sapiens
tcatttacctacttgcaaggacatttttcttttcagaggaaggtcgttgaggtctcccttgacagaagcgccactgtctttctgagcgggtaggtccaccttgatcgtccaagctctgacgctgggtggcttcgatccagagtgtcccggggtgtggctggagggtggatataggattcggagccatgctgataacatgctggtaacatggagtttcccagggacaagggacgaggtgacctaccaggtctctctccgtcagcctcagagcccacagggctgggcagtggtgggctgggcaaggggaaggaaattcatctctggaaactgccctcctggaggccacctgcacaaacagcaccatggatgcaacgtgtccccaccccttgcacgccagccctgcacactccgcccacgtctctacaccatcctgaagagatgtcatctc

SEQ ID NO: 346384 - DNA, 1000 bp, Homo Sapiens; identical to SEQ ID NO: 161414

SEQ ID NO: 346385 - DNA, 1000 bp, Homo Sapiens
actcagaaattataaaaataggagacatcaataaaatacattctacacagaatacgccaaccatacactactcttttttgataataaaaaatgtatttagtgagccaccacacccagcccctgttttgtttttgttttgcttgcttcttagggttgtttttctatttatggtaaaggcattggctttccatttgtagcatcaatagaatatttcctgtttacaataaccttatgtcatagtaaatggtaaagggatttaaagcagtggttttcagctgccagaggcctgagagagtttgggcatactctgtgtgatcgggcagaaggcctgtgggaagtttagcagaggacagggccaggaaagttgatggacagtgggggtctgtcctggtcaccaggcccctgggtcctgcccacctgcttggagctccccacccatcacacatgatgctgccaagccctctgggtattgtgggcaaataccttaggagagaagctgatgaactttgtttcttgaaatgcacagattccttggacgtccctgagagctcagtcatgaaagtcaacttggttttctccccctcatttgggttcagaatttaaagtccacacacacaggcagtaagatgatatagataaggacgtcatcactcggtttcggatgttaaaatgtctaggtgggttagcggtgatttgagatcacacaaccttgtgccacaaagaggaattcccaggccagagggagacattttattgccatgttatgatctcatcattgagttgaaaggcaatcttgtttcattttggattctttcttatgtttatgtcttataagggcactttgaatttccaagcaaataataattttgaattagcttttaatcattgacttctagcacagttatatgatcagaaacatgctgtgtgatttgattgctctcaaatatattgagatttgctggaacaaaataagtcaggttaatttttgtaaatgtaccag

SEQ ID NO: 346386 - DNA, 445 bp, Homo Sapiens
tttgtttaggttattttcttttttattcttctgagatgttccactacatctgcgaatagattaccgctggacctggtactcgattggatctctctgagtcatggcttgagatatcccctctgtttggaagcatctttaattccatcctgataattccacctttttctttgtatagcttgtcctgctgctcttacacaaatcattagaatgtaagcgttaaatgctgtttcccctacttcactctcaatttggtggacttctttgagcctcaattttttcatttggatccttcccatcagacgagaaagaacatctggggtgaaagtctccattagaagagcaatgtgggatggtgctgtgctgacaactggtagttcctgccctacatctttgtagaggactggagcccagagcatgccatggtcaacttgtatgttgaagtgaa

SEQ ID NO: 346387 - DNA, 1000 bp, Homo Sapiens
tttttttttttttgagatggagtcttactctgtcacccagaatagagtacagtggcgtgatctctgcccaccgcagttccgcctcctggattctcctgcctcagcctcctgagtagctgggattacaggcgtgtgccaccatgcctggctaatttttgtattctcagtggagacagggtttcactgtgttggtcaggctgctctcgaactcctgacctcgtgatccacccgcctcaggctcccaaagtgctggattacaggcatgaggcatcgtgcctggcccccttttttttcttatgtagctgtgaagcctctgggctgcttctgggttcttccttcttgatctagcatgaatcccaacctcttggccatgttcctttcctctccagggttgccatcaccaactccaagtcttgcagcccctcttcccttcagtctggctgccaccttcttcattgcccttcccttagctgcagctcccttgcttgcctttcctgaggatggagctttctttctgctaaaacaattttcctttaatcttttctgcagaagaaaacccagaacaagctttatggggttcactttagttttgctgtgaattttctgtgagcctgaggagctccggtgttttgccaactgacagatctgcctgtcctcttttccttctcccctttcttttttttctcttttctccccgtggctcttagccttgtaagtgtcataaggaccttttggatagaaatctgccaattttttccacgcagtcactctatttggggtttgtctctgcaggttttcctggtaccggttctggccttttaagatttttggctcagatttcacacctaagaggtaggcgttggaatcttttggtgggtcattatctgccactgcccagaggctcaagtatccgtagtcagagtcaacaatgctgccttgcagaaatatgtgtccagtttttatctttctagaaacagccaaggagtacagttcctctgga

SEQ ID NO: 346388 - DNA, 767 bp, Homo Sapiens
tggttttaaaacagggactttattggctcatttaactgaagagtgaagaggcatacgggctttgggggtggattcagaagtccacaccctcagcgctctgactccagacctctttgatcctttcagagcatctcttctctgtgtgtcaactctgtcctctggttaggtcctttgatggccaaaatggctttagtagtctcacatccaatttctttataactctccctacacaaaagaatagactcttcttccatggtttctccaaaccctgattaaatatctcctcacgtctcatggacctaaattaggtcttgttcatccaggtagtgtacagatgaatgtctagcaatgctctctccctgtcatggctgatttcaaactaccaatgcgatgtccctggacccagcgtgcggtagaggggcctgcagtggactctctgaagcccctgggagctggctccagcagtcggctaggtctgtccctgaaccaattcctgtgaataggtagataagccctgctgattggcttaggaaaatcaaaggtggctgatgaagcttgttggggttagttccattcttccacatgtaaggtagggatggagaaagtggataacagttggccaattgtgaaatgtctggtaccagagcacgaagcatgggggacaatgaagaggagcgaagttaaggagtaaggagagattgactacagtattcatctttgcactaaactattcatccaagctctctacagtttggccccagttcatt

SEQ ID NO: 346389 - DNA, 704 bp, Homo Sapiens
ttcttcccaggaaaaaaattacattttattcctggcagcctcctcttctagagtgggtggcttttggagtggagatattgctggatgctgagaagatgtggttgctcatctgcattttggggatggccatggggtcctgggttcaatctctggatcaccactgctgtatgtaattggtagacttgagttgtgaatacccagtgtttctgatggggctagattggcatgggttcatgagaccctggaatctgttgttgatacagagattgccctccagcttagtagatccccgctgaagtaggctggtgacctggcctttgggaatcctggagattgcatttggaggtgtgctgagtacaacgggcttgagcacttggttgtgttggctgaggtggtggctgtggttgtggtggctgtggccctggccacacctgtgcctgtggcaatgttgatggctgtggtggtggctgtgatggtggctgcactgatggctgctgctgtgatggctgtggttgctcctgtgatgtccacaatttcgccactggtggttgcggcacatttaacttcttatgtggctggagtttttcctccgattgttgttcttcctcctggtgattcttcagttccacccttctgggcaaccctttatctcccgctctgaaatcccatcgctgagggctgggacccctcctcagtgcttatcc

SEQ ID NO: 346390 - DNA, 1000 bp, Homo Sapiens; identical to SEQ ID NO: 161417

SEQ ID NO: 346391 - DNA, 1000 bp, Homo Sapiens
tttttttttttttttgagacggagtcttactccatcacccaggctggagtgcagtggcgcgatcatggctcacttcaacctctgcctcctggagtcaaacaattctcatgcctcagcctcccgagtagctgggattacaggcatgcacaaccatgcccagctaattttttgtatttttagtagagatggggttttaccatgctggtcaggctgctaacctcaagtgatctgcctgcctttccctcctaaagtgctgggatcacaggtgtgagccatggcgcccagcccatgtttaactttttgacaaaatcccaaactgtttgtcaaagcagctgtgccattttacattcccaccatcaaagtctgagcctccaatttctccattaactcactgacgcttcttattatctgtcatttttattattcccatcctagcaggtgtgaagtgttaactcattgtggttctcattttcatttctctgatgactaacagatgttgagaatccttgtatgtgtgtattgaccatttgtatgtcatctttagagaaatgtctgttctaatcctttgcctgaattcaaattgggttctgtgccttttcatttttatttttttcctgagttgtaagcgttctttatatgctttggatacaaatcccttatcatatacatgacttgcaaatctcttctccccatctgtggggttgccttttcactgatggtatcctttgtaacacagaagtttttaattttgatgaagtcaaatttatctattcttccttttgttgtttttggttatgtctaataaactacagcctaatccactatcacaaagatgtactcttctgttttctactaagagttgtatagttttagctcttacatttagatttttatctatttttggttaatttttgtatataagatagggatctaactatattcttttacatgtaggtaacacttgtccagcactattaaaaaaaaactattatttttgttt

SEQ ID NO: 346392 - DNA, 1000 bp, Homo Sapiens
cccattgtatgttttttatttttttttatttttttgatggggataagatttgcatgacataaaattagccattttaagactgactcatgccttaatcctagcactttgggaggccgaggtgggtacattgcttgagtccaagagttcgagatcagcctgggcaacgtgtcaaaacctcatctctactaaaaatacaaaatattagccaagcatggtggcacgcgcctgtggtcccaggtactcgagaggctaaagtggaggatcacttgagcctgggagttcaaggctgcagtgagctatgattgcaccaccacactcccgcctgggcagcagagcgagacccggtctcaaaaaaaaaaaaaaaaaaaaaatcattttcaagtgagcaattcagtggcacttagtacattcacaatgatgtacaaccaccactgagttccagaatactttcatcaccccagaaggaagcctgtacccactcacagtcactccccattcccctctctcccaaccacctgccagtcaccaatctgagccccatctctatggatctacctactctggatatctcatataaatggcatcatacaatagttgacctcttatttagtttgatggcaagagggggaaggagctgctgctggagcccctccaggccctgcctgaagcttctgcttctggggaagtttctagatgctcagagggagcagcccagtctgccctagacctttgtttacctccctccttggggctccgctgtgtagtggactgggtgccggtggtcctgggctttggtctcagctcagcagctgatgcagagtcctcagggaagctgctgcacctctctgggccccaggggtctcgtctgtgaagcgagcggttgaacttgtgggtccctgttgctgcttttgcacccccccactactcccaataagttctgaggagagacgggactccctgtggtagagacaaagggccactgctgattggaggggaggag

SEQ ID NO: 346393 - DNA, 846 bp, Homo Sapiens
ctaccagagagtgtacgagggagccgagcctgcagcgccgggtgggcagcgagctccctggagacccatgcagcgggtcaggtgccagcggccgccaggtctgggcgcggggccgggccaccagggtgcggctttccgctctggagagtttatggcccctgtcgtgggacggctgcgcagccgccagggagggactgcagggaccgcggctgggacaggctgctgcgccaggcggccctggaccgccgcttctgcccctaagccgccctcgcagcccaggtgaccggtttgtcctacccggggagcatcgccctcctccgccgggcccgagcccggcgtgggggttgtaggccggcaccacagcgtgaggacaccgcgacctctgcccccgggagcgcgctgaatgccaggtggggctgctgtcgcaggccgtggagccgcagccccgctgaatggcagggtcaggctgggcgtcggggtcctggcagagaccgcggcgagggccagagcaggtgcactggccgctgcacacgcgccgctaggctcccggacaccgctggcgcgcacccctggtggcagccggctcaggagccgcgggagggcggtgcccagtccccagccaagcggcagcgcgaagctccttccccgcttgggggagtgggcgtggcccaggggcccgactgccttactagtgaaaaagctggggttggagctgccacggggggaggtggggggcctaggaggctctctctggaccttctgggtgtcctcctgcgacctcaggttcttcacctgtctcagaggactgatgggcagaaggctttcttccatgacccctgccctcat

SEQ ID NO: 346394 - DNA, 725 bp, Homo Sapiens
ttctttactcccaaggcaggtgtagattccacgttagtccttaggtttgcgatatctctggctggcccccagggttggctttgatcagaggccctggaacctggagctgagcagttctcccagccatccactgacccaggaatgccagagacctccacacggatctccctcaccagagagctagcactgtcccttagctgacggtgggaggatccagcaggacatttgtctgatgcattgggtcttaaggatccaggaattttgaagtccagtctgaccagcagtccttacttgggcattctaaattccttagtaggctggtcatttaaaaggaagcaatgaaggctctttgactcttctacttcacagtctgacaaaatctgcagttttcctaggaggcttccggtgtgttcaagaaggcagcggggccgacactggtctcttacgtgctgccctctcgtggtcacccaaacacatgcagctaaagctttcttccgatgccgctcatctatttgttcaaatccacaggaacagagcccaggataaaggcggacaggtgatggaggttggcaacagcacagctgactccacgggtctgaaactattgctatggctggcaccgagctgatggtcctggctgcccttctgcctgcctgctctcttgcttctctttccctgttttctaacaaagaactccttatgccgtcactttggcttacatacat

SEQ ID NO: 346395 - DNA, 1000 bp, Homo Sapiens
ggcttctagtacatgtttcttctctttttattccagtgccatcctcactgttagagttcactggcgaatctcaacgctccaccaaaatacaactgtatcaaggatcatcctttggtatcaccttaattggtttgtttcccttctgaccaaacatgtttccatgaggaaaaagaaaatcatgggaacctccatttgataatcatgaaggaagggaaacaaacacatccttcttcacatggtggcagtgaggaaaactgttggcttcttacaggtctcatgaagacagctccattttttagaggtagctaggaaatatatagctgctttcaaagttctatcgctttctgggacaagcagttcatcttatttcttctccatggctagtcattaaatgttgaaggtcttggctaattctgggtactctaatctgcagtgaatccagaaagcatgagacttgcaaggtgacttgacagaagaatgtcaaagctagttctggaggctgagaagtccaggactgagggactaccactgattagggccttcttgctgcatcataacatgacagaaggtaacacatggcaaggaggtgtacccccaaacttattaaggttcacgtgttttctccttggtgcctcatgtccacgtcgtgactcaggaacctgggttcttttcatcatggggccatcatgtcaggactctccatttccaggaatattttagattcttttgtcagttgattttcaatgactcttcagagagcaagggggaagttttccctttgccccccacagtagacacaaagcttagagtatggaccatctcaggacctcagtgataaactgcagcatatcacctccaatgtcactcggttaataagtgacaacacgagaatatgaaccaaggaggactggttgtttccagagccccgtgttctttcaactaaatgtctctgccaggctgccacactggacatcagaaaataaaaaccattcaaagatac

SEQ ID NO: 346396 - DNA, 1000 bp, Homo Sapiens
gtagagatgggagtcttgctatgttgtgcaggctggtctcgaactcttgaactcaagcaattcttccatctcagcctcccaaaatgctgggtttacaggagcgagccgccgtgctgggacgggttaggggcgggctggcggcagaggcgccgcggaggggtgctaacggtgctaacgctgcccgctccccgcccgcccgcaggtgcgcaggaggatggtggcgcggccctaggcccacgctccgcaccatgacctgctggctgtgcgtcctgagcctgcccctgctcctgctgcccgcggcgccgcccccggctggaggctgcccggcccgctgcgagtgcaccgtgcagacccgcgcggtggcctgcacgcgccgccgcctgaccgccgtgcccgacggcatcccggccgagacccgcctgctggagctcagccgcaaccgcatccgctgcctgaacccgggcgacctggccgcgctgcccgcgctggaggagctggacctgagcgagaacgccatcgcgcacgtggagcccggcgccttcgccaacctgccgcgcctgcgcgtcctgcgtctccgtggcaaccagctgaagctcatcccgcccggggtcttcacgcgcctggacaacctcacgctgctggacctgagcgagaacaagctggtaatcctgctggactacactttccaggacctgcacagcctgcgccggctggaagtgggcgacaacgacctggtattcgtctcgcgccgcgccttcgcggggctgctggccctggaggagctgaccctggagcgctgcaacctcacggctctgtccggggagtcgctgggccatctgcgcagcctgggcgccctgcggctgcgccacctggccatcgcctccctggaggaccagaacttccgcaggctgcccgggctgctgcacctggagattgacaactggccgctgctggaggaggtggcggcgggcagcctgcggggcctgaacctgacctcgct

SEQ ID NO: 346397 - DNA, 691 bp, Homo Sapiens; identical to SEQ ID NO: 161419

SEQ ID NO: 346398 - DNA, 1000 bp, Homo Sapiens
ttcaggcaagctgatttattgtcagtcctgcctggctacctcttgacaaaagcagagaaggcagccccacttataggctagagcaaggttttataggacatagaactggatcagggtgaaggaaaaagaaaagggggggggtcctttgtgccatgtgtctgaccgcttcctggagatgtttttcttgccagttctcttgtgcaaagtagacgtcttaaccgcatcctgggacagctggcctctggtcaaacagttacaggcaggtttggggtagcgggttttactttttggcctttggggcttagtctatgggagggggaaacagtccagttgggtggaccttagcaatggtgtatctgtaagtggctggtggcagcgacaacattcttacgctgcatgtgtattgttcagttgtcatctgtgttggggaatctagccactggcccacagagagttaaccagagcttgggagtgtgagaggtgggaaagagggaaccatctactccagcttcctgtctaatttcttcaaggggaggggccctggggaaacaattccttggaaatgtacaaaggaggatagagaaagaatctctgtaggaattccttgggcagaggaaggcaagaggacacccaggtcacgtcagggctcatgatagggaaatctgtgctatggggagatgggactgggagtgaagggtgggtgcggcagatggctgggccagcaggtttcctgccacctgttaaaagggggtgggggtcgggtaaagaaagtgccttgcagagtaggctgctgcctcccggtggtcagccgcggccttgcatggatcttgccaagggagtttgcttggcggtgttggaagcggcctgagatgaagctgggcgggctgatggcctgcttcccccgtcaccggcagactctccttccacgaaagacttgctgaagctcctgaggcacatgctgaactgtgatgtgggactctggagttccccaaccacgctt

SEQ ID NO: 346399 - DNA, 633 bp, Homo Sapiens
ctaaataggccattgtgagtcatgagcttggtctgtagaggctgactggagaaagttctgggcctggagaggctgccgggaggtaggagcataatgtagaattagtgggcgtgttaagcttgttttcctgcaactggatggtcccacctgtagtctcagccacgtgggaggttgaggtgggaggatcgcttcagcctggaaggttgaggctgcagtcagctgcgatagcactactacactccagccttggacaacagagggagaccctgaataacatgttgcccagtcagtctctcttcctggattcacaagtctttcatggtagatccagctccagctctgtggccctgtggttggagaccgctgctcaagtgcatttgaaaggaaccatcccacgccattcttcagagtcatctttactgctgcagtggtcaacttgtagcacccataaaaatcttcaacatgagactggaaaaaagggtatgggatcatcaccggacctttggcttttacagctcgagcagagttgaactccctcattttccgttccccagcattggcaggttctgggactggtggctgtggtggctcgttggtctttgtctcaaggtcaccaacatcgatgtagaacat

SEQ ID NO: 346400 - DNA, 1000 bp, Homo Sapiens
agaaccacaggaaaaactgtggtccgtgcttttcccaaagattgtctggggacctcagtaagtaaaggggagaagtgtgggtgttggggaaaggggaagaagtggaaaaaatgggtgtgggtaaatcagaggcaaatggttgcattcttctgtctttggtcagcgttcactgaatacacattttacatgtgatggaggtagaggcagggatgtagcttttttatctttgtgtaatagctatcttatttaggaaccagatgggaagcaggtttgcataagccagttcccagcttggcttttccctttggcttagtgagtctggggtcccaggatttattttccgttctcacaggttgtggtcctcacatttggctcaaaatattcaaaattttttccagagtttggccttttcttcagcactgggaattgtgatccaaagcttttcctgagcagacctgcatgtctgcggtcaactgggttggcagagacagagtgactgtcttcctccaggaagcagcaggttaatggttggcagagacagagggacagagggactgtcttcctccaggaagcagcaggttggctctggttccttcgtggggcagctggtctccagggcagcaagagagaccaagcccccgtgcacattctacagcctctgtgcacatcagacttgttaatatcccattggccagtgcaagtcacacggccaagcccagattaaggagtggaaagatggacgctatctcctcctgggagaggaggcaaaggaggtgagagcattatgtggccacttatgtttgcaatctaccatacttagccctttgagaaaagaattaactgagaaacttgcttcaaatagggcattcagtaaaatgaagccccaattgaagtaaaatgcatatataaaaaatgaaactgtgaccgattttaaggacagtattggcaaatatttctgtgctcttggaggagaagacccttattggcatgacgtgtcaga

SEQ ID NO: 346401 - DNA, 1000 bp, Homo Sapiens
ttgcagggctagtgcctttattaaagctccatggaggggcagctccaaggcctgcacgccacagttggccgccattgcccaactgacacagcacatcccccccgcagtgcctccacagccccacaccccggggcaattagcacagggccatgcccttccattgcgcagcgttcacccaccccaccaccacttcagcataaaccgtggagtcctttcccaggctggacggagccggggtccagctgcggggcctggctggggaagcgctgcccggctggggaggcgctccccaggccctccccacacacctgcccctccccgccgggcgcatccccacctcccgctgcctcaaaccgccttcctaacaacaccctttccccagagccccacctccaatatgtagactggccgctccctccatgggaggggctgctcagcccacgccccgccctggcgctaggcaccaagcaggaggggaacggaaatcctctctggttcgctgggagatggggagcctggcaaagtggccaccagggcgtccaccgggtcccctgtgggcggggttgctgggcgctgctcctgggcagaggccgaggtctctccggcccgttgctcttcattcaccgtggcctgagactccccagtactcggtggagggagaaggccggaaggcttcccggaggcggcgcgccaggccttccctgaggtccatccgcggcgctctcggcggcccgggctccgggaatgaggtggctggtgaggcccgcggagtgggaggccggtaggacgcgcgtcctgcccagcgcaggcgacagacacccctgccgccacccccgccaggctcgccggggacgtttcctgttctgtccccagctgggagctgggctggcaccgcacgaacttctcggacagcagggagagcagaaaggtggcaaggagcgcccacccgcccctgcctggccccgcaggagggccctgcgctaccgccgcaccgccacgc

SEQ ID NO: 346402 - DNA, 1000 bp, Homo Sapiens; identical to SEQ ID NO: 161420

SEQ ID NO: 346403 - DNA, 448 bp, Homo Sapiens
gggaggaaagagatggctcatttattaagtacttgttctctccaaatacacactagctcacacttctcacagcagccctgaattaggtaaaaccccatattacagacatggagactgagtcgcagagaagccatgggatttgccaaataacaggagtgtcagacttttgtcctctgaagcagctcccactacaccacgaagtgagtatgcagttaatgcctgggggtggagaggaatgtggctgggtgatcaccaagcctggtagtggccttctgtttccgaaggcctttccaggaaccctccacttcaccaggaattcaaaggcgtgggtgcctaccaagaacttggtcactgctgagttcttggcaataaccaggtgaggacatgccagaaagcacctgctgattttagaacttaatgcccctgcctcctttacatgtgactccat

SEQ ID NO: 346404 - DNA, 684 bp, Homo Sapiens
ctaagagctcgtgccctgaggggccgcctggggccagaaggcggtggcgggacctgcgcagccgctgcgcctgctcccccgggccggggtcagcctgtccgtctgtctggccggcctgccagtctgtggtccgcgcggggctgggccctttctcggccgtgtcagcccggccccgagcccggaggccggctctgcatctgcggtcgggcgggcggggcccacggtccggtcgcggccctgacgccgccaggactgcccgggggccccggcacgggaaacccaaggccgggggccctttggagggtcggcgtgggggcggtccgtataggtcgccgtgtctggccggcggggccgggtgggccggggcaggctggctgggggccgagggccgggcggcggcgcgaccccgtctgcgcgggtcagtcggtcccctccggcgccagaggtgggaatgcctgtgattctggctggccgggtcccggttcggggaaggcagagacagaggtcgacggggcggcgtggcccccaccgagagctggggcgcctagggcccggagctgtcagcagcgtcctgggggctgggccccggctggccgactcacgtgtgccgcctgccccagtgccccgccggaaacgggcagggagagcggccccgcaccgaagtgagccacagcggccctgcat

SEQ ID NO: 346405 - DNA, 799 bp, Homo Sapiens; identical to SEQ ID NO: 161421

SEQ ID NO: 346406 - DNA, 714 bp, Homo Sapiens
tgtgactccagtggctcaatgacatagcccaatttcctatgacatcttctccagtaaacaatgccagggcctggcagatgaaggatgcagtcgtgtgtatcaggaaacccaattctgagatgtatccacttcccctcatggggcttcgagacttggctcccagctatggagttacctttctatgagaagaatgtcaaataatttgtatccacatcttcaaactaccataattctcctttggccacaaattgtttacattcctcccatgactctccaaaaagattcatcaaattatgaaattagtctcgggcttgaggtacaggatcttgtcatcaaaatcaggtccagatgtggcagaggctccatagcttcaattccttgagtacaattctttttgatctaaaaacctcaggtggagtagttttaagaggtgaagccagctggactttctgggtcaagtggggacttgaagaacttttctgtctagctaaaggattgtaaatgcaccaatcagcactcttctgcttttcctccagcttctgggcaaaataaagtgccttccatgggatgtcttccagaccgtcctgtaggatctcacacccacctctgtgagcaaaccgaggggggcaccccatctacattgacacgaacacgattgtagggctttaattttatttcgtcgacttccctttgcagcttgcctgtctctcccat

SEQ ID NO: 346407 - DNA, 573 bp, Homo Sapiens
taattttaaatgtactttaatgacaccatcttatgtatattgcaggtattatccccagtaaaaattactggacatcatgtatcttcagcgtgttcatcaggagtcacacgcagtatcaaatgttgaatgtagattccaaaggtctacaatctgcacatagaagtgtggacatttcttcacttttaggggacattcaggttgggttttccctttttcttctggaagagtaagacctagggcagtgatagaaaggaaattgggctggagttcaaaagagtaggaagaatttcccaaacttgtgacaaattgctgctgagtgtaggacagcatgagagtatagagctgcttaaagccagaaacacaaagggagtttgcatccattgccatgctcttcacacatctcatcacatattccggtgttggtatccctcgtgccaatctgtgggagaagaacagccaacactgtagagcaagagtttcacctggatccctcttccctacaatacacaagcctaaaccactgagggaagagcagcaaatgatctctttcattgatattatagatgaagacat

SEQ ID NO: 346408 - DNA, 1000 bp, Homo Sapiens
tcacccctgattcatccctggtgagggctgggagcttaggaatggcttttgaaagtagaacctggagggtccagctgtgtttggtggggtgagaaattcataaaggtctctgtcctcccaggacttaggcaggtaggcgagagaccggccaggtccagtgggcttgagctcatctaaccagatcttggtgtggggatggtaacttgaggccgctgccattccttctgaaccattgtgtttagggaaaattcttagagatactttgtagtgcgttgtggtaaagagtttggattcagggatcaaactcacttggtttactctgctaaaaatgaaattgttggacttgtaagtccagatcatgttaatcctgggagcataatttaaagctgattggtgatgtggggttatgggaacatttactgggagtgcagaagaaaaaagaagtgcaacaaataatactgtttgttttctaataaatataattctcaaagtaattggaataaccaccgtcatgaacagaacagccaggcagcctataggaatagtaatacattttctagaatacttcttttcagttgagtagaaaacttcagttttaggtcctttgtagaaagcacagtccacctgtcctgtggtgctagcttcacataggaagcctggattcagcagtttgccttttgcactgatagccttatgggtcatcgacagcactttaaagggtccctcccagcatggtgacagcccacttttatgtagatgaagtctcctagtccagaggggtggcagatttcctctggcaggtctttccagatctttctgactttgtctcagggtttccagcgcaaatgatgtcagggtcctttctatcctttccatgaacgttttaggagacacaatactttagcaatttacttgcttctgaagagctttcagaaaatgcatcagggctgggcacggtggctcacacctgtaatcccagcgctttgggaggctgagatgg

SEQ ID NO: 346409 - DNA, 1000 bp, Homo Sapiens
aacagataaattgtggtatatttatttaatggcataccgtacggcaatgaaaacaaataagctactgctaccacaatgttttggatgagtttcataaacatagtattgagtgagagaagccagacacaaaataatacctactgaatggttccatgtatataaagttcagaagtaagcaaaactaacctgtagtgttagataaacgttacttttgagaaggagtgtggcatagtcaccaggagcggatagaaggagggtatctgggatgccaataatgatctcgttctagatctggatggtggtcatatgggggtgttcactgtgtcatcatttgttgacctgtacacttaggtttcgtgttcctttcctaaatgcctggtatatttcaattaaaaaaatacacacaggagaggggaacagttttcgagtaagtaaaaacacggaaggtagaaaggaaataggagagagatcaagattttatacacaggtagctgagctgtggccagattaaatggggtagtggaggggagggaactgttgaatagaacagggcagaagttgcctccagcccaaccaaagttcctccagatacatcagccttaattccccacccaaccccacaccccgtattcacaaacctcatctttctggacaagtcccagcatttcctagactagcagctacttctcctggcagaaaaacccagtatttgaggccaaaactggggtctgagacactgatattttgctctagtaggtcctgtgagtctgcaggcccttgatgcaaatgctccagagctgatctggaatcatcctgggggtactggtttggggtgggtgaggggaacagggtttggtatgtgtatttgtcatccttatcaaaaggaatgacctgctcaggttgctgtgtgtgctcttgtgagcacgtgcccaaagcttcatacacagcactgcgatctcttctccccaggcacatctccgctccaaaccctattcagggg

SEQ ID NO: 346410 - DNA, 883 bp, Homo Sapiens
acaataggacatagtatttttattttttaaaatgcagttttttttaaaagaaaatttgcagaatttactacactaaacccttcacttttttcatgccactgtacaatttttcctacagctgtgcctggaccaaagagagctcaaagaaaggctaagaattcacttctgggacttggaaagcttcaaaagagtgaaccagaactagggggaacattgatcctggatgcagctggctggcagaggtgctggtgtgctgtttcttcagaggtttcaggaaggcccccccatcccaaaatcacccttccttcacctgggaagtcaatgcctgagactccaccattacagatacaatgcaaaccttcctgggagacaaaactcctcatatacaccttaaagtgagtttttatgatcttttcaagagggtcaatgttgagaagaatccaagtggagaaaggatgaggttggttgagggtagcaccaaaagattctctttttcactcagaataggcgctgcaagtctgtcctgctggtgatgcacatacttgatgcctcccagaagtgagatgcttttgttccaagagggcttcctgtaggcagatgtgggagcaggagtcactggtgacactggagcattctcctgggctgtcactgatgggaagagctcctgtttccttgccttgtgccaagagggcccaaggcagacctgccagcagccacgagatggcgctgcgatccaggcgactccgggccctgcagccaccctccccgaggttttggtgtgggtcacgctaatggtgatgatgtccgtggtggtggtgttgaccacacctatctcctttgtctcacaaaaatagggtgggacgctttcatcaaggtggtccat

SEQ ID NO: 346411 - DNA, 802 bp, Homo Sapiens
ggtgacttctccccggttcacaggatttcatgtggttcacctacaagcctcatttcattttatagtcactattttctcagccttccctaacagcagatgtggctgaagtagctatttctcagattgggttacccagaaagtatctttgatatacaaaaggctatttattctcttccaccatgcatatcccaggctcacgctaagcctttatattttattcattaagtcagtcctcaaaatcctgatgacagctcaggcagtagatcagagaaggaaacaatttttccattttccacctgggaggtggagttccacgtgccatcaccaagtaagggtggggttgcctctgtgagcagcctctccacaggctgctttgctgtcttcatagtttgggggtggcaggaaataaagatggctgagcacctgcagctgcttcttccggagcaatcatgaggtagtttctggtgtcctgtcccagctcatacatgctgcgttgcttgtgggtggtgatggctgaggtgtggccttgtccctggctgggtggtcccaacttctctattgctggctgggtggcatccaagtctactctctggccctcctggagattcttcaaattccctgtggaggtgtgtgtcccacgtagtgtcacagggcaggggagagcctgggccctctgtgaatagctgcatttaagagctgagtgcagctgacgaggtgcactggaggcctctcctttaaggaaatccagtacaagaacagagagggcccagtgccctgtatcatccacctgggtcagcagcat

SEQ ID NO: 346412 - DNA, 1000 bp, Homo Sapiens
tgagcaataaagcttttaatcacctgggtgcaagtgggctgagtccgaaaagagagtcagcaaagggagataggggtggcgctgttttataggacttgggtaggtaaaggaaaaaggggggtggctctctggcgggcaggagttgggggtcacaaggtattcagtgggggagcttttgagccaggatgagccaggagaaggaatttcacaagacaatgtcatcagttaaggcaggaacaggccattttcacttcttttgtggtggaatgtcatcagttaaggcaggaaccggccatctggatgtatacgtgcaggtcacaggggatatgatgacttagcttgggctcagaggcctgacacatggatcatgaaattcttcagtaacttgaggaatatgatgtacttgtagttctgggaatttatactctgtaacaagtagtacagggcccatttatggttcccaagagcaccaaggttaatgtcaagttaatgtcattagaaataaataaacaagactcccacatttattttttatgaataaaggcaatttcatcagtaaggcaataaggacagaaaacgtatctcgctgacgtattagttgagtggttgtctgcatttttaatttcaaagaaactcagaaagaacatggaatatcttgaattttgattattcagatagctgtagaggagccaaaactccacctccatcctctttgggttctgactggaccctaaagttcaatcgatatagacagattaacaggagaaaagcatacaaatttatttaatacaagttttacatggcacagaagccctcataaggaaacgaagaccccaaaaagcatccagagtcactcacttgtatactgaattggacaacgaacactgttgcaaaatgtaataaggcaaaggggcttcggctagggtagttaattgggtaaagaagcgactaagaagataagggttagtttaacaaggtcagcttgtggagctctctcttg

SEQ ID NO: 346413 - DNA, 960 bp, Homo Sapiens
gactttattgacatttatttccaaaacgtgacgataggcaaactcagataaatgacacacatagaccgcgtgaaccctctcatatttaccagataataaaatagtagcactgacaaaggctcaatttttttttttattcttccccagagacaggctctgttgcccaggctggtcttgaactcctggccacaggtgatcctcccacctttgtctcccaaagtgttgaggtaaaaggcatgagccaccgcactcggccaatctaatttttaaaaacaccttttcctcactggctggagcacgttctactttactgggaactgaatgaatgtgcaactctaattacagcccctccgaagtgcagtggcttgggaacctcccgttccgggaggcggcctgcagagccctcctcctacaagtgtgagcacagggtcagggttccatccaagcgagcacctgcttcctattttccgactaatttcggtcccctgatacggaatccgggatcctgcagacaggcagcgggtgacagcaagcacaagggtgttcgatgacacctggagaggtcaggagagccagtcctgcggtgcagaggaagaaacccagcacagaggccaacagagccagccccagcctctggaggcctgaaggtaccgccctgccgcgcgtgggcactgctccctggcgccgtccgtccactgaccatcgtccctcggcccggccgcccgcgcggggcaggcaacgcccgaccgggggcctcggggaccaggaggaacctgcggcgttaggagctgacagtgtcggtccgcgcacgcgccccggggcccgtcgggcctgcagggaccaccccacaggggcccgcgtcactgtaggctcacaggcgggacctggatctgtgtagacccatggtggtgtggaccctgttggtcggagctgatttgttgtgggcccgtcgtcagtcat

SEQ ID NO: 346414 - DNA, 1000 bp, Homo Sapiens
gtgttccaataaaactttatttgcaaaaacaggcagcagggcaggtttggcccaccagtcatagatctagcgctcaacactcccatcctacagatgctgaagtgtagcctcaggaagatggaactgacttgaccaaggctgcatggctcccaggaccagaccagaactcagaacatctgctcctcaatcttcaaatctctttttaaatgctattcaaccagctgcttcctcctggcaaagtggggtcccctcctgggcggctgcacaccagctcatggccgctctggggtctgtgagggcccggcgcccgttctccccagggagccgcgtgactctccttgatccggcctcccctcgagcgacaggcctcccagaggccccccagcagcccccgagcagtccccggagcgctgggggactctgcagcgcgcaggtgaccacgcagagacagccccagcgcgatgaataattgaggcgcagagtggaattacctctgtgggctccgagtccctcccgcagcccgcacctgcccctgcccctggcggtgtcacttccattcttaaaaccccagtggcttttggctgaccttggtccccctctttctcctcgcgtcctctgcctctcaactctggctcccgggctttttgtcagtcccttggattcactgcactcccctccactgcagggcccctgcagatgccgttccttccaccaggcacaccctctgtctcctcttttccttgttacctcctccaggaagccccccttcctccactcccctagtaagtcaacccccctcatgacaggccatccaaaacctgggtccttttcctcccagctcctggagagctgcatcttcaccatctgtgccatcatgtgataaatgccaatctcccggctgggccatgagctctggaagcagcatctaagtccagttggtttgcccgtcccagagcctgactgccccacggtatctcctgcttctcccctctcccgcatg

SEQ ID NO: 346415 - DNA, 1000 bp, Homo Sapiens
ctagaagggcaggaagccgtccactttgaggcgcaggaaggggtccagcagggcccggagcttccagacggtggcacggctcagcaggggtggcaccagcccctcgaaaggtgtggggttcaccacgtacacgtaggcagcggtccagaccagcagggcgcccagcagcagcctcagggtcagcagccagagctggcctgccaggcccttggagcttcccagctttggcctccctttcgacatgcttgccatctgcttctccttcctggctcgagtgcggcactgggcccgctccctgagaatctccagctggatgtcctccatctggtccagcacgccccggatgtccttcttgaggttcaggagcccggtggcctggttgttcagggccatgtgcatctcagccacgttgtcccacacctctgtgatgaccatcttcttcctctcaaagcacaggcggatctgctgcagctcgttctgagggtggggcccaggatgggcttgggcagcatcagcagggtggccagtacctccccgctgggcccactggcctactgcacgaagacctccctccctaatgaatccctcaggcccacctggagtgctgttacgaagcttcctccccccccacagcccctcccccaggcccacctgggactgttgcacgaaagcctcttgcccctggcacagctcccgccgcagcagctgcagaggtgccctgttccccaagggctgcgtgccagccgggtcggggggccaggccagagcagtgcagcttgagtgttcgggacacaggggcaggaactgctgccccggccccaggagggcccccagctgctcccgaagttcctgattctgccttttcaggctgtggttctcctgctccagctgcaggaaggactgttctgcagagcccagcagcccgcactgaagggggtcagatacgctaacaaaggccaagcgccctgccaagcggtgtcctggattggggtgggcgtgg

SEQ ID NO: 346416 - DNA, 907 bp, Homo Sapiens
caagctaatgaacgtatccatcgcttcacattgttgccatttgtgtgtgtggtgaggatattcgaggtgcactttctcatagatctcgagcgtgcaattaatcactatgaactacggtcaccatgctgcgtgtcaggtctccagaacgtactcatcgcatcactgaaactttgtgccctttcaccgtcttccccatctttttcattctccgacaccacccttctactctgtttccatgacttggacattttaggctaatggctgggcaaaaatctgtggtatgtacacagagagatgacatcagctatgtgagcacgggggccgccttttaaccatgagtggtgtcttggaactccgtatgcccaggtacttccaggcatatacatgggggtgggtcacccctgcactgcgaccagtgagcctgccgctgagtgatgaatgccacccagtagtcttgagcttccacatgccccgccccccaccactcaccctgcagctctctcacagagaagctcaggagcctgggtcattctctgtacctcattttccgaggcgtggggctggaaagcccgtgggcaaggctgtggtgagccatgaatgcgtcaatgtgtggaaagcccacagcggcggtggggttcccttggagaatgtagatgaggcacctgtgctgcaaaaaccgctccttccaccacccctgcctggtggccagcaggaagctggagtcagatctccagactgaagccagcaggaaagccccgcctttcttttcatctggatttttcagcagcaagtcagtgattgcagaatacagactcctttcctgaggccacctacaattacaggagagaagagaccatgaagaccaagtcacgtacgtggtgtttctcaggccttttgttccccccat

SEQ ID NO: 346417 - DNA, 1000 bp, Homo Sapiens
tttaaagattcattttggacttttaatctctggaattgtaagctaatggatttgttttattttaagccactacgtttgcagtaatttgttacagtgactatacaaaattcatcctaaacctgagactcagaaacgcaaatgcggtctttctgtctgcagaaatggggctcagactcaaccacaagttgactcaacagctgaccagggtcaggagttgaaagtaccaacaatgccaaatttcttttcccggggatgagtgttggggaattctgctgtttttaaatgtcagaattgttatgggaaagaggaatggtttgggtcaggcagagcaaagagtttccatattttggaccaactccaattgatgagaactggctgtgcagagctttgtgaagcggaggcaaagtcttgaggctgagcccaggctcccggggaaagggtgctgggatcgactggcaatgtctgctctgggtgttccatgggagaggagctgtgtctgctgttctggattagatgcgtttcccctgcgctggcactgggtctgactcttcttccctgggcttattagtatgctccgcatcgtggcataggtagatttcttttctaaaggtgaggtcagtgctgggcacttagcaggcgcccggtgggctgcgccgtcctggaggaaggctgattcctcccaccccgactcctggctcgtgggtgggtaatccagcacattctccccaccccggcaaccaactttgtggccgaacaagccctccccggcttgttccgctggtcccaggcgcctgcgcatccggacacgatgaggagcaggtgcgcggggccggggtgtgttcgagggggtcgtgcgcgcctgggctgcctccccgcggacggcggactgggccggggcggcgcttcctggcagagaggcgcggaggggcgtggctttggagaggtgcccccggcgggctggcggcctggctgcggtgaaaggcgggcggacgcaggtgac

SEQ ID NO: 346418 - DNA, 1000 bp, Homo Sapiens
tgcaaacatggttcactccagcctcaacctcctgggatcaaacgattccccactctcagcctcctgagtagctaggaccacaagtgtgctccaccacgcccagattttttttatttttataaagatgggatctcactatgttgcccaggccagtccctaactcctggcctcaagtgatcctcccacctcggcctcccaaagtgctggggttacaggtgtgagccatggtgtccagctaatttttttttcctactgcctgtatgattgcagaattttttgttttgttttgctagaagaggaaaacggtgctgtgagtgtctataacgtctgggacaattgtagcttatctagtttacacttagcttttctttatgttaaaaataaattatacatcccagaaatcttttctagagccaattgaagtgaatggctaacgatcagaaagcttattttctaactggaaaatgggaactcgctgagttgatgatgggctcacaactgtggaaatgcccaccctggaatgcacagtggagaatgaagaagccagtaaccctgatggcatcgttaccgaatggccagggtgtgccaggcggcaagggtggatttgctccctgaatgatccatccagctgaatcttgagtcattccgcgtttgccacgaggggcagtgttagatcagtggtcctcaaagtggggtccccgaagcagcagcaccaggttctcctgggaacttgacggaaatgcacatcctcagccacatcctctgatcacagaggagtcaactgctggggcctgggctgggccggcccgacagtgtcgtctgcaccgccctccaggagcttctggtgctcctcttgtcctggacccacacaggctccgcagcacctgctcctggcacggccccacagttgcagtacttgggctggagctgccgccatgaggtcctccttcaaacacccagttccagcgttccccgggaagcttcccatgccatcttgtca

SEQ ID NO: 346419 - DNA, 1000 bp, Homo Sapiens
tcagcgaccagggaggacatcctgctcacagagccttcgtgtgccagctcgtctgtcacacacggccagaattgtctctcttatcgaggccgtggcaagctgcacaagctggtgtacgtcatcacaccgcgtgcgtggggccctcaggcctgtgaggactccctggcctggaggtaacgggctgggaagggagccaggcacacgggagggggtcgctgcaaccgtcctggcctttgggatgggtgggatcacgatggcgcccagggacttctgcatcttctcatcattgcagtgcaggtattgccaggagatctgcgcctcctgagcaccgggtctcaactcgtgaggacccggaatgctccccggtaggtccaggcccttctctttgactccgctggcctcaggggtggtagggatgctctggatgagaggcatcggcctgggcaccctcagcagcctctgagaggtggctcgggggatggtgctgtgcaggggaactccttgggggcctccccctggatccagagaggctcgggaagacgctgccaagccctctgagagcctccttttcttgagcttgtccttaatctggatggtgtccctggccacgctgttggcctctgactccggagaagggaggagcaccaggggctggtcccccaaagacaaggccctgaggttcctggggtgaccattccttgcctgccagcccttggaaggggtgtccagcttgaggccacccagctgtccgagtccacgcaggagctgtgacggttcctcgttgttcagcagggctcttggctcaggctggagagaaccttctccatgaggcagactggagttgatgcttccaggcgggagcacccggggcccagcactggtccgagggatgctcccgcagtacacggccacggggaccaggaccttggcttcggggacatcgtcacgggtgcccatgtcctgggtggagaaggtgcctacaaggttgcccagaggcagc

SEQ ID NO: 346420 - DNA, 1000 bp, Homo Sapiens
gatttttttggaaattaacttttattgcattttacaaaagcattgatctgtgactgattatatattttaaaaattgattcttcaccaaagagagcttgagaggcactggcttagagactgatattataagatctcacaccacctctgcagggtcttgaattagggggctctgtcacttctattgtccctctcaggaagacagcacccatcccacacttgcttgccaggccttggccagaggaaggcagccctgttcccgggtcccctatcccacatcaaccacaaggcaggggtcaagactccccaggaagaacccaggcagagtttggaggatctagatttctctaggaggacaggggcgtgagaccccccaggacagaccgaagtgggggactggcatgttcctgaggcttcacgggaaggaaattccccagataatttccgcccttcgttttagaatcacccctcctcatcagggagctttctcttgtgtctgatctcagtcctcgctgctggaactgaagtcctgctccatgctgaggctggtgctagttgctcctgggctggaactgcaggcatgatctggtgtcctcttattcaaagagttccctgagacctgcctggtgagttcccccagctgcatcttccatctccagcttcctctcaccctcacctggagccaagtagggcagtcagaagagagggcaagagaagccccacagagccagggttgtaaccgccagtcttcttggtagaggaagctggagggctgatttctggatttgcctctcaaagctgtgacagtcctcatggtcagctccacctgtgggtttcccctctcctcttgtactttcagcggcagaaaggtgcactgagcggacatgggattccacactggagtccaagctcacatgtcttgtttttgttttttgagacagggtctcgctctgtcacaggctcgccttgtcttgtctctgctccctcactagctgtcatctgg

SEQ ID NO: 346421 - DNA, 1000 bp, Homo Sapiens
tcacaggggttgccttgcttatctctgttgccaaagcatccagtacagtgcctcacacaaaatagttactcaataaaattatgatggctggataaatggctctaaatgtcttgctgcaaattctcttctgacttccagtctccatgccagagcccctatggctgtccagctgaattctcagctctaaactaaatctttcttttttcctgtcaatcagcacctcctcctgatttctgttcaactcctatttgctgaactcatactctgcttgtgagacatgagggaaacaaagataaataagattcagtctatgccttcaagaattgtcttcattagggttccataactccggcactattgacgtttggggctggataatctgtgttgcaggcgtcctgtgcactgcgggatgttcagcagtatccctggcctctgtccactagatgccagtagcattgtcctctcggtcaggacaattaaaaatgtctccagatgttgttaagtgtgccctgaggagcaaaactgacttcaattgggaaccactggtctgtgatgagaatggagtccagggcgctgctcccagggagtctgacctttttcaatgtcctcacccaaagccgccctggtaaccgtctgttaccagggatggaggccacatcctctgtgtcttcgccccagcacctccaggcctggttcgggccaggctctcaggcgctggcgggttcctcctgcccgcatctgaggacaccagcagccttccctgggggcagcagggagggaagggcagctcggccgtggcgtccgggtaagactgtccttcccagggctgccgggagaccaccgtggcgtccgggtaagactgtccttcccagggctgccgggagaccaccgtggcgtccgggtaagactgtccttccagggctgccgggagacctacggcgttgaaagtgcagggggcacttggtccggagcactccgacctttctttcctcaagctgga

SEQ ID NO: 346422 - DNA, 1000 bp, Homo Sapiens
ttgagaacccagataaaaatagctaactttattctccaaaagacaaaagaatgacagtgagtagacgtctgcttctattggctatcagataatcttataaccctgcagtactgtgatggtatgaagcacatccacagcagtagtgtgacagtcaggtatcaaaaaaacaagaacttcagagaagacaaatgtaacgtttgaaatcagtagaaagaagtattgctttgagaaagttggttattatttggaatttgaagaaataaacaataaatttcaaataacttaaagaatgaaataaaaaataaaattaacactacaaggaagtttttaaaatattcatgccttttcctcatgacatgatatacaaatatcatgaagttaaagatagacaaattttactaactaaacaaactcatttttagcaaacaattgataaataccattaaaagacaaataacaaattagaagaaaatatttacatggtatatataacaaaaaattgatattcagaatgtatagagattatcaaataataaagaacttgcaaatcccagtgggaaaatgagcaaagaatacaaagaggaattgcacagaagaaaaagtatgcattatgtattaacaaatgaaaagttgcttcatctgtgtaatggccaaaatgtatgttaaaatataagacagcatttctcccatctcattggtaaactaaaaaatacatatgcacttcataaattcatatgtcacttcagcatttttacaattaatatcacttttgttattcttaaaaagttgaaaaattaaatgagttaaaagcagtatgagagaaattattgcaaatatgtgtataatattgttaggagaaacccaagtaagaccccagaggcgtaagtttaaatgaagactaattagttgatatatataataatttaaaaatattctgtacattataaaactcacaaaacaaaaggcaaaaaaatcaagaaaaaataatttcaaaataaat

SEQ ID NO: 346423 - DNA, 666 bp, Homo Sapiens
tttattttttgagatagggtcttactctgtcacccaagctcaagtgcagaggtgtgatcttggctcactgcagcctcaaccacctaggctcaagagatcctcccagcccagcctccttagtacaggtgagtgccaccacacccagctattttttctctagtttttgtagagattgggtctcactttgttgcccaggctgttctcaaactcctgggctcaagcaatccttctgcctcaacctcccaaatggtgctggggttacaggtttgagccaccgcacctggccagtttataatgttaatggcttttggagcaggaaccagtgggtgctgcttcttgtctgcaagatgaggagcctcctctccccagaagtgaggcatcttctaccacaagggaggctttgcccaaacagtcactgaaaggctccctggatacgtcttctgctgcactcatcctcttgaatgcccagctccagggaggtccatccccaggcctgatggctgtccccatctcttcatctctggtaacgttttggcttgatttgcagctcatacagggaaggctttgtagccctgggaaatttctacagacaacagctagttttcttttctctccaactccttttttctgtgcttctacctgatttttagaaaaacttctacgcat

SEQ ID NO: 346424 - DNA, 1000 bp, Homo Sapiens
cggcaattaccctaagtttattttgtgtcagttacagcatgatggggatgccaatcacagagctctccttgcaggtaggttagcatttctattctaggtccccatattcaaaagcgttcataacttggtcataaaaactaatcatggaatgaatcttggcatataaaagtcatttctcagaagattaaaaaaatacaaattagaaaaaagccccaagtgctttgccattctgatgttacccacaggccccaaaatgaattagcaagtcagcaagtccttttcacttatttttttctttctccaagaaaactgtgtacttcagggcctttgggtcagtttttaagctgacttgtctggaaaaggttatcacttggagggaaagaagttcttttccagcctggacaatatagttgagactcggtctctataaaaaatttaaaaagacaaatcagccaggcatggtggctcacacctgcagttccagctactcggaaggctgaggtgggaggatgacttgagctcaggagttcaaggctgcagtgagccatgatggtgccaccacactccagcctgggtgatggcagagtgagacccattcttagaagcaattcagttgtcttctaatacactgctcatttgtgaatattttattttcgaacaggcagattttcacttgaaatattgaactgagcggggctttcggggtaaggggaggcaagactttggtgggagctgctcgtcttcagcaaagcgagggccggctgcaaaggcgcaggctggcagttcgggtcatttcctgccgattccccattcccctcggagcagcttggagaggaagtcggacttcttttccaggcggagcctccacgatgggcgtgggcgcctcgtgcgtgggccgggggcctcgtgcgtgggcggggatcggggcctgggaaaaacgggaacccggtacccgcccgcgccctcgcgcgtcggccaggaacctcggccccatgcgggc

SEQ ID NO: 346425 - DNA, 1000 bp, Homo Sapiens
tttttcttttattttctatagtatactcctttaagatgtcaaaatcagagtatttatataatttgccaaaggcttgatatgcaacttttcatacaaccagtctatttcacagtgacagtgtttcaaacactctccctcttctttttgggtagtcattcattaatttcccatttgggcacacctcactggttataagacacataaccaactatgccacatcttgttactctgggcatattttcagcaacaggaaaaaccacagtgtatgttacttcagaggctttcctataatggtaatgtcttacatctgctaaagtacctctccactgtctacaggacaaagcccagttttttttttttttttttcctgtaacaaagctccctcaaacctaccttttcaaccttatcttccattagtcttctctatcagctttttgttccagccaaactggttttcccaaagtcagaagaacagagtcacactgtccttaattgctgttacagctccacccacatgcaggtttactaaagagaggttttatctgatgggttgaaattgaagtgatggaaagtaatttacctcccctcttctttcttcatcttcaaatcctactactcctcctttaagatcactttagattgaagtgtcctccactcacctgctttcggggcccgttttgcgctgggcagttgcgcccaaggagcgcgcgcatccagcatgagctcatttctcatgggcgtttccagaggcccggccgggccgcgcacaccaagcgcagcaagcctctgtatcaatggcccccgcggctgggcggggcgcggccgcccaaaggcgctgcctttctggaagctttgttcccattttagcgtctgagagcttgcagccggctgggaaggcccccttggtccgtctggccctttcggggaagaggccaacactcggcacacgcgatccacggcagaggggagccttgggcgcgcagaattggctgcgccccgc

SEQ ID NO: 346426 - DNA, 774 bp, Homo Sapiens
tagctttcataaaagtgtttaattgttgtcagttttgagttcatctcaccacctagaccttacagtccctgggtaggcaggcagtgggcgatagaagctcacactctatacttctcctcttactcattcccaccctgctgaggtttaaggaaagccaaggatcaggacccacttaagctttccttggccttgttaagtccaatcatctggggcgggaagaagagaaatgctcattgcaatctttgacccccactaactgctgtggtgactttgagccaagcccttgacctccatttccttatctgcaatgttgctgtgattcgtgtggtgaggttagagaggcagcacttgggataagcttgaagagatgcatccagccatatgaaagtacaggatgccgtgtgtgcttcctgcttcatagcacgttttgtttcttggaaggtgagtggcccggctgcctccccgcaaacacatatttctgcctttctcattgtaattagcaagatgttcccacttctcagcattgcacttttcccttgagtctgctagctgctggtgcagaataaacactttggccccacactgtcctgagacaaagtcacccagcatatggcaaagctgctacttctcggctggaacatttgaggcaacagtgacttcctccttccccagttaccatgggcattctcagctgtggcagaggataccctcctttcattcaggataacaacccctgggtggggttttcaacaagtataaaaagctcctggataa

SEQ ID NO: 346427 - DNA, 1000 bp, Homo Sapiens
tgtcttttcatttttaatctcagttaatcatccaaaagaggcttcctgacggagagaacagaagatgccttttggagcccgagaggcttgaagccaggctgtgtgaccttcagcaatcatttcacttctctgagctccaatatcctcatctgtaaaatggggacatcagcccttaccgggcagggattatgagagataacatgcttgtcaatcaatcaaggaagggttgagttcagttgagagacccgagcaggaagggacacattcctatgcttcctctaagaactggtacctttgcttccggctctcatcggtgaggcacaacatcctccaaccaagaagcaaccaaaacagtcagtgactcctgtaacccctggatggagcaatagccaggtggatgctgaagcaatgtaatctatgagaagagcactggatagggagtcaggggagctgggttctggtccttcttctgcctcttcctctgcgaccttgcaggaaaggtcttcaggccttggcttcaccatcctctgtactccagatcccagacctctcacagcagggatactttctccctgcagaagcagatgcagccagagataagggggctccacaggaatgcactctgcaaacgcactcacatactttctgataggattcctcctacctggatggaattgactcaggaaccaggtaagccacatctgatggtggagacagcttgtggctgtagtttctccaagacgcgtcccggaagggcagtcggaaggatggcctagatccccagagccagctttgggcttgacctggccaaactctgagagaaagatctggatagcaggttcttcagaattgctagggatgaaatctgagcctacagggaccacagctgtctgttgggccagaaggtggttggagggcagcatcgttgatgaagaggccagggcacgaaggttatctgcaaaacttgttcctggcccagaacctcctttcactgcttctg

SEQ ID NO: 346428 - DNA, 1000 bp, Homo Sapiens
gagacagagtcttgctctgttgcccaggctggagtgcagtggtgccatctcggctcactgcaagctccgcctcccgggttcacgccattctcctgcctcagcctcccaagtagctgggactacaggcgcccgccaccacgcccggctaattttttgtatttttagtagagacggggtttcaccgtgttagccaggatggtctcgatctcctgacctcgtgatccgcccgcctcggcctcccaaagtgccgggatcacaggcgggagccgcccgcccggccggatttggcattttcaaagcacactatcgttttcttgctggattgatgtctggcaagcttgcctgataactggcctgggtgtacttccttctttgatttgtatatattttaatcttttatttacatgtcctgcctatttttttcatagtgaccgtgaattaactggaacagtttttttaattcttaaaaaaagaaacagaacccattgaatagtcttagaacttagatctaccagtgagagaaactgctagttgagactaaaatagagctttaaactaccaagagatgtagaggcccggggcgcttgtgggcaagcacgtgtcagcatggggaggaagaggcacagccgcagcccaggacccatgctgatgccctcaccacttccatcctctcagataagatcatttcactcctgagagaggatcttccttctcctaaagcctcctaaacctcacggcccacacccagtctctccgacgtgaagggacgctgtcctaggggcgccggggagcccagtgcagtcttcctgaggcaaatgtgccgcacaaggttttccccatctgggatcggggagcaactgaaggcctggctgctggaatgctcctctcatactcttttgacgcggcatagcactggatatatctgttctgtttcattgttggacctttagcaaacacttactgatttcctccaacgtgccacgttctgtgctttcggact

SEQ ID NO: 346429 - DNA, 845 bp, Homo Sapiens
gattttaaaatagggttatttgtttattattgagttgaaataattccttcttttgagtgtcagtgactgaggttcgctgtgacacagaggggttctcctggagagctatggcacatgctccatattaaaaggcaacatgatgctcgcaccacccagaggccccggtccccgccattcattccgctcccggccgggagtcgctctagccaatcaccttccaggctcagggcggccgaggcagggcctctgcctcttcggggggcctctccctccccctgcccctgattgtggctgaactgccaccgcttgatagcaaaccacactcggcacaggaaggagaacagcgcccgcggccccgggctggcctgcggtctgtgttcactcctcctcctctcccacgtctcaggaacctgcagctggcccccgagcccgcgccctcccggttctaggaattcaccactttcttgcctttgtttgggtatcttttgtttggagccagagccggctccaaggaggagctgccggagggtgctaggctttttgcagaggaagtgaggagcagagtgatagggcgtgaagtcagagggagcagagaaggggccgaatccagcggggcccggatcatgcagggcccggagccccaggagggtccagttcacacttccagaaagtttgggctgcactgtcccagcggctgtgcccttcgtgctctcccgctcccaggactctcccagcaccgcgtgcccattttccccaaggtcctttcggccagcggagaaccccagaggcaggagcaagaggaccatgattttgcccggggtgagccgccagttccaggtccccat

SEQ ID NO: 346430 - DNA, 880 bp, Homo Sapiens
tgagaagatatttaaacctattttattgctaaatcattccctctagtctctctaccctacccaacatattctagcctccaatttctatcctggtagataacattacatttgcattttgttattccagaaggtgcataaagttctttgtttttttcttctcttttcttttttttgagatggagtcttgctctgtcgccaggctggagggaaatggcatgatctcggctcactgcaacctccgcctcccgagttcaagcgactcccctgcctcagcctttatgaacaggcaacatgtaggcagcagtagtttatgctgcttagaagagaaggctttagccagataccagaagaaaacatgtgttgtgtcacttcaggcactttttcgaagtcttttccctgaagatatcatttctgtgatgaaaagatgttgtactaaaatatctccctgatcaagccccgcggtgccgggcgagcccgagggcccggcaggaggcgggcggcagccccaggcgagctcggaggcggcgggaacgcagccgccgcgcatgccgggagccgcacgccgcccgccggggcgcgcagtcccgcaggcctcgctccaggtcgtccgaaaaggaaccgcctgctgctcctttgcaggctcgcgaggagccgcactcggaccgcctgatggggaaaaagccggtgtggccgggcggagcgagccgagcggagctggagctgcccctcccagcggggaggacggcacgaaggaccgagccgcctcccctcccgggtcccattcagacgcgaggcgcagagactggctccccgggcttcccaggcgggcggcgacgggcttgtcatggggatccgggctgcgagacggcactcgtagcat

SEQ ID NO: 346431 - DNA, 567 bp, Homo Sapiens; identical to SEQ ID NO: 161427

SEQ ID NO: 346432 - DNA, 1000 bp, Homo Sapiens
aatgacatgcttatacatttattaatcatttgtatgataaaatatatatgaatttacatctttaatatgacataaggaattataaggaatattatgaagttaaagaataaaatataattattgatacactaaaatccaagattcattccttattttaaaaaataacaataaacaagagtaaaaggaaacttatttaatttgataaggcgtatgtaccagaaatcctgtatcaagcatcatactaacggtaaaatattttgttttaattgttaacattttaaatgtatttaaaaatagagagggtttctccatgttggccaggctggtcttgaactcctggcttcaagtgatctgcccacctcggcctcccaaagtgctggaattacaggcatgaaccattatgcctggccttaacgctaaaatcctaaaaacagaaacaaggtaacagatgttgctgtcaacattccacatctgaggtgcagccttgggaagatgagactaacactgcccctatttgcacttcatataattatctatgtaagaaaataaactgaaaaggcataaaagctcacaatagcttaataattttttaaagatgaaagacattataagaatttttttaaaaagtgacacactgggacaaagtatttgctgtgtatgttagacaccccacatccataatatgtaaatagcttctgcaaatcaataagaaaaagatgagtcatttgagagaaaatttggcaaaggagtaatttgcaaaaaaaagaaaaggacatacaaatggccgataaacagctccacttatactaaaaactaaaaaatgataatatgaatgaatttaaatttttactcttcaaagtggtacaagtttaaggagtagagacattcagctaagaggatgctacagggatatgggtacttttggaatagctgggtcttcttgcaaggtgggctttccatgtgcttctgatccagagaggtggtggtgtttgtgtttgac

SEQ ID NO: 346433 - DNA, 618 bp, Homo Sapiens
tgatgaggcttcatccttgtcccatgcagtgctggagacagcatctttggtatgtattctcagctggtactcttccccttatgtctttcttgggcactgtcgtagtccatttgggctccaagagactgggtactgtgaggacagagactggcagggccctctgatgcaaagatcaaagaggaggcaacaaggagcaagtcccaggtgatctgagggttgtctctggcctaacagctggtacatctcagagtcacacttttttccctcaagttgtaaaaccagtctcaggtagctctctgtagcagtgtgaaaatggactaatacaggggtccacaatgaagtcctggattcctcagagggaggagtggggagaaatgaaatattagtccgcactgtctccctcagccagattcctgtaggttttctggagtaactgatcaggactaagtctaggaaaactggaaaaagaagagatgaaatttgttttgaactgaacttcagttttgctattctgcaactcttagttccttttttgatgctctttctatcaggatgttcacatacaaaggagtcaactaatcgctgatgaatgaccaagtgagggatgctggggtccat

SEQ ID NO: 346434 - DNA, 288 bp, Homo Sapiens
tcatctcctcctccaggagcccttggaccccgcaaaggggttggaactggatgttagggagaaagacatcgcagataagccacacttagggcaaaaagcttggtcagggccagacacattggagagtcctaggaagacatcacaggtggaggtgtgcagagaagatgcaaatataacaggagggatgatagcatgttgctcaggctggtctggaactcctgggctcaagctatcctccactccttggtctcccaaagtgttggaattacaggaatgagccaccatgcc

SEQ ID NO: 346435 - DNA, 621 bp, Homo Sapiens
tgtaattctcacaatggctttattgttgctgctgctgttctctcttttataaggaaaccacgttccccaggccgctctcctagcaggtggtcaagctgggcttgaacaggacagtcttcctgcagtgtctgtgctcccaaccagtgacaccttgctccaagggccgcagcagccctgagaggggcctgtccaggggcctgttagagtagagcattcgtccctgactgttgtcctgcagaagcagccagcccgtgcctccttctcagtgggcagatcttgggagcccctgtgtgaccagccaggaagggccaggctgggcaaactctcctcctcagagcggtagtaagggaagaacccactgagcagttctgagtcctcctggagcggtgtcttgggctgcaggaccaacccctcctcttccaggaggcacccataggtgcagaagaaaggcaggtactccaaggccacctgggccctatgtgaaaggtggagggagcttaggggcttcttgtcccttgaactggtggcctgctgttgggaggacaagggtcctgggtcatcctcctctaggaggctaggagaggttggggctccggattcagcgtcacagttctgacacat

SEQ ID NO: 346436 - DNA, 807 bp, Homo Sapiens
taatgaaacaattcaatttttgttatatttaagaagatatttgctaattcttaatattgtcatcaacaaatggccctaataagtatcttccaagaggatcgtgatcaaaaacgtaaagatgtaactctccctggattcaaggacctctttcaaattggcaaggattctgatgtaatgaaatgctggtggttgtgcaatagtttctgcactgtatctgttcgacgttattaagatgggtgggtgattagaagcacatgctcttcctgtcatttgccaacttacacacagcctcctcaggcctgtgcagtcagccagacacaaggcgaggaagccagcatggtcggcccgctcttgcccccgtcctccatgaagccttctcctcctactggcccttttggcaacctctgtgcccagctggaggatggagggatgcagaagccaggggccgtgcaaagcaggagcagccactctgcaggcagcagctctctccccctctgtgcttccgaaagcctggatttgttcacagggtagttcctgggggatgctgccaacttttaaggcctggatgagcaccctcacttcttgtagccctccctcatgttctggaggccagggaacttgtaacattcccaacagttctgagtccatgcccaaaaggttctccaggatctcagggaatactggattttgcaggatcctcctccgtgattcattcagaagagtccgtggctgagctgacaccaacgtcagctgattttgccccaacagactctgccgactgaagggatttctgcagctttgagtcat

SEQ ID NO: 346437 - DNA, 1000 bp, Homo Sapiens; identical to SEQ ID NO: 161428

SEQ ID NO: 346438 - DNA, 1000 bp, Homo Sapiens
ctaccgcttcctcacaacaacctctgctaccagcacgtcaagtcccagcagatcctgaacatgccacagggtatcaggcccccatgccttgtgctcagcaggtgtctcacggacatagtggtgagcgcccaggccctgcaaggtgcccagacctccttttgccatatttacccaggaactatcttccatggtggggaccagtttccctgaaaccaaggtaaggcccgaagtattgattgtcagggttcgctcaacagatctgaaataattcagaattcctaagcagatgtgctgcagttctctgattcgaaggtggcacagatacagaaaggacaagtaggcccctctcatcagaacaggattcctatcactggggtcagtgccgtcttccaagcccagcagttgtagggtcattgcatagttgtaccctgtctcttgtatctgcttgagaggcccatcagcatgttggctgagagttatctgtgatagatcattttcattttgtttcatggagaggtcatcatctttcatatttttattcttcaaaaactttgcttggagttgcaataatgcatctgttcttctccgttcttttaatttagtcaaaagcttcttttgccatggatcacattttggcttgatctttatgaaggaaatccagttggctttctttttcagggtcattctgggtcctgccaaacccaaattatctgctttagctattccagcttcacagtctggaaacatttgcaatctctgttgctccatgaagacgctttgaaatttttgggaaaccaaggaaaaaagttccatttccttagcagagtcccagagctcttctacgtcatatgggatactgaaatgggagagcaggagcttcagctgaggtttcagttctcctgtttctgttgcatgttgggggaggacaaaagcagcttctgttctcattggcccagaaatgctggtatccacagggtcaggagatgcagaaccctgaatg

SEQ ID NO: 346439 - DNA, 639 bp, Homo Sapiens
ataaaagttttatatgatttaatttattagtttcattgtagaacgatttttaaccagtcttgtccgagactcagaattttggttgacttttgtacttaaatttaccacggaattttctttccacttgtaagatttaagtgtttaacaagtacttgctggtaaaggcgctaacaaaagcgttgctgagtaacaccagaactgttcacacactaaaaggctgagacgggggaagagcagacgagggggatcttctctggggaaaagatagaggctaggatgtgccacccctcggaagagcagatggacagcacgactgctgccgtcccagccaccacggtcccagcaccagacaccggcttcgagtggtttcttatcttcacttcttcctctatctctcctcccactactctgcaggtagtgctgaaatcctggatgttggagctggaaacggtaattcagtacacactcccttattttgcagaggaagaaactccccgggcagtgttcctcgttcttcatacctctccacctgttcttcactccgtgaagagatccacctatgacctcaggtcctcagaccaaccagcccaaggaacatctcaccaatttcaaattgggtaagcggtcttttcactctct

SEQ ID NO: 346440 - DNA, 424 bp, Homo Sapiens
agctttgtaaacctgtaattgaaactgctggcactcacggaaactcggcgacacaagggtcagaagccagcatgaagaccagagaatttcctaaactgatagtgagatcctggtctttgtccccatcctgcctttcctctctgtcacaggtgacagcctgcacgccagatagatgcagcttctgttcgactctgtagctcttggaagacctggatctgaaagtgtgaggcgcttgtgaaggaaccattaggtggccttggtgtgacaaagcgttccctggcacacatgacctgagctttctaccaggtcctgtctccaaggggagaaggaaccagggcctcaagaggccttctggtggttggtggtgggggtgggggatgcaggaggagctgtggagggcggaggaagggttgaggtagggcat

SEQ ID NO: 346441 - DNA, 845 bp, Homo Sapiens
tgttccaccgttaactggtctgctggtccgctggtccactggtctgctaatcccaacatttggctgattgtgtgtgtgcccgctaaggtctcgggtttatataggggcaagatgttgggtgtggcaggccaaaaggcaaatttttgggcacaaaatcagaaatggctgtcctcatttagggtcgtgggtcttcaggcttgaggttggggcctttgtcgggaaccgccctcttctacccagtattttcctgtctcctgtccgtagcaaaatgagaggcaatccatgagcatggctggtccatggcagagctggatgcgaacttctcaagacagaggacacactatgctgtcctgatcccttttcatgtagcaccatgaggacagggacactccttgtctgtacctcctcaggagtctgcaaagggttctgcatggaatctgggcgatgttgactgcagaaagactggacaagtgccaggtaatccattttacagataaggagactgaggctctgtggggaaggtttagccggttggctgggcttgcgggtgagttagaggaggtggcactgctccagcccacatccctggttctcaggcatccctctctcccgggctcctccattaaactctgcgtgccagcccagggcaccaatcatgggcagagtgggctctccgctgcctcgtggggtcccagcagaattaactttcatgaagcaagttagagaaaagttaagaagagcagcctcaatgcaggttgctaaagcccagccccactgagcaggtgcacggagccagcctgctgttctgcaagcacaacccgctagatgccaaaccagtgtgttgc

SEQ ID NO: 346442 - DNA, 801 bp, Homo Sapiens
cattcttatccatattctgaattctatttctgtcattttggccatctcagctcagttcagaacctttgctggagaggtgatgtggctgttcgtaggaaagagggcactctggtttttcgagttttcagttttcctgtgctgactctttctcatctttgtgagcttatctgtcttcaatcttggatgttgctgacctttggatttttttttcttttatcctatttgatgatttgatgaccttgagggtttgactataatataaggtggattcagccacctggctttgtttctgggagattttagaaggtcaacactcagctctcaactcctggacggcatgttgtaattctggggaatttgtattgggccccatctgttctttgactccttgaggtttggaatccactgtactgggggagccaaggtgcaacagctgttgcagaatgctagtgggtgctggggtgcctgcctccctgcaggtgcttaccggagtagcagaggcaaagcagctaggggaattgggggaagccctgctggagactgtcttcctgaaggtggtgttggctcagtgatggggtgctggtgggcacaggtcagtgccttctcttgtcccatgagcaagagtgatggctcttgacaagctttcttacttatttcatcaaggagtgcctgtttctgcttcctcttccctgttcttcccaccctttttccgtcacagccgcgggcaccggtgccagggcactccgtggtcaccgtgccaggccattctgtgatgaccgcggctggaggggcggagcccat

SEQ ID NO: 346443 - DNA, 912 bp, Homo Sapiens
gcgccaagacagccggcctcactgggttttgtaagctgtgtaaggtgagatcccaagcccttgcctggagacccatcttaggaaaatgttagaacagggcaacaagttgccatttcctccctcctttctcttccccatacaaaaatcagaaagcacactagcccagtgcccagccacagtggtgaggaaaccccactcaaaatcctgggttgtgcccctgatgccaaagatctgcaaaattgggactcacctgctgcaaccctagcccagacttgtgtacatttcaggggtggctggactcatggctgcctgggacgtcagggtggtacaaagtactcttaatctaagactgtcggggtacaaagataagcatttttttcccttttcttgagagccagatggtaaatagttcagctttgcaggccataggtctctgtcccaactattcaactctctattgtagcaggaaagcagccacagacaatatgcactgaaatgggtgtggctgtattccaataaaactttatttgtgtgaacaggcagggggctggttgtggcgtgtgggctacagcctgcctcctctgctacagcatgatctccaaggaccgatccatcttgtagaccagcagctggcacacaggagctgctcagatacttgaaggaggaatggagaaggcaagcagcccccagtgtgcagacgtgagggtctcccagcagcaccatcctttgccatctcatgccgagggacaaagccagagcagggctctccaccaaggctgggctctcctccaaggaaatgtgataacaagacagaaagcactgtggaaggataggggctttggagtcccacaaaccacagtttgcaagaccaggagcatcctgcacttccttgcacacatcctgggtgggtgc

SEQ ID NO: 346444 - DNA, 513 bp, Homo Sapiens
tgtatcagaaaggatttactgggcgggtgcagtggctcatgcctgtaattccaacactttgggaggccaggcaggaagatcgcttgaaggcaggagtttgagaccagcctgcacaacagagggagatcctgtctcgtatttccaaagtagaaaatgaccaaagacgaattctccaactgcaattgtgaatgagcttggtaaacctgggccgctgcaggtcttcatcatgagctgcctgcattcttgacttctgttgagttcatggaggatgttgagtgctgctaagcttgcccttggcctgcctgtggcccattctctcctccttccaccaccacccatctgcaggagctgctggacctcaaccactgttctccctaatgatgtcacattctgcaagcctctcaatctcccccattctctctttctgcatttccaagaaggggatcatgctgcctacttcttaaggttgtcataaggtttaagtgagagaagttggtgctctggtgtctcccc

SEQ ID NO: 346445 - DNA, 487 bp, Homo Sapiens
ttttgcacaactgtgtcattttaatcgtgaggaagctgaggccagagaagctatttcactcacctgtggccataagacaacttagagggagagttgggactagaaccaaggccccctggctcccagacctgtgacatgaagttctatgggaacagccggtccctttcctgctcctgctctgcagcactctcccaggtcctgggtagccacatgatgctagtcttagagctgtgtggatgcttgtcaacctctgacctcttgttgcccaccaacttcgaaggttgtactcctgcttccttttggggtctgtggtcagtcttctcttgttcttcaggatcagtgactcattggacacttgtgtggtatggccaggggccaaggccagggagatgctcagcaggttgccccagtgggaggggtttgatgctgccccgcttttctcctcctgcaaggacataaaccattcctggtgcaaagctgcagacat

SEQ ID NO: 346446 - DNA, 1000 bp, Homo Sapiens
agaaccgaaaattccactctctgaaatgaaaaatttatttggactttcttaagagagattgaacattacagaagaaagaatgagtgaacttgaaaagagatcaatagatatcattccatctgaagtgcaagggaaaatgaaactgaaagaaaacaaggaagcgagtctccgtgacacgtggtacaatatcatgcagtacacacggaaccagaaccaagaagaaatggctggaaaagatgaaagaaaaaaaaagttgatatagtctcaaatgtagtgaaaaaacatcaacttatagattcaaaaagttcataaacccctcataaaaataaatgtaaagaaaaccctacctggacacatcatagtcatcatacagagcaaattttgtgcattcacaggtaacaaagatatgaacgacagctgactcaaaacaatggaggctcaggatgtgtgaaatggtgaaagaaagctgttgactcactattcacactcattgagaatatcctttaaaaatagtaagtgaagacgttgtggcaggttgaactttccaaatttcaccacaacaacaaatgtaaccagaataaacaatccaattaaaaagcagagtttccccaactaggaaaaaaaaaagcaagctgaaattattaactgtctaaaatatatgcaccttaaatataaagcttcagatagattgaaagtaaaagatggaggccgggcatggtggctcatgcctgtaatctcagcactttgggaggccgaggttggcggatcacttgaggtcaggagttcaagaccagcctggtcaacatggtaaaacctcatctctgctgaaaatacaaaaattagctgggcatggtggcaggtgcctgtaatcccagctactcgggaggctgaggcaggagaatcatttgaacccggtaggcggaggttgcagtgagccaagatggtgcctctgcattctagcctgggcaacagagcaagaagttcttgaggctgggaagtc

SEQ ID NO: 346447 - DNA, 672 bp, Homo Sapiens
tgcttgaaacacagtcagtactttattccatcatttaagaaaagtgtgtcagtttcctcctgtgtggctgtcctgtcctgggttctggggaatcacatctacctaaggacagaggcccttctctcatggggctcacaaggggatgggggtaggggagggggagggcaagcatgtcagatggggcctgtgagaggaatggaggagggaggtcaaggaaggcctctctcatgaggtgcacctcgtccgaattcaaaagaaataagaaccagccaggcatagaccaggagagaagcagatgaactgcaagcaccaaggccttgaggtgggaatgtgcttgggatgctcaggaaccatgcagacgccgcagtggcagaaatggaggccttgaacgggaggctggtggagaagccgtcccgcagcaggccagcccggggagctggtaaccacagtcagcactttggattttacttcaagtgagcacaggaagcctctggaaggttttggtggacagaagagtgtcatctttttggggtcactcaggctacagatgaatattaacctgtctcccccagacagcgccttcttctgtctactctctcttgaatcaccagtctcttcctgtctccaagattactccttgccagtgtggaaaccatctcttgatcctttgtc

SEQ ID NO: 346448 - DNA, 872 bp, Homo Sapiens
tttaagtgttaaccagctctatggaccctctgcctttttgcaaggtcagagggccagtgtgaaatctttctgtatcccgagttcttatccagcatcccgggagtatcgggtcacacacgggcttgaaggatcaacgcagggtttcgtcgagtggtggaggtggctcttggcgggatggatgggaaagcggaagtgggggatggagtgggaagatgatcttcccctggagttgggctgtccagctgccaaactcctttccaaccacccccagctgaacgttcctcttcctgtctccctgctgtgtccttctgccgtccctctgcttctcttcatctgctggtctgctcctggagcctggggtttgaggtttatatgggtgcaggatagggaacgtagcaggccgaaaggcaacttcttgagtgcaaaaacaggaatgcctgtcctcatttagggccaaggttcttcaggcttgagggtggggttcttgccaggaaaccaccctcttctactcagtatctccctgtctcctgtctatatcacctgtgggatgctagatgcgtttttacaaagcacaggaacatcattcagaaggattttcatgtgtgttaatgaaatatcaaaaaggccgatttaaaattgctgagatgttccttgggctggtcggtctgaggacccgaggtcgtaggtggatctttctcatggagcaaaaagcaggaggacaggggattgatctcccaagggaggtcccctgatccgagtcacggcacgaaacttcactcgcgtccgtgtgaagagaccaccaaacaggctttgtgtgagcaatgaagcttttaatcacctgggtgcaggcgggctgagtccgaaaagagagt

SEQ ID NO: 346449 - DNA, 1000 bp, Homo Sapiens
tcatttctgaaccacccgaggcttctcaggtgtgactttgatctgtccatgactctgataaggtgtcccttctccagacacattatctatatcacctttcctcaccaacccttcagcagctggaagatggcaggggccctgtggagggaggtcaaagtgtgatgcaaggacctccttgcaacacccagcaaggaggaagtgatgtgagaggagaacaggattgacgcccctggaccaggtccagagctttaagagcttgtgcttcagggagtgtatctgggtgatgccgcctctgtgaatttcacaaacccctctctgtcggaagctcctgtccttagcagagttctgtcgctgccactgctcgccagcgccagtgaaaggccggccagccagagaggccttggagacatttgcatttgggtgaaaggagctgatggtcttggactcacagctgaaggttttctgatatgaaatgctgtcaaatcctgcttcattaaagcccacaaaagctaatgcacagctctccttgcactgcccatcccacgctacctcctcatttaatctcctgtcctccccttcatcttccttcactcttctgtcatccacagctaaagccagctgctggatgctatcattgccaagagatgctgttctctttctttcatcaggcaccagaatcttccaccaggtgccaccgctgctccgtaccatggccaggtccattttggaggcaccagacccatgataaagcccaagcagagcacagtggttatcatcaccagctgccatttctacgtagagatcaattagaggcatctttttgctggggaagtggtcaggccaacttactaaaaatcccattcggattctttctgcaaaatgcattgtgttttggtcttccaatgcagttgttacgggagccgcctcggtgaggcagtctagctcgccggcctcgctcgctgggggaaggcgaagaacacgagctgagtgggagagaaga

SEQ ID NO: 346450 - DNA, 926 bp, Homo Sapiens
acttgaacctgggaggcagaggttgtggtgagccgagattgcaccactgcactccagcctgggcaacagggcgagactacgtctcaaaaaaaaaaaaaaaaacatacacagaaagttgtccttgaagcttgtatctgatatcagcactggattgtagacttgttgctgattttgactttctattcaagctatattcaagttaactgttccccttggtatctgtttaataccctgtacatgtctctgatttcaacctttagtacatgtggcttgggcactttgtggctgaggtaagaacgtgcttgtggaagacaagtctgtggcttggtgagtatgcgtggtcagcagtctccaatatgtgcagggtattaatgtgtcatcagggctgagtgttctgggatttctctagaggctggcaagggctcctgaaccagttgtttctgtcctgccggtctgtcagagttggaaagtccaagccataggacccagtttcctttcttagctgatgttttcctgccagaacaccgtgggctgttacttgccttgagttggaagcggtttggatttacacctggttgcagtctgggagccgcaggagcactcggcttccctttgcgacccgcacgatcctccgcaacccgctgaccgtacacctccggccgtcgccgccgccgcccctgccgcgcgcgcacagacaccagaggcctacagcaagatctgaaggatacgctggacggaacccttccacgggctgcagcgcgagcaggggcacgggcctggctgggtccgctgcgggcgccaggagaaggaggggcttcctcagcctcgcactgccattggccaggatgatccgcattggtctgacgcaacgcctctgcggcctggcggagctcgccccccacccgccaaacccccgcaactagcat

SEQ ID NO: 346451 - DNA, 458 bp, Homo Sapiens
attctgcaggaagtaaaattgtttttctaatcaacaaaaaaaatatcaattgagaaatactaaattagaaacaaatggaagagccaacattatatgtaggaaattttcctatccaactcacataagcttccacaaatttgaagatggtgctatcagcagtaaggtcttcatgttcttcaacatcgccacccatggtgagcccttgggctgcatcttctaactgtttgtagacaaagttccaaagacagcagaaaattttcatgctctgagcacaacatgttttcagaactttttgaagttccagtatggtgctgtcacggttggtgagctgtctgtccttgatccagtagacaatgcgagtttcttccgtcattcgccacgctgaccacttcccctctgctgcctcccgctgaagccccagcccggccgcggccgccatttcccgacagcctcttccc

SEQ ID NO: 346452 - DNA, 1000 bp, Homo Sapiens
tatctccatgagatccaggttttaagctcccacatgtgagtgagaacatgcagtatttttcttctgtgcctggcttatttcacttaacataatgacctccagttccatccatcaggcctccttttttcacggaggatttattttaggaaacttgcaattgtgagttctttctctatctctttgagatgcaaatcttctcccaaattttcttctagcctcttcctagttttgcaacccaggaatgcctttctcaagacttcagagccatccctttaaaatgcaattattgaaggagatgatacatctgtgtctcagtttttgtagaagggcagattcctagttttgaaaaattccaatgagccaacgcagatagctttacagcatttcctaacctcttcctgatgtctccagttccttctcagcatctcaccccggcacttaaaaactctccagccttttgtttcaacaaagttaagctccttctctcttccgtgttgcagtagtcctgactgagtccttccttgaaggtttaacttgtctggtgcaattttttctttgacaatgtccagatcaaatgatcccataaaaacatcgagtgtgattttagcctgtaaatggagtgcataggcagcagtgcttctcccccaaggctggggcgatggaatcagttagactactgagggcatctggaagggcatctgtgtcagggttagtcctcagggtatggtggccaatgggtttcttttggttgactgttgacaatgcgtttgttgaatggcagcctgcactaggtgacgctgaagccacagaagacactgcaggccaccgcgtgctgactctctcaccaagcaggagcgggcccctccctcacgcggagccgctggcacggacagccccgggaaggtcaggctgagcgtcctttcctctgtgcacccccggagggtgctcccattggctttctcagatagcaccatctcagggtccagctggccatggcctg

SEQ ID NO: 346453 - DNA, 1000 bp, Homo Sapiens; identical to SEQ ID NO: 346142

SEQ ID NO: 346454 - DNA, 1000 bp, Homo Sapiens; identical to SEQ ID NO: 346311

SEQ ID NO: 346455 - DNA, 1000 bp, Homo Sapiens
ggagcaggccaagagagggtagatgttgtccccttgtgtgatgtcccctgctagaaaagaagaacgcactttctcagtagctcagggttcccactgacagcatacggatttttgactagactgcctttgagattctaaaatctatggtctgctctctgctctagaatccctgcactgaagtggtgccatgtgaaacctctaggtagacccaatattccaaccctaaagaggaatcttctgcaacacaggccctgctaccctgctgccggcggcttgggagtctgcgccgcggctggcgggcgcccagtgtccagctgagcgccgcctgccgggggagagaggcgggctgggcagggacgcgcaggccagcggagaacagcaccgaacccaccacactgcgcagcgcggagaagcagcctttatttcccaccgccgcacaagccttccccaggcggaggcctggacagcccgcgcagggccgcctcctctagtagtctatggtttctttgtccttcttgttgaaagggttgtagggtctcacagttgtgaccagtcgagacaggggagcctggtgacggaagaggtcaactgccatttctttctggaagacgcggtgcagttctgaatctggtgatggggttgttgatggaatattagaatttgctgggtgggtggctgtgaaatgaaccttgccggtatatcctggaatatttgcagcacgacttgtgtttatataaagaggcttagagtaccgctgcttggctagcgatgcgatgtctcccaaggggttgtcaacatcatcagcatttgtagactgcacatgaccagtatagagaggaatatatttacttctagaacttgaactcacaaaattaattggtttgactggtgccaagaaagatcttgtttgaaatctgtcccagagctcaccaaccatctgagttattgctggcacccctttatatcttttcagagtaaaacactgtgagatggggtcagc

SEQ ID NO: 346456 - DNA, 617 bp, Homo Sapiens
tggagaacatcagactcatgtttattagggagtgagggagcacaaagggaggtctccttgcccttgttctccttaacacagctcagagtccccaagcctgggcccgtccaggtaggggtgggaggtgggcgagcagaaggccctagttctagcagcaagccaagaccgacaggtgtgcctgcctcatcacagaggcccaggacccaatccgcttctccgaccctcgccctccggcaggctcagacatcaatgggctcccgacctcggttctgcctcttcaccacaaacaccctctgtcctgacaccgtcaccagcagtgtgtgttctccaaagaccactggaggagagacacaccagacaggcgcttgaagggcacattcatgcccgcggtgcagccggaaaccgcaggctgtgctgaccagctcagagatggcactggctgcctgctcatcattctccaggtccccagatgacgccagcactgcaccttcactcagtaccaggtagccgagctggtctgggattcgctccagcccctgggtcagcgcagaagtcatcgcagtcttcggtgctgggggagctccctaccagataggtagcttccggcttcaggcccc

SEQ ID NO: 346457 - DNA, 1000 bp, Homo Sapiens
gttcccaagtcatctgggcatttatgcctctgccccatccctttacccttgggccactgccctgtcccacgccactaatctcaggtgcccgcaagccttagccatcacttccttttcttcttctccttgtccagcttggcctcctcggcctccaactggtccatcctgtgtttcatgctcttcttgcccagtggggtcttgaagtaccagtccttcagggactcctcctcctccctgtacactggatccagcttcaccagttgtcccaggaactcggaggccaccaggggccgcttggacagttgcaggaaccgccgctcactcagcaccgattggatggcttggagaatgtgacccggcgtgtagccatcggagaccttggctagggcactgatgtccaggtgctgggtcggctggatgccccgggcctctatcatacgcttccagagcacatagcgggatgcgtagtcaggccggggcatgaagaggatccgctcgtagacccggcacagaccccgcatctcggccagctgtggccgggaggttgtcccaatcagcatcacacggtctccgggagtcagcagccgcaaggccttggtgaggtccttctttatccgctttgggtccatctccttgtcttctttgggggtcttcttatagaaattcttctcagcatttccaatccaaatcacagagggctgtaggagtcgggctaccagttcagcacctgaaatcatacccagtaggctgatgggtgacgtgacctcaaagcccccctcctttgttgccacaggtctgagaaccgcaaatgccaaaagctgggggctccggaccttaaagactatatgcaccatcatctgtgccccattcctgccaggatatttgcccagcaggttttccggcgacaggtcgaacaggttggcgccagtttctgtgcacactgccttgaccagcatcttcttccccatgccagaggggcccaccaggaggatggagcgga

SEQ ID NO: 346458 - DNA, 1000 bp, Homo Sapiens
ctatatctttgtgacaatatcatgctgttttaattactgtagctttttaattactgtagttttgaaaccagaaagtgtgagccctccaacattgttcttttacaagattgttttgtctactcagggttccttgagagtccatgtaaattttagaatggattttcctatgtttgaaaaaaaattgggttttgacagggattgcatagaatctatagtattgacatcttaacaatattgtctttcaatccatgaacatgggatgtgttttcatcatctaattgtgtcttctttaacagctttcatcaacattttctagtcttcagtgcagttttaacattttgtttacaagtccctcacctccttggttaagtttattccccaaaagattactttttaaaaaaatgactacatctaagcaggagggggttcttcttccattttctcctttccttagtcaatgctaaagtctaaataactgctacatggtatttaattgttcctttttaagaaaccatacttgcaggtcaaaatagccttaataattgtgtattgtcagcttacttcaaagcagctcacgtagattccagcccaagaccaggaccacccgggaccaagaaagcacattctccaaagacaactttcactgcaaagattagctgtgtataactggcgaccattggaaaactgaagatgaaggactgtattttttttttaagttttccagcatggataatgcagttagactgagccctgagattgctaattacaacaatctcaataaatacaaataactctaacccatcatgccactggtctttggagcaaaataggagcaattatatttcaagtaagtcagttcaaaggcatgactaagtctttacaaggagccaaattgtccatgggtgttgagtggctacgaaacatgacgcccttcatctctgccaaggagcaggttcaggtgtgcgcagctgggtttggccgccagccttaccttgggaga

SEQ ID NO: 346459 - DNA, 1000 bp, Homo Sapiens
atttttagttgtctttatttaaaaaatgaaacacattagttacaaaaaccgttgctccaaatagataccgtgtatcttacaaatgttttttgcttggttttgagtgtttactgtagaaattttcaatatcataaataaatgattatttctttctcagaaagctgatttttgtagtgtagtatttacaaataccgtaagtgaaaaatgatagtttataaatttgtaccatttaggaaaaaatgttttatgtagtgttgtttgtgtaacagcaaataaaaccatttaagattatagtttttacaagggtggtaaaacctttaaaacagagcataatgtgcatcgtatgcctttctgacattagcatgcaaaaacaaagctatttgttaaaatagacttatttttgctccaactaagtaaacatgtaaaattatttttaataagctcaatagcttagaaggcatcttgtttaaaatgaaaataatttaaaacaatatctagcactgcaacccaaagctaacagacaactgcaatgccactgtgacatatttcagcaaaatataaaaaatgaaaactttccaagttgtagaacattggtttttcaaatgtaagactgttcacatgtgtattcacatgttcacaagttttccaaagggaaaatactaattttttattggcatcatccatatccaggcaggctgtagttgagtcaccaatagctactcctaaatggagctgctattttttctatgttttctataaagttatttacatctgtaacaaggattccactattttcaaagacttctctggggatagtaggcttgtctgttaggaggacagcaaacctggcatcaatatgctgaatttgcaggtttagcaaacatttcagaatttctgcttttgttgatgatcgagagtcacactggtgataatgaagcaattcaatgatatttgcactctgaaatgacttcaacattatgttcttcttatgtgcagttga

SEQ ID NO: 346460 - DNA, 1000 bp, Homo Sapiens
tttgccagcaacactttattttagaggcaaattttccatattttataccctattatgcacaatatgagcaagatctgcagaaatcccctaagtaattactattgctaccatgacagcaacaagccaggccacatctggaccgtgtgcaaagtttgcaagtgccgtggaagtggcagttgccaatttctgacaggggcatgagtttccattgagtgtccaatgctcctagacctgtccatcatgcatgggggtgattgcgatatcccttccatccagtgctcaggtggaatgggcttcctcgggacataggatacctgctcaccatgtttggtcatcagtagctggatatgaatcccatctttgccagagactggcttgggcaaattatttaaccacaccctttttcagtttcagcatctatgaaaaaaaggcactaaaacttatgggctgggcgcgatggctcacgcctgtaatcccagcactttgggaggcagaggtgggcagatcatgaggtcaggagttcgacaccagcctggccaatatggtgaaactctgtcactattgaaaatacaaaaaaattagccgagcatagtggtgggtgcctgtaatcccagctacttgggaggctgaggcagtagaatcacttgaaactggaaggcagaggttgaagtgagccaagatcgtgccactgcactccagcctgggtgaaagagcgaaactttcttacagtactgaggctgggaagcccaagatcgaggtgctggcagatcccacacctggtgaggactcatccccatttgcagaaggccaccttcttgccgtccagcatctgacgccgtgcctgacacatgagaggggcttcatatgtgaagttcgcgttgaacaatagttctcaaccgtgctggcgtactgaagttacccatttgatgcccactgtggtcgttcccattaaccaggctccaggggtccaacaggcgcctgacaagggtttcaatagttg

SEQ ID NO: 346461 - DNA, 1000 bp, Homo Sapiens; identical to SEQ ID NO: 246643

SEQ ID NO: 346462 - DNA, 1000 bp, Homo Sapiens; identical to SEQ ID NO: 161431

SEQ ID NO: 346463 - DNA, 1000 bp, Homo Sapiens
tttatgaactttttttcaaatatattttcacacattttatctaaatacataatacagaagcctgtgtgacttgggcaatgtggccaggagggcctgagactaacacatccacctcggcaaaaggacataaaatatgtcttatggtcagaaaaatcaacattttgtgtatttacttagtttacgaaaagtactgaaaatgctattactagctgaatttgtgatttccttttgaaattctgagttatccttatttttcccattttgtttttgcaccaaggagactgcagtcaaataaaacagatactacacgcactcgtcggggcagccgtactgcagaagcacgttgatgcactcctggctggaggcctgccgggcgtaggtcagcgctgtgttcccgtgggcatctcgggccatgacgtccaccccgtaccagatcaggagctgcgccaggaccacattccccttgcggcaggccagatggagcgccgtgcagccgtctccctccccacaggtctcgttcacctcctcacgggagccatgtgccagcagcaggatggctgtctgcaggtcctcatcagcggtggcccgcagcagctgctggcccagggacagctcagtgcagggtagtggggccagaaagagcttctcctcatatttggaacggatccaccgttctttctcttccctcgtggacttttctgagggttttgtctgcccctggctgctcccttcccagatgctgttggctaggtcattgccaatagatgacataaccttcctgagctcaactggccagtcatccagctccagagatcgcacacgggaaaggcgggtgccaagactgcggtggatacctgagcattcaatacacatgaggactcccaagttcaaactggcccacttaggattctgggtctcacagtccacacagtgggcgttcccacgcatgttttggatcgactgcagggccatggcctcgctctggctggtcagctgggac

SEQ ID NO: 346464 - DNA, 1000 bp, Homo Sapiens; identical to SEQ ID NO: 161432

SEQ ID NO: 346465 - DNA, 1000 bp, Homo Sapiens
tcactcggccttacgtcccacaaggagatagttaacttgactacataaattctggagaaaaggcagcaactcagagttaggtatatttgagttgtcatttgctttctttggtaagaaaggggatgttgcatttttaagatcattttcaagaagggaatggttttgtggcacaattttacactcatcaagctttgtagaattctctccactagatgcctgtgtgcttttatcaatgtacgcttgtaagttttcagtcacgtttccagatgtcaatccagttctaaaagggaaaggtgtggaggatgacttgtctaaggctcctaaggcagatgagcattgtagtccagtcatttgcttgtatccagcattgcccaacaccaactgaagctgctcttcaataggaatacaattccactgctgaaacctaaccatattaatcaattgctgagctccaggagataactttgaccccatggactccattatggtttggatcctgtctagttctattcttgattttacagcaggagagcctgttgaataatttgctgaaactgctctcatgtgtatcacaactttactgatgaacacacactgtctttcaccaaaggagcgcaactttattttacaggcatgagtggaggatgccaatattaagtaatttttgtagaaaataatttcgcgtttactccatcagggccacacctcaggtaaaggaagcaggggttttcatcttggttgttcaatcttctcttctaaatcaccagattctggctgtaggtaggagcagctgaattctttccacagagattcttcaacatggccaaaaagctacatgtcctggtgataagaccaaatgccttggcttaatggaagtgggaaagatggttctgatgtctctggtctttccactgttcaggaatggttctcattgaaattgagctcagattcaatgcttcatgggtttcctttagcctgtcccctcccaagctggcccttc

SEQ ID NO: 346466 - DNA, 1000 bp, Homo Sapiens
agctgataccaaacttgtctttattaactgtgaggctggccattcaaacaccaggtgccagagagggtccctcactcatcggaatccgggtgggatgaatcctcggaggcaaggtccctccaccttcaccctagagtcacacagagacttgccctggcggctggtgacaggtgggcgggagaagaaaaggcccctggggagcaggagaaagccaggtgccatggggacccagcgccgctggagggcagcaccagcacacagctgaggccgcctctcccggagcccggagggagctgggttccggtcgccagcggtgcccgggtgagcagttcaccctcacgtccctgctctgacgaagtttccattcttccagggtcatagagccggtgagctggggacagcgcctgtcaacgccccagagccttccacggcactggtttctccgaccttcctcttccgaagctcccctctctaagcgtccgcgggccgggaacgcctgaattctggctcccgagcaccttcttgtggacagttttggaatcacacgctcagcgagaaagggtcgtgggaaaatggtctgtgcttcctgacattgagggtgggtggccagcccttggatgttcatctttcctggccctgcccactgctgcccttgctcagctgccttcctctggctaattgggacctgcagctgcagctccaagacaatggggcatcccacctggctgccttcggtgcaggcccagtgtgcaaggaactctggcgagtcaacaacatcagcagtcttaatgtctttctctttctcatattcgggtccctggttatcttgttgatcaaaatagttgttttcagtgtagccctcagaagtgcccccagtactgacaatgccatctgtccttagagtggaggacaggatgggttgcccatctttttccacgcactctttatgtgctaccttccagggtgtcaatgcaaatgaaatgatggcacttagcccata

SEQ ID NO: 346467 - DNA, 1000 bp, Homo Sapiens
tcagtactggtgttccagcaggggctgggctgccgggctctcacgctcctcaataggggcaggccagtcgcccagggcacccataggtgtgccactctcaggggcactgctgtccaagcaaggaatgtcctgagatttgggggtacctcctttggggctccctgaggctggctccccgtcagatcctcccagccccttccggccccccaggctccactttccactggggccctcagaactgaggagacccgggccagggggccgtgaggtccggggaccctctgccgtgttctcaggtgtggggtgtgccacgggggggttattgctgagggaggtcaggccaccgcccccactacagtctgaatcatccacgttcccgccactattgcagccggcgccacagcccttgtgaagcctctcccaggtgcgcaggagccagtgggcaatggcacccaggctgatggggccaccccacagtgcccgtagctgggggtggctgccagccagcgaggtggtgagaggcgacacgtagatggggtagcccagcggctggtcacaggaggagttgatcatgttgcgaagcgcctgcttggcgttctggatgctgccacgctcggggttgcggttgcgcaggaacaccagctcctgctgctgcccggcccacaggccgcgcacgcactcccggttcaccttgatgactcggaagctgaggtggcgccggttgagcatgatgatcttgtactcgtcggaggcatcatccaggacatggcgcagcgccagcagggagggcgtgttgctgaggatggcgctgcgccatgctgggtcaccctcatgtgagatgaccagccgctcctcgttggccgcaatggcatcgtatagggctgctggctcctcatattcatctggggacgtgaagtggtcctggtgaagcttgagggccatgcgaaccccaggcgccacaacgcggtgaagcaggtccatgtcggcaaagacccactcg

SEQ ID NO: 346468 - DNA, 1000 bp, Homo Sapiens; identical to SEQ ID NO: 161434

SEQ ID NO: 346469 - DNA, 1000 bp, Homo Sapiens
gatggggatacccccaaatgatttaggaggttattttattttaatagttttttcttcctgatttttttcagttagttagagttaaatgtacctatagcccctgaatacatgctcaggtagagaaagtctccatagtataagtaagtaatatgaatgtggaatcttggaaagtgatatattttgattggaataattttaattaaatttaatgattttaattaagaattaaaagccagctagccaaattttctttaaaaattggaaactcattatggtcttaaattgtcctcaggcagccttttcctcatcaacccatagagtggtcttttgaactggtatctaaacatacctggttatgaattctcaaaagagaaagcaggtctggggcggggtggtcaggagacagattctagggaaagtgctgaagagattttcttctgaagatgatctaggaaatgcatctttatacatgattgttagctgctgtagctttctgaagaagattgtagaaaagagactaagatatatgcaagggtcaccagtttagagatcagtcaaattggaaaaagtgccaagactggatgtgcagattgttctatgtattatcagtatttttttcctcttaagaaaaaaatttactctctctcctttgtgagtaaatgcctccttaatgccttttaagtaaggtggcaacttttaactgtcatcttgtgagaggcaacctcaaactctaagcagactccctctctccctttctggtgtcttaaatcaagaactagtttgaagccaaggcaaagcaaggtttgttcatcttcctttcctgtcatttaaggtaaaacaggcaatgaactcgctcttcaaataccatagttcaagagtagctgttggccctggttccagattaatatagcagcaggcagattgccccttcttggggccaccaccctccaaagctgtgccaccaatgagagcattgggttcaagtttgcatcaaacatgg

SEQ ID NO: 346470 - DNA, 1000 bp, Homo Sapiens
cctcgaataacaatttattgactttaaataattttgtctaatgctacatatacacaattaaaaaacctttacactatttctagaaagtcagcatgtatttttggctcgaagtttctctagtgttttcttatggaattcttttgcccttgctctgttttgggcataagcttcttgttttgttttttcttccttttgttgtttcacttcagctagttgattgtataaccttagacccctttggtgccttagagcctgtgtagtctttctgtcttcaggaaaagatgctctgactttattcacgccctttagacgactcacagatgaacttatagatggtttctctttaactgttttgatttgagaattttcagagacatgaattttattccttatttctttctgcctctggtgggatctctccataaatgattttttcctctttataaatgcttcttgtaagctccctggtacaggtgtaagcctgcgaggggtttctgtagatgctgtccttggtttttctatggaaagttctgatacagctggataatctgaggcttctgttgctgatacaagaggcagaaactcactcacctgaaagaagcattttgcttcattctcgctcttctcttctagggttaaatttgcaaaatccatttcagcaatactggtatcagtggtgcttattaaagtaagttctggttcttccattataccatggccagtttctgtttcccagactggtatagagctctgtaatgaaaatgatccagaacttgcaaaaagctctgattctcctagttgagatagttttttggtgatttttggaatgtctgtttcagctgaattctcaaaatatttttcattttgagtagttaaggaatatggtgcctgaattgaagttcccatctccactgttcttacacataatcgagagtcagtttcctctacctgtggatttatgtctaaaaccctacaggtttcatttttattatcttcaatg

SEQ ID NO: 346471 - DNA, 1000 bp, Homo Sapiens
ggagaaaaataatactggatctttacttaaggcagtattacaaaggtggcttcacataggttaaagactgaatataaaaacaataacaaatcaaaacaaagtccccagagaccctcacagaggattcttcagagaggtgggagaactacaaatgtacagtcataggagctagagaggagagttttaagaaggggactgatatggtttggctgtgtccccacccaaatttcatcttcaattcccacgtgttgtgggagggaccggtgggaggtaattgaatcatgggggcaggtttttcctgtgctattctcgtgatagtgagtaagtctcacaagatctgatggttattataagggagagttttcctgcacaatctctcttctcttgtctgtcactatgtgagacatgccttttaccttctgccatgattgtgaggcttccccagccacgtggaactgtaagtccgataaacccctttctttcgtaaattgcccagtcgtgggtatgtccttatcagcagcatgaaaacagactaatacaaggacattaactgctaaaagaatttcagtgagtacacaagctaatgaggaactgataaattgagctattaggacatcatgtttgattgcttcagaacatagcaaggcaccatttaccacagatacacctaaaggattatctgcagcatgtcatgaagtttaaaatccacaaattgatctccacatttattcatagcatgtgctctgttattcctctcttcctgcaggtcactgtaagccctgagcggtggatactgttgtcacctagactggcccctgggtactcaggcttaccaatgatttgaattcctagaagtttatttggattgtattagtttcccattgctgctataataaattattgcaaacttagtggcttaaaacaatacacactttgtggctgaaaaccacacccgcttagagttctggaggccagacatccaaaatgagtcttacagggc

SEQ ID NO: 346472 - DNA, 1000 bp, Homo Sapiens
actttgatatgtttaattgagagattacattctcctccctatagcctggctgagaattgacaggttatttaaacttttaagttcaggggtacatgtgcaggtttgttatacaggtaaacttgtgtcatgggggtttgttgtacacatcacttaatcacccaggtattaagcctagtacccattagttatatttcttgatcctctccttcctttcaccctctgccctccaataggcctcagtgtctattgttttcctctaagtcttcatgtgttctcctcacttagctcccacttgtaagtgggaacatgcagtatttggttttctgttcttgtgttagtttgctaaggatgatgtcctccagctccattcatatttctgcaaaggacatctcattcttttcatggctgcgtagtattccatggtatatatgcaccacattttctttatccagtctaccactgatgagcatttaatttcattccatgtctttgttactgtgaatagtgctgcaatgaacatacatctgcatgtgtctttataatagaatactttatatttcttggggtatatacccagtaatgggatttctgggtcaaatggtatttctgtttttaggtctgaggaatttccacactgtcttccacaatggttgaactaatttccactcccaccaacaatgtataagcattcctttttctttgcaaccttgccagcatatgttacttttttttactttttagtaataaccattctgactggtgtgaaatggtatctcattgtggttttgatttgcatttatctaatgatcagtgatgttgagctttttttcatatgagttttggccacaaatgtcttcttttgaaaagtgtctgtccatgtcttttgcccactttttaatggagttacttattttcttctcataaatttgtttaagttgcttatagatgctggatattagacctttgtcagatgcatggtttgcaaaaatttgctcacctt

SEQ ID NO: 346473 - DNA, 1000 bp, Homo Sapiens
gtgtgagcaataaagctttttaatcacctgggtgcaggcaggctgagtccaaaaagagagtcagcaaagggagataggggtggggctgttttataggatttaggtaggtagtggaaaattacagtcaaaggggattattctctggcaggcaggggtgggggtcacaaggtgctcagtgggggagcttctgagccagaagaaggaatttcacaaagtaatgtcatctgttaaggcagcaacaggccattttcacttcttttgtgattctccacttgcttcaggccatctggatgtatacatgcaggtcacaggggatatgatggcttagcttgggctcagaggcctgacagtttggatctgtgtcctcacccaaatctcatgtcaaactgtaatccccattgttggaggtggggcctggtgggtggtgattggattactgggtagagttttcattaatcgtttagcaccatctccccttggtactgtataatgagtgagttcttacaagatctggtcatttaaaagtgttagcacctcccctttcctttgttcctcctgctcataccatgtaagatgcctgctcccactttgctttccaccatgagttaaagctccctgaggcctccccagaaactgatgttgccatgcttcctgtacagcctgcggaactgtgagccaattaaacctcttttctgtataaattacccagtctcaggtatttatttatagcagtgtgagaatggactaatacagttctttaaatgaaatattgtcagatatttctgttctcttgtgacaagatagccttaactttcccctcagcttgaccaaataggtttcttcctgacttcaggcccttgacctcccttaagaatatttgctttagaaaatttgctgtagttctttctatttcttgagatctaaatcttcttccagcctcttcccagttttacaactcaggaatatctttctctaggacctgagaaccacctctttgaaa

SEQ ID NO: 346474 - DNA, 1000 bp, Homo Sapiens
gttgtaagacactcacaaatctattataggtagcagaaaaagaacccaatatgagctatcttacagccagtatcattgttacacaatatgcacacataatccaacatataccaattaattattcaaaaatggcagctgaatttaatttattgagatttatttttatattcatccaaacagctatttattttcaattattggaaaaacatttcttgaagtttcagtactttttagtttgtcttgttttgttttttgtttttgttatcaatttgtttttttacatataggattattgcctttacttctgtggggtctttgtaaggtcttatacaacatctgataatactcactgatgaaatttctacaatataatgagaaaagactggtgattttctagccaacctaagttctgaaaaactcttgaaaaactaggccatatgtgaataagaatgctagatgactttcacttttagcaataacacaattcactaatgcattttctaaacttttatgaagtctcacaaaaagttataaaaatatagaaaagtctgaaagataaagagtgtattagtctatttttttactcctatgaagaaatacccaagactgggtaatttatagagaaaaagaggtttaatggactcacagtccccatggctagggaggcctcaaaattatcacagaaggtgaaggagtagcaaaggcacatcttacatggtggcagggaagagaacatgtttagaggaactactctttataaaaccatcaggtctcatgagacttattcagtatcatgaggacaggaggggaaaacccactcctatgattcaattacctcccatcgggtccctcctaggatacatgggaactgtgggagctacaattcaagatgagatttgggttgggacacagtcaaaccatatcattccacccccagcccctcccacatctcatgtcctcacatttcaaaaccaaccatgccttcccaacagtcccccaa

SEQ ID NO: 346475 - DNA, 1000 bp, Homo Sapiens
tttggatttatttctgggtgctttattctgtcccattgtgtctatttctataccaatgccatgctgttttgattattatagccttataatctgaagtcagtttgtgtgaggttttgaacttcgttctttttgcttaggattgctttggctattccgactacatcttggttccataaaaattttaggattgcttttctatttctgtgaaaaatgacaatggtattttgatagggagggcattgaatgtgtattttatttggggtagtatggtcatttcaaggatattaattcttcttatccatgactataagatgtcttttcatttgtttgttcaattttttcatcaatgtcttatagttttccttgaacagatcttttacctccttagttaaatttattcctaggtattttgtttttattgtagctactggaaataggattaccaacttgatttatttttcaactatttaattattgtatagaaatgttattaacttgtatatgttaattttgtcttctgcaactgtactgaatttatttttaagcactaagagttattttggtgtagtctttaggtttttgtaaatataacattatttcatctgcagataggaactatttaacattgtcttttccaatttggatatcttttattttttgttttgcctgattggactgtctaggacttcctaatactaagttgaaaaagagtgatgaaagtgaacattcttgttttattctagtgcttagaggaaagactctcaacctttcccattcagaatgacattagctgtggatttgtcatatgtagcctttattattctgaggtatgtttctcatatgtctagttcattgagtttttgtcatgaagagatgttgaattttatcaaatgctttttctacatctattgtgagtatatgtttctgtcttcattttcatgatgtgatacatcccttcaatagatttgcatatgttaaaccatccttgaatccttaagaa

SEQ ID NO: 346476 - DNA, 1000 bp, Homo Sapiens
aatgtctatatttggaataccttcatcagaggccaccaacctataagaaagataagacaaagtgaaaatcattgtttaaaaaaatgtttaacttaatctcttttgtattagtattcaaaccatttaaaattcaagttcttatcagggttgtttctccctaacttttcttactccctaatatggcatctaatttcaagaagaaaatgtggtcacagttcattttctgagtgtaagtctctggctttgctcatcctgtgtacctggtgtggcctcctgctgatgaatttagaggctgttgaaagatgtgggatgttgtcttagcactggcagtctgtgattttattagctcccaggatcacagttgttttccctaattcattgtctccatttctttattagcagaaaatgtacttctctgactcttgggcacaatctgcatggttcctcagttaaaatgtctaatttcctactccaccttcagggttaccttgcccccttgaaagtgcagcttagtgggaggcataaaagctcttgtctcagctacatttttgctccctcagtggtgttactgaataacttacagattgactgtgtattaatagaactcaacagggaagtatcattatttgtggctttttcacttacacaccagcctccatcaatgccgtatctgcacaggtagacaatgagtctcaaccatgagtgagtggtgagaaccaagacataaattttgagtattttgtccattttctgtatccattccatcatgacgcctctggaaaccatgcaaagagacctagcttcagtttgctgagtgatttagaaatagtagggatgagaattccattgtgccacattctcaatcctctccgtgctatgacttaaatgtaaactcaagattcaaatttctaagttttcttttgataggtacacatgcttgtaagggaggagggttagagcatcatctttatatggaccagaaaaagaaaaaaattatctt

SEQ ID NO: 346477 - DNA, 1000 bp, Homo Sapiens
agatggagtctggctctgtcacccaggccggagtgcagtgacgtgatctcggctcactgcaacctccgccttccaggttcaagcaattctcctgccctcagcctcccaagcagctgggattacaggcgtgtgcaaccacgcccagctaatttttgtattttttagtggagacagggttttgccacattggccaggttggtcttgaactcctgatgccaggtgatctactcatcttggcttcccaaagtgctgggattacaggcgtgagccaccacgcttggcctctcactcctaattgaagaggaactagccagataggaaggcattatagcagacccagcctccagccacagtcctgagagctggctcctccccactttcccttggattgggacaaaggcctagcttaggccgctaccttgcactccttctttgtctggccctcttccaccatcctggcctctctgccttttcttggtgtgtctttcccagtctttgctgcctgcctcaactctccagctaacagatggctctgtacctactgcccccaccttggatttagttttcttctcttacctatcctatcctgtcgtgtcttctctgtgaaatggttccatttcctctgggcattttctggacccagaggctcccttgtccctgcccactctgcctctgtgaaccatcacctggaaaggggccctacctgtctgctcagaagccagctcatcctccctcaggctcagcagctcccaccttattttccatctttctttttccttcttctttttcctaatgtgaataaacaccacagctcccccagtggcccaggaaaattctggcccagccctctcagcacattctcagccacacttccagaggggtgaggctgccagaggccccaccatcacctgactgccagacctacccagcctgcatccaggctggcaccagtggcacaggcctgtgtgtcagggaggggatgactgtaaaggaaggggat

SEQ ID NO: 346478 - DNA, 1000 bp, Homo Sapiens
tatacctgaagatttacaccttgggagtcaacatggtattggggcacgtacatgggaatcggagtcaaagagctctagggtcaagtagcagtttgtgagccttgtgtctttgcactagttagttacccgtgtgagcctgatactacaatatggggttgtttcgaagaccacatgagctaagatacgttaaatacctggcacagtgcatatgcacaaatactagtttctctgtcctcatttaatccattaatttccaattcactggcagcctttgaggatgggagacattaaggtggttttaatcatgttaagtaatgttacataatagctttacctctctacctacttctgcccaaatttcccttgaaaggctccagggatgtcttgagactgtatgaacaaagtagaaacttccttctgcttgaataagatttcttgcagctatttaaaagactggaagaaggctgttccatttatctattacatgacgaattataaaaaattacaaaaattattttatttgtatggggtcagaattctgtggggtcagaaactcaggcagtgcttggttaagtgatatttttgctccacatggtattaactggggtcgcttggtggcatttagcttgtagcatggatggtctggagttcaagaaggcttcatttatatttctgtcatcttgatggggacagttggaagatggtgcagctgagcccctctcccacccaatgtagtctcagggcctctctacatggtttttccagcagggtagatgaactttttacatggatctaagagacagtgagtggaactgcctgtctcgtatagcctggacccagaagttggcaaagcgtcacttctgccatattcattggtcacagcagtcacagaaccctcccaaattcaagagggaggtctacagatcccacctttcacgcaatgagtggcagataattttcagtcatctttaatctgttatgacagcacatgcttgaagac

SEQ ID NO: 346479 - DNA, 1000 bp, Homo Sapiens
cacttcacaatttatttaagaagctggcattactctgatacttaaaaaccaaaacgaaacaaaatctacagaaaaatatccctattatacatagaaacaaaatccttaatgaaatattaacaaaaacaattcaactataacaattcaaattcaattcaaataactcactatatttgattatacactgtaaccaaataaagtttattacaagaatgcaaggctggtacaatattcaaagatcaatgtaatctaacatattaacaagttaaagaaaaatcacatgataatatcagtcaagaaaaagtatttgacaaaatttaacatccattcattatatatattccaagaaacatagagacagaggaggactttcttaacttgataaagagcatatagaaacaataacaagaaaagctaaaaaagaaagaaagaaagaaagaaaaagacagaaagactgtcttgggtaaacagaagaaacaaagtaaagacatctgctggaagttttggcaagtatgatagatgaaggagatgaatgcttatgtattagaaaggtaggaatagaactgtttctatttgcaaatggtatgattgtctctgtagaaaatctcaagaaatctacaaagggactctcagaactaaaaagtgacttcaataaggtcacaggatacaagataaacataaaaaaattgtttttttacatattagcaaagaatatatgagaaacaattagaaatgcaatatcatttcagaattactcaaaaaattaaatgtttaggttcaaatgtaacaaaacagatacagaatttatataacaaaaactacaatgtttttattgaagaagaaatgttgaggaaatcaaagaaggcttaaataaatggaaagatacaccatgttccagatttggtctcaagaggtgtaaatatatcagttcttcctgaattgttacacaagtttaatgtaatttccatcaaaattagatgaagattatattataaaatta

SEQ ID NO: 346480 - DNA, 1000 bp, Homo Sapiens
ttgagtggagtttcgctcgttttgcaggctggagtgcagtggcgtggtctcgactcaccgcggcctccacctcccgggtttaggtggttctcctgcctcagcctcctgagtgtctgggattgcaggcatgagccaccatgccagctaattttggttttatttttttggtacagacggggtttctccgtgttggtcgggctgatctcgagctcctgacctcgagtgatacgcccgcctccgcctccctgggtgctgggattgcaggcgtgagccaccgcgcccccggtccaatttagtaaccagaaaggaatagatcggcctggcgtggtgcctcccccttgtgatcccaggactttggaaggccgagtgtggcagatcgcttgagcctaggagttccagaccgcctgggcaacatggtgaaacccggtctctgttttgagatggagtttcacccttgttgtccaggctggagtgcaatggtgtgatctttgcccaccgcaacctcggcctcccggatttaggtgattctcctgcctgggcctccctagtagctgggattacaggcatgagccaccatatccggctaattttgtagtttttttcttttttttagtagagacgggatttcttcatgttggtcaggctggtctccgacctcgggtgatccgcccacctctgccttccaaagtgctgggattgcaggcctgagccactgcgcccgacggaaacccagaacggaaaacaaaacaaaaaccacaaagattagccgggtgtggtgggccgcgcaggtagtcccagctactctgaaggctgatggaggaggattgcttcaccccggcttctaggtggcagtgagctatgatggcgctgctgcactccagactgggcgacagagcgggactagtttgaatgtcttctttcttcactagccgatgcatctgtgccagtaacacatggtgattctgtcctttcaccttcagttatgcctgggactgtcccc

SEQ ID NO: 346481 - DNA, 1000 bp, Homo Sapiens
ttgagtggagtttcgctcgttttgcaggctggagtgcagtggcgtggtctcgactcaccgcggcctccacctcccgggtttaggtggttctcctgcctcagcctcctgagtgtctgggattgcaggcatgagccaccatgccagctaattttggttttatttttttggtacagacggggtttctccgtgttggtcaggctgatctcgagctcctgacctcgagtgatacgcccgcctccgcctccctgggtgctgggattgcaggcgtgagccaccgcgcccccggtccaatttagtaaccagaaaggaatagatctgcctggcgtggtgcctcccccttgtgatcccaggactttggaaggccgagtgtggcagatcgcttgagcctaggagttccagaccgcctgggcaacatggtgaaacccggtctctgttttgagacggagtttcacccttgttgtccaggctggagtgcaatggtgtgatctttgcccaccgcaacctcggcctcccggatttaggtgattctcctgcctgggcctccctagtagctgggattacaggcatgagccaccatatccggctaattttgtagtttttttcttttttttagtagagacgggatttcttcatgttggtcaggctggtctccgacctcgggtgatccgcccacctctgccttccaaagtgctgggattgcaggcctgagccactgcgcccgacggaaacccagaacggaaaacaaaagaaaaaccacaaagattagccggctgtggtgggccgcgcaggtagtcccagctactctgaaggctgatggaggaggattgcttcaccccggcttctaggtggcagtgagctatgatggcgctgctgcactccagactgggcgacagagcgggactagtttgaatgtcttctttcttcactagccgatgcatctgtgccagtaacacacggtgattctgtcctttcaccttcagttatgcctgtaatcccagct

SEQ ID NO: 346482 - DNA, 1000 bp, Homo Sapiens
tgattcaaattctatttttatttttccacattaaattcataggcctagtttcaaaagtgacaacagtttctctgaaatagaatcatagaaagtttcttttgcttcatgatttttctggatatcttcaaattttactttatttggggaacatttaaaaccttatgagagattttctgagatcagtaaacaaatccctcacattaaaatgaagtagttttctacagagcaagcctcgaataatagctgtatattttctatgaactgattatactagaaaatataaccctcccacaggatgataataacagaagcttgtctttgtgcccttgtactaaactcccgtgtcgtgtggtatgacaacaccagcatgtctgtgcagattcttctccaggagggctttagaagtctctctgcccagggcctgctgggcgcccatggtggtaccataactgtgcaggggatcttctacgtgcttctccaggtctgtgccctttctgggccccggtgacaggcctgaaatgatagcctcaagtggctcccagtctgctgacttctctttgggtttggccaatgggaatgacgatgagggaccagagagtgggatgagaagagatcaggttgtgtgccctcagttcccagcctggcatgtcactatggaccggcggcacctccctgctgagggctgcgggtcctgcccagcagctgcctccacaccactcagcctccctcttaagttctagttttcgatagcgacttctactcttgccccttcaggcttgggtgtggtaaaagcttctccttggtactggccccagagtagcgctctcttactgctttttctaaaccccgtctgtacctctgtgaaaggtctctaataaactctcctcaaatcactccatttgagtgccacctgattcctgattagtacgaccctcattgatacagtcatatatgtaattaccctagagaaaataaagttaagtgcgtttggactaaacaa

SEQ ID NO: 346483 - DNA, 1000 bp, Homo Sapiens
gcggtatagaagcccatgtgaaaacccatactccaaggggctccaagtccagcgcacagtcccagaaggccccaccaaggcacccagggctggcagagcctgccccccagggatcactgagtcctggaggtggtcgtttttgaggagggggctgtggggctcgtcccacctgccgccttctgtccagcacttgcatgacacttccctctattttcactcttggcggctgcccacacgttgcatttctcttcctttcttctcgctgtcctccatcctccattccgtccaactcctagcccagtcccgggggcgcctacttcaggtctgagagtctgaactccgagatgctctgggtgtgtggatttccttcagctaccctgatgtccccacttccaagtcctgactcctttgagccatcccagggggtgtccggccactggaccacaggagcagaggcgagtctgtgactgtcatgcagtctgagtcatgctgccagggcaggtatccagctcccagcctgggagtgccgagagccaaatccactgcagattaggggtgatagtcacggtcccacgtcctctatctgtcagcaatccagtggtgatctaggataaaagcctgagagtcctatacacgcggtcatcccacaacacacttcataggccatgcaaggacacacagcccccttccctccctcccaggtaccatcacagctgctagcatgtgactgaaggctgggtccctggccagcactactgaagcactactgccagccagcaggctcacggaccttggcctgttgctcctaggggtcacctgtgctattcagccaaggagaccacagtgcttgctggcccagctgagctccgcctagcgagcccacctgcctttcctgccgcggagtctccctcttctgcttttcccagcaggaagggcccagcctcacctatgcaacctgcagccccccgccaaccagttgaggttcccctcttagacttat

SEQ ID NO: 346484 - DNA, 1000 bp, Homo Sapiens; identical to SEQ ID NO: 246645

SEQ ID NO: 346485 - DNA, 1000 bp, Homo Sapiens
cactttagaaagcatttgtgtttatttatgtttttgagacagtctcactctgtcgcctaggctagagtgcagtggcgtgatctcagctcactgcaacctccgcttctgggttcaggcgattctcctgcctcagcctcccgagtagctgggactacaggcttcggccaccacgcctggctatttttttttttttttttttttttttttttttagtaaagatggggtttcaccatgtgggccaggctggtctcaaactttcgacctcaggtgatcctcccacctcaccctcccaacgtgctgggattataggtgtgagccaccgtgcctggctgaaagcatatgtatttaaatcatgccaaggtaggacttggtgagcccttgttgtttctttatgattttatcaagttatatcactggttgatacatgtcatgctgaaaaagaatatatcaagtgtatttatcaagattataagtgggccgggtgtggtggctcacgcctgtaatcccagcacttggggaggctgaagtgggagaattgcttgaggccaggagtttgagaccagtttgaacaacagtgagaccccatctctacacaaaatttgaaaatgagccgggcatggcgtgtctgcctgtaatcccagctacttgggaggctaaggcgggaggatcgcttgagcctcgcactttgagcctgcagtgagccatgattgcaccactgtgctccaacctgggtgacagagcgagactctgtctcgatatcccttctgtataaaggacgggacaaggccactcaaggcaggcccagcattgctgaaagccctgccccctgtaggctgtaggctgtatgcattcatcggaggacacgaaaaccacaaggccatattggagaacaggccggccactgtctctgccacagccacacggctctgcttcccactgtctcctggtgcccatgcccagctccccctcctggcgctggtgctggggcaggtgtggggtc

SEQ ID NO: 346486 - DNA, 1000 bp, Homo Sapiens
acttagccaactttgcccaggtggcatttatagaacaccagaagcaaaacctatagcacacatagtttttacaaattcacagaaaacatttatcaaaatataccatgtactagtcataaacagttctcaaaatgtcaaagaactggaattgagtatactctctgatgaaaggaaattaaaacagaaatcaacaacagaaagataagaagcccccagtgtttggaagttcagcaacacatttctaaaaattttgaaattccatgcatcaaagaagacatcagagtggaaatcagaaaatattttgagtaacccaaagcgactattggagtaacccataatagactttaaatttgttgagatatttttgttgtagaatttaaaaattactgggaacttcatattctcctgtttcagtctttattttaaagaatgctttgataaaaaaaagcaaacaacaaaaaagaatgctttgagatggcatctactctcaaggactctcatatctcttgaaagacaaaaaaagatggaaaagttgcctgactgtgtgtgtgtgtgtgtgtgtgtgtgtgtgtgcacatgcacgcacatgtgtagagagaggtgtgctagggagatgcccacaaacttttttttttttttttttgagacagagtcttggtctgtcacccaggctggagtgcagtggtgcaatttcacctcactgcaacctcctcctcctcctgggttcaagcaattcgcatgcctcagcctcccaagtagctgggactataggtgcataccaccatgtctggctaattcttatatttttagtagagatggggttttgccatgttggccaggctggtcttgaactcctgacctcaggtgatctgcccacctcagcctcccaaaatgctgggattacaggcgtgagccactgggcccggccgacctaaacttctcacagtatttacctctaagagaaagaggtaagaaactgatccgggaatatgaaggtaag

SEQ ID NO: 346487 - DNA, 1000 bp, Homo Sapiens
gacagagtctcgctctgttgcccaggctggagtacagctgcactatctcagctcattgcaacctccatctcccaggctcaagcagtcctctcacttcagactcccaagtagctgggacacaggcacatgtaacgcgcccagctaattttgtatttttttgcagagatgaggtctcaccatgttgcctgggctggtctcaaactcctgagctcaagtgctgagagctcctgagctcccaaagtgctgggattacaggtgtgaaccactgctcctggaagttttcctaatctcttatcttttgtagttgcactggcttatgtggctattaactgttagtgttaattaacaggggtaactgtaatactggacattttgtcttattcctgatcttaaagggatgtttgtagaatttcacccatcatgcatgatggcagcttttggctagatgtatttataacccactaggagttaaaaaaaaatcagaaataaatattgaattttatcaaatgtctttctaacatatatggagggaaccgtgtattttctccttaacgtcttgcaaccaggaatcatatcagatcttctaatagtgattcaaaaggataaggttcatgtggttgtgtggcataattttcccactgtgctatgtttgcatcactagtcatgaatgagagagtgtgtgtgttttaacgccacctttgtcaggtttgggttttcatgttctaacagtttgaaaagaaaaaagtttgaaagttctattttattctttatctgtggaaattgcaataaattatttgtgatttactgaaaatttcacttgaaggtctgatataatttcaaagcaaaaccaaacctttctttcttttttgtgggggaagggtgggaggagtgggatgggaggacactaactcattgatactttatggtttttttccccctttagaatttattttcttgggacaatctgacaacgatgaatttaatttagattcgcagattt

SEQ ID NO: 346488 - DNA, 1000 bp, Homo Sapiens
gttacttcttgctacattttattgatattatgtatttattttgaacacagaaaagatacattgttgcttattcattgcctagtccaggaacaagaaaagctattcagctccatctttcaaacactgatgagtaggtaggaatttttatccctttttttcccccagcactctctggaattgcagaagcaggatgtgtttcttaaaagagtctcattcctggactgcattttaaaggctatacagtacaacagacagatattttttgcctagaaaacagtacaccactaaggtggtcagaactgcttgtaaacaagtccctcccccagatggagtctggggctccaggaggctgcacgcaggatgctacagaacttctgggtggattcctttcagctccgcaccagaagaaatgctatctctacagaaaataaaattcaagattgccatccttgccactcctctgcttaagaaagagattactaaatagtcttagcccttcattggaggaacagaaatgtggggaagcaggatagggtgctgttttttaacgacgagggacaagaggtgggagggaggcagagtgatggccgctggcgatgctagcagggacactgctcagagatgcttggctgccaccctctgtgggctgggtcttcaggaatcacctctgttacctgcgtggtctttgatggaaatcgctggggtttcttggtcaagatctgagccagcctttctgcagccaggctgaccctacaaatccccttctgtggcagcaaggctgagtagccttctggtcctcttgtggtggcaaggtggtatttatggggagcatatccccttcattttgtctctgcaaacacccacgtgggcaaggccagaacacagccactcaccatccccagctatgagcagccacctagaaggacagcaccagctccggggtctggctctgacccattcgcgtgcaggccacagtggtcggccaggcagggactgaggg

SEQ ID NO: 346489 - DNA, 1000 bp, Homo Sapiens
ttttttttttttttttggaaatagacaatatgattctagagtatgcataggaaagaaactacccttgaaaaattctgaaacagtaggaaaatatagaggaggtctcaccaagtgagtttcataatattatttaagggtataataataaaaagtttggtatttgtgtataaataggtaactagataaaggaatagaataaacagttcagaaattgaccaaaatagacatgattatttggtatatggcgaggatggcattgcagttggggggatacatgtgctattcagtaaattctctccagattatgtacagacacaaaataaattccaaatagttcaaatataaactaaattataaaagcattagggcccgggagcagtggctcacacctataatcccagcacttttggaggctgaggtgggtggatcacctgaggtcaggagtttgagaccagcctggccaacatggtgaaaccccgtctctattaaaaatacaaaaattagctggatgggatggtgggtgcctgtaatcccagctcctcgggacgctgctacagaattgcttgaacccaggaggcagggcttgcggtgcgccgagactgcaccactgtactccagcctaggcaacagagcgagactccatcttactaaataaataaataaataaataaatgtattagaaacggtgacttaacatatggtgggcaggagggtgggcaagtggtctcttcagggcagggtcctcgctagtgctgtgggcaccagaaggggaagaacagccatgtgctctcctctgggtagtaggatactgaaattgggatattttggggtgtatgttttttgaagctttgactgtgatttttaaacaataaaatgttctaaaaatataaaggtaaccactgagaaagatatttaatctcagagtggaagagaaatttataggtaatgggcattttagataatgtaggtttaataagactttagaaataagaagacacac

SEQ ID NO: 346490 - DNA, 1000 bp, Homo Sapiens; identical to SEQ ID NO: 161436

SEQ ID NO: 346491 - DNA, 1000 bp, Homo Sapiens
attgatacaatggacttttatatagtcatgaaagtcatgttttagaatagtcaatgctcatgatctattcttaagtaaaatagtaagctaaaaaaacatatagctccaggagttgagcaagagaggcaccctgcctgctgggcctgtctgctcccctgagttaggcactccaggaaggggttgagagcatctgagtcttggggcccagccctgaggccctcactttccctgcctactaaggggccctcaggaacaaaagcagagccaaggagttgtacagctatagagtccagtgtgctcagcccctcaagtgtgtgatggaaataggcccagagaggtcaggtgacctgcccagggccttccagccctcacacagctggaatcaggatccacggcccccagcctggagcactggacatcacatttcaggggaagtggggtgctgggctcacacgtgagaggtcttgctagctgccagcctggggctcacccgcctgctgtccaccccttcaacatcggtagtgggactcacaggcacgaggctggggccttctgctgcagacacaaagcataccgccacctgaggtccagggtcatgattcaaaacctactaagtgcccatcagtcctttcccaggttgaagggaaaacaggactccagcccccacatagtgcctggccacctgctgctcatgaggccttgtctccccatctttaggaaggctttgtgtgtgtgaaagtttttgcatgcacttgtcttaagcatcttcacggccctgcaaggtgggtttgattgtcatccccatcttacaggtgaaacaggtttccagagtctgagtagtttgccaaggcggggaaggggtgatccaggactcaaacccaggtcctccaactgccactttctctgactttctgggggtcagtaaccccagtcccttctctcctagcctgtcagagattcagcagagaccccaggtggaggctcagtgagctctggtgtg

SEQ ID NO: 346492 - DNA, 1000 bp, Homo Sapiens
tttctatggaccaaccagattaatttaaatgccacaggaaacaaactttatgtgtgtgtgtatgtgtggaaaatggtgttcattttttttggggggggtcttgtgtaatttgctgtttttgggggtgcctggagatgaactggatgggccactggagtctcaataaagctctgcaccatcctcgctgtttcccaaggcaggtggtgtgttgggggccccttcagacccaaagctttaggcatgattccaactggctgcatataggagtcagttagaatcgtttctttctctccccgtttctctccccatcttggctgctgtcctgcctctgaccagtggccgccccccacgttgttgaatgtccagaaattgctaagaacagtgccttttacaaatgcagtttatccctggttctgaggagcaagtgcagggtggaggtggcacctgcatcacctcctcctcttgcagtggaaactttgtgcaaagaatagatagttctgcctctttttttttttttcctgtgtgtgtggcctttgcatcatttatcttgtggaaaagaagattcaggccctgagaggtctcagctcttggaggagggctaaggctttagcattgtgaagcgctgcacccccaccaaccttaccctcaccggggaaccctcactagcaggactggtggtggagtctcacctggggcctagagtggaagtgggggtgggttaacctcacacaagcacagatcccagactttgccagaggcaaacagccttccaattgcccctccacccccagctgaggcccggtcacctggtcaggacagagcaactgcatctaaaagcacaagaagacagaaacctgtaagctctgaccccacccccaccccttgagaggtcagcggaccacctccttagggacagaccctggcaggtcgctgcccaccgagatttcctcaagtgtgcatagatctgagaggagtcgggagtcgagactcgagattccat

SEQ ID NO: 346493 - DNA, 1000 bp, Homo Sapiens
taccaacgggagatgcagtttatttacaccagcagccatgggggcagagggaatacacagcgtttacaaagttagctacctgtacagaatggattacatatgcaaaaataaaaatctcaagaccacaggacagcgtgagccccacccccctcccccaatgaccccagcatgcggtaatgccaggcgggtggcccctgggcatgcgggggggagtgatgcatggaaggaaaagccaccggccatggaaattagtacagaacccccccacacacactcagacacaggatacagggtggacgacacctagccggggtgggaaggatgggaattgaaacccacacagcctgctgttagagggaggggagtggggagctcctagcccctgttcaactacatggtagggggggcactctctccccagaaggaaaagggtttgttccctcagggtccctgctggaccaagcccatctcttacccagcctgggcagggggctctgccctgagggcgggccaaggaacaatggggaagtttatgtggacaaaccagttcccaagctacttcccacttctccctcctccaaccagaaggggggaaaagggagaggccacagggcaaagagtgtattagggcctgagctgcagctgcctctcagaagggagagtggcccacagccttcctcccttcaccttcagcccactccccagactgcatctggaagcggctagaggcctgctgagatcctcctctccctctggcctcctctcggagggagactacggagggccaagaatagagaagcccaggccccgggatttattctaactcctgccaaaatctgtttggctttttaaaaaataatcacaatttgtgggttaaaaaccaatttgcaaccaggcatgagccacaatcagaaccaccccagcgggagagcggagttccagacagggcattgcagccccatctctgttgttcccttaaccctctagggtccctaacccg

SEQ ID NO: 346494 - DNA, 1000 bp, Homo Sapiens
tccagttcttaaaatatttttaattgagatatgatagtatacatacttctttcttaatgcattaaacaaagaatagttgctggtttaattaccacccaaatttctaagttatgataaatgtaaatactattttgagatatctgcagccactttgatgttgcggagaagtaactgctcatactattgggttatactgattccatttataatgaaagaaaatgctaaacttcagtaaaactttcctgaaaataaagatgcaaatttattccatccaagctcccagaccccctgaattctctccatagacccatgagtgccaggttatcatgatgttctgaagaatacacagttttctgctccctctgctaagtgaggaggcagtcatctgccaagcaccaggctgggggtgctgagctgcagggactcttgggcttctgaaaccacagggtgcctttcttccaaaagctgcaggttcttagaagcagagctgcctgactactgccaacggggtggtgggctcttgtccagatccagacagggtgggagtgagtccattttcacactgctgataatgacataccggagactgtaatcccagcactttgagaggctgtgttgggcgaatcatcttgagttcaagaccagcctggccaatatggtgaaaccccatctctgctaaaaatacaaacattagccggatgtggtggtgcatgcctgtagtcccagctactcgggaggctgaggccagagaatcacaactgtggcaggtgaagctttcccatcctctgcatggggctgaccatctgcccgacaacagaaacatcctcctggatggccagcaggcctctccagtcctggagatacaggaatgagggtgtctgggaggggaatctagccagggagcctccagtgtgtcaaggggacccgccaagtcccctggaggccactgaacatcagtgtccgcccagaagatgcctcttccatggcagagtcaggactt

SEQ ID NO: 346495 - DNA, 1000 bp, Homo Sapiens
tttttagtagagatgcagtttcaccatgttggccaggctggttcgaactcctgacctcaggtgatccactcgcctcagctgcccaaagtgctggcattacaggtgtgagccaccgcgcccggcccccggttcccaccttcttaagtgtatgtgttgtcatcatgtttcaccccaaccaaaccttgggtgggcagcctctgtaggggaccactcacagctggcctgtagtcacggtcccctgcagagccctgtcccgatgcgtcgtccctgcccgtggcctgctctgcctgatgtgcactgtacgctcggctctgctgactcccgggggcctccgtcacacactgagccagcctcatcagctgtctcggtatttggtgttcagggacagggatccagcccttcctaaggtccacctgggctgagactcagaatggacgttcaaaacaaagagatggagctgtgagtgacaccgggccccacgggccgtctgtcaaccaggccttggccctagtccatcgggcactcaccccctgcaagatgtggacccactagtgcccaacgtgtgaacaagtagctggaggcctcaccccacactgctggcatggcctgcctctctcctacccaggtgtagcagctcctggtgccagttgccccagagcgtggccaggccccgggtgtctctccatcacagctgcggctctggcttcttccgggaagtgaggtggggtcgctccccgtgcagctgctgctgccgctgcttcaacgctctgtaggcctgcacggcccgctctctctcctcctccacaatccgctggcgggccagggaggcggtcagaggctgggacacaccaccggggctcagaagcatccgcagcatctgcgatctcctgccaggctggtccttgcttacgctcctctggggcctggcagtcagctctgggggctgcaggacaacctcaccaaacttcaccgtgtctcggagcaactcctgctccagcct

SEQ ID NO: 346496 - DNA, 1000 bp, Homo Sapiens
ttttttgccattagttacgtttaattttaaatataccatctttggcagcaaaaatcaagctgggctttccttctcctttataaattgcatatatttttaacatatattaacactttaaaaccgtggggtggaaagtttaaaatgccataaaataagaatcatatatgcattctttacactgtaaagcattttaccagacattagaatctgcattcagaattctttctcagaacgtaagtgttcttgaagacatatattttgtcttactaatctgtttcttccaagcactactgtactaggcatacggtaaagatatacattcaagttttaaaagtaaatactttttcctggtagtggccagggcctgcgttcctcagaccaaaaggcgcaaactggcattgctgtgatttcagaagagaagtgaaatgtataaaacgaagtaattctggggaaggaaaatgtcacaatttttcttcagtgttgtcaggcacactaacccgggaagccgtctctgggcctgaactatccaaattagtgtccgaggaagtgtgacaaatgcaggcccttccaagtttgaccctgattctcaaaggtggccaaaagccgtctctagaaacggcggtggcagcggcgtgattctgggaggtccattcaacttttaacaggtcctgggcagtgaccgggttgctgggcagtgcaaaggcatagagattggcgagaacaggcggcgatcaagcttcccagcgagggtcaaagtccagcagcttggaactagtgagccgggcttgtaggagtgaagcggctcgcgcgggcccggccggcagccgctccccagacaccggggatccggcccgactgtttcctacccacgacggcgaagacccgctacagcgcgtccacgaagccccagtactgagccaggacggggctctccctctcgatgtaggcgactacgaactgctccgccagccggtgaggcagctaattaagaaagccacct

SEQ ID NO: 346497 - DNA, 1000 bp, Homo Sapiens
tcaggacaacttgggcctgcggcagtcgccgggaggcccaaccttggcgtggaggagcccaccgaccggagaccatttggggcctggagatgccatcggagggcaggagctcatcctggagaggccaccgtgaggcctgacctgggcctggggagcttggcttgaggaagctgtgggccgaccaaggccgccaggagatgggtaggcactgagtccaaagaggttgttgagaggcaggaatcgggcttgaggaggttctgggcccggagaggccgccggaagggaaaaactgggcctggaaaggccgttgtcaggaatgagccccatgggcctgaagaggccactggcaggcgggagctgggtgtgtagaagctgctgaaaggttgggagcttggcttggggggtccacagtgaggtagatgctgggcgtgaagaatctgctgtgaggcagacgttgggactgtagaggctgacgggaggcagaggctgggcctggaggggccaccaagatgcaggagctgggcctggagaggctgcaaagaagcatgagctgggcctggtgaggtcgacttgagaaagttcagggcctggagagaaggctgggaggcaggagctgggtctaaagaggccattgtaacgatggagctgtgcctgtggaggctgttgtgaggcagtagcctcatctgcggaggctgccgtgacgtagggtatgggcctaaataggccattgtgagtcatgagcttggtctgtagaggctgactggagaaagttctgggcctggagaggctgccgggaggtaggagcataatgtagaattagtgggcgtgtcaagcttgttttcctgcaactggatggtcccacctcctgctgtgtggctccttgcggctccatggctcaggggttggggacccctgctcaagtgcatccaaagcgacccttcccacaccagtcttcacagtggtcaagggcagcaaccacttagctcccaaggcatgtgcc

SEQ ID NO: 346498 - DNA, 1000 bp, Homo Sapiens
aatgaaaaaagaaatcacttttattggcttggttttctagcattgctggtgcagtgggggcctgagctggggcgcaggcggcagtgtcactgggcccgtttgggactgggttgagccatcaggccaccgtgagaagcgactaaaaggcactctgggcccagcccaaccctgaaaggccagtggcaggagagctgggcgggagcaagctcttcccaggagacaagagggacaaaccagggcatctaagctgtgctgcctgcgccctgccccgcacccacgaggctggggggtttgatgcttcctgcatctggcagcccagggtccaggcaggtgagcaggtccgatgtggggaggacgagggtccgcgaggctaggctgggagggtggagaccaggccttccctgagagccgctgctagccgacagtggtctccagcgttcagggagcatgggcctcaggggccagcctcgactcaccccagctgtgtcacccacacaccgtgtgactttggacaggttcccctcccactcggggcttctctttcctcctctgcataaggggctgtcacgtgggcacggtcccaagcaagtcaccccgtgctccgaagttgctcattccacagtggcgtctcgtgtttgtcgtcctgcccagcgtagccgagttgcctccgtcccagtaagaattaggctgtggtgtggcgggaagggacttcctgagctgcggccccatgcttggttggctggacgtgagctgcagtcactgtgcctgatttctgcaaatggctgtgtctggcatcctagcctccgatggccatgggtgtcgggctgaggagaaggcttgggaaggctcctgacccgtcccctctcacggcccgtcacctgaggcagtccttgccgtgccagcttccccggttcagagctgagctgaatgccccggcccctcacggcccctggtgcacacggtgacccctggggcccctccacccttcctccccctgggt

SEQ ID NO: 346499 - DNA, 1000 bp, Homo Sapiens
gcactttatcattctatttccttttggggaggcaccaaggcaggagttactcctgggagcctctgagaggtggtatctgcagagaggggaaccatgggcaccctgggagtctaggtcaggagtggggctcaggctgggcttttctccaagctgacatcctttttgtagctctgctatgatctcctccagcaggtccatcttctgcaggctggagaagagacctcctctagtcagctcagtaccgggtgcagggctggggctccagcagaataaccctgtgtgtgcgccgcagcagcccctgcagggctggaatcttggctgagagcttcctcaaactgttccgcagagctctgggtccccagcagggaggctgagtcctagaggctggagttggagtgcagggaagggccctgggggaagcagggttggttaagggtcataggtgagtgaggggacagttgggcgaccctaaagttccctggtcaaaggagaggcagccagggaacttcgggttggtgactcctggagggcgggcggagggggtcacaggttagcagtgggacagttgtgcagggctctgggggtatctgtactgttgagctgggctccaggcagcagtgcaggctgaccctggctgtggggctgtggccagacccagggctgggtcctgggctgggcccagagctgctgcctagagtcaagctgctgcccaagttccaggctgcaccccttgggatcctgctgtggtctctgacctcaggagtctcaggcctggcatgggatggggcctggggacatcacaggggccacaggcctgggtgtggtcttggctctgtgagccacttgatgtacagtttctcagtgaagacctcctggatcaggatgcagaagctgtagaggtctgaggtggtggtgggcatgtcaccgcagatcagctgaagtggcagccatgggtgtagttcagggggcgggggaagccctgggcctgggcctccccagg

SEQ ID NO: 346500 - DNA, 1000 bp, Homo Sapiens; identical to SEQ ID NO: 246646

SEQ ID NO: 346501 - DNA, 1000 bp, Homo Sapiens
tgataggtgacttctttattgtggtaaaatacataaataatacaatttaccatttaaatcactttaaagtgtataattcagtgacattattacacttacggtgttgtgcaaccatcactacaatctagttccagaaatttttcatcaccccaaaaagaaaccctgtatccattaagcagtcacttcccattcttcccaccccttccttccccaaactcctggcatccactaatctgctgtctctagtctctaatgatttacctattctggatatttcatataaatagaattacacagtatatagcgtattaacaaactgtcctcaaagttccttcatgttgtaacatgcctcagtacttcattcctttttatgactgaataatattccattgcatgggtaataccatcagttggtggacatttgagttgcttccaatgagaggattatctgagtattgtgaaatgtactgctatgaacattcttgtacaagtttatgtttaaacaccttattcaattattttgggcatatacctagaagtgaaattgctggattatatggtaattctatgattaacttatgaagaaataaccaaactgtgttttttttttacagtggctgtacctttttatattacaaccagtaatgcacaagggttccagtttcttcacaacctcgccatccatcatttgttataatcatgtgccacataatgatgttttggtcaatgagggaccacatatacagtagtggtcccataagattatagcagagctgaaaattttctttttataaaattgtatttattattattattttttttccaacttttatggagctgaaaagtttatactgcctaatgacattttgatgatcctggcactgtgtgtacctaggctaatgtgtttgtgtcttagtttttaacaaaaaagtctggaggctgaggcaagagaattgcttgatctgccctattaattgcaattttcacagttaactagtac

SEQ ID NO: 346502 - DNA, 1000 bp, Homo Sapiens
gaaagcacagggtctttattatcagacacatgcagccactcctccagtgtcccctctcccacagggcaagtccggctgctccaggctctccccagtgttgctattaggtgagtagatatgaatgattatgtgtggggaagatgattcatggacaggatggggaaataatctggtgtccaaggccattaggttacaagcacaagggacggttgagtgtggtggtgagcagcggtgaagaatcgtgggggaaatggagttagcaggaagggcaaaccgctccccaccacagcgctggggccagtgccagccccaccccccaagtgagacactccaggcccccagccccacctccctcatgctgagaggcaggaggcggctcatcacccttctcacacacagagaagatcccaatttgtctggtgtggttcaacaaggagctggaaggttgggccacacagccctgaatgctcattctggtggtcagcccacctcctgagagatgaatgtacccatcataacaatgagtggcgcccctggggcaggtcattcggggggagccacttgaacaggttccaaggggctgcacacaggtaggacactgccggtctcctgggacaggggcagcttgaggagggagggagttcagcagaacgctgctgctgctggcactattgcacaggtccgaggagcagaagtgggtataggaggccacaagcaccccaggaggggctgagtggatggtggtcttctgggaattttgagccccaacagcgctgcagctttaggtcgccaccagggttgatgtgagtcctacatctatgagcagcagcatctcctgacacacctgccccacctcgcacgtctcggtattagatgtggcccaatcagtgggttctttactcaagttttcctgcttcttcaaggtggtcccccgatgacaggtcagaacatctttcatatcgcagttctcagtcatacccacgggcccaatttcctgtgt

SEQ ID NO: 346503 - DNA, 1000 bp, Homo Sapiens
gtacaaagtgaagtttaatcaaagttacaaacgttggtgggttttccgggacaaaggcccctcctcgacgcagggttcgcttgggcgacgcgtcgactctcggctccctgcagtcaaggcgcggcgcggcccccgtgccgcttccggtgctcgttgaggttggagcgttggctgaaggcgcggccgcaatctccgcacgcgtagggccgctcgcccgtgtgcgtgcgcaggtggcgcaccaggctgcagttgcgcacgaaggccttgccgcagtcgcggcagatgtagggcttctcgcccgagtgcaggcgctcgtgctggcgcagctcggagcagccgcggaaggtctttccgcactcggagcagccatagggccgctcgccggtgtgcgcgcgctggtgttgcaccaggcccgagcggcccttgaaggccttttcgcacagtgggcacgcgtagggcttggcgctgctgtgagtgcgctggtgccggctcaggttcgagcgctggttgaaggccttgccgcactcggggcacgcgtagggcttctcgccggtgtgcacgcgccggtgctccacgaggtgcgagaacagcccgaaggccttggcgcagtcggcgcactcgtacggcttctccccggctcccgacccccgtcggggactccgctcgctgtagtccccgcagggcgggcaccccagccggaaggcgcgccgcgccaggacggggccacgccggtggcgctcggccgagtgcgtcttctggtggcggtacaggccggagcagcgcacgaaggccttgccgcactcggcgcactcgtagggccgctcgcccgtgtggatgcgctggtgctgcagcaggctggaggtgcgcgtgaaggccttgccgcactcgtcgcaagcgtacagtcgctgggccggggggtcggggacaatagggcgaggtcgcgaggtttggccgcactcaggacacactgggggactcttgcccgcctgctgctgctggt

SEQ ID NO: 346504 - DNA, 1000 bp, Homo Sapiens
ccaggaaatgaaaatgacactttactgttttagtttgcatttctctgcttacaaatggattacacgcattttcatgtgctgttggctacttattcattcagaaaacatactaagtgctggctctttttcatgtcctttatcaagtttggatcatgtcatttgctgttttctttctgatgtaaactctcaaagtttgaagggtattgtcttttcctgacacatacattgtaaataattttctggcttacattttgacttttaatttcattcacgatgtttttaatgaataattttaatttttatgaatgcaagttaaaataattctttcattgtggtttctgacatgtcatgccaataagggtcttctcctccaagagcacagaaatatttgccaatactgtccttaaaatcggtcacagtttcattttttatatatgcattttacttcaattggggcttcattttactgaatgccctatttgaagcaagtttctcagttaattcttttctcaaagtgctaattatggtagattgcaaacataagtggccacataatactcccacctccttggcctcctctcccaggaggagatagcctccatctttccactccttaatctgggcttggccatgtgacttacactggccaatgggatattaacaagtctgatgtgcacagaggctgtagaatgtgcactggggcttggtctctcttgctgccctggagaccagctgccccacgaaggaaacagagccaacctgctgcttcctggggggagacagtccctcagtccctctgtctctaccaaccagttaacctgctgcttcctggaggaagacagtccctcagtccctctgtctctgccaaccagttaacctgctgcttcctggaggaagacagtccctctgtccctctgtctctgccaaccagttaacctgctgcttcctggaggaagacagtccctcagtccctctgtctctgccaaccagttaacctgct

SEQ ID NO: 346505 - DNA, 1000 bp, Homo Sapiens
aaactagaatttattggtatacaaaactccatttcatagataaagtggcacatctttgcagcttctattgcaccaagtatcgaagattaaaaacacaaaaaaagaaacatttggttttgaaaacactgcaaatagccaagtacagtactttggtaaataaaaaataaaatggttcagatgaacacaatccgtggaaagaaacaatctagggggaaggaactatggacatcagacaatggtcacaattctcaccatcgagctccatagataaggcaagacttgctaagtctatggatcacgaccccatggaggtcttaagtatctccagactgaagctagaacaagtatagtgcaattagaaagagagaaggcccctcctccacggatacatccacccctctgtaaaggagactgacgcatgccaacacttctacatgggaaaggggagcccccgggtgtgacgtctgactcctggcccttttcttctttcctctgagcttagtgctggtggaggctctggaagaggcactggggaggccaagggcccttcctactatgaaaaatgaactgtaagagtgggaaaatgtgtgaagcctcttaccagtactgctcgagggacctgccagggatcaaaccgccagctgaggtctgtggctgagctcacatgattgtcatggatggctggcagcctgccgcaggctgacacgccaaggatgagagccaggccacagagagtctgtccggcaatcgccgccagccgcaaggactggcagtgagcagcagcagctctggatcacggctatgacctgcttagaataaattccctatgcaaaagttcgtagttttacagaaatagattctttacactggtaccagccccttctcaagtaattctgcaaggatgctaaacattttcatggaaccacaaaacagtcctaacgaggacagtaaagagagggactctacaaagcagctgcttcaaagacataggtcagagcct

SEQ ID NO: 346506 - DNA, 1000 bp, Homo Sapiens
gaagcaacacattttattttgtttcaagtccacacagcaaggaaagtggggctaccgaggtggcgcagattggaacaaagagaaaactgtggtctctgattaagacatggagtctgcaaacaggggccaaaaaccttgccctctctgtaacacgagatcaatctatgctggctggagggatgttaaagtgcttggtggagactggtcccttcagtgtgctaaacatggccctgatagcttctccacacaggtaattcaccagtaaaacccatccctcacagaggagagccttggcccaagtctggaccaatgaccaggtcttcttaagtgcccatctctgggctgtaatcctagacccaggacatggctaaacctctctctccttgccagggaaatgtgaggctggggcctcccatagagaccagtggtttgtccaggctccagtacagatggctgtaaaacagagtcccagcttcccactcactcaacataaaaccagtgctgggtttccagtgaaaagaagtcccaaagggcagttccttctatcttttgtgacaggatagctcacttaacttgcaaggaagttacaaggtcccaggccaagcccctctcctcacgggagggttggaggtggggaacacgaggcctgggcctctgggaggctggcttctcactccccaagtttgcctcctttctttctgctctggtgggactgcccagttccttccaggagtcagaaatctgtgactttcaaggcactgaacagttctgtcccactcccagacggggagagggcagcccccaggctcatgacgtggcttctgcttcaataagagaagttcatgcaaaatgaacttgttctataacagagttcagtagattcattatttgtcaagtttgcttacaaagagggtttgtcagtcactggcaggaccactgcctcacactagagtcgtttccctgggtctcccatggcccgctgaggccaagcgcccccggc

SEQ ID NO: 346507 - DNA, 1000 bp, Homo Sapiens
aactgtgtcatgcatcctttaaatttgaaatttttgaaaagttaaaggttaaaacaaatcaaaagggccttgcagagctgtgttctcaccagtccccatggcagtcccttggcaattcacagatagggctcccactacccaggttagctcaggccacaagcccgggtgcctccgcctccttctcatgtgggaggttatgtaacccacccaaggtcacagaggcagtgggtgtcagtccacagtcacggctcagggcttctgtcagaacagggacctcctcggggtggggcatgtgagtgcccttgtgctgtgactcaacccagttccccgtgtgactccacagggagctcagagaaagtcagcccacacccactttcatctgaggacaccccagtggggcagagcaggccttccctgctccaccccaagcaggactcatgccccagcctttctggggcacattgctacatattttaaaatgggcaaataagtactttcatgaacatggctagtggggaagaaaggagattattgccctcattttgtggatgagaaaattgaagttaaaagagggtaatgagctgggtggggtgctcacgcctgtaatcctagtgctttgggaggccggggcaggtggatcacctgagctcaggagttcgagaccagcctaggcaacatggtgaaaccctgtctctactaaaacacaaaaattagctgagcgtggtggcacgcacctgtagtccccagctacttgggaggctgagacaggagaatcacttgaacccaggagagagtggttgctgtgagctgagactgtaccactgcactccagcctgggtgacagagtgagactctgtctccaaaaaataaaacaaaaaagaggataatgatttgttcagggcacaccactgatcccacccctgatttggatgcaggcctgactctagcacctgggttcttgggtcactgaggtaaagcacactgactcaggtttgtaaaa

SEQ ID NO: 346508 - DNA, 686 bp, Homo Sapiens
ggaaagaacagtttgtgctgtgctttattaaaatgtgcatcattcttttattttaaaatgtgcatcattgtctcgtgctcggcgcatgcgacctcagcgtggtggcccgctgggggcctcgttcccgcccagctcccgcggagccgcagggagcaggcgcactcacgtggcgcgggcccgggggctcccgcccatggcgaggtagacgtcgatgggcacgtgcagcagcgtcaggcagtggcatccagggcagcgacgaagcggcctgaccgggttgtgctccgtcgctaccgcctccgggctgtcctgggactcgggggcggcggcaaggccacgggagtctccggcctcaatggggaatctccgaccctgcgggggctcctgggcgctcatgtccaagccccggggcgctctcccggcggttgagaccggtcccaggctagaagcagctgccggagccctggccgcgggagaacgctccggtccaggcggagccgggcaggtctctgtggcgtgcccgggcccgggcgtcgaggagggcagcattgtgacccgggccgcggcgcgctgacctcacagagcacgttcctcccactggagaacccccaacggtgccccctgccgcccctggcactcagcgcgggccagaatcggggactggaggcctctggccatggcgcctggag

SEQ ID NO: 346509 - DNA, 1000 bp, Homo Sapiens; identical to SEQ ID NO: 161437

SEQ ID NO: 346510 - DNA, 1000 bp, Homo Sapiens
tatttctttatagcaatgtaataatggattcatacatatccaaaggaatagaaatcattctgccataaagacacatgcatgcatatgtttgttgcagcactattcacaattgcagatatatggaatcaacctagatgtccaccaacggtagactagataaagaaaatgtgatgcatgtacagcatggtatgctacacagccatgtaaaagaacaatattatgtcctttgtagcaacatggagggagttggaggccattattgtaagcaaactaacacaggaccaggaataccaaatactacatattctcaaatttgcctatataacaaacatgcaaatgtacccctgtatctaaaataaaagtaaacaacaacagcaaaacaaaagaattttaagatttatccactgtaaagttaaaattttttttgaaagaaataaaagatctaaataaatggaaaagcagctaatatttacggaaaaaaaagtaatcaagaaagtaattttagagatgagcgggcaagatggctgaagaagaacagctccggtctgcagctcccagtgagaccaatgcagaaggcaggtgatttctgcatttccaacagaggtaccttgttcctctcattgggattggttagacagtgggtacagcccatggagggggagcaggaggcattgcctcacccaggaagcacaaggggctggagaacttcctcccctagccaagggaagtcatgagggactgtgctctgtggcccagatactacacttttcccatagtttctacatcccacagaccaggagattccctcgggtgcctgtacagctagggccctgggtttcaagcacaaaactgggtggctgtttgggcagacactgagctagctgcaggagattttttttccataccccagtggtacctggaaccccagcaagacagaactgttcactcccctggaaaggggactgaagccagggagccaagtggtcttgctcaactggtg

SEQ ID NO: 346511 - DNA, 1000 bp, Homo Sapiens
ctagcattctggaggtgctccaaaacattttcggcagtcaatggccttgggagtgggcatctgcgcccgccggtgcctcagctcctccttgcccatgctgctggccagcttgttaaaggcagacttgtacttcttatcgaaggccactatgtccacgtggtccttgcccagagcagccattgtcaggaataatatctcacggtagattcccctctgcaggtgcaggccagtgggtgggggccctagagtttccagcaggagccccacagccttgtgcacttcattgagtccaacatggcgcagcactgactccaacagtgccaaactaagggatgcaggtacagggcctggccataccacccgctgggggatctggctgtggaccctccagagcacatagagaggtgggcagctattggggtcaggggtcagtacatcccacagcagccgtacctgggagtgcgaaggcccatcacaggaggccagcaccaggcctggtagaatactgggcaggcgtagccgttggaaataccacaaaaggttccagaagatgatggggtgggcagagggcagttcaggcaacgccagcacctcactgccctcgttctctaccagcgactccagctccttacgcagcaccagggggctcaggtatgcccatgccccactctcaacccgccgggaggctccccccatgtgcccgttgcagagctggggctcatccagagcaaggcagagccttcggtcactgagcacagggccaggaccaccagggacaggagcatctttgctgccactggcaccagcagatttggggctggggacactgggccgggaatcaagggtctggacactgagcaggggcacaaaggggcaggcgcagaaggggcaggttgtgttgaggttagagtcatcaggtgcccagccagccatgatttcctcatcatacaccagcgaatcacaggcacggcacagggagcagctggacagcagaatttcc

SEQ ID NO: 346512 - DNA, 1000 bp, Homo Sapiens; identical to SEQ ID NO: 161438

SEQ ID NO: 346513 - DNA, 1000 bp, Homo Sapiens
atgtgtgacaataacaatgtttttatgttccattcaatttttcttaaataaataagctcctttttctttctgaacacttaaaaacacacttcaataaaacataaacagattattttaaacagaagacacatagcagtttcctgataattttgaactcagtttgtaaatgaaatagggtttatgccttaatcagtgtcaatgtccttctctcacaccaggaaatgctggcctcaggcagcactccacatgcgaacttctttaactctgtgtctcacaggatggccgccatctcgtacttctcttcttggtttctccccatgtccaggtgaaatctattcaatccccaaaactcccagaatcaaaaaaggaagaaattctttcctcagggagtggggtacaaaggaggctgaatgaacaatgaccacaagttagtaattgggagaaaaggaagacaggaagacagagaaacagggaaaatgattttgaaggaagacaagtcagaggcatggctgggctggaggccccttcaggtagccgaatgtgggggcggaactgaaatgtccatcaggccccgtagagagagggagactgtgaacgtctacagccaattatcatgtctgcatgtgtcccacaacacccagcgcagatgctttttaaatacttgtcagacccacattttttgacacctattactcgttgtgtattagagatgcagagaacagtaagaatgtgtttttctcacagttcagtggagagcacagacacaaaaagcccataatagaacacattcaatgttgtctttgtacaacaaaatacagaactctcccaaagtcatttcccagggctgactggaagatgaaatggccaaaaagctagtcaggtgcaggttgtgatgattgtaacagtgatttacatgaggggtagaaatttatctggacctcttcttcattgtatctacaatggttagaacagcacagggttcataaaagatactcagtaa

SEQ ID NO: 346514 - DNA, 1000 bp, Homo Sapiens; identical to SEQ ID NO: 161439

SEQ ID NO: 346515 - DNA, 1000 bp, Homo Sapiens
caatttgaaagatatttatgggcaacaaagtaaggtcaggattagacttcaggcattcataaggcaggcactatcagaaagtgtacgccaactaagggacccacaaagcaggcagaggtaatgcagaaatctgttttgttcccatgaaatcaccaatcaaggcctccgttcttctaaagattagtccatcatcattagcaactgagatcaaagcactcttccactttacgtgattaaaatcaaacctgtatcagcaagttaaatggttccatttctgtgatttttctattatttgaggggagttggcagaagttccatgtatatgggatctttacaggtcagatcttgttacaggaaatttcaaaggtttgggagtggggagggaaaaaagctcagtcagtgaggatcattttatcacattagactggggcagaactctgccaggatttaggaatattttcagaacagattttagatattatttctatccatatattgaaaagaataccattgtcaatcttatttttttaaaagtactcagtgtagaaatcgctagcccttaattcttttccagcttttcatattaatgtatgcagagtctcaccaagctcaaagacactggttgggggtggagggtgccacagggaaagctgtagaaggcaagaagactcgagaatcccccagagttatttttctccataaagaccatcagagtgcttaactgagctgttggagactgtgaggcatttaggaaaaaaatagcccactcacatcattccttgtaagtcttaagttcattttcattttacgtggaggaaaaaaatttaaaaagctattagtatttattaatgaattttactgagacatttcttagaaatatgcacttctatactagcaagctctgtctctaaaatgcaagttggccttttgcttgccacatttctgcattaaacttctatattagcttcaaaggcttttaaactcaatgcgaacattctac

SEQ ID NO: 346516 - DNA, 1000 bp, Homo Sapiens
caaagtgagaggtttattacagaagacagtaatgctaaaaggggaggagagctaagtgaatccacctgctgcaatcagagccgagaatcccaccaccctaaaagccaggagacaacgcggccaaaagggcagaggcccccagggctcccaagtgaatacctaggttcctggtgaacatcaggaagcaggtggcactcaggccctacactcaggccaaaagagaaatcagaacatatgtggacactcagggcccaggtggctatcaggccccaggtttatatcactttcctggtagacatcagtacccacgtagacactggacttcaggtatacatcaggttcctaggtggacacccaggccccaggtggacaccagcctacaagtggacatcagaccacaggaggacacccgggccccagatagatatcagactccagaggaacacccacgtctcaggtggacatcaggtcccaggttaattccaggccccaggtggaattcaggccccacctggacacaagtccctaggtagatacataggctctgtaggccctggggaacatcaggccttaggtgaagttctaggctacaggtggacatcttgctccagttggacatctggtcccaaatggacatcggtctccaggtggacacaaagtcccaagttggacatcaggcaccaggaggactagtcctctctggtgatcaccagctcccaggttgacatcaggctacaagttgacacctagggcccagacggacatgtggccccatataaacactagtccccagtcagctagggcctgggtccccctggagcctgatgcttagctagagactggatatccacctgaggccaaggtatctacccagggactggtgtccaagtggggcctgatatccacctggggactaggtatccacctggggcttgatgtccacctcgagccagatgaccttctggagtctgatgtccaccacaggcctgggtgtccatct

SEQ ID NO: 346517 - DNA, 1000 bp, Homo Sapiens
attgttagcaagatttatattgtacttttgaagttcttctagaggcacacaatcaaccataggttttatctaacaatagtaaaagtaatcccaaaacataaaaagtagttgctgtattgaaaagtatattataggacaataattaaatggatgataaggaaaccttgttacaggtgattcacaccacttcaaaaacagcaaaagaaaaaattgatattaacatgtaccaattataatgcattattatgaaatatttaaaatggggaatccaagatgacatagtttttaactcatccacatactggaagtttagagaaactcagaatttcttatttctttttctttttcctccatagcataaaagctttgctaataagaataaatatatatattggagttttagtgtttgatcctgtgatcagttgtaaccgtgtgtcataaaactctctcacagattccatctttcccaaatcttctgatcataacacagattgccatatagacttcccttgtaagagaatatgctggccataaggcagcaaagtgaacttgcagtttcacttcttgtaaattaatgcatttgcattgacttctataaaataatctctcctgaatttttttgcttagtcaacttactgtgtgcaagcaacagaaattgtctctggttaacttttacagcacaattaaaaattgtatgaagaagcatacaaaatttgtatgaggctgaatcagcctcattaaatggtcagtgattaagggaatttatgtaggacacttcttttggattcttgctggcaccacaggactgtcgatgctgtcagcactgctgtgctgtgctgtgaataattcttcgttgctcatgttctctgtgttccccattccagattcaaagtcttaggcaggaacatcttattggccaagtatgatcataaagtcaagtcccgtgagaagccatctgcaagttgaggagcaaggaagccagtggtggatcagtctgagt

SEQ ID NO: 346518 - DNA, 1000 bp, Homo Sapiens
gacatgacactcctttattaaaacctagggacattgttataaaaactactgtatataaagacaaaagcagagcaacagcggtcagtgaaaaacacatgattattcttacattctagtattattattaggaatattattggttttggttttcccggttatcagctctcagggagaccccatgcctgctcacatgaagtcagagtttacgggagagaaaatatttccatccccctacccctgcgctgcatgcccttgtccagctggccctggggacgacacatcagccttttgtgggaggtctcctgccttgttaaggtgactgagcccctcacccttgcagcccccacctcgttactgcacattgtcgagacactgaccacttggttatttgactgtgaggtatgccactagctttaaaacgggaaatgggaaaaataggaagaaactgcgtatgagaaactgacatgcaattccaagaagaggctctctcttgggccaccagcttggttccagctgtggccagggtggccatatcatctatagttttagatcctgtgctcagggttggcgctgaccaatgtgggatcctgcacattttggaggctggtttagggtcattcaacagggtacctcattgtacaaacctaagggtcaccgttctcagtgcagtctatgtaaacagtatccctgggagcccattaccatttatgggacagtgtcgtgaatggtgcctcctggaggtgaaccctgcagcagccccggatttcagtctgtcaagggcaaatctgtcagggctttgatgtaaagataggagttttaggtacagagtaactaacagtcaaatctgctcattcatcaagcatctatctagcaccagctgttggcttggactagaaactggggtggtggggggcaatgacacctccaaggtcactttcacgggtgggacaggtaagtgttctgaattcattttgtgaatctgagcatgtctgttaggcac

SEQ ID NO: 346519 - DNA, 928 bp, Homo Sapiens
aagattttgggaccacaaaaaaaagtctatatttttatattggggggagggagtagaaaagcaagcccctatactgggccctattcagtggcagcttcttgttccataggattaaggaagactctgaggaaataaaagttgtttggaaaaatccaggtgtagttgctttgtatgttgtgatgggtagaagggatgaagtgaagtgtgaaggcccctcataccctccatcttgcctcagactatgtcctggaaccctggggcggagaaagcgccactttcattcctgcttcttgggattgttgacggccacgtagtgatagagaacgacaagcaagaagagcgacacgcccagcatgttggcgaagatggcgagctgcacgtccgtgatcatcctgaccagtccggctcggctccgacgccaccagcgaacaagcccgaagtcagagacctggaccggaacttcgtagcgccagctcaggcccgaacaagccgcttccggcggggggcgcggtcgggacggcctctctagccccgccgtctcgtcggctccgcgcggcgcgttacggccgcggctggggcggggcctcgggcgcggctgcggtgggaggtccagccgtagggggtggggcggggctgcggacgcgcgcctgggcccggcaccgcacagctggctgcagctggcgtggctcgggacgcggctagcgaagccgtggtggccgcctccccggagccgaggagtgggccttcgcttcccggcccggcccaaccaggtgcttcctttgggtcctgccctcagtgccctctccctggcccggacggcggggacaggggtaggaggcgttgtagaatggggacagggctggtgctgccgggtgctcctttctccggcgccatcctttgtgacccacatgcaaccaagtagaaccat

SEQ ID NO: 346520 - DNA, 1000 bp, Homo Sapiens
attttactttaagttctgggatacatgtgcagaaggtatggtttgttacataggtatatgtgtgccatagtggattgctgcacctatcaacccgtcatctaggtttaagccccacatgcattagctatttgtcctgatgctctccctcccctccccacaccagacaggccttggtgtgtgatgttcccctccctgtgtccatgtgttctcactgttcagctcccacttatgagtgagaacgtgtggtatttggttttctgttcctgtgttagtttgctgaggatgatggcttccagcttcatccatgtccctgcaaaggacacgatctcattccttcttagggctgcatagtattccatggtatatatgtacaatattttcttcatccagtctatcattgatgggcatttgggttggttccatgtctttgctattgtaaataggagtgtacactcttgaccactacactggagcaacaggccctagaaatagtgaccatattcattaaccaattagaaactagtatgtggagggtattgggaggaggcttaagactctgaaagatagtctggcttcattttaaccagggaattaatcatccattccatgcagcatcattttcagaaaaggcattccctgctgctcaccctaagtgtttgtattctatagctagataggccagtgtataaccactccttttttcaacacttcttccaacaaaaacaaaacagagcatggcgagctgagcttattatactccttaccacgggcctctgatgttccatctgttagtaggataccaatccatggctcctcactttctaggagtctcagaggagacagtaggccctggagacacccatgatacaaaaccagagcgagatgaagacgctccactcacctctcccctcattcttgcccagaaaatttgctctatcttccccattttttaccctgcccacattacccaccacaattagacaaaaggcctcaagaagtc

SEQ ID NO: 346521 - DNA, 1000 bp, Homo Sapiens
tcacggttttggagagtccagattatgggagcagttgtgtaacttctgcagcgttttgagcttgtgcatccggggcagcatggtaggcatttcccaacggctggtggcaaggaggcacctcagcatggcctctgcagttgctggctggtagcagcagcagcaataacataagaggcttctgcagtcgtctcctccagtgctgaccacatacttgtcatcataagagaaacggatgttcgtcacgtgagccgagtgaccgaagtatcgcttatgtttggcaaatttttctgtgcatggaaaatcaaagagcttcaccagcccaaagtcatctcctgtgacaatgttcaggccagcgtgggtcacacatgcgcagttgacatcagccttgtctgcatttcgtggccagattccaatgacttcatctcccaggacgcttgtccaggaggcccaggtgatcttctcaatgaccacggcttcagttacctgcttccccagggggacctcatgcacctggcgcttataggcacctgttgacacctgaatgtatttgccatccgcagaaaaatccatctgaatgacaaagcttgggatatctttgcagtagccaatgcggttcagatttgtgccctgagtgaggtcatagaagtcaactgtgtgttcagaagaaccaacggctaagaatcggttgtctgggctgattctgatatcttggatagcagatttccggtctcgttttttcccccaaactttcaggctgttcaccaacaagatgacaaactctccattcttcatgccaatggccaccatctccccatcagggctgtaggctgcacacctggccgcatggcccaagctcaccttgtttaacagcttcttgtcagccaggtcccagatccgggctgtgccatcgttgctggcagagatgaagaggtccttggaagggtgagtggccaggccccagatctccccttccatgtgaccatcaatcaggatgttagaa

SEQ ID NO: 346522 - DNA, 1000 bp, Homo Sapiens; identical to SEQ ID NO: 161442

SEQ ID NO: 346523 - DNA, 1000 bp, Homo Sapiens
gacatttgaatttcacgtatcttcattgtcatttttatattttatttactattttgctccacaatttgagtcaaacatgtgatgagagttctaacttgatatgtttacttcagtcccaaacatagtcatctttggtcttttctcagatttggcctaaaactcgtagtttcattgatttttttttttaactaggcattcttctatgttctaggtcttcaagaaacctccatacccaagaaaaaatagaaagcaacgatgttctactatggtgccaaaaatagttgaacatcgacatcaaaaagattctttctgtctgcttattcacatattctggtttgaattaaaagtgatgaaattatcctaaatacagttggccctctgtatccatgggttccacatccacaaattcaaccaactgtggatggaaaagacttgaaaaagatgagagaaaataacaatatgacaataaaacataatacaaataaaaacaatacagcataacaacgattacatagcatttacattatattagggattgcacaagagaaggtatgtaggttatatgcaaatactgcaccattttacataagggacttgagaagcatggattttggtagccacaggggtcctggaaccaatccctcacagacacagagggacaactttacagtagatgaacacaaagatgaaagggaaagtcttacctaggtctgcggggagaagtggaactccatttttgacaggtgatgccattttttgttttggacatcgtccctctgtagttctttccattcccagtcttgcactctgaaagatacatttacttttcaaataaaactacatctctcatcctaatgattatggaggacttcttgttttcagccattatcacacattgttgctctttactgtgatattggaatgccctgcaggtgaattctttgtcctcctcacattttgctgcacattcttctctgcttcctgcccccagctgcttctt

SEQ ID NO: 346524 - DNA, 1000 bp, Homo Sapiens
gcaaaaatctttttttttttaaacttaacttgtcatactttgttattaatatacaaagacaacaaacttttaaaacattacatttactaagattctggcaataagacacagcataccaggcttgccactcaacttgttattgtaagtctcagcttcaatatgaagccgttttttttttttaatcaaaaccctgctttttacatgctaaatatcttggcaagtaggccattaaacatagtaatgaacttaagacagcaagagtgaggagttaacaaaagctaaacattgcagcctaaacaaaattcatacaaaaaaataaactatcactagttacataaaattttcctgactggttaaaacttagtataaaacatgcattttagaatctttagctatcaagttcaaaaagtaccaatgtctatttaaaataattcctctcccaagccaaagtgtagtcaaaattaattcaaatgacataacacattctaatgctaaaaaatattcattattactgaagtggaggtaaatcccagagcttttggggctttctcatgctgcaaatggctgtttctctggttcactcaaagcagcatatgacagcatccaaagatgacactaagctcagtaaagggcaagactgctggtagccagctctgacctccccgtgaagcatggctactgtgtccataatacaggatgtgtgaggatcaaaggcacactattctgctagctaaagagatagcaaaccaccccccaaccctaaaagctccttccccaggtaaataaaagtatacgaggggaaaaaattaaaatacacttatctacagagtaagggttttgaaatattaatgtaatccctccttcaaaaattctaactagagtcatctggtcatttctgattacatcttaaagatgtatccagattcaatttctgttggtttatccttagacgcttctagtcaaaagtattaattttattcccaaatatcttaaccactag

SEQ ID NO: 346525 - DNA, 545 bp, Homo Sapiens
ggacttctttttttttttttttttggagtcatgtgcgcctttattagctgagccattacttgagagggatgaagcgggaggagtgggtggccccgatgccgggccggccgtgctttacgggcttgtaggtgatggagaactcgcccaggtagtggccgatcatctcgggcttgatctccacctggttgaaggtcttgccgttgtagacgcccaccatgctgcccaccatctcgggtaggatgatcatgtcccgcaggtgcgtcttcaccacttcctgcttctccatgggcggcgcctccttcttggccttgcgcaggcgcttcagcagggagtgctgcttccgccgcaggccccggttcagccgccgccgctggcgcgcactgtacagctgcatcggctgctccagctgctcgtaggacatgtccagcagctggtccaggtccacgccgcggtaggtgaacttgcggaaggtccgcttcttcttctgctctacttctgccatcttgccggatcctcagaagagcagcatactggactttcagtct

SEQ ID NO: 346526 - DNA, 1000 bp, Homo Sapiens
tgcagacacaccatggggtgccacagctctgcagagcctcaaagcggacagccatctgtctcagtggctcagagaaaccgagacagagagacaaaataacctccctgtgatcagacttagcaaatgctgggtggggagtaggttcccaggggagacactgttttaggtcctgcttgtcttagtaagccccactgtctagctggtaactgtgagtgtggcaggcctccagcaggcgggggtttctgcagtctccatggagacctgggggccagtaagacggagccaggccccagtctgtaggttagagccagggacagcgcaagggtccagccttcatcttgagtctccggtgggctcagcaggagtgtgtacgactccatcacaggcttttgacccccttccaaggtcatcacagtctccattgggaaatatggctgttagtggcagctcctcctcaggttcctggaagtcttcctgagctgagcttctgcaggcagcaacatcctggttcttcctccggctccagggaccccaggaaaagcaggctagcagtccggggaggcctggcctctcccaggctccttccactggttgcccggctccggcggcttgcagggccctgcaggcggccgcctggacggccaggcaggaggccgggaggccggggcagtaggcggccgcctgcacgggcccccccgcctggcggccgaacacggcgcgcaacagcgcctccagcagccgcagccccggcgccaccgcgtcctctggcccggcctcggccaccagcaccccgaccagcgccgccccggcccgccgccggccgcgcacgtcccgcagcatctcccgcaggcggcgccgcggctcccgggcggccagcgacgacgcgcggcacagcacgaagaccagcggcgagcggatggcgcgcgccgccgccgccgccgcccccgccgccccagccgccctcgccgccctctgcgccccgcgcgccgccccgggcccc

SEQ ID NO: 346527 - DNA, 1000 bp, Homo Sapiens
gacacagtcttgctctatcgtccaggctggagtgcagtggcatgatcttggctcactgcaacctccgcctcctgggttcaagcgattatcctgcctcagcctcccgagtagctgaaattacaggcatgcaccaccacacccagctaatttttgtatttttagtacaaatgggctttcactatgttggccaggctggtctcgacctcccaacctcaggtgatccacctgccttggcctcccaaagagttgggggattacaggcgcgagccaccgtgcctggctgctattcttgaagactatccccaggtgacaatccctgcagtgtcattctactgcagcaagattaaagccaatctaatagctggcaaatttgctgtgaaaacatatcaccttctgttacttgctgccctaaggaaaatgtgcaatagaagaatctttcagaacaccagttcatttttttttaaaaaacacaaagtcacatgaaacaaagcacacttttttacatatatgaaaggaagcattcacaggattttccatactcagtaatgaataagtaccccaagaactgtatttacttctgtgaatctttgttgcgtgatattttactgaagtccaagtgagcctgggtggtcctgcaaagagtattcacacagagatatattgtattacttatgctattaataaattggctttattagccttatcactgacttaatttttgaaagaaaaactcaaactaaatcaataacctgagtattatttcccaaattgatgacattttcatttgggttttaattcagcaaattcccctcctcaaaagaggggaatgctgtcacttccccagccaacatacaggtgacattggaaacgctgctaaatgccactgtgccttagcttctcctatgtatgcaaggggtcactgcccaggtaatgactctgaggggctggcaatacagcataagaaagtcactccaaattctgttaagcaaggttttccgca

SEQ ID NO: 346528 - DNA, 1000 bp, Homo Sapiens
gagatggagtctcactcttgttgcccaggctggagtgcaatggcacaatctcggctcactgcaacctccgcctcccaggttcaagcaattctcctgtttcagcctcccaagtagctgggattacaggtgcacaccaccatgcctggctaatttttgtatttttattagagacggggtttcactatgttgaccaggctgctctcgaactcctgaccttcggtgatctgctcgcctcagcttcccaaagtgctgggatgacaggcatgagccatcgtgcctggcctctccatcttgttaaacatcagcgccaggaaccgcttaaaggatgacttcttcttcttgtacttgtccggggagtcgctgtcgatcaggagagagggagagctctttgtgatgggcttcttggtgatgcaggccaggtcgaaaggaggtgggatgtcgaccatggaagaaggcgtggaggtgccgctggatggaaggtggtttctctgggagaaactcccagacacgacagagagatgttcctctttcctctttatcctgtggtcatctaaccccgacccttctggctcccagtacacagagatggaaacaggaatctcttggccttccacggagaacgaccgagggtataaagtgaaggccctgggctttgctggcaaggccctgctggcttccaggggcctcccttcagtgacaacagctctttcctgcctcctctgcggcacctccgatgccaggtgctgaggaacctgcctcagatctggtttctttgggggcagtttctgggacggtttctggccaccttcccagagtggggccaggcccttgtgtcgatgttcttcctgtccacggagaccaggctgccctctccttcacagttcatttcttcttctgagccataaccacccagggtcatccaatgcagcctgccctccttctcaaggggctgccagaccggcaggcccactcccatcacataggggttggccagtgtgtc

SEQ ID NO: 346529 - DNA, 1000 bp, Homo Sapiens
ttttttggttcatagaaagtattttcttctagagtctctgcagattggagtactgcttttattcgtgggtttactgaagcaccagtcagggccataaaaaaagttagaaacctatgttgattctcagaaaggtaaagtccaaggtgatgtagaaatatgctgccaccacccccactttcaacatcctactgcacatacaaggatcagcaaatgaaagaataatccatgttagcacactgcggaagtcaaaactctgtatttctttaataatcctaaaacaaatgctattgaatggactgatttaagtgctttgtttattttatggaaatatttccaaggaaaggccttctatgtaatgccatgaaaaggcttttataaaagtatatgaattatatgctgaagttgaacctatcattgagcaagtactttctggataaaataccaatatactatcacatagatctactaatttaggctagtcctgatcctagatttccagctgggatccggaattatttagcaattatttagctgagcataaatatttagagacagtttttgctaacaaatcttgcctctaggagccaggcccataacaatattcttggcactagctttccacacataaatcaaggatctaacttcacaccttctctatttcatttttactattttgtgtggtaccatcactcctttttaaatttctggtctctttttgcagtatcctgtagaacagaaatctgactgacctcatggggcctgtaatgagagtctgaaaagttactcaagagaaacaggttgagttctttttgaatattccattttggatttgtaaaatttataagagtttgggattttccaggcctgggatctcacttttgtaaaatgtgctcctgttaagcattctctctgttttgtgtctgtgcacacatgtgcacaagtgtgtgtccctgatccatgacatggaaggctatgaaaagcactaggatatttcccaacc

SEQ ID NO: 346530 - DNA, 1000 bp, Homo Sapiens
taaagacacaagcacgtaaatgtttattgcagcattattcacaatagtaaagacatggaatcaacctaaatgcccaatgacaggttggatacagataatatggcacattgtggagcaaaatttaaatattaaatttgaactctattgaacagggacagaaacaatggtcactaagtcctggaacgagttgtgtgagccccttgaggcattcatccagtgctgtttcggagaactagttattgaaaaacaacagacaatggcaaaaacaagttgtcctttttgtattccttgagcccagtcaggaagggctttcatgaccgggcctcctgacaaacaacttgttacaaaaagagctcggttcccagactgcgccgaagtttcatgggacctctcctcgtctgtgcacggactactggtcaattctggagcccaggctgttgcttcctggtctgttgatgaatcctccatagtctcagttgaagaaacagtccaatgttaagcatggagaaccagaatgtcttccttgtccttcctgagttctgaaagcttttcttattaaaagttctgaattctgattcttgggcgtgagagtaaagcaagacggcagaaagaaggctccactgattgtccctctggttttaacctcagatcactgaaagaggcactgaagagacagaaaaaacagtcctgaaatcaccgtttcctcatccccagcagtgatggcatgctgcagagatcaactctgggttcttttctcttttttaattttattttttaaacctctcatatggtgctgcatgcccaagattttaatgtccagacactgaagaacatctactaccatcaacaccatccaggaaaaaaacatgacctcaccaagtgaactaaataaggcaccagggacaaatccggtgagctccaacacgtctggcagccgactttacagtggaagccctgtcctgagccggccgatgtggtggaagctcggagctcgggagcc

SEQ ID NO: 346531 - DNA, 1000 bp, Homo Sapiens
tcagaaaatgacaaaaccatattttgacaagtttatttaatccagtgtggtagaaaaggcacaattccaatgtatcatttagaattgaatgtcattaacctggctttgttctttggaagaaacaacttctttaaagagcttctttggctctagaaaaatttcaaacaattaaaataagaaaaaattttaaactggttttttataatgaaaatatacatacctttgtgtatagacaagcccatgcccattaaaataaagttatcctgtaacataaattttattaaataatacttccccacagatgagaggcacgcaacacctatggacaaaagggagttacagaggctgcttaaaagatggagaaaagcctgagattgaaggaggaaaaaaacccagtatttaaagtctataaaaaatactcaaaatagtgggtcttcgagtttaaaatagtcattgttattttacattctaaagtgcatgtaggttgatattttttaaaatatcattggagaatttaatctttctttataaaaatagagcatttttctgctttctggcaaaagttggggataaaaggaaaaaaagttgtcaaaatgtaattttcagtccaattcaccaggaaaacatgcttgtgaattgtgcagtaaaaggtggtaatgactactggaagctaagtcaaaggtgatttcctacctgattttacttacttaaataaaagttacttacaatgggagtgaaaaactgaggtttctgttatttagtagagaaatcaactccacgtttacttaaagagatggtaaggtcaaggttcaaatgctactgtgttttaatttggatatttgaaatttctcttgaggcaaaaaaaaaaaaaaattgatgcctctccttaaatctaggatgaagtgtcaacatggagacaggtaaccactgttatagagtcttgtcacctaaagggatgtcttggttaacacgtaacagtgcaagtttggccataggttat

SEQ ID NO: 346532 - DNA, 1000 bp, Homo Sapiens
caacaatgtgcacagcagctttatttatgatatccaaaaactggaaacaaatgtccctcaacatatggatggataagcaaatactagaatattacacagcaataaaaagaaataaatgtctgacacatgcaacaagaccagtgaatattaaaaatatgttgcacagaaaaaactagacataaaggcatacatgctatatgctccatttatacgaggctcaaggcaggcaaaggttatttatggtgatagaaatccaaatatggtttcccttttgaggcaatattgattggaaaaagatatgaaggaaccttctgaagtgccagaaatgctccatatcttgatccaggtggtggttacatactgcattacatgtcagaatacatcaagctgtatattgtttaccatctgtaagttatactgcatacaaaaatatggaacaaggctaaatgcccatcaaccaatgagtggataaagaaaatgtgatatatatacaccatggaatactactcagccataaaaaggaacaaaataatggcattcacagcaacctggatggagctggagaccattatactaagtgaagtaactcaagtatggaaaaccaaatatcctgtgttttcatttataagtgggagctaagctatgaagatgcaaaggcataagaatgacataatggaccaggcgcagtggcgcacgcctgtaatcccaacactttgggaggccaaaataggcagatcacttgaggttaggagttcaagactagcctggccaacatggtgaaaccccatctctacaaaaaatacaaaaattagctgggcatggtggtgcatgcctgtagtcccagctacacaggaggttcaggcaggagaatcacttgaactcaggaggctgcagtaagccaagttcatgccactgcactccagcctgggcaacagagtgagactctgtctcaaaaagaagaaaaaaagaattatataatggggactcggggggggaagcg

SEQ ID NO: 346533 - DNA, 1000 bp, Homo Sapiens
gagatgaagccttgctctgtcgcccaggcttgagtgcagtggtgcgatcttggctcactgcaacctccacctcccagattcaagtgattctcctgcctcagcctcccaagtagttgggattacaggcatgtgccaccacgcccggctaatttttttgtatgtttagtagagacagggtttcgccatgttggccaggctggtctcgaactgctgacctcaggtgatccgcccacctcggcctcccaaagtgctgggattacaggtgtgatccatcttgcccggcccttgaaattccttttaatagagtttgtttcttcctctgataatttaagtgacatctatccattggggaaaatgtggcagacacagaaaggactgaagaattgcataacatcttctttcatcttgccggccagagattaccaccattaccattgatgtgggtttatgtatgtgtgtcattttacatagttgatgttgttgagaagtagtgaagaacagagttcttggacccagacagcctggatttaaatctcagattgaccactcactagctgttcaacattggacaagttacttaacctctctgtgctgcattttatctttagaaggagatgatattatcacctgccttgcagtacttttatgagaattaagacaggttatttgtatgaagtgcttagaactgtgcctcattgaaaactttattcttcatctgattgtaaattttactattgttattcctctagcgacttttctgttttgttctgattaatattatatcctctatgtaggtgattctgactaggattacaaaccataggtcatcacagatgccagggagttgctgaacttgattacccatttttcagcaatttatagataaactcttgcaagaaacacaggttgagagaagcagaactcctctctggatgcggacatctgagcagaagggactcggggccctcagcttcctcctctgacttgacctcatttgtcc

SEQ ID NO: 346534 - DNA, 1000 bp, Homo Sapiens
cattgatcttggacccttgaataccagccatatatgtgctgtcactctgttgttatcaggactggaaacaacataaagttttcatatgttgctgaaaacagcattttcttcctctttgtctgatctttcatagcttggtttcttctgctcttttgtgggtttgtggagtacctttaggttaagcacaggaccatccatcctcttatatttgcttggtgacagtatgcatgcagctgtattattcaatatagaggacaagcagttacacaaatctaaaaaaagggaggccgggagtggtggctcacgcctgtaatcccaacacattgggaggccaaggcgggcagatcacctgaggtcgggagtttgagatcagcctggccaacaaggtgaaaccccatctttactaaaaatacaaaaaattagccaggcatggtggtgggtgcatgtaatcccagctacttgggaggctgaggaaggagaattgcttggacctgggaggtggaggttgcagtgcgtcgagaccgcacctctgcacaccagcctgggcaacatgaacaaaagtctgtctcaagaaaaaaaaagagttgcctgaggcatagggtaaaggtatcacctaagaattgggatgatttattaatacattcatcaatcatttgttgaacaactgctatagacaagcaactgagctaggtgctattaggtgatgcaagggtgactaagacacaatttctactctcaaggaaattgtagatttttagggaagataaaacatatatacaaattactaaaataaatgaggtggaagcaataatttatttatcttatctggaaatattcccaggaaggtcaagtcattttttacataaaagatcagagaaatttgcatggaggaagtgacatacacaatgaaacttaatgtatttttgtttctgcttcattatcaagcagaaaattgcataaagcagagatgagaaggaatatttcttcagaataattgatg

SEQ ID NO: 346535 - DNA, 1000 bp, Homo Sapiens
gaaagcagtaatgtttattacagttcacacattggcacttgaaatgaaaacatttatcccatcatggaaaatacgtgctacatagagttgagaagagaagcaattattttaatttctgttgtacctcagaggggactttagtttaggaggtaatttatctttcactgagtatggctctttgtatagataatgtgtgcacacgtatatttaggttatgtacatatgtataagtacacatataccgtatttagctcagtttggtattttatagaggtatatttggtattagagtttaaattgtctcaaggagcttttagaccttgatttttttcatgtcataaaatgagctacaagaccctttaactgagcagtaatgaaagtagccagttttatataaatagcatttattattttatgatcattttatttagtttgttatgtgcagatgttttccccactagaatttaagtggtatgaatggagggatcttgtttgtcttgcacagcattgtattcccactaactctcaataaatacttactggttcaatgaatgaatggacagataagcaagtgtgctaacaagtaagcttttaggattgtacattttaatcccattagtagatatgtggtgactatcatttttctattttgcatatgctttatgtaagattatataactacagattttagtgacttaaggaaaagaaaagggaaaacactaaaagaaaggccttaaagtcagaagacctggttttaaattccagtccctccatgtgaggtcctcaatttcctcctttataaaacacagatgaaaatgagatgtccttcaagtctacagtggatctgaagggagggctattattttctgtgagacgaagaagaatgtaactgacatggccatgaatccgcacaaaacagaatgcactgtgtttacatggggacattgcacagtcacaaagagaaattacactaaaaggcttcagagaggtaattataaag

SEQ ID NO: 346536 - DNA, 309 bp, Homo Sapiens
ttatccatctagagtgataatgggcattgacccatcaggcatctgacatctgttcactcgcgattctgcatttaggtagtcctcaaatttaatatcaatgtaattgataacaggctgccagcaattactgttatccactgcatctccaaatcctggggtatcaactattgtaagcagcaactgaacaccaccttctttgattaaaactttggttccacccggatactctggagaatacaaatctgggaggaataatgagttgattaatgtcaactttcccaatccagattcgcttagcataataggcat

SEQ ID NO: 346537 - DNA, 1000 bp, Homo Sapiens
atgttatatttatttattttccagcttgtacaaactggatgtagaagcataaacatagtacatttctaccatcttcaacaaaaatataaccaatatgtacaattattgtattaaaaatacaaaagggatacagactccaccaatgtctttctaaaagacatacaggtacaagtagtatcaaaagtatgaggaaatcaccagttaattgtacattctgcacttgacatcacagagcgaactgagattagcagtcctatgttctacaattacttaatgcttagataacatttgtgcaacttgtggtagagctagatttctgtctttctatatgcacatgaggtccatagcctatataataaaactggcaaataatgcatattacatgtaaaattacaaatgcataattgacaatgtaataagcaagtagacaaatgccatgatacagaagagaattattaaataaagcactgacattgtttgatacagtgaaaaaacactgcaattccacttttaaaatttgaagctatttacgtttatctactgatcaatatgatcagctgaatttaatggaaaaaaaatccaagaccagcagttcctcacatttgagtactactcagattggcagccttcacttttccggagtctgtgcaaaacaacacaaaaatagagtggaggggtcatttcagtcattatagggttaatagcagctgtgagcagatggttgctacacttaggccttctctatatgcagcgtccataaagccacttggaggttagtctttggtgactaacctgccttgcaaaggctggcatgtctaaccaggtttttgatcttttatcacgtttaaaggcttgtttattccctaatgccaattcaataaagggaggctgtcttgaaagagcagtataaacagctggcattagctccaacatcccaagctgctttcactgcaatgctatccagttataaatgtttctcttaaaaaaaaacaaaaaaaca

SEQ ID NO: 346538 - DNA, 1000 bp, Homo Sapiens
ttattctaaatgattttgactcatttgaatttgcatttcttgaagtttctcataaaaggtttgactcaattgtttaaatgccaggactacattgtcacgcttattttcacatagttcactcaaggagtcactgatagcctgaatgttgaatgcaaaatctttcaaacactttaaaagctgtcccatacgcatcccatttttttggtctaatcttgtcaagcagttgtgtttatagaaattgagcacatatgcatttagtggcattctccttcctcggttatctaatttccatggccacagcagaggagcctgagtgccactaacaccgactgtgcgcaggatgacctggttgatagtctctggtcgaagcaaatcattatctgtgttccccgaaagacaaacaaatggtgaaatggctactcttcctttcttgcagctcatcaagtgagacacgagttgggagtcttcacattctttacctgtgaattcagctttgaagcatccaatatccagaggctttcttaaccaagattgtttactctttaaattgttccggaatggaactaaaatctgcttactgattcttgacaaagggagttgatgctcttttttcatgttcaccgacttggaagcaatcagcaggaaggaggcaaaatccttcattactgccaggttatactcatataaagcagctttaaaatcctccgggagttcggcaaggatcacctttgactgagaaaaacttaaattagcattttggaattttgctggaatatattttcttccaaacaaatttgccaatactaacacgagcttttccatcacatcttgggaaaattgttgtgagcctttccaggctggcttacagagattatggaaaaggcctctcttgagaaaatttacaaaaacaagatttgaaggttcatgaccatgcaaatatgatgcaagtcctgcaaatttctttggattaccctttttatttaaatagtcctctttgata

SEQ ID NO: 346539 - DNA, 1000 bp, Homo Sapiens
cactcattgcccaggctggggtgcaatggcgtcttggctcactgcaacctccacctcccgggttcaagtgattctcctgcctcagcctcctgagtagctgggattgcaggcacatgccaccatgcccagctaattttgtatttttagtagaaacgaggtttctccatgttggtcaagctggtctcaaactctcgaccgcagatgatctcccactttggcctcccaaagtgctgggattacaggcgtgagccaccatgcttggccgagtatatggattttttaagaaggggaatggttcctggaatgaattcctcacatatactgagggatgactgtagtcccacaaagacttatacactagtattcatagcagctttattcatcgtagccaaaaactagaaataatcaaaatgtccacccaactggtaagtggataaaaaaagtactactcagtgaaatactgctcagcaatgagcagaaataaactaatgataaagcataatataaaattatcaaaaacattaagctgagcaaaagaagctagacacaaaagaatatatagatttctatttatatgaaattctagaatatcaaaagtaaactatcacgacaaaaagcaggtcagtgtcttcctggggctgagagttgaaaggagaatggacggcaaagggggaatgaaagaacctttggagatgacataaaatgttccatatctttatcgttgtggttgtcacacagatttatacattggtcaaacttactgaactcttcacttgaaatgagtgaattttattgtattcaatcaataaatatattttaaaacatttttaaggtggattgcaaacaaactggtgacaaaaggctcagaatacatgattagttacaacatagaacaaagacagcctttcaatatgtgaaagcttacatttaaaatctacctatactatggcgcaggtatttatgtaggtaatagagacaatcactgtgtctgataggaagg

SEQ ID NO: 346540 - DNA, 1000 bp, Homo Sapiens; identical to SEQ ID NO: 161443

SEQ ID NO: 346541 - DNA, 1000 bp, Homo Sapiens
agcttctggaggccattcacattccttggctcatggctgctttcttgtatcactccaaccttttgcttccattgtcgaatttcctactctctttaccctagtcaaatctccttctgactccctcttatagagacacctgtgattacattaggacctgcttagataatgcaatataattttcccatctcaagatccttaacttaaatctgcaaagtcctttatgcatataagtgacaggttccaggaattaggacctgggtatctttggggactattcttcctatagcagcactgattttctaattttcaaatctgatgtcttctgttcagtcctcatcctaactctcttgctatttgatactgtcagttactctgggaaaagctcctccctgactttcatgattattttcctctgatacgatatctttattgtctgtctctcccttaaaatgcaagactctgagagtaggaatcctggctatcttgtttgttgttttatccccagtgcttggaataatacctgccactatcaaatcacaaaaggcatcacgtaatgtaaattggatgagcttctcccattcctagttccaccaccactctctcattttccttcactagcaacttcctctattctcatgggtcaagattagtattctccatggtttgggaatagcttgcttttctccttatatgccaggtggccacatttccaaccatactcagtgggctctcaaatgtataccttaaccccagacctttgttttgcacttctaacttttatctttaccttgatatcccacaagcatggagaattcaccatgtcttacctttcccatccaccaagcacagcccaaaactaacttttccttcctcttacattctctgcctcagggaataaaaagtatcagaattcacccagtagtgtaagcaagaaaactgggagttatcccagaatccatgctttctctctactcccctctccacatcactaccgacccat

SEQ ID NO: 346542 - DNA, 1000 bp, Homo Sapiens
tcaatttaaaaacttttatatgccatagtgaaaatgtccatcatttacgtattgacttctctattatctttgataaagaatgaaatacattaggaacatgacttcacttgtaaaattttatcaacaaagatgtagtccccaaaatcatcaaatccattggttgttgcactatctattaaggcttgaactgaccctgaaggcttttctgtgttcagaccattcttatgatttcattagtgtatgaattctctgatgtacagtgagttgggacttctggatgaaggccttcccacatacagtacatcgatcaggtttctctccagtatgaattatctgatgtacaacaaggtctgacttctgagaaaaggcctttccacattcagcacatatgtaaggtttctctcctgtatgaattcaccaatgccctgggaggtgagacttctgagagaaggctttcccacattcagaacatacataaggttgttctcccgtgtgaattctctgatgtccaatgagatgtgactgctgacagaaggattttccacatttggtacatttatagggtttctctccagtgtgggttctctgatgtatgatgagttgtgacttgcgagagaatgttttcccacattctgtacattcatacggtttctccccagtatgaattatctgatgtataatgagttctgacttcctgctgaaggcttcctcacattgagcacatttgtagggtttctcaccagtgtgaactctttaatgtataaaacagaatgctttcccacattcagtacacttacatggcttctctccagtatgagctctgtgatgtataatcagctgtgactctgggaaaaggctttcccacactctacattcatagggcttttccccagtatgtattctctgatgtataatgaggggtgatttctgggagaaggctttctcacattcactacattcatatggtttttccccagtgtgaactctctgatgtataatg

SEQ ID NO: 346543 - DNA, 1000 bp, Homo Sapiens
tgcagtctgaagtctttaatgtagcaggggtgggtcattagcccctactgaaattatggaacagaaataagttaaagtattgcagcttatgttcagtgatgtatcagtaaagaaaagtcttatgtttattatattctatttaacataacagattgaacacatattcaccagaaattattaaacaaaaattaaaagatttagaacaaatatttagaacattcatttcagtgggagtcttcattcctccatggttctagaacagtgaaataaactgagtttgtatccagcattagactcttattttaaatctaacaaatattgatatacctaataaattaaaacagactactatgtcaagttgtataagtcacataaatataaacatacattgaagcaaacctaaaactctcatacacattcactacaaaactttatgcagcataaattacagtataaacagtgtaaatatgtctcattttgcaatggacttcagttgcataagctaaaatttgaagcttcacccaaggatttagcagcctgaaatttacccagcataatataaagaagttgtgtgaccctcaatgcagggaaacttgagagcctacatggcaaaaaaaccgaggccatttccccaggcaatgtgtccttcatctagaaacaggtggatttgataaatagtcactagaagatcatgttaccacaaattctacactgtcgtagtctcctgaagtaattaagttacaactattagaggaaaaaacaaaactatgaattactttacagtccttacaacttgtactatttcatgagaattttgtatattaacactttgtaatacctttgtaaaataattaggaagcccaccttctcaatgcccccaaaaaagaatggatgtcatcactgtaatcatcctggatataaaagtacctgtcactccaagggaaagaagcaactagagtacacagaatttgatcatgaacaagcctcattttgtctttcc

SEQ ID NO: 346544 - DNA, 1000 bp, Homo Sapiens
aactgtacatctcaaatatctttattatggtaaaatatacataacgtaaaacttgccactccacccatttttaagtgtacagttcagtggcattaagtacattcacagtgttatgcaaaagtcaccaccatccatttctagaaacttttcatcattccaaactaaaactatgtacccattaaatattcactccccattccttctctctccccttccctgaataagctctggtctactttctgtccctgtgaatgtgactattctgggtatttcatgtaagtggaatcatacagtatttgtcattttgtgaccagtgtctgtcacgataatgggttcaaggttcatacacattgcagtgtgtgtcagaacttcattccttttcgtggctgaataacattctattgtagggacagaacagtaaccattcatcagcaaatgcttgtgttgtttccaccttttggtggttgtgaataacgctgctacaaacattagcttacaagcatctgcttctgtccttgctttcagttcttttgggtatatacctaggagtgcaattcctggctcacagggtaattacatgtttaactttttgaggagccaccagtgtgtttccacagcagctgccccaatttacattcccaccagtaaggcaccagggttcagtttctccatatcctcaccaaagcccaagtttttgctacacatatatgaactcaagtaaccaccacgtggataaagacatctaacatttcctgcatcccagaaggtaccctcatggaaaccggtattgttgcaagctccccagcagccagggtcaagaaccacgtcttaaacttttaggggttctatctctgtcaaggttggctaactctcaacctaagaataagcctcaagtctgaagatggaacattaaaaatgacattgtcaccttgacagagtggttaataacaccccagcgggccggagcccatcaatcatgggctgctgccttctgtttcga

SEQ ID NO: 346545 - DNA, 1000 bp, Homo Sapiens
caggaagtattgctcacttttactgttctctcttagggaagggcattctcaaaacgtttccgcacaagcagaccatcccttttattttccccgtctgtctcctttccttctgctttcaaaatgtctcaagagtatttacaagagttgagcaacacaggcatctttatctggggtctttatccacagagcagaggacaggaagtcatcactacagagacgaagcgatgtatggtttgacccagtggaggactttgttaaggtggaggtgtgagtgtggagtgtaaacgtgggacatccagggcagtggagggtaaccactggagaggaagtctggggacagtttgggagcagccaaatataaaataagcatttctgttctaaatccaaatgaacattctacgctgctgtcatctccagtatacctcagagatcctaaagtttcctgaagttgtttggaagtcacggccgatgtaaagtgaaagcgcacacatatctgtaagctctgagctcaggatttcacgtgaggtcctttgttcgggaggcaggggggttctccctgttgctggctgaggtcactgcattcatagtgtgacaggagacagcacaatacagcaaagcagctggagggattgccttgtagagtggaagaccttccgcagaacagaacgctctctgtcctgttctgctggagaatgaaaagggatgggtggcctgcgtgaaacctctttatggggcttgtgcgttctgacactgtgaccgccgaggccacagctgcctttgtttcttcctctctgacctccatgaagggctagcgcacaaacttggacagggacggctctatctcttgggtgatattctggaaaagtcagtcttgacttagtcaaaggcatcggtaattccccaacagctgagagcagactccatgctgcggttttcttgtaacttgaatcgaggagacttccacatctttgctatccattgcgcctggctttgtccactc

SEQ ID NO: 346546 - DNA, 1000 bp, Homo Sapiens; identical to SEQ ID NO: 161444

SEQ ID NO: 346547 - DNA, 1000 bp, Homo Sapiens
gaatattaaaaatttattaacatttcccagaaaggtagtgtcagaattaagccattcgcaaaagacgaatttgccataaacaaacattcacttttgcctgatgacagcaacactgtgatggggtggcactgtgccccacggacaggtccacaactgaacacatggctctatctctccttttgggcttaaagtttagtgttattttattttacaaatatttacagtcattttgtaaaaaggcagtttttagtagcagaaaattcttctgttttatagtatggtatcacagttactagcgtatctccaatgtcaaaccaagataaacagcatcacaagatgtcacagactaatacaacttccctttggccaggggaaaagatctgtatctttttttttttttcttcaaaagtctaacctctaaggcaaccggtttctaaaaccctcaaaatacacaaatacactttcatgttttaagtctcatcttcactaaatgttcagacacatccgttttaattatcccttttatgagggtctgtgtttttcctgtgataaaggattcaggaaataatttaccacattataatctatttaacataactaccctcagtaaatagttcataaaatacttgaggctggtgacatttgtcttgtaacctgctcatttagtgggttgggtttacaaaatgtatctaagcttttattgcaatctgcaattatgtacattaacaaccttacaaaccttgaacatagtatatatatccccttctctagcctttcaaatggggcttaagagagagaaaatggcaccacttcactgctataatgatttaataataaatcaagcagacttatcatccacatggataacgaagctctccctagggaaactgaaatacctctggtcatcttccaggttctcctagactggaccagtatttaaaaaatcccaaagatgatgttactcaagccattaccatgaaggaactaaagtcagcccttt

SEQ ID NO: 346548 - DNA, 1000 bp, Homo Sapiens; identical to SEQ ID NO: 246647

SEQ ID NO: 346549 - DNA, 1000 bp, Homo Sapiens
actttcatcgtgtaattttattcactctagttgagaaaataaagagataatactgaccgaagcacctgggtatttaatgcaaactgtaaaatctattatattaaacaaagtcaaaagcaatgtcaaagatcttgaatattcaaggcatgcacctcattacagacttagcaaattaaaacacaaataggattagaaaagaataatgtaacaatctcccactacggtccctagagcattaagtcataaattgggtttgcattaaattgtgcctgcagtattgaattcagggaaagagctgtgggctggagataaaccatgctgggctactcaccaactttggcaaagctatgtgttttctgagacgtgtagtaaatttgttagaatacagcagttccacaaaaaaaaaatgagcacttcatatcttaattaaaaaaatgtctggtgtcacggcatgtgaggcctgcagagatgtaaatgcagacaaaatccacgtgtgaaatggagctgtatttcctacttaagtttaaagtcatttcactaaacatactgcttaataccagacacatttaaaacaaaacaaagtcctcaacacaagggttttcattaattttgttttggtttggtttttattcctgtttgtttgattttgcaaaggaaggaagaaacggagaaagcaaaccaaactctgtaaagaacacgtgtggacttccagaatatccaaagaatgtcccctttcattccatatgaagatcagacagaccttaactattctggccgatcagtagaaacatacatatgacttattttagaaagcaaatgaatatacttaaatcagtttttaaaatgatgcaggctttgaaaaacactcgactacaaagcacgttccttccatttcaagtttattctcttgggtttgttttctaatcccctgtacaagagaggctgacttggggaaaaaagaaattgctgtgatagttctatggcatccacgtgatatgcc

SEQ ID NO: 346550 - DNA, 1000 bp, Homo Sapiens; identical to SEQ ID NO: 161445

SEQ ID NO: 346551 - DNA, 1000 bp, Homo Sapiens
tcaggctggcaggaaggcggcaatcttgggccggttctccacggacggcaggcgctgccgcttggccagctccttggtggtggggaggtggacgccctctctcttcttgggtcggctcttggccccagcctgagtcttgggctgcagaggctgtgtgggctgcggaggaggcgcctggggctggggcgcgggcgtcttcttgcctggggagtgggccgagggccgcgccttgccagcctgcttggtggccttggtggggagcgccgcctgcgcagaagggccagccgtgggggcgggggctgcctcatcgtccgagctgcaggaagagtcctcatggcccccggcgccacagcccccgtccccgttcttgtcgccttcctcctccccttctgtctccgagccgctgctgctgctgctgctgctgctgctgctctcggactcttcggccccgtcctgctcagcctgggccttgtccgggctcttggggttcccagagtcctcgaacgtgagccccggcccgggttcctgggcgaggtcccggtcggtggccttgggccagggtgccttgggctcgctgctgccggccgcagggtgatagctgcccaggctcaggaggctcttgggctcctgccagccccccgcccccggatcctcccagagcagcagggcctctttagccttcttgcttttgggtgacatgacaccctcgtgatccagtttgacaagcagctcggcctcctcccccggcctccgagggcccttggcacccgactccttggctgcccgcgccttcttgggcttggggcgtgtggcaggcatggtgatgaggggtgctggggccagggtggtggcaggagctggcagctccacaaatggctcgggtgctgggcagctggtgaaggcgggtggtgcgggactgggctgcggcagtgcccggcgcaccttgggggccttggctcgcttgtccacaggctctggggggctcttcttggaacctggg

SEQ ID NO: 346552 - DNA, 1000 bp, Homo Sapiens
cagcgttttgtggcttttactccatatatgaaagaagacaaaaacatacaaagtatatgtacaactaaaattcaacaatatatacagaaatgtttcttgatataaacgtccctattagctttgtgaatgccaccaattcacctagtaaaggtgtcaaagcaatagaatggtgattttgattgtttcctccgtctttcctgattccagttcagggtttgggggggtggggtggggaaagagtggtttttgttttgtttttttttaatcaaccatcattcctggtcattgcattttgataaaacatgcagcattccctttgtagcaatgttctaatcttacagccactttttcctttttctttagagaagggctgttatgtgaggaattttctttttctcgtcagtctgggaatggtaaataaaaatgcaggagtccaaaatgcttctctttcaccatgtaatgtcttaaactcattaaacaagtaaaaacgctgccaagtttgtgcagattcttctggttgggggaaaatctgtttttaaaaaaagtcattttgatggatactcccaaagagaagagactcagagcctggatcccaaggggtaagagaaaatatccttacagtaaggggtttcaggagtgctggcatagaaaccagtttctctctcacacatgctctttctctctctctgagatgcaagatcaattactgacgttgctcaagagagaaggtaaatgagaaaaaaggtgaaaggcaaaaagaaaagaaaggtagaaaggaaaaggaaagaaagaaggaatggaggaaaggaagaagtaaaaagaaaggagagggagagagagagagagggagagagaatgagcctagtcggcttcttgccacacttatgagctctcctaagcctgctcctttggctccttttcgcagatacaagcaggtcccggatcctcttttccttgttcagacgtttccctagggtgttcccttgggcaactcacatca

SEQ ID NO: 346553 - DNA, 1000 bp, Homo Sapiens
ggcaattctctacaggtgttttactgctagaagatcatgctcctcatttcctaaagactcacagagaacagaagactggttgcatgagaagtgaataacaagaggttatagtgcttatttgggttgggggcaaacatgacatttcaatattaacttgtttatttatttatttttcggttatacatcattgctggtatatgtactttattttattttttagagatggggggtctcgcatgttggccagactggtctcagacacttgacctcaggtgatctgcccgcctcgacccccagagggctgatattacagcgtgagccaccgtgcctggccgaacgacaggatttcaagcctgaactcgagaggtagcccagactggggatctgcactgggaagtcatccgcaaggacgtggtggctggagctatagacaaagggaaagttatccagggagagtgagggtgtggaatggggagagagagggcccgcaacacagtcctaaggaacaccagcactttttttttttttttttttttttgagacggagtcacccaggctggagtgcagtggcatgatctcggctctttgcaacctccacctcccaggttcaagcaattctcctgcctcagcctctcaagtagctgggattacagacgcccaccaccatgcccagaatttttgtagttttagtagacacgggtttcaccatgttggcctggctggtcttgaactcctgacctcaagtgatccacctgcctaggcctcccaaaatgctgggattacaggcatgagccaccgtgtctggcccagttatcgctttctgagagaggagtttctccaaagttttcagtttgacataatcaatataaccatcctgcgtattaggggatggctggttcttcactccttcagcatctttggttaaccggtacctcgacttggccatatccacaggtgggggaggtcaggagatgtcacccctagtcactggggctgtggg

SEQ ID NO: 346554 - DNA, 1000 bp, Homo Sapiens; identical to SEQ ID NO: 161446

SEQ ID NO: 346555 - DNA, 1000 bp, Homo Sapiens
attagcaaaacaacattttgtttccaaattttggctaccctctgagagctggaatatgacacagttaaaatcaggacagagcaatttcgtgaaacataaaacagttacaaaaaatgaagaaaagcagctgcatcttaggagggaagtcacttatttgctaagaaaacttaaagccacacaatttttctgcccacaccctccctgaaaatgtattatattaaatcttaaagtttattgcagaactcactttatttgccatatgattatgtttcgagaggaatccagggaaaaaaacatgtggacactagatatctgaatgtgagaagatatccgaagtggaacatacaaatagcatataaacatacatagatatggtatacacaggtgtagtatctgtatccccatctacgtatctatctatcatctatatatatacacatctatgtatctatatatatctatagtcactgattgggggaaatcgcacatcaaatgagaattcttagcatggttacttgttgtatatgtatccttgagcaagtcacttccttttcttgatctcagtcccttcatttctaaagtgaggaaattaataacaggatccaactgagttgctctgataagtgagctgtatgcaaaagttcctataaactctgaaatcatctatgaatgttaatattttcttgttgaacaattttacagaaagatggaagaaaattatgtttttgtttaaataaaactcaggtgattactttagggctcagttttagtagtactggtattagtgttgttttcatttagctaaaatgtctgagtgcttatcacatgctgagcaatgatccacacactatataatctcacttaaaccacatcagatcttttcaaatgaatggtaatggaattttaatttgacagaaaagtgaagtcaagagtaatcaattaatttttccaatgcaatgaggatatgatgaatagtggcaccaaaggataaaaccatgcc

SEQ ID NO: 346556 - DNA, 1000 bp, Homo Sapiens
caagtttcattatagacatttattttagttttattttcaaagtcattgacctcttgtatcagatttaaggcaaagaagaagatacatgtcccaggactataggccaggctgttgactgcactgggatttagatggtgtaatctcccttagttctaccagggagacctcagcccaggtcttgttgccggggcacagttgagcactggattcaggtagaggagggctcccaggtcagtctgagagttaatgaagagattaaaaagtctggcagaggacaggactcttacaggtgactggcttggaggggaacctaccagtccttcttccaacttgctgctgaaatcccagtgttcttgaagacagggttatgatcctcttcaccaggtctggcgggggtggggctcagaaggtggccaacccaccctctgagcccaaatattgttcccagaatgctcaccttgacctcaccctgtggttcgcctagacccagggttggctgtgcaaaatcatgcttagggaagggttgcagagaaacctttgcaccagtttcctgggtcttcatcccagccagtcaatgtcatcgtcatcatcatcatctccaaaaaggggcgttgggggcgggcgtcccttcatgctcacctcgtcttcatcctcctcctcaggctgtgctttgggcctcagagctttcagagttgcccctttaaacagttcatcctcttcatccccagagagactggaacgctgggaatgatggctgggtctgagggctgctcctgcaactgtggaacctgcctctgtgcttgacagctccttgtggggaccggtggagctagtgacatcatctttcttgagctgtggaggctgaggctctcctgggctttcaggccctaaggccagtgggtccccctcctcggggtctgaagtcagggacagtcttgtggagctttcttgtagtgggccatctggtgctacttccctgacacagacctttcctgatggg

SEQ ID NO: 346557 - DNA, 1000 bp, Homo Sapiens; identical to SEQ ID NO: 161449

SEQ ID NO: 346558 - DNA, 1000 bp, Homo Sapiens
gagatggagtcttgctccatcgcccaggctggagtgcagtgatgcaatctcggctcactgcaatgcccacctcctgggttcaagtgattctcctgcctcagtctcctgagcagctgggattacaggcgcccaccacaacacctggctaatttttgtatttttagtagagacggggtttcaccatgttggccaggctggcccttgtattaccttttaaaaccccatagcatctatggctacattcttttttaaaattttatatatatattttttattttaacataagttattggggtacaggtggtatttggttacataagttctttagtggtgatttgtaagattttggtgtacccatcacccatgtatacactgcaccatatttgtagtcttttatccctcgcccacctcccactcttccccccaagtccccaaagtccattgcatcattcttatgcctttgtgtcctcatagcttagctcccacatatcagtgagaacatatgatgtttggttttccattcctgagttacatcacttagaataatagtctccaatctcatccaggtcactgcaaatgctgttaattaattcctttttatggctgcatagtattccattgtatatatatatcacagtttctttatccactcattgatgggcatttgggttggttccacgattttgcaattgtgaattttgctgctataaatatgtgtgtgcaagtatctttttttgaataatgacttcttttcctgtgggtagatactcagtagtgggattgctggatcaaatggtagttttacttttagttctttaaggaaacttcacagtttttcatagtggctgtactagtttatatttccaccagccgtgtagaagtgttccctgttcaccacatccacgccaacatctactgtttttttttattttttgattatggccattcttgcaggagtaaggtgatattgcattgtggttttgatttgcatttccctgat

SEQ ID NO: 346559 - DNA, 1000 bp, Homo Sapiens
aatttttttaaatttaattttattttttttctgcagttggggtctcgctgtgatgcccaagctggtcttgaactcctgccttcaaagtgcagcctcccaaagctctgtgcagtggtgctgtcataactcactgcagcctcaaactcctgggctcaagtgatcctcctgcatgagtctcccgagtagctgggaccacagatgcgtgccaccatataaggctaattttttctatttttataattttagagatgaggtctcgctacattgaccaggctcgtgtccaactcctggcctcaaccaatcctcctgcctcggtgtcttgcatagctggggttataggtgtgagccactgcgcagagctaggtgagggattatgatgtgacactcatagctccttagtgtttggtgattgtctctgggtgttcacatgttcacagggaggtggagacatagacagatcccattactgagagataaagaaatccctacaatgaagcagattaatggagggacttccttctttccagggagagaaaagggcagtgctcaaaacaggaagaaaagccatgaacgggaattcaccggaaatggaatgtcctcagaagaccttatcttttccgtgggaggcaggggatgggtgattctttttggattctagcagcatggatgcttagccatcgctcactagtagtttgttccactataatttcatgtagtcactattgacccttcgctgaagtctgtaactggcatagcgtctacagtcctgtgagtggtgcttttggggatttaaggagcagagcagtcaagcgaagcgttgccttcctggcattgccattccccattggtccttctccaagggaaactggtcgtggtcatccagacagagaccaggagccgagtggatctgagatcccccgagaggggtgtgaaacacaggggagtcactggcaggtgggcactcaggagtgcatatgagacaaaccccctgacccagagg

SEQ ID NO: 346560 - DNA, 1000 bp, Homo Sapiens
tcttgaagtaaatacataattttaattttcttctttacatttacagtttctaaattttccccaatgacaaaaaaaagaacaaaacaaaacagaaaatatataaattggtatttgattacacagcttataaacattattaattttggcataatttaacaaaaccaatgacaaatctgtagacctgctgataaagacatacctaagacttggaagaaacaggtttaatggactcacagttccacacggctggggaggcctcacaatcatgaaggaaggtgaaaagttctttcatggtggtggcaagagaggatgagagagaagccaaagcggaaaccccttataaaatcatcagatctcatgagacttacccactaccacagtggtatgggggaaactgaccccaagaatcaattatgtctcaccaagtccctcccacaacatgtgggaattatgggaattagaattcaagataagagttaggtgcggacacagagccaaatcatatcattccgcccttggtcctttgccaaatctcatgtcctcacatttcaaaaacaataatgccttcccaacagtcctccaaagtcttaactcatttcatcattaactcaaaaatccacagaccaaagtcttatctgagacagggcaagccccttctgcctacaagcctgtaaaattaaaaagcaagttagttacttcctcgagacaatggaggtacaagtattgggtaaatacaactattcccaatgggagaaattggccagaataaaggagctaaaggccccatacaagtccaaaatccagcgaggcagtcaaatcttaaagctccaaaatgatctcctttgactccatgcctcacatccaggtcacactgatggaagaggtgggttcccacagccttgggcagctccgcccctgttgctttgcaggttatagcccggatcctggctgcatttacaggctggtgttgagtgtctactgatttttcaggtgcgaccat

SEQ ID NO: 346561 - DNA, 1000 bp, Homo Sapiens
tcagagaagcaggcgcggggatgggacacgcagcttccgggtcaagcgctttttctttttcctcccggaaacaacggtgtcattctctagttccggatctaaggtgacccagttgcgaagtccagccttctcgtcttggtacccactgcgccccttctcagggctgaagtccctctctaccttttcctgctctttcctctttcccagagggatactgagaagggaaggacctggggccaaatcctcatttctctccagaaagctccccagctccccggcttcttgcgggccctgtcttcgcttgcgctcagccatcagcacagccacagccactgtgagcagcacggtgcctgtgatgcccagcacagtggcagtctcagccaggcaaagctgggcctccacaccactcagcactgcccctgacagcccaggagagagaaggcccagtgctcctaaggttgcaaacgcctcggcctccagctcactgatgtcattcccagctacagagaggacttccaagcccggcacagtggtcagggcagcacccttcacccgctgcagctggttcccagccagcgagagccagtgtaggtggaagaggcccccaaagacccctgcggccagttcagccagctggttgtggctcaggttgagctgctccaggccccccaggcgccacaggctggtggggtccagggaagtgagtaggttgtgagagaggtccaggcagagcagagagcccagggtagccgagaagtctgtgggcagatgggccagctggttatggctgaggttcagctgctccaggaaactgaggccccctagggccccatcagacagatcccgcaggatattgagagaaagcagcaacacccgcagtccccaaaagccattcagtgcatcaagtcctgtcagctctgaaaccaattctctgccaccactgtctcccacccagactgctgcaccgacccctaacccagcagcctccttgcttccgctg

SEQ ID NO: 346562 - DNA, 1000 bp, Homo Sapiens; identical to SEQ ID NO: 161450

SEQ ID NO: 346563 - DNA, 1000 bp, Homo Sapiens
ttaacattttcgcttgcagtactctttccctagaatcggtgccaacaaattgcaaccattgacgggccctggtgtgctcatacgcttctgtacatcaccacccagagcagccctctcccttgcgcggttttccaagcggtgtcctgctgctttcctgcgacttaggactggttttcccacttcgccgctgcctttcgtcggggccgcgagcggggcgacggccgcccagcgcccctggcacccctgatctccagccggggctcccggcccgcgccttggtggctggaggcccaggatgagcctcgatggcgagaggcccaggatgcgccaccaggccgggctcacttctttgacgccgaataaactgacaaaacaattagctggccggctggggaaggtggtgggtgactcaaatgccagtcggctgcgtgcccccgcgcttagatgagtctgggattctgggcagttgggactttcctgtccatggccgtcaaaactcgccaccaggcaagaccacagtgtgttatccaccagcaatccccgaggtccaacgccacacaagtcaggcagccctgagacagcaggagccctgtcctctggggatgctggttccagaggagaaggcccgaggacagtctcttcagagaggagctcaccagggaaaggcggttctgcttgagggccgggcccagcacacttcgcctctgcggtcttggggccctcttccaagtctttacaagcagcgtcttgagaggtagacagtttcccttcttcacttttaaagaccgcagtctctgtcttggcatctacagtaaggctgagcgtttccttcatgcctccattcatcactgtctcagttacctcgtctgtaatttctgcatcctcctctccatccgagctggcttccatggccacattgcctggtgcttctggctgagctgccagggcagagcgagcaggctcccgagttctagcgttcacagtgaagccgttaaacgca

SEQ ID NO: 346564 - DNA, 759 bp, Homo Sapiens
tcaaggtcttaggtgaggggtaaagtagaaattacacattatagaccatgttttgggaagcttaaaagtaaacgaaaagcgaacttgagaacacagtagagatgtggcactttttatggcttcccaccttgtgatgatagtgtcataagaagtaccagtggtgatgacagtgtcataaggagaagtaccagtggtgatgacagtgtcataaggagaagtaccagtggcgatgacagtgtcataaggagaagtaccagtggtgatgacagtgtcataaggagaagtaccagtggcgatgacagtgtcataaggagaagtaccagtggtgatgccagtgtcataaggagaagtatcagtggtgatgccagtgtcataaggagaagtaccagtggtgatgacagtgtcataagaagtaccagtggtgatgccagtgtcataaggagaagtaccagtggtggtgccagtgtcataaggagaagtaccagtggtgatggtagtggcataaggagaagtaccagtggtgatgatagtggcataaggcgaagtaccagtggtggagttcatagtcataggaccattcttcaagacccactgactttctctcactctgtcattgtctgtacccacatccacatctccagcaacatccacactcacaatcacatccacatcctcatctacatacatagctacatccacatacagagtcacatccacattcacagtgacatccaccccctcttccacatatacactcat

SEQ ID NO: 346565 - DNA, 945 bp, Homo Sapiens
tcacagggcaccatgggcctcaggagggcctttcctgctgttgccctgagaaataggcaactctgtgactcctcgggattgaacattgctgctgatctcatggggctgctctgcccagcaggggaggaccaccaggccgccccgggggcaagtgctgctcctatcacagccttccacatgctggcagcacccagcagaatgcagtaaagacacagtgaattggcaaaaacggacccctaagcgacggtgccctgaggagtcacggaagttcgggtgaagagtgcggggcctgggcaggaagttcctgggagtggtttgaacaaacggtcctgcaaggtcagccagacggggagcgtgcttcagggagacagcgagttcagcgctcggtggagcagcaccgtcggccaggtgcatggtcaggctctcggccgcctttgggtggagggagggcgttgccagagcagcatcataaagtacataggtctgcccacgtcgggacgcgtgggtccgcgtctgcaggttcctatcgctccccgttttctccggtgacccataaatcttcagtaaacattctgtggctcccagcagaattctgttcactgttaccacggaagaagtgatcaaagagaaggggctctgttgggtgcatgccagggcagaggtcaaggaaaagccacggatagggacaaagaacagcttgacaaaggccatcctgcgaatggccctgcagatagcataggttttaaactggtggttaaacctgcctgctaccttgtcaaccttggccccgttcatctggatggatttgtggtccttggcatcgatgatgcagttgctattggaccatttccatggcatgtacaggcctatgaactcaccagtgtcattctgcatctcaaagccgcacctgctgccgccacactgcgcgcgagcagagaaagccat

SEQ ID NO: 346566 - DNA, 1000 bp, Homo Sapiens
ttatttctggtagtgagtggaatttgaagagctgcctcctccccctcgaatggcatggacggccgttggagatgaggccgggtagtgtccggggcggatgggcttggcgatctgggctgaatgggcccttctggccatgttcttggcccgcacggcctccttgatacgatccacctcctgctggtagcgcttacggtcccgcatggcgttctccttggcctccttcagcgcgctctccagagccttgacgcgctccgccgtggcacgcagccgcttctccagcttgggcagttcacagcgcaggtctgcgttgtcccggaccagcttcaatctcagtgccttctccgcacactgtggccaaacctggtggggcttctttccaggagagaggagggaatcagaggggagcgggcagaactctcctacctgcttgtgaactttggtgagctgctccaggttattctccaagaaggaaattttctgcttctgggcagcactgccccctccatcatcgttgtccaactccacactttttttaactcgggtggtcagatcctggacaaagagtttccgaaggttgtgcagtgtctgcaattctctagacataggaaatatgatcagttccttgcaaaatattttcccagaggagggctcccgccccaaagcccagacagtgtcctgttccagccagtcagctgcccggggccagggatgccccgacggccagttggccttttccaccactgtctcctgcagcgggcttcccgggcattcaccccctggccagcaggctccatgctccgcccacctcacccaaacactccaggaggcagaacgggccctgcgttttccatagaatgtcttatctaaaacattacacagaaaggtgtgcatggataaaattttgaaataatccgacaaatcacaaatgaatccggtcttggagacaaacataaatcgggaaatatcttgacataccactgtctcctccagccctttg

SEQ ID NO: 346567 - DNA, 996 bp, Homo Sapiens
ctaaggagagcttacatacacatcaaaggcactgtcttctgcgttctggtcatcagcaacaattcttgctccagggctctttgacccttggaggtcagttggtagaaagcctcttgccctgctgtttccctgctcagtcataaaaatccctctctctagctggttatcagaggccacagaacagcctgctttctgcaaactctctgaagagagatccttaatggatgtcccattcaattctagtaaattcttgctgtgactctcgctgtgccaatgctttgatgcaaaatttctgcacttcagcttcccagttgtactctctttctgttttacagtctgcttgccttggcattcacgtttcgaacactgagcaggcttccaccagtccccgttgtgacaatgacagatgttacattcgtccactttcacttcaatgccagctggaattatcgtcgttcctgcaaagcagtttggaccatttttgcagacaggacaacattgttctggttcatagactgggttgacacactcaggaactgcgcagtctgctacaacacagtgaacttcattgctgggctcacagcgacaccattcacatggagagggcttaaattcctccaagattttgtaatttttcccgtgatattcacagaagttttttacttctttgcactcaggacagcatccattgtgttccactttagtacactttgggtgaattttagggcattctggttggtcgcaaacaggtccatctagagcacagacacatggacagttggaatgcccagggaaaaatcgttctcccaacttgtatacaaagccgctgtcatcgacacaccctttccctcgatagtcatcaaagatcagattgtcattactggagatctggtcaccttcatcagcaggatagtcttcatgactgatagcagcagaggtgaccaatccagggatgaccaacagaagtatgcaagcttcatgaatatgaagagccat

SEQ ID NO: 346568 - DNA, 627 bp, Homo Sapiens
ctaggactgggccttcttccagggggcccctggcagcagttgtgcctgcctgtttctttgcctgttagtcagcaagctccaggccccaagcgaggctccccaggccaccagcatctgctccgggcagcaggccttgtagcaccacctttttccctcaagttctctgcaaagttgctctgctcttttcctcctttcttccagctctgtatgagattcttcaagaagtttctctcgttcctcggctttggccaacaaatcaacgccaccaacaattaccttcttctccagggcagagaacttttctggcaaagactgatgctcttgttgggttttaagatcttttttcctgtttctcgaatttagctgcagccttgtttcttcttccacgtcaagctttgtttcaagtgcctttctctccgcatccgctgtcgccggcgtttcaaccgtcctctctgggaagactttatttcccccttttttccttttctcttcatcttctccaatcttaccctcttcattgtcatctccgtccgacccactgacatcacagcctgatatttcttccccttctgtgagcttctttttcaggtcttctatttctttagactgaggctccagggagggcat

SEQ ID NO: 346569 - DNA, 1000 bp, Homo Sapiens
tcagaggagacactgccgagctggacactgtccagcctgagcgtggccacgtcgtggtggtgtccaggctgtgcagttgctggggctaggtccgctcgctggcttgtggggcaggtctgagcgaggacagttccccacaacggtcaggtctgagtgagggcagctccccaccacggtcaggtctgagcgaggacagctccccaccacagtcaggtatgagcgaggacagttccccaccacggtcaggtctgagtgaggacagttctccaccatggtcaggtctgagcgagggcagctccccaccacggtcaggtctgagcgaggacagctccccaccacggtcaggtctgagcgaggacagctccccaccatgggcaggtctgagcgagggcagctcctcaccacggtcaggtctgagtgaggacagttccccaccaggatcaggtctgagtgaggacagttccccaccacggtcaggtctgagtgagggcagctccccaccttgggcaggtctgggtgaggacatgaggacagagccccaccacggtcaggtctgagtgaggacagttccccaccacggtcaggtctgagtgagggcagttccctaccacggtcaggtctgagtgagggcagctccccaccatggtcaggtctgagtgagggcagctccccaccacggtcaggtctgagtgaggacagttccccaccatgggcaggtctgagtgaggacagttccccaccatggtcaagtctgagtgaggagggcagctccaccacgactggcctgtctttgtccttggcctccacacgcggcacctccgtccctgctgtctggatggcaaagctgtgcttgtagggcaggtcgtcagagcccacgatacccattgcctcggacctcaggggcttcctggtcgcagcaggcggcccagtggcttctgccgcatccccagcccaagctgcctgggcccccctgatgcccgactctgactggtggtgtttg

SEQ ID NO: 346570 - DNA, 485 bp, Homo Sapiens
ctactcaatgaagagaaacatttttacagtccagaagtcttttatttcatttaaacagttaatatgccatgaatccatagggaatagcttcctcagctcaggctccttcccactggttctcacacagtgcgtgtctctgggtggagcaggatggcgcttcagttgaacccaggtacctttctctttggcttctttctttttctgatcatgttccttcaggcgtttcaggaagctatctcggctcttagagtgcttaatgtgctcaatacgcacattaattctcttggcaagaatctttcccttaacttgtttgttacaacaatgccaacagcatgctgggcaacactgcagactcttcgttttgccatggtaacacttgtggggcattcctttttgaacagtaccccttcctccatgtcttctaaaaggcctagagaacacgggtcaggtgtctctcctctttccctttgtgttcgtcattttgg

SEQ ID NO: 346571 - DNA, 1000 bp, Homo Sapiens
gtgatttattggaaagtttagaaacatgtggcaacaagacaggtagatctctgcactgttactccccagaccgagagcttacataccatatagaaagagcataagtgcttcagaaggaatgtgtaggatcgctgaaattgacccctcagggaaaggcaagaatgctgtgtctcatagcccataatttgccaaaggacaggacttaggtaagtacatgtttatgataacatcaaggttgtcttggcttacacaagcaacagtaagtaaagtagaaatcttgaggcattcctgggcctggggttaatcagaagtcaacatggcagattagcatccaagatgaagtggcatcatcctgcacagtgtccaacgttgtacacttgattaggagggaataaacgagattgagcactaggagcaacagtggcaggacacccaacagcccaaagttggaaggagcacaagtgttcactgatggatgaatggataaacagaatgtgatctaaacataccatgaaatattatccagcctttaaaaggggaggaagttctgatgcatgctacaacatgaatgaaccttgaggacattatacaagtgaaataagccaggcagagaaggataaatgctgtatgattctactcatatgaggtacctagagtagtcaaactgatagagaaagtagaatgttggttgctaggagctgtggggatgggaagatgggaagtcgtttaatgggtagagtttcagatctgcaagatgaaaagggttctagtgatggatggtagtgatggcttgcaccacaatgtgaatgtactttactaactgcacatttcaacatggttaagatagcaaattttcattgtgttttttaccagaatttaaaaagaaaaaaagggttttttgtttttgtttttttcaaaaaagtcacaggacaaaacaaggtgagaatggtctcatgaaaaccaaagatatagagtgtttctagaatgaaggattcattga

SEQ ID NO: 346572 - DNA, 1000 bp, Homo Sapiens
tagaaagacacacttttattcttatgattaaacaatttaaaaagaaatctgtttatatgatttaataatcaatattatcagatttaatggtaaaataccatttaaacatcaaaggaataacgttaattcatatttctttaaaaaattattcacataattcatgaactaaaacagctttaaaatttttttcactaacagtacacataggtccttgaaagttttttaaaagcatgtatttttacattgtgtatcctggaagtttatttattactaattcacaaatatctttgcattgcttggaaatatttagtgaaccaacatcatcattgccttcttcaaagtgatctgatgtactgctatccaggacattaagttcggacacatttgaaggcaggtaagaactcacctgggatgtttgtggtgactggcttttttctaaagatttccaactacttcttgttttaacagagatgtcttgagctctctttgtaatttcagaattgtgcatactattttgatctatctggttttctttttgttcagtccaatgtgttgaagataaatcactagcagagatactagatgcttcctccaaacttttatcctgagtctttgaaatatgaaattttctgtatgagtgtacaggtgacccggctgaaaaaggtgggctaaggatagaactcctgtcactactatttttctttttggacactcctgtgtcactagacttgcttgtatattgactatgttttggattttctgtccttgaactgctatcatgagctttgaaacttctgctggtgtcctcactggtacagaaatcttcagaatagcaagggctagacaaatcatctgaatacttcagttctgagatgttttcatagcaactatttttacctgttctcttgtcacttatatcagccataagaatgtcattatctgtggttttgacctgtctaatatctatttccttatctacaattctgtcaacaacagcatc

SEQ ID NO: 346573 - DNA, 1000 bp, Homo Sapiens
caagaagaattgccaagtaatttatttgaacaatgcttacaattgtgctttctgcacttcctgtgtctctagtaattcaacctccagcattttactcatgacatttaatcaatacatgcaaatcacttcagggatctattatatcctgaattcattaatctacttgggcaagagacaagcatgtaagaaggttttcttggctaaggtcaaaaaggaggatgaatagtatcaagttccacagtctcaagctttttaaagactgcaataccccagagaggaagaggccctcttggcttgcttttctaattcaagcaattttcagtaagatacattttgcactaacttgagaatatacacatattggcactttattattattattaattattactgtttctattcaatgtgatacatgttgataagaatcgcaaaataagcatatttatctttcatagatcaggatgttttcttcatcacagaatataaagatgaacatagtgcagtaaaatttcacttgtatcagtcatcaataggaatttggtttatggctgcacaagagaaaaccagtcggatcaggtgttctgtgatggtgtatcataaagtatcccttatccttaggcttttgccaagagctgatttatcaaaggtcggagatagatacaaatgaagtttaatataatgggatgtaagccaatcagaagactattacattcaattgacataaattgaactatgttttatgacatgagcatactgtagtgtttcaaaattcttgtttttattcatagcagggaagaacaatgagacatttcatgatttttatttatttctattccttcgttgcacagtccatctgttggactatttttgagttgcattaaaaattttaacattatttgtagtttcattaacaaatacatctaaaatgcaatttttcacaggtatgtctacgtcacatgcacctgatttcacaacacacatccaggatggccaatatgtt

SEQ ID NO: 346574 - DNA, 1000 bp, Homo Sapiens
tttttttcctggatgataagtatttattagatatgacggttacagaaaaatataagcatgaacagtatgcatctatttgaatgcataagtgtgttcacaggtggtttcagagagagaaattgagaatgagttgaggggaagaagattaaaaaggaagggggactcagagatctgcagtgacccaaatatcaacaaggcttgggaacattttggatcctgacaaggggctgctctccaaaccacgtgtgtgctcagcgttgtacacagttcagtttacttcatgtgttggaattcaatggtgccaaagtacattggcaaacaaagtggacagaagagataatctgcttgtcagctagagacagacaagaggcatggagaggggtggctgaaaatagggccgttggcatgcgctcagggactggagtggaggaaagtgcttgggggcactgcaaatagcactgatggggaaatctaggaggttgggtcacactgagcctgtgagccacggatcaggagaaaacaagacatgtgataggcaaacccatgggcttctgatgcaggcgctgtgctgtgttcctcatggggctcctggcagatggcttgggagaggggcttgtgtgcctgtaaagccgtctccggggacctgagctgcgaggtgtgcgaagtagcctctcgctcctcataggcagttctttcacatatctgccagaggacggctcttctgactacggcatacaggttacaaaaatcaacctctccatcaaacgtgttttccaagagcatctcttgaaatgtattcttctcaactgacaggacagaaaagtaggaaaactgtgagccaatccaaaaagccagttttctaaaatgctgatctctttgaaatattcaattatcaattgtgtttctttcctcactgaagttcctttttacgacttttggtagtgaagagataaagttcattacaaaacatgccaggcttaagcaattttccaaagggatt

SEQ ID NO: 346575 - DNA, 1000 bp, Homo Sapiens
gcacatttatgaaattttttttcaaatatattttcacacattttatctaaatacataatacagaagcctgtgtgacttgggcaatgtggccaggagggcctgagactaacacatccaccttggcaaaaggacataaaatatgtcttatggtcagaaaaatcaacattttgtgtatttacttagtttacgaaaagtactgaaaatgctattactagctgaatttgtgatttccttttgaaattctgagttatccttatttttcccattttgtttttgcaccaaggagactgcagtcaaataaaacagatactacacgcactcgtcggggcagccgtactgcagaagcacgttgatgcactcctggctggaggcctgccgggcgtaggtcagcgctgtgttcccgtgggcatctcgggccatgacgtccaccccgtaccagatcaggagctgctccaggaccacattccccttgcggcaggccagatggagtgccgtgcagccgtctccctccccacaggtctcgttcacctcctcacgggagccatgtgccagcagcaggatggctgtctgcaggtcctcatcagcggtggcccgcagcagctgctggcccagagacagctcagtgcagggtagtggggccagaaagagcttctcctcatatttggaatggatccagcgttccttctcttccctcgtggactttattgagggttttgtctgcccctggctgctcccttcccagatgctgttggctagctcattgccaatagatgacataaccttcctgagctcaactggccagtcatccagctccagagatcgcacacgggaaaggcgggtgccaagactgcggtggatacctgagcattcaatacacatgaggactcccaagttcaaactggcccacttaggattctgggtctcacagtccacacagtgggcgttcccacgcatgttttggatcgactgcagggccatggcctcactctggctggtcagc

SEQ ID NO: 346576 - DNA, 1000 bp, Homo Sapiens
aactttatttcaaatatgttttcacacattttatctaaatacataatacagaagcctgtgtgacttgggcaatgtggccaggagggcctgagactaacaaatccaccttggcagaaggacataaaatacgtcttatggtcagaaaaatcaacattttgtgtatttacttagtttacgaaaagtactgaaaatgctaatattagctgaatttgtgatttccttttgaaattctgagttatccttatttttcccattttgtttttgcaccaaggagactgcagtcaaataaaacagatactacacacactcgtcggggcagccgtactgcagaagcacgttgatgcactcctggctggaggcctgccgggcgtaggtcagcgctgtgttcccgtgggcatctcgggccatgacgtccaccccgtaccagatcaggagctgcgccaggaccacattccccttgcggcaggccagatggagcgccgtgcagccgtctccctccccacaggtctcgttcacctcctcacaggagccatgtgccagcagcaggatggctgtctgcaggtcctcatcagcggtggcccgcagcagctgctggcccagggacagctcagtgcagggtagtggggccagaaagagcttctcctcatatttggaacggatccaccgttccttctcttccctcgtggacttttctgagggttttgtctgcccctggctgctcccttcccagatgctgttggctaggtcattgacaatagatgacataaccttcctgagctcaactggccagtcatccagctccagagatcgcacacgggaaaggtgggggccaagactgcggtggatacctgagcattcaatacacatgaggactcccaagttcaaactggcccacttaggattctgggtctcacagtccacacagtgggcgttcccacgcatgttttggatcgactgcagggccatggcctcgctctggctctggatggcttggacccag

SEQ ID NO: 346577 - DNA, 1000 bp, Homo Sapiens
gtgtgtatgtcatgtaatatcaagaattaaaaagcatcaaaagatcaagtgggaggaacattaaatatgaatgggatgaaagacacatttctgtgcacggaataatgactttaatgagtttcctcacccaagtcacggcatcataaagtacaaaagccgggaaagggattgaggaggggagcggggagtgcaggggaggctttgtgtgtgaaagcgagatgagcaggtaggtaggggaggaaaagacaagagctgaaagaactgtcagggtgagttccgggccctgatgcaagtcgccagattcccaggaggtgcctatgggcacagagcagcaggacctccagccccggggcagctgacagtccccggagccccacagagtcccactgtgacccaaccctcgccccagcccacctggacagaagtagtgtgggtgccaatcagttggcaaagcacctctgctgaccttggccacccagggtaaccagatgggagccatgcttggagacggtgatttccccagcgggccaggagcaactacacatatgctatgatcagaatgcctgtgtccccccaaaattcatgttagaatcctaacccccaaggtgatggtatggggaagtggggcctttgggaggggattaggtcatgggggtacagccctcatgaatgggattggtgaccctatttaaagaggccccagagagaaccctgaccccttgctgtgaggccacagtgagaaggggacgtctatgaataaggaagtgggtcctcaccgaacactgaacctgcgagagccttgatcttggacttccaggctccagaactatgagaaataaatttctgttgttcataaactacccaggctatggtattttgctgtagcagcctgtacagaccgagataacacagaaggacatgacataagttttaaaggcagacaaaccctggccgccaatcctggggctgtcacctcccggctgtgaggctcagagcaggc

SEQ ID NO: 346578 - DNA, 1000 bp, Homo Sapiens
ccagtttaaaatatgtaaatttattctcttacaacgttcaaggtcagaagtccaaaatgagtcttccaaggctaaaatcaaggtgtcagcagggctggttctttctggaggctccagaggagaaaccattccttgtcccttccagcttctgatgtctgtcagcactcctgggcttgtggccacatcaccccaacctcttgcttccactgttgcatctcttactactcactctaaccctcctgcctccctcttataagaaccttatgatgacatcaggctctcccagataatctccccatctcaaaatcctaaactgaatcacatctgcaaagtcccagggattcggatgtcaaaacctggggcctgggggcattattctacctaccgcaagaatgaaacccagatttctgacttttgcaaccaagtgatgctttcacccaaggatggaggaggttggtgggaaagataattagcttgatataggaaacagtaattctaattagaagtctgggagacatccaggaggggagccagagtaaggactggtccaagaggacccagaacacaggagggaagtgtaattagagagtgtgacttttaggtcttgggtaacatcaacatagctataatcataagataaaatgaagctttatgtatttcacatttatttccctggccaaaaagggccaaggctaaagagagagaaggaggcattgatcaagactgaggagcaagacagttgatccaagaaaggggagtgggagagttgccagagtgggatcaaggagaaagggtacaacatcagatacaggacagggtcaaatgggataggtcaatgatgacctcaaagccatttgagaagagtggaaacaagtggcaggatttgccagggtttgccacaaaagttcttaaagtgcagacaatgtgagagctttgtgtgcagagggcagggatgggcagaggctggtgctgcagaagagagagggacttactgctagag

SEQ ID NO: 346579 - DNA, 1000 bp, Homo Sapiens
ggatttgtaatcataaaataactcactgagagtgaaaaggcaagcaacagaatgggaaatgaaatttgcaaacataaatacaataagaactcttgatcaaaagatactttttaaactctacaaatgaattttttgaaaaaaaaaatatggccaggtacagtggctcacgccattaatcccagcactttgggaggaacacttgagcccgagaatttgagacttgtctgggcaacacaatgagagacctctgcctctacaaaaaatttaaaagattagccaggcatggtggccgtggcctgtagtcctagctactcctaagtagctaggctcttttgagtctgggaggtcaaggatgcagtgagctctgagcaactgctgcactccagcctgggtgacagagtcagaaccatctccaaaaaaaattgatgtagaagaacttctaagaagtgagagtggagacagaggccaaagatgctgctctaggctgctccgtgaattccaggacttctgagaagcaccttctggacagcgtctttactgccctccaggactcagctggtcagcaatggccagccagactccatccccagcgtggagaggaggtagctgatcccagaggcgctcctagcaggcatgtggaacccgagaacagctcgccctgccaaggcaatggagagcaggccggcaaggcaggagctcgggctctgtgtggccaggcaaggaggagccccgcaaccatgccaccaccccttactacaagaagcctctgtatggcatctcccacaaggtcatggagaagaagaaccctccctcgggggacctgctaaacacgtatgagctcttccagaaggcaaattccagcaacagcccctcgctgcttaggctcctgaatgagccatagaagtgggactgtggcagcactggggcagccaccaacagtgaccctaacatctacttcctgatccaggagatgttctacatgctcaacaccctcacgtcc

SEQ ID NO: 346580 - DNA, 1000 bp, Homo Sapiens
gcttataaacaacagaaatttatctctcacagttcagaaggctcagaagtccatggtcaggacatcagcagattcagtgtctggtaagggccaattttctggttcgtggatgatgcttcctggctgtgtcctcatatgatggaaaaggtgaggggtctctcccaatgcctcttttagaagggcactgatctcgttcatgagggctctggcctatgacataatcatcccttaaagtgcccacctcctaattccttcatcttggaagtgaagtttcaacttatgaatttgagggagacacaaacattgagaccatagcacttacctattgcaatgctcttaaataaactgtcttgccatttttaacaagtgtttggtgaataatttctctttaataatacagaccctatacctaatgccagtaactataaggactttataatactccagagtcagactcaatttctcatctggctgctgcctcctgtgttcccacagcaatctgaagtactgaagtcaaaaacagcacatgggccttgcagcatctggggtgcagcaagcagggtgaagggggagactgccttagaatggagggtggcagctccaaggaatgggaaagcttctcaatccctttggtctaagtgggaaaacaaaagagctggcagcaatctggggtgagttagggcccaggagctaaaaagcaggccggtttcatgataacgagcttcttttttgtgtaggatgactgtagcaagtttatctgcaagacccacagggacctcagcaatgacacattgtgggatagattgggaagccagattaggtaatcacagagctggagcacctctctaagaaccagctggggctctgcaggggtgtgacaagtgctcatccggatgagggactcacagagacaactggcacattaaacagattgcactgtcatcttcctgacagcacgcccacaaaggaccatgctcagctgtcatcttcaagtgtggga

SEQ ID NO: 346581 - DNA, 1000 bp, Homo Sapiens
gacagcgtcttgctctgtcacccaggctaaagtgcagtggtgcgatctcggctcactgcaactccatcctgggtgacatagtgagacctcatctcaaaaacaaacaaaaaaagcaaatgaaggaagttcattactaagtcagaccacaccaccacagctgggtccacaacccaggaaactcactccatagccaaaaagcattagagaatgaggcttctgggcccctctgagtatattggtgtgagcagtaggagcaccgcacgcatctgcaggcagctggcaaaaccaatacacctacccctggtcctctctctgaggcacaggctaagttccctgtctggctccatttttgtcccttgtttatttatttagtttatttactcaacaaatgcttggaccccttggtgtatgctgggctggcataggggcatggagaggtgattcaggtccttccttcccaagttcacaacagatggagagagagaggcaggacagacagacaaagcaacacattcttggcaatatgacagtgacatccaggggaatgtgctaaggagcgcagaggagctgaacagggcagagaaggtttcccccaggaaatgagttgagcactagagacagagcaggaggtgccaggaaaggaagggacacaaatcatcccaacccttggatgaggggagcaaaagcttggaaccaaaagagaaggctgttctagaggctgcagagagtgggcacccaggacttgagcatctctgggaacttgtctcttctcctcccttcctgtctctgtcactcagtggtctgtctatgtcccccagtacttccaaagggcaagcactccccgctccttccaagcaggattacagtgcctggaggaggctggtgcatgtggtatggtcaccttgtcacagtgctctgaaggaattcagctcacaaaagaagtagggaaggggagaatcagggaggggaccaaaggagtgtcctgccctcagatggtgcc

SEQ ID NO: 346582 - DNA, 1000 bp, Homo Sapiens; identical to SEQ ID NO: 161451

SEQ ID NO: 346583 - DNA, 1000 bp, Homo Sapiens; identical to SEQ ID NO: 161452

SEQ ID NO: 346584 - DNA, 1000 bp, Homo Sapiens
tttaagataacatcattttattatgatataactttgtgggtcagaaattcaggcaggctttcaagccatccctccagcaaagcaacttacatatgagttgtaactattggctagaacacctacatgcagccacattagcatggtggcttcagagtttgaagtccattgctcccagagacagtatttcaaatagcggagaatacaaactgccagcttcataagtcctggctctggaaactggcagtgtccacattgtgttagttgaagtaggcatggaacctatcagaattccaggagatgggacctggacttcgcctctggattggaagactgtcaggtaattttctttcttcagtttccaacatgattttggtcttatgatcatgatgtgtggacacaaagtactgtgtaaacatggtcttgattaaattgattaaattgagttatataatgcctttttgaatagacctctttttagagcaattttggatttacagtaaaatggagcagaagttaacagagatttcctatataccccttgccccccacacatacacagcctcctccattatcgatatctgtcaccaaagtagcacatttgttataattgattaacctacactggcacatcataatcactcaaagtccatagtttacattaggttcactcttgctgttgttccttgtatgggtttgggcaaatgtgtaatgataagtatccaccattatggtatcatacacagtagtttcactgccctaaaagtcctctgtgctctgcttattcatctctcccgccttcctactcccaggaaacactgatctttttacggtctccatagtttggccttctccagagcgtcatgtggctggaatcatacaatttgtagctttttcagattgtcttccttcacttagtaatatgtgttgagtttcctccatgtttttcatggcttgatagctcatttccttttagtgctgaacaatattccatagcctgaac

SEQ ID NO: 346585 - DNA, 1000 bp, Homo Sapiens
agggttatgaggttttcacttttatttataaactcaaaaagggctggagttacacgatatttatttgcatacagcttcgtgatgtacaatgtgtgttcacatgctccatgttttttgatccccacgtaaggctgtgagatagacttgatttattagtcttggtttttaggctgaggaacaagtccaggaggttcaagggactcatcaggatcacacagccagaaaatagcaaagtctgttcctgactccaagtcagtaggttttgtcagtctgtgttgttgttggagagaacagtcgggagacacatggactaacacaaaaggaatggatgggagagcaggcaaaggtttggacctgccttgtcatcccacaggacaggtagccccagtggcaccatggctctggcaggcagacaaaccccaggatgcttaaactgggatccagggaggcttatgtgaaatgtccaaaatagaccagtttatggagacagagagtagattagtggttgcctaatgttggagaggggtggaaaggggaaagggagtgactgctaatgaatacagagttttctggggtcaggggtgattaactcttctaagactgatcatggtgatggttgcacaattctgtaaatatgcgaaaaaccatcaaaattgtagcagggagggctagtgcatgaggacctccaggctgggaagcaggagctatttcctgtgggctttctggtccgtaaagcctctggaagcagacgctgtttacttctcactgagcagtaattgctgtttctctgccagtctccgtcgcccttctttctgttctggcctggcaggtggtgctctatcccatgctgagtgcagctgcacacctgccatctctctgtgcccagactggacattactccacctccaaccagatgtagagttgttctccccgctgcactgccgtccgtggtctgctttacagcttggctgtgtcagtagacatcctcagttagaacaaa

SEQ ID NO: 346586 - DNA, 1000 bp, Homo Sapiens
aaaagcttaaaatggcatttatctattgtcttaaagtttgggcaggtcaggagccaggacatggcatagctgggtcttctgtctcatggggctgcagtcaaggtgccaaccggagctggggtctcctctgaggtttgggaccctcttccaagctctctcggttgtggaagattgcatttccttgcccctgttcctcatggggctggatctccaaatcctgcaggagagtctctgacttcaaggccattttgaaagggctcacctgattagcttgggcccacccaggatcatctccattttgattaactcaaggtcagctggttaggaccttaattacacctgcagaagtccggcacctttgcgatataaagtaacctcaccacgggagcacatccaccctctttgcagccctgccacactccaagttggggagtacacaggtgtgtagacacctgggggcagggatgctggaaagcgtctgagtctcctcccaaccacgctctccttggctctgagactgagtcctggccccaggtaggtaatgagtgaagctttgcggaatgaatacacgagggaatgagtgagtgagtgaatgtgtgagtctggcatcttccatcaaactgtgaccttcccagggccagggtccacattggactcacctctgaaatcgccatgccaactagtgctcctggttacctatgacgctttgaatgctcacctgagcgagtggaggagggagtggcgcccctgtctctcctcaaggtcagtgtctgtgcagagcagctccaagacccattcctctgggagccaggtacagggccgcaagctctgtcctcggcaccatctcctctggctcctccatgcagctgaccctccagtgcacagcagcagcccccagggcagcactggccacacagggaccagtggaggcaggctcctggctgtgagaccttgggcaaggccttctgtcccgaccctcctggtctccatcagcaagaga

SEQ ID NO: 346587 - DNA, 1000 bp, Homo Sapiens
taatattttgaataattttatgcatgaaacaaagtttgtgcacattgaagcaagtgtggaattttccacttgtggcattatgtcggtgctaaaaaatgttttagattttggagcattttggatctcagaactttgcattaggaattgaggactaagtctgatattctgtcttacccagattcctacctaagaggtctaggaagtcatgccctacaaaccatacattctcatcagatgggttttatttgaccctatatgttgtgatttacttttcaatctgactctggcataacattatgagacaaggaaaaaaatatttaaccccaaaatatatttccgtgccataccttgaaattgccctgcaaagtctcttgtgggaaaaatccacattctatagagattccccttccgcctttgttttccttcctttctttccagatccaggagataatcaactaagtaagagccaggcacccttttaagtccgataagagacaatttacaacttgctctgtctgaagtctgctatctgagagcttcctctgcacaataaaacttggtctctataatcctttatctttaaactgaacattcctttctatggatcccaggtctttagacaaactcaaacaattgtcaaccagaaaatgtttaaatttacctatagcctggaagccccccgctttgagttgttctgcctttctgaaccaaatcaatgtatttcttatatgtatttgattgatgtctcataccttcctaaaatacataaaaccaagatgtatcccgaccaccttgggcacatgttctcaggacctcctgagggctgtgtcacaggccacggtcactcatatttggctcagaataaatctcttaaaatattttacaggctgggtgcagtggctcacgcttgtaatcccaacactttgggaggcggaggtgggtggatcacatgaggtcaggagttcaagaccagcctgaccaacatgacgaaaacccagtc

SEQ ID NO: 346588 - DNA, 1000 bp, Homo Sapiens
ttctaggtaccatgagatttaatactggatgccacaatgtattttccaagttcccagagtgcacatgattgcagaggcaggaatgggcaacaagatggataagatccagtctttacccttgaggaacccaatagtgttttctggtgacttccttgtgccagatctgctcagaatcagctttgtccctgcctgtccagtgcccttgctcaggaagatgggtctgaccaggtgccagcccaccagggtgcctttccacagtgtgcagggggcatccacctgaatgcccgtcttcagtgcatcccctggccctgcacttgctattctgtgcagcaggagtttcaaactgtgttccacagagccctggagatagggtgtgtgggctgggcaagtgagagacaaaccctgaggaactgtgggaccaccccagcagcctgtcatccctgtcacttcttgggctctcaaggttgtatttgaagaaatgatttcagctgggcgcggtggctcacgcctgtaatcccagcgctttgggaggttgagatgggcggatcacgaggtcaggagcttgagaccatcttggctaacatggcaaaacctcgtctctcccagggctgtggaggcgatggatgggaatttgctttcgtccagtagttctgctgttacaggtgctccctctcccagccttgggaggcaggaaaagcgtacaggtttgaggctctggaagacttggtgtgaatctcagctttactacttactccttgtgtgatccaggacaagtcactttacttccctgcaccccatgtgcaaagcggtgggggtgatcaccccttgtgtggtggctgtgaggactgggcaagctcacacaagccagggcctagcacagagcagggagcttgatacacgtttgtttctgtctttctacctgtgcctctcttagggcaagtgtcctctctgccttataggctggccacttaccctcctcatgtgtgcaatggaggagcta

SEQ ID NO: 346589 - DNA, 1000 bp, Homo Sapiens; identical to SEQ ID NO: 161453

SEQ ID NO: 346590 - DNA, 1000 bp, Homo Sapiens
caagataaagttctatttatttggaagaaagactgacattggacacataagctggaaagttctaaaagagatagatatgtagatcagggcaacagcgctggaagagaattagagtgcaactctagaactagacagaaggcagccatggtcactaggaagacaaggtgagcactggtgagaaaggttaatctcagtgggcctctaaaagcttcatgaggcttagtcctgggcccactgtgtacccagcttaaggaagcaaggccaattttagaccttccactgaagatggggctgggccccaaataagttactaggattggtcaagacaggaacaggaactgggcaaatctgaatctgtaatttggtctgcagtacctataggtgggcaggactagagatggcaggggttcacagcaataagattagcaactttttgaacataaacctataaattgtaataagcagtgtttcggccgggcgtggtgactcatgcctgtaatcccagctctttgagaggctgaggcaggcagatcacgaggtcaagagatcaagaccatcctagccaacatggtgaaaccccatctctactaaaaatacaaaaattagctgggtgtggtgatgcacgcctgtagtcccagctactcgggaggctgaggcaggagaatcatttgaactagggaagtggagtttgcagtgagccacaattgcgccactgcactccagcctggtgacagagtgagactccatctcaaaaaacaaacaaaaaaaaagcagtgtttcctttctctttcagattggttcctagacactctagtagctctattaactctgtatagaagagcaaaactgtatgtaaatgtttgtgtaggtgcatgtgtgtatgtgcacacatgggctttctcttccttagcagactgggataaatttttcaggagtaaggagaaagttggggtcacctagtccagagaagagaaggccaagaaatagaatcaaagtagtc

SEQ ID NO: 346591 - DNA, 1000 bp, Homo Sapiens
aactttaaaaaaatatatttaattggcaaataaaaatagtatacatttatggtgtacaacatgttttgttatatgtatacactgtggaatcactaaatcgggctaattaacatatgcattatgtcacatatttatcattttgtaatggtgagaacatttaaaatctctgtgagcaattttcaagtatacagtacattgctttttttgtttttttgaaacagagtctcactgtgtcacccaggctggagggcagtggcgcagtctcgactcactgcaacctccacctcctgggttcaagcgattcagcctcccaagtagctgagattacaggcgcacaccaccacacctggctaattttgtagttttatagtagagacggggtttcaccatgttggacaagctggtctagaactcctgacctcaagtgatctgtctgcctcagcttcccaaagtgctgggattacaggcgtaggccaccaccccccgcccagtacattgttattaactattgtcaccatgtggcacaatagatctctggaacttcttcctcccatccaactgaaagtttgcattctctgaccatctccccattccaacaggcaaccaccattctactctctgcttctgtgagttccactttgttaggttctacacacgagatcacgcagcgtttgtcttcttgtgctctaggctggatcttggttatcagcccaatgacaagcagagtaaaggcccggaagttagggagaccagggctcagtgtggctggcactgagagctgagcttctagcgtgggcccacacatacatttaagactgtagccaattttcctttcagaaccacgatgaagaaatgaaagccaaggccaagaaaatctttaatgttctgttcctcccctgcttgggaagtagagtggtctgaaggctccaacacagaatctgtgccataaccaagtcttatctggggcaagttacataactgctcatgaaataggagtgat

SEQ ID NO: 346592 - DNA, 1000 bp, Homo Sapiens
gagatgctgtaacccaggttggagtgcagtggtacaatcttggctcactgcaacctgcacctcccgggttcatgcgattctcctgcctcagtctcccaaatagcagagattacaggtatgcgccaccacgcctggctatatttttagtagagatggggttttgccatgttggctgggctggtcttgaattcctgacctcaagtgatcagcctgccttagcctcccaaagtgctgggattacaggggtgagccactgtacctggccagaattcattacttttttattgtggtaaaatgtacataatatttatcatcttagccattcataagtacacaagtacaccatgaatacatttaatgctgtggcactaaactcattcacgatgttgtggaaacatgaccacagtctgtacccaaaacttcgcccgtcatccctaacaaaaactctacccttcaaccaataactcgcccttcctcgcttcccctcacttgctgtctctagctacctttcattaagtttttattgtgaaaatttgcacaacacggaagttatcactgtagccatttttaactgtacaggtcagtggcatcaaacacatttacactgtttgcaaccatcaccacccttcatctcagaactctttcatcttcccagattgaaactctgtatactttcaaccctaactgcccgttctgacctcccccagaccctgcaggcaggggttagatgaggcgaacatgggcagaaagactcctttgcgtctctgaatttgcctgttctaggtcgctcgtctaagtgggatcatacaatatttgtccttttgtgtctgacctgtttcactcagcatgtcttcgaggttcatttttgtgtggcgtgtgtcggaacttcaaccctctctggagatggaatagcatttgtatgtctatgccgtaattcacaagtccgttcatctgtagctggacacttgggttgttccaccttctggctgctgtgaatgag

SEQ ID NO: 346593 - DNA, 1000 bp, Homo Sapiens
gggaaagctggttttccttttaatgagttcacattggccaccccaggcctttctaggcagaggagataaaccagcccagcctctcggtagcccctggagaatcctcacagtagaggcggcaatctgccccgagaggctggctttctctctgtccacgtgggcacttcccgctctgaggatacagtttctggacagtttagggctgtgtttgtgaccacagtgaggggccttcaggtcactcctgtgtacgggagcaagcacacccctcctcagggccagcccaggtcagcaagggctgtgctcagcaggctgggagctggaacatgtggagagaccaggtgtgacctctcccagcctcggccttcgcatcacaaggcgctgtgctttagggggaagagggcccacctctggggagaagtgcaggacctgggaggtatggaggccaggcgtggggttcccgtgttatgctcaaggtgcccacttgtaatagccatttaggggggtacctatggttgtcgcaaaagttgatacctacccttcatgagactgccagcatgaatactctgtatttcataggatttcctctctgttctcccttagtatttgggaaagttcttcctgaaaactccctgcctaattcaagacagatgcaagacaggaccaaaggaagggactctatccagcctgggacgggcggaaaaagggaaggagagcgagaccctctggaagcaacacggtggtggccccagggttggggagaggggccccaggaaaagtgaggttcgggcagatcccctgtattcagagctgccccttctcagccctccaactctgcagggcctgtgatttagtccacgctgggatgagttttacacccaccaacattaagagctgaagatagttttgaaaccaggcatgcctcagctgggcgaagtggctcacatctgtaaccccagtactataggaggccagggtgggaggatggcttgagcccaggaat

SEQ ID NO: 346594 - DNA, 626 bp, Homo Sapiens
gatttccacttcattatgcaagtacgctatcatcttcaggtcttttgtatgtaaaatgtttctgttccagttgtagaccttgatgattgtgcagtatgaaatcgtattgtaattttcttgcatttagatgtcaacctcagaaacaggaacaatcgtcttttgaacttccagtaggcccacagttgttggttgttcctcaaaacaggttgtggctcctgaagtcacacatgggagctaggggctagcatttcaagccagatttgcctggttccaggattcatgctttgtggcaagagccttgttggaagcccgggtccttctgaattcacggtccattgtgctctgtcttcagtcaggccagattttaaacaggaatgaagaattagcaataatgtttccttatgcaagtcaatgaacttcttcactttagtttcctcatttgtaaaatggggacgaaaatacttgtcaatgttgggaggttttaatatggttatatgcacaagaggtactccaatacgtgacagtatctctgtcaccttttcaacatccgctattaatctctcagcatcaaatcctggtgtgttcttattggctgacattttaatttttctttcaacagaaaccat

SEQ ID NO: 346595 - DNA, 1000 bp, Homo Sapiens
tttttttttcttttagtcaaatctgtttatttggattatctgcatgttcttaaccagaaggaaatgctacacagagttgaagaataaagacaaaatattaaaaatttaaggtaggtattatgttctttgtataatgtggataacagccatattgagctacggaaagtaacatgacaaaagaatctctgagtgtatatcactcacggtcctttaggaaatcgatagtacctttttttaaaaaaaaaaaaaaggaggctgcaaagagtttcaattcttgaaagtgtaggcagggttaagggaaacagcatggggtggtgggcaacctcaggtgctggcatctggctctaggaagccattaccctccctggcaagaggcaatggagaaaacacttacagaaccaagtgaacactgtcactttgggagaggccacctgacaggggctgtggaaaagcgtgagccactgtcagacagagacctggcagggtgggagccaggagaacaaatgctgcagactcttcctcctcctggccctccatctgctgggccctcccactggccacattcaatgggaaatcagagggcaaaggagccagactgatgctgtcaatagaggcctgtctcctgggatgctgaacaaagatgggttgctcttgctctgcatccacgggatagatccggaagggcaacggatgatttcattcagtgtaatatgcatcttggtaatatattcagggccttgcttcatttccacctttctccaaaaacatattatcacttttctttcaaagtaattacttctgtagtaatcctttttggaatggaagccatagatcattcaaactcccaatccttttctttccgagacagcatctttatatgaaaattgtcatagcatgatgtaggctgcagtatatccccaacaggaatctccatcttgggtttctttttgtaaagtctgcatttgacccctttacactcttttccgtgttcataaacgtg

SEQ ID NO: 346596 - DNA, 1000 bp, Homo Sapiens
gcttaagttttctctgaatagtttcccctattctgtgggactcttctggtctggtctgttttgtctttgtgctgaatgttcaaggctgaatggtcaatgtctggtagttggacggttgcttggcctagggaggcttcaactaggatggcctgaatctgctccaggtgatggctcatcctccagtaggttagctcaggctttccacacgtggaagcctaaggattccaaaaacttagttcatgaatatggaggctgagaagtccaagaacatggcactggcgtctggtgagggcctccttgctgactgattcttgataccagtctactgcttctttcataatcagtcagtgaatccaaaactgttgtttggctatcaactgtctcctttagacacttctcgagggcgcttcaaacctgaaggagaacccaatcaagttgtcagctggcaaattattgaaagtatttggctgagtgtagtggtgcatgcttgtagtcccagctacttgggagactgagatggaaggacctcttgaggccaagagtacaagtccagcttgggcaacctaatgagaccacatccccgagctgggaaggcaggaagtctgtgctggctgggggttggtctcagagggactctggggcttggacacaaaaatcgcggcgcactggggaggacacccggagcggtgggaactgcggtgtggacccgggagaaaagggggttggaggtggggggagatcgcgcggcacgcgttgcataacctgacctgccctcctgggctggaggcaggagtgacacctccgcctgagccgcagttcagagaaggctaccgcggcgctgggtcctgcgggacagccagcagggctggggtggaatgggggcaggggaaggagccctgagaggagccaggatgggtctggacctggctccaagtcgcgtgccctacacaccccctctgcgctgcccagcggggcacggcccgacctcggaaggcccatc

SEQ ID NO: 346597 - DNA, 1000 bp, Homo Sapiens; identical to SEQ ID NO: 161456

SEQ ID NO: 346598 - DNA, 1000 bp, Homo Sapiens; identical to SEQ ID NO: 246648

SEQ ID NO: 346599 - DNA, 1000 bp, Homo Sapiens
tttcttttccattggtttatttgtatattggtccacaacacattgaagcctcacagttccaagaattttttttttttcatatttgtggcaaactgaggtagagacaatgcttggcacagaataggtactagataaatattagtggaatgaacagccgaagcgactgacttctaaatggagcagattgctcatttcacttctgttcctccacctcaacaaacctttacatcctcactggtttgtgaggccagagaacaggtgtggccttggtgtgataagaaatgctaattttatacaaactgaagcaatctggtctcaactttgacccccaaatgccctcaaaatggatcaatgagccagggaggcttgaggaaggagggagcatctgcccttcctcctggccagaagagaatttgaatttgctttgagtagcttatgggcagggctggaaggtgcagttcatgactgtcagcagctttgaggctgatggaggcatggggaaggattaggggcctgggagaaagcattttatttccctgtaccccaccaccccaacatgggggagaaaaacacaacagcaaactgaacagagcagaggccgaggcagcaagaacccaaagacggaagctgcttctagcatcaggctccaggatgcaactgcggctctcagctctgccggctgagcttccagatcctgcgaagcaagtcaggttccttccttccctgccaggctggagtaaggaggctgttctaggcaggcagtctgcagctgctcaccaaggtctggaacaagctgccttccttctttgccgagcagatgtggatggcggtgggcctggctaatcaggggtgttcctgggagagtaacagccttgagggcatcagcaattccatttttgggagcagggacaggctgactgtggtttgcagatggctgggagtggggaagaattgtctttccgcggggcgtgtctggggatctccaagcgtctctaagggc

SEQ ID NO: 346600 - DNA, 1000 bp, Homo Sapiens; identical to SEQ ID NO: 161457

SEQ ID NO: 346601 - DNA, 1000 bp, Homo Sapiens; identical to SEQ ID NO: 246649

SEQ ID NO: 346602 - DNA, 1000 bp, Homo Sapiens
aactaggtcatctgtttatttaatcattgaattaaaatacaagcaaaagaacaagtgatatttttagaacgatctacaaaaaaatttgacattgcacctctaattagagacagatctatttcatgtctaacctttagtcttattcttcaattttgttttcaccttctttaactcagtcttaattttcctgtttccttttttttccaacactggcaagtttttaatcctttagaaaatcatttccaaagaatagtacacataccactttagatggaataaagatattaactttaaaatttatatattagaacaatataattattccttcaaaatgatgaattctcagatattaatgtttaaaaaaataaatttaagcaaagatataagacaatttaaaaaacgctagataaataatagtagtcgtatcttgatagaaaaaaatcatgaagttggtgtgtaaaaaactgaagttgagaaaacattgtttaaggtaactatcagtattacctggcatcaaccccctggcatattatctcttttttttttcttttctttttattattattatactttaagttttagggtacatgtgcacaatgtgcaggttagttacatatgtatacatgtgccatgctggtgcgctgcacccactaactcgtcatctagcattaggtatatctcccaatgctatcatattatctcttaattgttttagatttattctagaaaggccttgtgttggccattgctatcatgcttgttccagctgcaatactccagcattatttagaatctcagccttcttttcgaacttccatgaagaggtgagcatttttcccatctccccaacacattccacaccatatttagcttccctgctagacctgtggctttctattcttacccatctgccatatacccttttttcttcctgagaagtcccaattcggactggtattgtacatacttcaaatacactgaatagtcttggtttagtggc

SEQ ID NO: 346603 - DNA, 1000 bp, Homo Sapiens
cttaataaagttctgtacattcacgaacccaaggaaattgataaatccattttgactttaatttagcttttcttcaaaaagcaaaatgttggcatttctttggctcccttcattcttcagatgtcttttctttcttgcctttctccagtgtcctatctaatgatatggtttgactttgtccccactcaaatctcatcttgaattgtagcacccacaattctcatgtgttgtaggagggatctgggaggcggaggttgcgatggccaggatcgcgccactgtactccagtctgggtggcagaggggaactccatcttaaataaaaaaaaagtgcagtatcaatgtcagccattaccacgggcaatggtgcttaaaactaccgtggaaactcggaggatagcaaggagcccaaacctcacctggagccctttgatgagggccaaggggaccggaagttgtgaaaactaactttcatcattcattgatggaagattctttcccttgacattaaatccccaacactcccagccacacaggtaagactgagcacatttgagtggcaagctttcagataaggacatgcacgtgctgatcgtggtaagtgagcccagcaagcattgatataagggctggtgaatgaatggatgtggcattgacaatgactgggtacaggaggttctattgaggctccttatatttatgtcaaatgtatttttgttctttctaatagtggctgcttttaatcctgaaaactgtttaaacctgctttaaagatttttaaataatacatctgtttgtgtgagttttttaaaaaatcaattctaatttaatgcttgagttcatgcatacactacttgaggcgacacttgggttgaggttcatgttctaggaaagcacttttgttgatcatgaatgcagacgatgtgaatgcatcactggtctatcagtgggtgcgaaaattttaaaaaaatgcctgtctgccttgtttctcatattttgtt

SEQ ID NO: 346604 - DNA, 1000 bp, Homo Sapiens
gtatttgaaatgtttatttgttatgaacccaattcaagctggcttaagctagaaaacaaacacacacccacacaagaatatgttaactgtcataactggaaaggagtacattggcttcagaaatggcttcgttgaggtactcaaggggcctcatcaggattttgttccccaaagtctttatcccacagacatttatgagcatttcccaagtgacattcttggtagcagagacacagcattgcacatagaaagtctgtcttcctcaagccaagattctagctgacggtgagagaggcctggagtccatcctaggttcacgtgctcagccctactattttctgtgacagatacatttttagctaggttctctccgtgtggtggtaccctacctttccaagctcatatccttccagcaatacatgtaattaaaaagagaccttatttccacagttctattaacgttctgggacatccctggcttagaatttaactgatccttattctcagctttgaacagattacaatgcaaaacgatgaaattcactaatttcttagacctgacactggggctgctctctgagcagaggaaggcattggccccacctaaacacatggatggagagtgggcaagagagacattcccaaagggaatttgggtgccagtagcagaaggaacaacctttccagggcaggcagaagcaatagttaactgcagcattgaaattatttccttaggatatatttttagaagtgaaatatgaatgcatagtggaaatatattttaagacttctgacaaaattgctaattgtcttctatgatgtgtctatttgtttttacactcaccccatgcgtgtgtctgtgtggtttaaatggtgtaagatgttaaaagtgcttagagtatattaagttgatttctgatcaccgaagactctctttttgtctataggtgacagactaataatattaatccattagttcacgtttcaattacagataaaa

SEQ ID NO: 346605 - DNA, 1000 bp, Homo Sapiens
tcagatggtagctctgtttaattttttaaggaactgccaaactgtttctacattggttgcaccatgttactttcccaccagcaatctatgagaaatccagtttctccacatcttcactgcacttgtcatttctgttttgttttttattatagccctcagcatgagtggaaagtggtacttccataatgagtagctgctgagtatcttttcacgtactcattggtcatttgtgtatcttctttggacaaaggtctcttcgaatcctttgcctactgtttaatttggttatttttctttatattgttgagttctaagaatttttatatattctggatacttgtcccagatgtatgatttgcaaatatttcactcattctctgggttttcttctcgcttttttgatcatgaactttaatgcacaaaagttttaaattttgatgaaattcaatttatgtattttttttcctgtggttgtatgtgcttctgatagcacatctaagagagtgctacctaatccaagaccatgaaaatttacacttactttttttataagagttttatacttttagctcttacacttaggtctttgttgcattttgtgtttgttttagtctaaatctctgacatgagtaaagcaggactcacccgatagcaggtgctctcagatccctgcccatccatttccggccaaaagagccttcaagacaggtccagcagtgccaggaagctgactatgctcactgcaaggcagattgagaaatggagtcagctctggtcccaggagggaaaatggacttggggaatagccagccacgtctgcccaactgtcttctcatcagggtgcttcacaaacctccctgaggtcacctgttggtttccaggtctctgtgcctctgtgccacgtgttcctatgtcttcaacaggaaataggaaaattcagaaaactgctcagagatctcaggtgccaagaaccccaggcctatgtactttgtcctctgca

SEQ ID NO: 346606 - DNA, 1000 bp, Homo Sapiens
aaaatgttaatcagccccaaatggcatagtttatttatgcaatgctccagcaaatttttatcaatgcctactatgtaccagtaggccaggtctaggagtgcagcaaaatcatggtatcgggccccacagcctttgaagtgtgaacagaaacctcaagtgtggtgagcattaaaaaggacagaccttttggagtaggcaacacaaaaactcatcctaatcatggggatcagaaaaggctcgattgagttactgatgtttacactaaaaagattaataacattgagtagataaaaggaaagaagtggagaacaaggactgcattgttgtagtattggctaaagaaattcttaaattggggttttaaaaaaggcatttggaaagaaaaaaccttaagaggggcatgcaagtcaatctaaatatatttttaaaggattaactatgttttctgtgaaaaattctgtgtactgggagggacatggattagtgaaaatgactgaggaacagattccaagtggaagaaacacctgagtgaagaatggaaggcaaaattctgtgtgtattggcttgaccatggaagagaagctaggcaggaaagaggttgcagagagatgaggaaagtcagtagaacctttactatctgagaaactatggtctagaaagtaaatacaaaataaatgagaataagaggaattcgaggctagaaggggaatccctgggatactgtgagtgttattgcctggattagggtaatgcggcagatgcttggtgccctgcccaaatccccttggcatcccattcccatttccatacacaccacctgctacctaccacaagcatctgtgactctccatcctcgggctttctctggccacagaagcatgcctggtctatctggggcacaggccagaagtttggggaggttaatgcccttaaccagtgaagcacggaaattagctgatcagtaccctagttctcttgccccagcagagggggacaactc

SEQ ID NO: 346607 - DNA, 1000 bp, Homo Sapiens
gttgttatcagattataattttgtagacttttaagagaaagctttgtgtgttctgtgttctccccatgagaaaggtcatttcccaggctccacagatgcctgtcgtgatgtttgagccaggtcgttttttgttgtcacatgaaaggctctgttcagctggttcccctttgtcctgagtggtgaccacagagctttgctgctcagcactccttccaggaaggcctcgctggggaagctgtggagaccatcagcagacagcagcgccatcggggccaccccagctgtgcccaaggtcaaatactctggtagctcccagcctgggaatgcgctctgtgtggattccaccctgacttcttcctgcagctgtgctgctgcctctgcttccctggacactgcatctccctgggaccccataatatcttgagaggaacactgctttcgggtttatcagggctgcactaggtcactcccgtttgttcttccaaatccaccttccttccctcttcgcctcgctgtctgccatgctgacctgtttagataacaatgagctctcttgccctctgaatttcagttatttgtttggccaatgacgaatactgatgaagatcaggaggactgagtttggaatccttagtgctcccgctctctccctgtggggtcaccaggagctggctgtgttcctccaactgaaggctgctgatccagtaaaggtatccttccctagatgattttcccatgtcccagtctccaccccctccccttgtcactttgggtgcaggggtggtaacaggactgggctattaaactattccttggagtttccccaaaactttgtaaacagtccctttatcatcttcatctgggatgccaaccatttcctgttgggacactgattgatgcaagggcttttccaggaatagctcactatgactgagagaactggatggcatgggtttataggcaagcaaagaaaagatcttccagtagcttcatgaaactg

SEQ ID NO: 346608 - DNA, 1000 bp, Homo Sapiens; identical to SEQ ID NO: 161458

SEQ ID NO: 346609 - DNA, 1000 bp, Homo Sapiens
atgaaactcatttattcactttatcaggattgcttcattgtttgtcaactcaaaatattagtggggatttagggaaataatcttgctctctaattagatgaaatgggaggcttattgctgcagccataaatgatcttttaggtgttactaattcaactaaatctcagatgtccaatttgtgcagcctgttgatgatattattcagtgaaaaatggttggggagattgggaatgattaagaaaattagtcttgctcacaacttaatgataacacttgaggataatgtaaaaacaatagcaactttgaaagtcaagatgggtcatccagcaatgaactattacccaactcagtcgccaagatttggatcattaagtgctcagctacataaggaagaaatgaattactaatttgtgttgttaaggctaatgttcttgtttagtgtttagactgacctataagttcctgcgctgtcctgaatgaagccttgcaggatggaaatatggcaaggttgccagctgggctatactcacaggggtcccagattatctctgtccgggaagcagtggtgggaaacgggtaaaaatattctccacatggggtctccacttctctggcatcaataatccaagctacaagttcttgctattctttatctttgtccttactgtgcctaaatttatctttatccattctcagccttttttcaaggaaaagaagtattgtgagggcaatgaggatccacgtctttacatccatttctttgctttgcataaagtcctcagtatttattttcctttagggatgctggctttcttaggtaggggatctattataataattgatttcaagtccactaggctgagatggctccagtgcctttgtaagcaaaccaaaacctaactcaacctaaatactaaaataaaactttagtttaaccaatcagaaattgctaaccaacctgtaactagagattttcagcctaaatcaatcagatattttc

SEQ ID NO: 346610 - DNA, 1000 bp, Homo Sapiens
actaaaagaactttatttttttttcccaaggcagaagaatttttcttagtacagaacaaaatagagtctcctctgtctacttctttctacacagacacagtaacaatctgatttatctttcttttccccacatttcccccttttctattcgacaaaaccgccatcgtcatcctggcccgttctcaatgagctgttgggtacacctcccagacggggtggcagccgggcagaggcgccccccacctcccagacggggcgtcggccaggcggagttgccccccacctcccggacggggcggctgccgggcggagactctcctcacttcccagatggggtggctgccgggcggaggggctcctcacttctcagacagggcggccgggcagagacgctcctcacctcccagacggggtggcggtcgggcagagacactcctcagttcccagacggggtcgtggcggggcagaggcgctccccacatcccagacgatgggtggcggggcagaggcgctccccacatctcagacgatgggtggccgggcagagacgctcctcacttcccagacggggtggcggccgggcagaggctgcaatctcggcactttgggaggccaaggcaggcggctgggaggtgaaggttgtagcgagccgagatcacgccactgcactccagcctgggcaacattgagcactgagtgagcgagactcagtctgcaatcccggcacctcgggaggctgaggcgggcagatcactcgcggtcaggagctggagaccagcccggccaacaccgcgaaaccccgtctccaccaaaaaatacaaaaaccagtcaggcgtggcggcgcgcgcctgcaatcccaggcactcggcaggctgaggcaggagaatcaggcagggaggttgcagtgagcggagatggcggcagtacagtccagcctcggctcggcatcagagggagactgtggagagagagggagagggagagggagagggagaccgtg

SEQ ID NO: 346611 - DNA, 1000 bp, Homo Sapiens
ttaaccatttaatcttcaggtagtaggagttgtggtgatttttatttcctttgttatacttttctgaattgactgattttattcccagtaaattcagtttaagatgacaaaatctctgttttttgtagttataaacttgtactagtcataaacatgtgctagctccaagtgaaaaaattagtgctgttcaacataaattctcaggatattatactcgagagccagtaggaataagggcaaagaaacaagcgttaaggcaagtaaattagatgatgagagaaaacctagtctacaaagttaccatttaaatcttgaactccggacagctatttcataaatggttttctttggtcatacaaggtgaccatgggtcatataaggtaatgttaaaatcacaagtcagggtttctgtctgactgctggtgggtcagatatcttcccctcccatgaaagaaaagtcattctttagtgttaataatcttgtcatgtctgtagaaatgagcacttcctcttccaccaccaagctccccaccccaaattctgcttgggacattatactgcaggctaatgatctaaacaaaattaagattcattaaattaacaattccattgttcctaattaagattttactttgcacttaagatattgaaccatacatagccctgtgtatatttttaatgcaagcaaatattaatgaagcaaatttgtcattttcatttgtgtattttggacaaaggtttgtttatactcagtgaaatgataattttttctggtaatttctccttttcccagcaaagaatgcttaatctcctttctgaaaatgatttgatttgggcagcaaatcctacgttgagaattcttcccagatctcaagttatataactgaacagatggtattcgcatggctttgacaggtcaggctgctatcacaggacatcctgaggaagcagctcggaagccttcccgaggagagtgggaagatcccgtgagcaagcaggc

SEQ ID NO: 346612 - DNA, 1000 bp, Homo Sapiens
gagatggagtcttgctctgtcgctaggctggggtgcagcagcacgaccttggctcactgcaaccttcgcttccgggttcaagtgattctcctgcctcagcctcctgagtagctgggattacaggtgcccaccacgtccggctaatttttgtgtttttagtagagacggggttttgtcatgttggtcaggctggtcttgaactcttgacctcaggtgatccgcccgcctcagccttccaaagtgctgggattacaggcgtgagccaccgcacccggtcgacagcaccttttgacagtgtccacacatgccagaaggggtgaggggtctctctaagaccccttttataagggcattaatcccattcatgaggctctgcttgttatggactgaatgtgctctccccaaattcatgtgttgaaatcctaacccttaaggtggtggtatttggaaatacatttgcactatcggaggaggccttgaaggacagaccacgtgtcagcagatccacctagaatggaagagaggggccttggagagccacagcccggaccacaggggctgtggagaacacagcagtctggcttgctgggagcagagttggggcactgccggcgaggccaccaggtgtggctgttacatgacagccatagatggtgctatggaagggccttcagtggggtagtgacatacgtattttggggttctgttaaaatgcagttgttcttacaaaccaggaaggctctggctcaggaattctcttgatgtctcatactacagaaaccccctacaaagaagaaaggtgtttgtgcagaagtttcctgcacacctgtgctgggtgtccggctctcgtcctcccagattgatgctccatccttcaccctgcttttgccttttggggccacctccatgggctgcagccagatgtggaggtgccctgtgggaggtcaaaggcaggagagggagcgatgcgggaatggatcccctccctctttgggcctgc

SEQ ID NO: 346613 - DNA, 1000 bp, Homo Sapiens
gcgccaggtatgagagaagccacacctgagaccagcccctctgtcctcctgcctctgcatgcagcgtccctgcaggaggcagaaggggtgaaaagtagcctcgatgtgaaagtccttgtgtgtccctgaggggggaagtaagtcacagtcgggacactggttcctgtcactgggtgcagcacaaagaaggaccccaggacatgcggtgcagacgggagcacagagagggtgagtgctactggggtgcacaggcagcttgaggaggatggagatggcaaacttccctttgtcacaccaggtccacgttcagggccggaggaccaccagatccccaaagcctccggtgcttccgaggcagaggagaggcaaagccggtggccccctgcgtccagggacctggcagccaccactgaggcccacctgcttgtccctcagccgggtgcccactggcagccacactccaggtctctgggctctgcccaggacgtgtgtttgggcttctctccccagcagaagtcatcagcgtaccctctgcatcccacggatttgctttgtttctcagtttcttgatcttgaccagaattgggcacatgattccatccaaccacaaggtggggcgggaatgaaatcctatcacgtcctcaggctgtggagaaaaaaaactatgtcaggcctctctaatgcctcccacaaatgggcaggagggattgaaacagaaaaggggttcctcctgacatgtggcattgatggagcctggttctgcctcatgccaagccctgccttgcccctcgatgatggaaaatggttgtgtgtcttgtttcctggcctccatctctgtcttggtacagagtagagacttgagtctcagttccaaagacaggagtcccgctgagctgacccgcccactgacagatgaagtcttgccatctgctgaccaagttccccaaggccccttgagactcaacttctgaagaggttctgctcagaattccccgtcccc

SEQ ID NO: 346614 - DNA, 1000 bp, Homo Sapiens
ttcagcttattatacttttattttgatgagcaccaaaatatctttttcttcaaatcaacacatgaggcttttttacttaacaagttatttcctaatttgagacatcctttctcacatatgatcatcttttgcaagttaagtcacctacacttatttatcagctttgagaaatctcctccaaccacagtatttccacgatgaaatgcacattttcatgaaacacacatcttttataaatgtgctgtgatctgcagccataaaatggccatccacagttattgctttgctactgagcccgtctgcaccagcacctcccctgaccatctgttgcccaaacccatgcatcctgcgaaggcatttgttcacattgcttcctgtcagcctccagccttctctccttctgtctagtcacaaccttgtcatgagttctagtgccaggacaactgtagaactatgatctgattccagggcccaaaacgtcatggtaagcttgagacccctgattgccactcttatggaagccccattggccacgctggcatcttgtatttgtggaccacagggtatagagattaaaccatctcattagcaccctcttgtgaatagaaaagagaaccccagagactggagggagaatccagcccagactgagggatgggcaatcctcaaccagcctccccgcagctgggattcgaaatgtagactgaagtatttctagcttccccatcatcaatttcaattttgccaagcttcgaggcaaaaatggacacttttgtctgtccagacacagacacttctccataagcatctttggcaaaaggaacttcaggatcaattttcttcacatatgcatggaattggtttgaaaagagccacacctgtttacccgcaatgcagctaaaaaagagccacatgcaaagaaagagtgggatatagtgaaaataccatgggatctggtatcagtgaccctggagcctaccacggcagagtctgagctggg

SEQ ID NO: 346615 - DNA, 1000 bp, Homo Sapiens
tggcagttagaacatagtttattctttaagtgtaggagtgcatgacataacacttgcctggcatgaccttagatcttacgaataatttgttattgccacaaagggtctattctgtcagccttatgatctttattttgacattaatgctggtcagttgttgtgtctaaaccataaaagagacggagatataatgaagcgtgtctgacctcccatcccgtcatggccaggaactcagttttaaggtttttctggggtcactttggtcaagaggggttccattcagtcaattagggggcttaggattttagtttacaacttacttcaccatctctagggtgttgtctttatttatgtggtccagaatgtccacatgtggccaactaaaaattgatgactataagaaagggaaagttgctttaaggacgaccccagtatctggcacactctggcaactgaagtccagagctgaagcataaaaccaaaggaaacaaaaagcagtctcagagcatatgagaaatcaaagagtttcttatatactgcagatagcaattttaaaaatcagtatttttaagctcagagcattggatgccaacaacccatagttcctgcacaaagacatggaaaaatccagccacaggatctgtcttgagcaataaggcatacatcatatataactgcagtgatactgatggaggctgatttttttcaaacaaactgggcagtgttagtatgtgtaaaggaagtgcagaagcactgactacagatgtggccacattctatagagtagatgtgttgtatactaagttcaatctctgagcatccatccatgcaaacttgacactgaatataaccaggtagtatatgacaaaaaaaatttttttgcagggaattatggtgggcactgttggttatacatacatctctgtcccttttcactccctcctcatcattgttcaccacacaactgccagtgtggtcttggagtggccttgtgtttgct

SEQ ID NO: 346616 - DNA, 1000 bp, Homo Sapiens
gttctctgacaatgtaaacatcatacatttttattaagagagaaaataaaaagcaaagaatccacttgaagctctctagggagcatcccgtcaccgccatgtgcaagaaatctggtcttcacccgcattttagctgtgttgcccagcatgatgtcccgtccagggccacactgggatgttcgtgggccccaggcatttctgccttcatgaactcctttctcttctccttggggtccttggctcttccttgatgaggggcacgacggtcccagagcttggggccgggctcaaagatggggtcaagcggccgtagcgggtgcggcgcggcgcgctcccggaaaaaggcaggggcaggggcgcggggctgggcagtgccggctcttttctgatggatcatctgcccctcggttcgctgtccccgggctgagaacccagagtcccagatagcacctctgcccggtcacagccgcttccgacagcagggggcgccccggcgctggaggtgagaggccgaggaccggggcgcgggatcacaaaggcagctgggcccagaaagagccccgggaagaagtccagttggaaaaataaatcaaatattaaaaataatgcatcgtcccctcgcccgcaccccacctctgaaaagcccattcccgtctggggctctgcctcctcgggctgtgcgcgtcctcccagaagggccaagataccagctcccccgaccccggctaggagcacacacgtgacgggcaggaagcactgcggcgaaagcccgagctgccctcctctctgaaggctgggagtccggagggtccccccgggccacttggcttcgtctgaaaataaacacggggaaagggaagcagagacacaccctccagagacagcctggggggctgcctctgaagactgcgcgcggctggtcccgcccccacgccaggagcccactcggtggtcttatttgtaatgaaaacaaacgtggccctttcagcagctgaggaca

SEQ ID NO: 346617 - DNA, 1000 bp, Homo Sapiens
tttttttttttttgagatggagtctcactctgttgcctaggctggagtgcagtggcacaatctcggctcactgcaacctccgcctcccatgtttaagtgattctcctgcctcagcctcccgagtagcgggattataggcacccgccaccatgcctggctaatttttgtatttttagtacagacggggtttcatcatgttggtctggctggtctcgaactcctgaccttgtgatctgcctgtcttggcctctcaaagtgctgggattacaggtgtgagccactgcgcccggccacctcaagaaggttttaatgcaacatttacataccttcgtgctgggcacataatagcaccactagttacataagtggaaatccacaatttcgaagaaaactcctcatgatactacacttgatcttagccaaaaggctgagaagcaatatcctccacatgatagaatccacctatctcatacttgtacacaaaagcacactttccctcccccatcaagagacaaccaaatgtcacactgtggggcccttgctccagtgtctctagttggtgtccactcatcttctatatgaaaagcctcctggaatgggacatgggtaaacagtatgagaatatccaggaaaatgacaccagcaagttaactccggatgactgggattagaggtgattctaatatttctttatttgctgatctgaattttctggttttacttgtgtatttccaaagaactaagtttcagccagtactgcttctaaaccaaggagccaagtttttcagtctctgtaatcccagatattcaggaggctgaggcaagagaatcgcttgaacctgggaggtggaggatgcggtgagctgagatcgcgccattgcactccagcctgggcaacgagagtgaaactctgtctcaaaaaaacaaagaaacaaaaaaacaaaacaccaaaacttctagaagaaaacagaagaaacccttgtgatcttcagttaggcaa

SEQ ID NO: 346618 - DNA, 1000 bp, Homo Sapiens
gagacaaagtctcactgtcgcccaggctggagtgcagtggtgtgatctcggctcactgtaacctccacctcccaggttcaagcgattctcctgcctcagcctcccaagtagctgggattacaggcgagcaccaccatggccagctaatttttctatttttagtagagacggagtttcaccatgttggccaggctggtctcgaactcctgacctcaggtgatccacctgccttggcctcccaaaatgctgggattacaagtgtgagccaccgtgcccagccattttttttttttttgagacagggtcttgctctgttgcccaggctacaatgcagtggcgtaatcatggctcatgcatcctcaccctcccaggctcagatgatcctcccatctcagcctcccaagtagctaggactacaggtgcacgttgccatgcctggctaaattttgtgttttttgtagagatggggtcttgccaagctgcctaggctggtctggaactcctgggctcaaatgatctgcccacttcagtctcccaaagtgttgggattacaggcatgagccactgggcccggccagaactccacatttaaaagcggatttcttggggtatttacaagttgctgtaaggtgagaccctgctgagcacttgttgttgccttcatgttgtgttggaactgcctcacagatagaggctggggacagagataacaggtggtccccaagtccagagtccacaacagtcacagcgtaagacagtacacacagatgaaggaagctacttacttgcctggggacatctgaaggcctcacaatggaggaaacatttaaaggcgattttaaaagagtaagtataccaaatcaactcttctgtttgtcgtggaagaggagagctgtttttaggggtagtttcaacgctgagctacaaaactggcccacttccagagaatgtgagcagggaatttttgattatctccctgacatgaagtcagttgttaaac

SEQ ID NO: 346619 - DNA, 1000 bp, Homo Sapiens
attaactaatgggatttattaatgcaaagttttttaagggttatcattgtattgttgttatatgggaggctgctctttttcctaggagatgcctggtttcgaggtaaaatgtcatatgtctccaacacacacaaacatatatactgagagaaatgaaacaaaagtggtgaatccaggtgaagggtatatgcatgttcattgtgctattcttgcaacttctctgttggcttgataatacgtaaaacaaaaagttgggagaaaagccattgtggtgctatcaaccggagtctctgatatctactagaaaatatcagcctatccaaggccgggagcagaagccaaagtcagagacccaaggcgagtcccacacaccctctacctaattacagttcaaaccctgtggggctttctgtgtgttgtacagcatagggtgagcacataccaggcgctcagcacctaccccatccctggcactgtaaaggcactgagatatcaagatgtgacttctgttctttcagggcaaacggttcaagggagggtcttcactcacttcttcatgctactgcagagtatgttgtccatacagcagtccaaaggctcacagataaacctcaggattcccaggggaagatggaaacagattagtgacagcagcagcctccatgaactgggcgctcctaggagtcaaacacgaagctaagccttgtctttgtctgcccatcaccatgtgtccttttcatgacagctgaccatgcaggaagggatttttttttttttacaaggtagaaactctggctcagagaggtcgatcacttgtctaaaagtcacccagctagagggtggcagatctgaagaagaaagcagcatgatctcagccgtgaagaggtttaacaagttggcttagtggagaagggcatgccacgagcagcttgagggaagatgtggaggaaagaaggtgagggcagggttcctcaacttcagcaccaatgacatttggggc

SEQ ID NO: 346620 - DNA, 1000 bp, Homo Sapiens
ttgtctcttgttaattatctcattgttaattgtcctgtgctgctatacagagatcatggacattcaaggccatggtctacatatacactctttgacattgataagttgctcacgtctcctatttttctacaaaatagtgcaggtctttatgggtattggtttgttgctcatttgtttgttgaggacatccagcaaccaaacacctctccttctctgggagattcttgattgaaagtcttggcagaaggcagaggcctacctctctgtaccgatgcccaaagactccatttctctcttttgctgtcccctggaagctagaacatgttctcatagtctgtggttagcccattggatgttttcttctgggatagtgattcttaagcaactcgcacaaaacacaggtattgggccctaatacgcccagtagaaatggggacaccaagagcacagcccaagcagcactgagcgagcaggccactggtgctggtgacatcattctagccactctgcttctgtggtcttgactctgcatctgatgtacagccttcaagttcatcttgcaagccaggtcttccagcctccctgcctgcccaatagccttctagtaatgacttggaacctgtctgtcttgcatgtgattaagaacacaggttcttttcttcctgagtctcaagattccagttggcttcaggttaaatttataccttcacaggcagtctggctcttcctaaagaagttgctagttgtccactcttctggtctttctttaaaataatcttctaacctctatcagtatgttctacttctctcttttctctgtatccctttgaatgccatacagtcaacactttgtatccatgggttctgcatctgtagattcaaccaaccaaggattgaaaatattcggtgaaaaaaaatgcatctgtagtacatatgtacatacttttttccttgttgaaaaaaagttagggaaatatattccctaaacaatataagttaa

SEQ ID NO: 346621 - DNA, 1000 bp, Homo Sapiens
aaaacaaacacacattttattttaagcaaagtcaaaatgttaaatgccattgcatacaaattagggaatggaatggaggactggagggattattagaaactgactttttatgaccttgatatttccccacaaacaccaaagggaaatcaaccaggaactttatgtccttccgcctctgtgtgcttaaatgtgtcacgtgttagagctgtctctgtcatctgtatacagctgcctctgtacgcagattccacgatgaccatcagtgatggagactggattattgaggtgcaagctaattaacttttgattcatttttactatcatttatctaaaagagtcacagcaccgaggatttggctcccatggaaagattatgaaccacttcactcagctaccttacttctggagatatttgactagctttaggtcataaatagaaaaacttagtgtttccatttggcaattcatgtcccttaagagcacaggtttttgacttcgttgactgctgtgttcacagtgcctagaaaaacacagcccatgcctgttgctcctaacgtatctgctcagtgaatgactaaatgcttcagaccagtattacgaattgcctccattttgagcatgaacatcagatccagattatccaaatcacaaattttgttattgtctgtttgtgtgttaagatgaaaaatagactttcccacaatgatgagtgaattgttcatagaaatagtttgattacgaggaagagttctgtacttgaaacttcatggcagtggcgaagatgtctctctctctgatgagatccctcccatgcgcactttcgataaaacagcttggataccgcttcttggaatgatgatactgatgtaagtttcttgacttaaaagctcccagtcttctagtggatttggttgctattggtgctcattgatgggtaatcttgtggatgagctctcatctcaatttctccatcttagggaaatattttacttcccagaaa

SEQ ID NO: 346622 - DNA, 1000 bp, Homo Sapiens
ttcatagcagctttatttgtaacagcccaaacctggaaacaacccaaatgcctattaatatgggattgcattaatacatttctctgtatccataaaatggattagtactgagcaacaaaaaaataaactattgacacatgcaaaaacatggctaaatctcaaattgtaccgggtgaacagaaaaagagcatacacgtcgaatgattttatttatatacatttctgaaaaattcaaattaactgatagtgacagaaagcaaatcagtgattgcttaaggattggggataggcagggggtgaggagtggggagaaagttcaaaggagtgcaagtaaaccttggcggtaatggatagatctactatcctgattgtggtgatgatttcatgggtgtatatatgtgtcaagatgtatcaaaatgtgcactttaaacttcagaaaagcagtttttcaaatggcaatttaggagagatacatggaacaattattatattgaagacataataaaatccaaagcctgaaaatcagacctcctcaatcaaaagagtggacagagtatcacttacgtttttgtttttgtttcttttgagatggagtcttgctctgtcgcccaggctggagtgcagtggcatgatctcggctcactgcaagctccgcctcccgggttctccccattctcctgcctcagtctcccgagtagctgggactacaggcgccctccaccacgcctggttaatttttttttttttttgtatttttagtagagacggggtttcaccatgttagccaggatggtctccatctcctgacctcgtgatccgcccgcctaggcctcccaaagtgctgggattacaggcgtgagccatcctcccggcccacttaaatatttttaaagtcaggaagaaaatgtgttgcttttgatagatagtaggaagatggattgacagatgataaatgatagatgaatagatgatagatgatagagatagatggatagttgat

SEQ ID NO: 346623 - DNA, 1000 bp, Homo Sapiens; identical to SEQ ID NO: 161460

SEQ ID NO: 346624 - DNA, 1000 bp, Homo Sapiens
cagtccaaagctgtatttgccaagttttcttagaatgacttttaccgatttatgaattcttatacacagaatgcataatggaaatactgatttttgtctaaagtggcattattgactgctgctgtgatgctactgtaatgtaatacattattaaattgtttcaaggtgctgttttgcctaaaaattttgtgtgtcttgaaaactatagtattgggtattgagactctgcaaattctcggcatgcttggcatgaggtaatcggtttttattcttacaaaattgtaactatgtaagtgtgtttattaaaagaacacaaactaaaaaagttaacaggaattaaagttgtgggatgaaaaagttacaggataaaaaaatactgtggaaaagtggcaaaaaaaagttgtggaaaaaaagtaaaaaaaaagttttatgaaaagttattttaaaaagttatgaaaaattagttacaggatttaaaaaaagtcatgggataaaaataaaaataaataaaagcaggcccctgtcagcataagcctggagaagtgggtctggagtcttcacccccaccatgtccctacaacccctccccagtcagccctttaccattagggtagcaagacaagacccctgtctaatggagggagacaaacagaccctttaccaccttgaccaaggctgagtccttacatttctggatgatgatgtttgttatttaagagccagaggttggtggagttggtttgtttggaggaggtctgacggccttcttactctcaccaaagcaacttttccctcaggggggctcccatcttcttactcagagaggcagctgaggcgggacagtggagttaactgtagaccaggccagggcacaggctgctgggggtggccccccttcccccgtgtacatactgtagctgtgtaacattctgtattgtacctagcggaggttgcagctggcatatgaggaagaggttcttataattattcgcggctggga

SEQ ID NO: 346625 - DNA, 1000 bp, Homo Sapiens
gctcgacaaatttttgtgtttttttttaaccctgaagtttactttgttcatactcaaaatttaaaatgtgctgagcctgctgccccaggatgttcctgtgcagggtgagcctctcattctgtggggtccaagagcgggttctgccaggccatctcacagctccctcccatggatgggtacaggagaaaaaagcagcatcagcagaggccttgcctgcaactggcttcttcctgatgccccacctattcctcgcaaagcaaccttggaggcagtaatgcctggcacccagctcttcacagccatgtcagcgtcaggagtgacctcaaaggctctagagacggaatctggtactcttccatccaaccccacccgtgtcccactcccagcctaggccctccccaggagtctcctggtgaccggaagcctctttctgatcttcttcactgggatgctggccctttggctgagcaatatcctgtgacatagaagcagtgagaatcctcctggttctaaggctcagggagagagtgctggcccctgggcaggctctcctcatggctggtggagaaggaacttggtggagtcccaggtggcaggggcagtacgagggacagagaggaggaggcatccaagaccccataatgtcaccaatcaggagtgttaagaggagtccgagcttgttgtgtgaacccagtttcaggtccagcccctgcaccaacccctgcctcagggtctgcagccctctccaaactcatcattatcgctgcagctggacttttagtggaagagccttcccttgggagttctgtgtctggggccagcagtcctgggaggccttctggaggaggtgagacttggacctcaccaggtgccggcaatggatacagatggaagcatccacagagcggccatccagacagtggaggaaaatctggatggattcctttctggtttgggagcggggaaggcttcctgagcaccatgcaaagccaagatcatt

SEQ ID NO: 346626 - DNA, 1000 bp, Homo Sapiens
ttttttttttttttttgagacacaattttactcttgttgcccaggttggagtgcaatggtgcgattatcggctcactccaacttccacttcccaggttccagcgattgtcctgcctcagcctcccgagtagctgggattacaggtgcctgccaccacgctcggctaatttttgtatttttggtagagacggggtttcaccacgttgaccaggcttatctcaaactcctgacctcaagtgatccgcctgtctcggcctcccaaagtgctgggattacaggtgtgagcctctgcacctgaccctccttcctctttactaacagagattagcaaggaaggcaaaggtataaagaccagcatgaaatggaggcattcttctggatataagcttagatataccagtcaactgaaaaggaaacaaccttctcattctcagacgtaggatctgatggttttgctgtgtaatcttcccaggcctcctctccgctactttaggaaatgatgttgctttagagtcacactgctggctttgaagctgagaagggccacgagcctcgtaatccaggtggcctctagaaactgacaaagatgggaaactgccttctcccataaaacctccggaagaaatgcagccctgctgaggctttgattttaccccaataggggccgttttggacttctgacctccagaactacaaggaaaagcatgtaggttgtttgagtgattaacacaagtggggaatcacccactcaggcacagagccaagtccttgattttactccagcattgaacctggggacagaattcctgagataaagttaaagctctcctctttgtgtgtgtggaagggaaataggaagatgggtgtggagacggggagtggaaaagacactcactttctttgcccctaaaaagattctctgtgcccaactccctacacgattctggaagtatggagaaaatgcctgaactgcaaatgtgaagtaatcatctcatgagac

SEQ ID NO: 346627 - DNA, 1000 bp, Homo Sapiens
tatttctatttaaaaacaatgctcaggagacttagttccaaagacgaagatgccagggttcaatgtacaactacagcgaggtgctagcgattattgagtgagtcatggaaggctctgtagttccttggagacttccgctttttcgtatcactcctagtcttagcctcgtggttttctgcaagttctcgtcgactgtaaccgtacacagggctgtcactccagtgaggacaacaaaaaaagcacctatggctatcattgttaatccagtagagaaaaccacagagtcagaggggtcctgtagaacaacaatgagtcccagaatcacagtcgataaccctaagcaggtgacaagcagacattcagagcaagacaagcatcggaactcccgtcttctggatagattcatccatggataagtttggataggttggtacatggtgattttttgctgtagtcccagatacttgggaagctgaagcaggagaatcacttgaacccaggagatggaggccgcagtgagctatgattacgccattgtattccagccagagtgacaggacaagacccaagggagaagcttgggtggggatagtgattgccaaacgctccccgcagctgtggttgctcttgccttggggacagttcactcaaggtcactggttattagagaacatcaattgtggattgcagaactccatagccaccaacataactcaagtcccggttgggcttttcactgagaaatggttgtgtggcattttatcaacacatcacaggccctggtacagcaggcaactttttagtcaaaataaggtcaggaatagtttccccaaaacagccagacaccctctgtcaagacaaaccgtccttagataaaaagatgagcaacaagctgctgtgtttcttttatacgaattaggctcttgattggataattgaaataacacggattctcacaagcagaaattttcacacatcaggttagattgttttcttaatt

SEQ ID NO: 346628 - DNA, 1000 bp, Homo Sapiens
taatgtaaaatttatcattttaactattattttaaaatgtacagttcagtggcttcttgtacatttacaatattgtgcagccattaccactatctaattgcagataatttttgtcacctcacaaagtaatcccatacctattagcactcactttctattccccctccacacatcccctggcaaccactaatccactttccatctctatagacttgcctattctggatatttcatatatatggaatcatacaacatgtggtcttttgtgactggaagcataatgtttttcaggttcattcaggttgtagtatctatcgttacttcattcctttttatgcttgaataatattccaccctatgaatagaccacatttgtttagtcattcatctgttggtgagcacttgggttgtcttcattttttttgtggtttttatcaataatgctgctgtgatcacatttttttgtttttgttttttgagacagggtcttgctctgtcacccaggctggagtgcagaagcacaatcatggtccattgcagccttgatatcctgggctcaagtgatcctcccatctcagcctcccaaacagctgggactacagatgtgcatcaccatgcttggctaattaaaaaatttttcttatggagatggggtcttactatgttgcccaggctgatcttcaactcctgggctcaagtgatcctctctcctcagcttcccaaagtgctgggattacaggcatgagccactacacctggccgaccacttatatttaaatacctgtttccgattctcttaggtcgagatctaggagtggaattgctggcttagatgtaattctatgtttaactttttgaggaactgccaaacttttccacagtggcttcactattttacattcccaccagcaatttatgagtttggtaatctttttgttttcctttgaagaaccagcctcatctttgagcccatgtgttgacgggaatatttaagatgtat

SEQ ID NO: 346629 - DNA, 1000 bp, Homo Sapiens
tttttcatacatatacaaatggaattgttttcttaattttattttcaggttggtcatggtagtatataaaatacaattgaactttgtatattgattttatatattgtgaccatgctgaactcatttattggttttagtgggttttaatgaatttcttgtaaatttttatattcaagttatgttatctacaatgatagacatttctaacctcttattttcccacatggaggactgtgtttatttttcttatgtaatttctttggatgttaaccttttcctcttgttctcaaatgtcatgacacaacaaccagtattttattattatggggttagctgtaagtttttcattgatgcccttcagcagatctaggaagtttccttatactcctcctttccagggagactaattgtgaaggaatattgaattggtcaaatgctcactgtgtctgttgaaaggatctttctgttactttcctttatcctattattttgtgtaatgcattgattgattattggataggtcaacaattcagtgtctgtctgtctatcacctgagaaaatgatttggagcatactgtttgaatcctgaagttggagtcagtaaatttcatgcagaaatttattttgaccatgacttaacgaagttatgtccttgtagataaaggcagtcaaaatggaacaattgttcatggaaaacagatggttcagctgcaaactaaatgtgacccttatgtccttgagcatagacatgaagtgaaaattggagagactgtgttaccctttcacattcaccctggcagcgatacttgtgatggctgcgagccacggcatggtagagctcacctttgccttgataagaaagatgaattgtttactggtccaacacttgttccatcttgtttaggtgattttgagaggctgctctggaatatgtctcaatggtggatgttgggaaacaacacaggctttgatgggactcaggtggtgtttgttgtgtgaa

SEQ ID NO: 346630 - DNA, 1000 bp, Homo Sapiens
aaagtgtgttttctttattactgtgaaaaagaggtttggggccaagcatgaggaactgggatacagtgagattcatcctgggcacatgctctgtgggcatggaggatgcattctgtccagtcaaagtgcagcattccctgtggtggtgagctcctggtgaatctatcccgggtccagttccagactgctttgcagccaagcttcttctttggcagggtttgccagtgctttgtcatgggggaaggagggtgggatgtgagctctgcattgggtcctctttcctggctcattggtcctgaattccgctagcctgctgcttcctccagcctgggatcatgggtggtggtctgggatctctgtaggtagcacagagttagtagcagaccccacaggttaagagcttgatcccacaagactgctcccgcttcaaatgttgatggaaagtccaggttgtcatgtgtgcttcttaccaatggctgtaaaccagaggttcataccattccctcctgggtttgaccatttgctagaatgggtcacagaactcagagaaagttcatttacaacattattgctttaatataaaggatgcaacttagaaacagccagatggaagagataagtagggcaaggtatggaaaaggggtgtggagctttcacaccctctctgggcatgacctccatgtggtcagcaacctggaagctctctgaaggtcttctgttaagatttttttcttgtggaggcttcattacatagacgtgattgatgaaatcattgcccattgcaaattaagtcaacttccagccactttcccttccctggaggtcagggtggtgggtggtgaaagttccaaccttctaatcacatggttggctcccctggcaaccagccccccatccttagaggttttccaaaagttacctctttagcataaactcaccacttaggacattccaaggactttaggagctctgtgccaggaatagagaccaagagcaaata

SEQ ID NO: 346631 - DNA, 1000 bp, Homo Sapiens; identical to SEQ ID NO: 161462

SEQ ID NO: 346632 - DNA, 1000 bp, Homo Sapiens
gtttatagcagttttatttataattgcccaaacttggaagcaaccaagatgtcctttagtaggtgaatggataaacaaaatgtggtacattcagacaatggaatattatttagcaataaaaaggaatgagctatcaacccttgaaaagtcatagaggcaccttcaatgcacattgctcggtgaaagaagcccatttgcaaaggctacatagcgtatgattccaacaatatgacattctgggaaaggcaaaaccatggagatggtaaaaggatcagtggttgctggggttgaagagagggatgaataggaagagcacagggtattttagggcagtggaagcactctgtatgatactgtgatggggacacatgtcttcttttttgtgttgagacagaatctcactctgttgcccaggctggagtgcagtggcgcgatcttggctcactgcaacctccgcctcccaggttcaagtaactctcctgcctcagcctctggactctgcagtaggctgtatcatatggtaattctatgactaaagcttctagcatttttaaaactgcttacatgatggtaaagtcagcatgaaacagagccatagctcactgagcgcatgcagcctatgcagggagcaggctaagggtttcatgatcggaattctgtttaacgatcccaccaacaccatgaggtaggtgatactcttgtctccattttacagatggaaaaacagtcccacagctgctgtcagaggtggaatctagcccactctgaggccaaaacctctacttggacctgtggtgttagaattctatgaagctctgtggatgtaaaactgagaatgatcatggcagtagatattggacactgatccttgcaaccaatgaggatgtgtggctgtggattctccaccagggacacttgcttgtctacaaagtgcatcatgggacatggggttggataacgcagagaggataatgctctctgactcaaatcatgcctctcc

SEQ ID NO: 346633 - DNA, 1000 bp, Homo Sapiens
ggtagagacagagcttcaccatgttggccaggctggtcttaaactcctgacctcaagtgatccccctgcctcggcctcccaaaatgctgggattacaggggtgaggcactgctccagcccaaatgctttttaaaaggaaggaaaaagaaggacagctcaaccctttctcactaaagggcaaaggactgctagctgggcatgtaaaagtgtgcattttcctgaagtgtgttctctggaatcctcttccccagagatgttgaaacggaggtgctttgtttagtgcagtggcggcagatgacagccacaggacagctgctctgggggccttggaaactacaaatgctcaaaccccctccccaggccacatctcagcgtgcgggaactggggtgtgcatctctcccaacagcttcctggtgacgccaagcttcacacccacccaatccatgggagcaaaccgactggactgcatggcagacggtggcccactggccattgcctctttgctttgctcaggaactgggtggaatgtgcccggggaaggtagccccagaactgcaggggagccacgacagactcaagcctcacggaaacccctttccctgggccagagttggttcctgggtggcgtggggctggctctggccagtgaggagtcagcccctgctgaggtttctgggaattatgtgtctcccaggaggagaggaagacagctgaggacacagcatctcactagcccctcctcacccaccaggtgccaggccaggtgtcacctgagccaagcagcacacgaccgcccctgcccacttccacctcagccctgaccctccctgcacctgggagtccaccgcctcctgatgtgtctgtgatcggggcagccccaagagcacgtatcccgggacatgatgtgttgtggtctgtgtggggtcagagccgtcagtgttcactgccgcgtgcccagtgcttagcactgtttgccgcatgggagatgcaggtcacaac

SEQ ID NO: 346634 - DNA, 1000 bp, Homo Sapiens
ggctttttttgtttgtttgtttgtttggtagcatccagatccctaaaggaagctatattgtaaattgtcttctatttctgggtcccaatatctaaatgaggcgattgcacctgttgggaatgaaggacaggaatttcacaagccgaaaataaagctgaatgttttcccttctgtctcagcccatggaaaatgctcttatatttatatctgggcgggcaggggctgggagggagaggatgggttggcagagagaggggcagaggaaaggcagggcacctgccaggggcctggggtgtaaagaatggaggagccactccacttaacgcaggtctggcccaagtcagaggcagcgagggtggccagccccacccaggacacccccagccactgcccaccagccctgcccttcactgctggcctctcctccttgttctgcctgaccatccccaggttaacctggagcggtcatttaaaatctgggcttctggaggcctatccaacacctgcagcttgagcaccaggaaggaggcgtctcagccttgctcacagtctccgggggctcggggcggggagagctcttcctcccaggactcaggccttcctttccccacccaaatcttcactcatcacatccactctcctccctcttccaggggcagtgtcagagtctttcctccgggcgggaggcggggcaaggatggacaggaggctgcaggacctgagcacactggaagcgggtgtttcagtgacggtccagtgatgtctgggtgagggtggaagcctaggaaatccctgaggatcctggacaagaggaagagggtgtcctgagctctgaaaggcaggggctgcaccctcctcacagcagaaaaagtcccctgatgacgtcttccctaatagcacacggcaggcctcagacaggacccacaccagggtgtgcaggaaggaaaattagtagggccctgcgtgcctctcgctgttctctgactcatagtgtaaaagc

SEQ ID NO: 346635 - DNA, 1000 bp, Homo Sapiens
gctgaaagaagcataaagtttaacagtatttattcaatttgttcattcttcctcactgaagtttcttgggccttacatttttaattgataaaatagtcttaaattaacattcaaataatagctcgttccctgaaataatctagagaagccctgttccctctctttttgagctacctataataacattctgctgagccaacatggagcagttctcctggcacatcctgcctggggaaaccgtggcagtgactgtcattaatgggagtcacagagcccctccagcctctagactatgctgtcaagtctgtatggtgaaggccctgagtcaccacaacactgaaattgtttgaggtgctctggacccaggaaacactgcctggccatggaacactctagcggaggagaggtgaggattacccctggccatggagcactctggtggaggggaggtgacggattatccctggccatggagcactctagtggaggggaggtgacggattacctcctggatcatggccatatgaaagagaaaggtgtggggctctagtaaaccactaagttaactgaaactgggaaacagccaggttggcggaacagggacctaacccagtctgcaacccttttgtgtgaaaaaccacagccgttattcttgcaacttcagaagtgaaaaggcgtgtgggttacaagacagctaaaagcagcagggcgtttccctcgggcaccagaagaggaaaggtctggcagttaaaattattccaacatattcttagcatatagcacaagctcacctgcacatagcgccgtccagcacaaccttagaaaacttccctccagccctttatctttgcagacagccccttctctgctgtgctgcatgttgcattcttgcaatgtattttcatagtttctgtaataaatttgcctttctttactcacggttgtcttggtaaatacctttactacccacgacaaccctggcccagcagtcgcacccacg

SEQ ID NO: 346636 - DNA, 1000 bp, Homo Sapiens
tttgagaaacacaagtgtttatttgaaaagcgatgctaggaataccaagcaagccagtgggagactgacattggaaagaaaggaggctcataaagggtgtgttatcaagcaagttaaaaacatggacaaccggccgggtgcggtggctcacacctgtaatcccagcactttgggaggccaaggcaggtggatcacctgaggtcgggagttcgagaccagcctaaccgacatagagaaaccccgtttctactaaaaatacaaaattagccgagcgtggtggcacatggctataatcccagctacttgggaggctgaggcaggggaattgcttgaacccaggaggcggaggttgcagtgagccaagattgcaccattgcactccagcctgggcaacaagagtgagactctgtctcaaaaacaaacaaaacaacaacaacaaaacaaacaaacaaacaaacaaaacacgtggacaaccagagcttaatcctaagaaggaactcagggagccagtcataatgtttgctgcaggacctgagggatgaggaagctggctatttacgcaccgatccccatcggtgattggctgaaggttgctgtggctgggagtataattccccagaactttcagcctgctcagcaggctccagtggccagagagagtccttagataaagagctgcaggttctggcagctggaagttcatccagtgaacccaagagcttcaggaacatgggagggcactgccagcatctgccacactaagggaggaatcctttcacgaggagatactgcaatggttccactacctggaagataaggctctcacctgagctcagggcaaaaaaggggttaccttctgggatgactgatcccaaatgccaagggtaagctgggttctaactccaaaagaaaggcagggaggactatgtctggaacccaggggactccctggtgtgccatgtcctatttccgtgtccaatagtaaaagttaaaaaaaaaa

SEQ ID NO: 346637 - DNA, 1000 bp, Homo Sapiens
ttgtttatactcaggtatttattgggagacacgcgtcagtagtccctgataaatggaaagatcgcttgagtccaggagttccagtccagcctctcacaccgccaacgttccgccaacgttccgccaacgtcccaccaccctcatgatatccgtccgcggtactgctccagcgaaggtacccttgcctgggccatgaggcgcaaccgtccctcacagctggggtggcttctccaggttcgcaccgaggggaagttggggtaccggtttccgccgccagcacccaagatggcggcacgagcgtcgcaaccacaagaaccacatgcttcgtgtcccgcctcagcattctcgggtctcactagacttttgcaagtcactgtgggaaccctcaaggcgagggtgttccgcactctggcggcgatacaccttcctattccctgacctaggccttcattcccccgccacagaaagcgctggaagcgcccaacctggatacttcacccaacgcccaagcccactaacatcgcccgccgcgaaggcgcggccgaggggcccagaatgccagacactagggccttcgccctcctcattggtgggtccataccgcggggcgggcctaggtactcattgggccgggaattatgtcagtcttgggaaatcaggtccggggatgaggaggtacactcagccattgggccctctctgctgccaatcagagggacatccgtcgacggccccggcctcggctcgttgattggagaaactgttcctagggtgtttgcggcgggcgggtttccgagtgcggtagcaggagggggcggggaggtaagcggaggctccgagctctaggccggccggcggtggcggcggcgaggccgggactcgggcttagggcctgctgtggaggcagcggcggacgccgagctaagcagtgggtatcgggcacattcctttcccagaagggagggttgcagcgccgcggggccgaggcttatggggcgac

SEQ ID NO: 346638 - DNA, 1000 bp, Homo Sapiens; identical to SEQ ID NO: 161464

SEQ ID NO: 346639 - DNA, 1000 bp, Homo Sapiens
agttaatctggaggctgagcccaggaggtcaaagatgcaatgagccgtggtcctgtcactgcacttcagcctgggtgacagagtgagaccctctggagtattcacttctgaaatgaaggggtgtttcacttgtggactgggtgatgctgggtaagttgctgaacgtctctctgggcctcaggtgccacatctcagatggaaatgcagaaatcacccgtcttctgcgtcgctcacgctgggagctgtagaccggagctgttcctattcggccatcttggctcctccgcccctgtatttttttatatatatctgtttcttcctctcttgaggctggccttgtagccaatctagttggcttctgtgtgttccatagccttgccatgtgccttggaccatgcaatattgatgatgatacaagtaatcctttagtgagcacttatcagtgtaccgggtgctgtgctaaatgtgcttcaaacaacatttcattgaactcccacgactcaatgaattcatttctattgcagatgaagcctctgagaagttaggtaatttttctctaggttacagtgcaagtaagtacaagagccaggactaaaactcaggcttgttagaagtgtccaaaatccatgttcctaatgacttgtagcatgagggttcccagaagctagctctgagatggagatttgtatgcaggagatttacgaggaatgtgcttcggatcaacacttgcccactcattctttgattcactcattcattcattcagtgtgccagattcggtgctggattctgggggacaaggtacaaagtgaagtttacagtcaacacggagatgatgaacacatgagctagcagaacacagtcttacgggtgctcagatagagatgtgcacagggttccatgagagaatggacgtggggatgcactgaaagcaagtgggaggagccaggatgttgctgcctcctcagaggtgactgggctttcctagggcaggggaaga

SEQ ID NO: 346640 - DNA, 1000 bp, Homo Sapiens
atttcaggttcaggagtacatgtgcaggtttgttacctaggttaactggtatcacggggggtctgttgtacagattattttgtcacccaggtactaaacctggtacacaacagtaaggtaccaaattttgacaggttcaaaatttcagtgaaggaagtaactgtggatgtggtagaaacagcaagagaacttgaattagagtgaacctgaagatgtgaccagattgctgcaatctcatgatcaaatttgaatagatgaggagttgcttcttatggataagcaaaaaaagtggtttcttgagatgagatttactcctggtgaagatgccatgaacattgttgtaatgacaacaaaggatttatactattacagaaacttgtttgataaaacagtggtagggtacccaatagtaccacatttagtacctgggtgacaaaataatctgtacaacaagattaatgtttttctgctcctctccctcctcctaccctccaccctcaaagaggtcccagtgtctgttgttcccctctttgtattcatgatgtctcctcatttagctccctcttatgagtaagagcatgcactatttagttttctgtttctgcattagtttgctaaggataatggcctccagctccatcatgttcctgcaaaagacatgatcttgttctttcttatggttgcatagtattccatgggacctatgtactacattttttatccaatctgtcattgatggacatttaggttgattccatgtctttgctattttggatagtgctacaatgaacatttgttgcacatgtttttatggtagaatgatttctattcctctgggcatatacccagtaataggtttgctgggtcaaatggtagtcctgtttttagctctttgaggaatcaccacactgctttccataatggttgaactaatttaaactccaactaacagtgtataagtatttccttttctctgcaactttaccagccatcggttatt

SEQ ID NO: 346641 - DNA, 1000 bp, Homo Sapiens
aaatttaataccaatgtttattagggcagaaaagaagaggaaaaaaatagaggacaaaacaactcagcaaccccaagtggtatgcttcactactctgaacaaggattccccaaattccttagggcaggcagcctgccccaactcctggtctgggagttccagctccatcaaccccaggtaagattctggttgttcccactcttgcaaactgatgggaagacctttgggaggtgtctatgctttaagctattggttttagtgatctatgcaggttagtaaaatgaagcagtatatatatttgccatttccaaggcaatctttgatatgcccacagttcacgaggtctgaagacatccatttctgcaatttaaaaacaagtgaaagaagcagccttgtcttgcttcgacattatccagcttgttgtctattaaaatgcttgcgaggctggtcctgatccccttacacaggatgaatcctgttcctgtcacagtggggtttgcagtgagggttcagccagtgctccaggaactgctcctcagcgcgatgctccagggcgagcaggtggtgcatgtattcccgcattggctcatcggggaatccgggtttgcttggtctatcctgtcgccgagatcttaggagctgtttggcctgcttctctgtcaaaatcggggaggtctctgagaagacagtcagtaaggtaagagacagcacgagcacaggcaatgtcttcatcctgccttggttcctctgcctcttgctgagtgaatcctcccagactgagtcagccaacttgaaggaagccatgccaggccctgcgcttgtttatgctttgactaacgggacttacggtatgatgctgaatgtatctgactctgagcgttttagtaatgaccactgaaatattttcctccgaattcctgtaaattttcatcctcctgctgggaaccttcacatatcaatgatttactgctatttcccaaaagggccagctttgggcttt

SEQ ID NO: 346642 - DNA, 1000 bp, Homo Sapiens
actgtccaccgagcatcagaatctgcacctgctgatgcacattatttttattcttaattttgcaagtggatataaatatacatagtcagccccctgtgtccatagttctgcacctgtggattcaaccaactgcagatcaaaaacattccagaaaaaaaaatccacaaagttccaaaaagcaagacttaaattttcttcacaccaagtactacattgaatccacatgaatgaagtgatgcacaggcgttgtgttaggcattataagtaatctagagattatttaaagtatataggaagaggggagtaggttatatgcaaacactaagccatttatgtcaggaacttgagcatccttggattctggtatccacagggcatcctggaaccaatcccccatggatactaagggtcaactgtacctaattttagaattatttttaaattagcaagtcaaaaccccctggacagagtgttttaaacaaatcaaatgatatcctatatctggtcttgcaacactcttttttttttttctctgagctatgtgttgtgcagaattttcataaatctagcagttcaagggagctatagcattagggaatcatttgacacaaaataaattttaaaggaagttcacagctggcctgatgccccacattgagcgaatgcctcagatcacaggatatgcatatcagttggttaaaatatgcagatacacttggtatcgatatccaaaaatatcaaagggaggtttgcacaaggagagagccaaagcactgtggcatgtttgagaggtgagagggcatgccagtgggatctaattataaatcccaggctgctgaggttttcatgcttgacacagagattaaaataactcaaaaacaaacagtcacagatttcagccaaaaacacgctgttctttagtggaatagttactccagagcttccaagaaatttcagaaggtgtgagccagtccattcaattttcaaacaattcgaagag

SEQ ID NO: 346643 - DNA, 1000 bp, Homo Sapiens
agcttggaatcattttttaatttcagggtttttttttgactaattgcacttgtggtttgcgcctcctggaccaagagttctgttccctggcggtttctccatgttctcttcctcttcttttccctctgctttttctaggatctctgtcttccagggtcctcgctgggccccagaaagaggcagatttgggctttgggaggggagaaaaacttcaggaaatcctgggaaatggtatttgctcatccctgcagtctgtaatcttcctcctcctcacctgcacccaaccccctctttatgactcacccctttcaaggaaacttcccagaatgatttcaccctctctttatttcttcatcctggcccccagccttgcatttttttaatttgagtcttagttcttgagttgatggaagatacagtctgtcccctgatcaagctgtgggctcccctggaacagggaacacataattgcatggaatcttcctggctgtccctggaaatatgtaggcacacaccaggatgctgcaggcaggggcaatccagaaggggcctcaccatgcattggatggttggaccagaaagcctttaagatttgagattctgaagacaaaccaggtgtctggaaacagctgtgcccctagacattcatccagtccatgtgaagcaggaagttctgggttccagagagtggtcacagctcaggatgacttcccaatgaccaatcctcttgattggtctgaggagatgagcagtgatgttgaatcctctgggaggaactggttgtgacatggttaccatctccctgcccctccgcgagggttgagaagtgcggaattcggtcactttccttaggaagttcatggtctgcttgggaatggggaagccatacatgcggagaaggtcttatgcttgctgtgtaaatctgcataattgtagcatgtcaggacatcagaacaggcctctgtctggcactcacgctgcagggacagaccagaaggca

SEQ ID NO: 346644 - DNA, 1000 bp, Homo Sapiens
tgagtacctattatctttgttttaatgtaaattatttaattacaagtacataaattaaacaacagctgtgttaacaatcagcttgccaaatttctgaaaattaaacggtagacccatgggctggtatgagttgcctcctaacaccacaggttctgcccgccctttcaccttaggcttggaaaagtggttgcatattattctttcttgcttgctcttatgctgtaaacatggcaacatttctgggctggccagctgaaggataaggcagtggaggagaactgagtagtccacctgtctcagccaagacaatcctagactagtaaagcagctgatcctagacatgtgtgagatcccagccaagataagaagagctagaccctgcagctgactgggtacaggtgagcccagccaagaccaatagaaatgttcacccaacccacagattcatgagctaaacaaatgtttaattttttgaaatcactgggttgtagggtgtgtacatgtgtgtatatacacacacatatatttatatacacatatacacacacacacatacatatacacatatatgctatatatgatggttaatacagagttatagtttcatcccataagattacctccttgcagtcactgctggtaactacttcaggggtatacgagcacttgtattctttactctttcaaagctcaaatacaggacctagtcaaactagactgcaggccacagacagagtacttccttagtacggctgtgtttccttccaattgtaactgtagacttgcttaatctagcctgtttgtccttcttttaagattggcaagaaggggttagaaaacatgaacattttggattttccttaccattttccccaatcctacattctcatcatttgcctcccaagacacagcacatgaaaatgtgatccattgttttgccatcacctaataaagaccaacagctttctagcctcaacaaagcctgcagcacctactgctt

SEQ ID NO: 346645 - DNA, 1000 bp, Homo Sapiens
acactttaaatattcaagtttattgtatgtcaattatacttcaataaagctttttttttttttaaaccctcacaatttagttctgggctctgtgcttgggctcttgaaattcggtggcagtggcctgaatccccatgcccactgtgacagagcaggagcaccatcctctcggacaaacaccgccactttaagtgccagctccctttccagcctcatgcatttcaagaaaatcacttctcttctaacaacaagcagacagaaagagcagacagtaaaacatagatgagacagctcaggcacagagggaggtggggggaaagtctcttgggtaattgccaaacttcaccctcatacattgggccccagtataacagtgggccttaataagcacattctttcccttcaggtgcactaagatagggaagctaaaagcagacctgggggtatgcctgcagctgcaggaagatgtatggaaacagacacacaactccctcccagataagcacacctaaagagacacagaagcagtccaagcctctgataaactctcccaccctgaatccttaaaaactcttagtctgtaagagagcatgcctctgatctaactcagccagaagccactcttgggtttgttttctttaaaataaacctgtcctcgaccatcaagccattgtgtttctttcctctttctttaattcttacacactggagcctagggaaaggatcattctctgcccacttccattacctgagaaaagaacgccagaaaaagaagccatggggaaaacattaagatttgtagccaggcatggcagctgatgcctgtaatgccagcacttaggggggttgaggtagaggattgtttgaggccaggagtttgagaccagcctgggcaacatagtgagaccctgtctctacaaaaaaagtttttaaataaattatctgggcctgggggcaagtacctgtagtcccagctgcttaggaggcggagacgggaaga

SEQ ID NO: 346646 - DNA, 1000 bp, Homo Sapiens
gtctaattgctctgtctagaacttccaacgttacgatgaacagaagtcgagagagtgagcattattgtcttgttcctgatctcagaagaaaagcttttaacttttcactgttgagaatgttagctgtgggtttgtcatatctggtctttattgtgttggggtacagtccttctatattttgttgagtttttttaaatcatgaaagggtgctgaattctgttaaatgcttttcctgcatctattgagattataaagattttgtccttcatcttgttgatgtggtgtatcatgtttatggatttgtgtatgttgaaacttcctgcatcccagggataaatcccactcgatcatggtgaatgcttttttaaatttgtggttgaatttcatttgctagtattttgatgaggatttttacatccatgtttatcagggatattggtccataattgccttttcttatagtgtctttgtctggcgttggtatcagggtaatgctggcctcgtgatatgaatttggaagtgttctctcatcttcaatttttaaaaagagtttgagaatcattggtgttagttctttaaacgtttggtagaattcagcagtgaagccatcaggtcctgagcttttctttgatgggagagtttattactgctttaatctctttacttatattgatctgttcagattttctatctaatcatgattcagttttgatagtttgtctaggaattccttgatgtgtctgggaatttgtccatttcttctaggttgaggttctgtcttcatatattcttttagactgttgagttttctgcacaggcctgattggcagccctgtgaactgtggacccttgagcttctccctttaaaccatctgcagaggtcagtctctctagagcctgccaagctggttttaacttcatacagttgaaagaggcactgaagaggtaggaaaaacagtcttgaatgaccaacatcaccccttcctccatcctctggcag

SEQ ID NO: 346647 - DNA, 1000 bp, Homo Sapiens
acacatatgttcataacagctttattcataacagccaaaaatcactgtgaacaattgaccatttcaaatctgaatgtattattttcactaacaaagggataaaatcaatatgttttccttgtaattctgattccttagagaagtccagctatcttgtgcaggatctggattttatgaattaaaaaaaaaattaaaaatacattaataaaaatttttttaaatttagccatctctaatttcttgcaggataaagaaactctttgaagacaaacattacaccttatttagttttatatccttcatacctagtttagtgcctggcacagagtaaatgctaaacaaatgtttcttggtcatgatacaatttagcactattttaggtccttcaaaggacataatattactttatcacaatgttagtatgatttaaaacagacatattttccctttatcctatgtcaggggctctataggaagctctcagcagccacatcttccatacgggttgaagttggccttgctatagtagctctggccccaggggtcaagatgaagtcagtctttcctcttctaattgcccttggctaaatctgggcagtcataattgaggaaaatattaagcattataattccaaaatcaagagcgttctagatcaagttttaaaagtaactggccgggcgcagtggctcatacctgtaatgccagcactttgggaggccaagactggcggatcacctgaggttgggagtttgagaccagcatagccaacatggcgaaaccctgtctctactaagaatacaaaaagtagctggctgtggtggcacacacatgtaatcccagctacttgggaggctgaagtaggagaatcgcttgaacccgggaggcggaggttgcagtgagccgagattgcaccactgcactccagcctgggagacagagtgagactccatctcagaaaaaaaaggaaactgtaaggtcaattctttcctctgatttaag

SEQ ID NO: 346648 - DNA, 1000 bp, Homo Sapiens
gaccgtgtgctaatgcactttatttgtagacactgaagtttgaatttcatgtatttttcacgtgtcactaaacattctttttcctttttcaaccatttaaagatgtaaaaaccattcttagcttgtcggtggtgggttgatgccccttggtttatgctgccaacccaagagctacgcctaattcatatccttcagcactaagtcatacagctttattttttttgactaaaaggcccctgaaaatgaaaactttacacatgcaagcagagaggagtccgagactttctgacggggcaggaggggcagaaactgctccctaaggccagggacagccagacccgtgctgatgctgccccctagtgactggccagcctaacgtccatctcccacccacggccacgctgtgacgggttgggggtgtgttccccaacacacgaaataagaacttcaaatcagttcaatcagaaagcgtaaagaactgtaaacccaataaatcatttaaagtgaaaaagtaggcttcaattcacagaattttagaactgaaaggaacttttgagatgactcagttccatttttacaccaatttaccaacgattcacgtagctttcaggtaaaaaaaaaaaaaaaaggcaagttccagaaagggctggtggcccatgagtgttcgcagaagagcctgcccgggagtcccgcctgctgaatgccagtgcagggctgcctacacctcacaccgacatacccacgaaagacagaggtggcgtggggcagcaaccttgttgtcacactgcctgggctcaccgtcacccaatcattctgtgcccttggatatcgacttcttagcctttgtgcctcaatttccctaactgtaaaacagggcagagttcctccctcacagggctgtgggactgaaatgagctgatgctgtctggcccatactgggcattcaagtgtcccctgcatgacaaacttcttgagagtccactatgtgtcagacattgag

SEQ ID NO: 346649 - DNA, 1000 bp, Homo Sapiens
ggcctaaattttacttttaatttaaaaagagacacagacataaggtataaagatttgggagaataccccaaaacctgctttccctcatagagggataaagtcagagccttctaggagcccgcaggccagcaaaccaaagcccacgggccagacacagcctgcagactgtttttgtgactaaagtttcactggaaaactttcattcttttattcatgactgcattcacactccagtggcagagtcgagtagagtagctgcgacgagactacaaagttgaaactatctcccagctgatcctttgcagaaaaagtttgccacccactggcctagactgtggtggatccctgaggaaaagccccaggcccttctctgcccttcctgtcccatgccagatcccaaagggaaggctgtgggtgaaacattcaagaggcttggagatttaagactcaaggagtcagaacaggtctggaagatcaagctgttttggtttcacatatttgggctgtctaggctgctggttgcgagactgtcttactatttgtgcattatccaagaagtacagggagcagtggtacatttacctattcatgtactatcataatgggcataaaggaccttaaaggatctccctgagcttctcttgggtatgaagtggcataggaaagcagtcagatgtttcctggaaatccaagaaagattcaaatatagtcaggaatggaaaacaaaggaacaacaagttgtatgaggggaagccaatatccataggatacaggtacacatgtgattggatgtttactccagcagctgacactcagtggcagcttgccctcctccaatgggaacggtggctctcatcagtccccatcgccactgtagggacatcatgtacaaacccagaggcctgtgagaccctgaacaggctgataggatcttcagtttgcagagataactgagaaacgtgtctatcatttaggagccattttagctttaaacaaggtt

SEQ ID NO: 346650 - DNA, 1000 bp, Homo Sapiens
gaggaaaagttgctcattttattctgaatatctccttgacccactttcatttgcattcagtcccatcatatttgacacacatttggagtggcattcaccccaccgaattctcacacgctcaggtgttcatgcgcttcctcatttacatacgtaatgactttcttgtccacctacacacccagcgctgtggtaggggctggaaaaaccagcttgaacagttcccctcctgcccatgagcagcttccggtgggcacacccatggggagtgacaatgggattgttcatcgccaatggaaaggtgacctcagggccacgatcatgggaggttgtgaggaggacgacggctgggcggcccctcagaggcagtagcctgtgctgaggtgcagaggccaaggaggagcagctggacttcagaccgatgaaaccggtgcagcgacggggctgcagcggcaagaggaggctgatcctggcgtgggcggcagcaggaggaagccctgcagggctgggcttggtttcccagcagtgcttccaggggaaacaggaccaagcccggtccatgggccggtgcttaactggaagctgaatttttgcccaatgaactaatgccaagaatcagagagaaaatcatccatccatggcatctctctcctgtggtgacagaggtttaacggcaggtactccctactcaccattggtgagaggagctgatccccacagtcaggaagtgagcctaaggcacagagatgaaggaagtcccttaaaaaaggataaatgatgaatgactttgtagggaaagaatgtcagaaaccagaggctgtgctggcttaattcttgtcattaagaaatgagttagcaaaccagttccttaaacatttagattattgtgggaaaagaaaccattagggggttggagggaaatggaaagtgctagtcagatacggtatttgctggccgggcgtggtggctcacgcctgtagtcccagcactttgggaggctgag

SEQ ID NO: 346651 - DNA, 1000 bp, Homo Sapiens
gtatttttcgtagagacaggttttcaccgtgttagccaggatggtctcgatctcctgacctcatgatccacccgccttggcccccaaagtgctgagattacaggcgtgagccaccaagcccagccaaaaatagtacagtttttaaagtttggtgaattcatgaaagaattataaagacctttcctacatcaaaacccatttactcaagtgtggtgactctggctttcctggatggacaaacagattctacatcagcgatccttagtgcctgttccttgaaacttgtgcatccaaatcagtaaggggtttgccaaaaatgcagtttccagggccccaacccagacctattggataggaacatctgggatagagcccaggaattggattttcatataatgccccctgcagttctcatacacacttgcatgcaggaatggctgggtaaggtgccctttaggaagccgttctcctacaagtaaaattgaggaattcagctccaacaggtagaaatcaggaagaacttctgggccctaccacactgtttttatctatttatcaccaaaagtggattttaaaataatcctcaaagactcgactaccatttttcttatcaacttaaatatttaactctgtgaggcatttttttttgagacagaatctccgtctgtcaccaggctggagtgcagtggtgcaatcttggctcactgcaagctccgcctcgtgggttcaagtgattctcctgcctcagcctcccgagtagctgggattacaggtgcctgccaccatgcccggctaatttttgtatttttagtagagacggggtttcaccatgttggcaagaatggtctcgatctcttgacctcgtgatcagcccaccttggcctcccaaagtgctaggattacagaggcattggatttttaaatcaactaaagggacagtattacatttatctgtggttctagaactctgctatccaataaggcagacaatagccacatt

SEQ ID NO: 346652 - DNA, 789 bp, Homo Sapiens
ccagggagacgtggattgcagcaactctggcgctatttcctatctggcaggtcaacagagacacagtggcccacactcttcattctcacacactgctgggggtaacccctgtagtcccagctactcaggaaactgaggcaggagatttgcttgagtctgggaggtggaggttgacatgagccaagatcgcgccactgcactccaacctggccaacagagtgagacttggtctggtcacccaaaaacccacaacaacaggtggaccttgtggcaggcttcaacacgaatctgagcttgaatgatgcttttctcatctaagctcacagcccgaggcctcatgaaccgaaacacggctccctggagggacgcagggcccgtggctggcggtgtccgcggcccacgtcgccccctggactcggacccgagcccccgccagtcgctcaccgagcccggcccctcccgcggggccaaaagcgccgactcgcggggacggagggactcgctccccgctgccccacgcgcggcccctcccacggtaccgccccgcgcttccgcttccggtgaggcctgggggcggggctggttgtgggcggagatcagttccggggcggggctgaaggcggggaaccggctgaggccgtaccaggcctggagggcgaggctgattgggcagagaccagttccagggtcggggctgtgggtggggcccagttctcggggcggatggtataaggcttctagagcggggatgactgagcagagaccagttacaggggtggagacctccat

SEQ ID NO: 346653 - DNA, 1000 bp, Homo Sapiens
gcctggcaacagtttttattttcacttaaccatctatcttggaaatcactccatgttagaaataagttcttggtgccacagagagagaccagcactcaaaagaaaaatttctcagcaaggcaaggtttacttctgcagaaggtggctgcttgcgcctgtagcagtctcaagagcacattggacagggaaaggaaggggtttttaaccctaatgcatcatagcttttgcttctgtgttttttcctcattggctggtggttgaaccacacaatgtaagctgatcccgattggcagtttcaaatagagtaggggtatggattacagtgatagtgaagggcagttttggtcggcgggaaagacagtttctgcgggaagggcagtttacagaacaaaggttacagaacaaaggacaacgaagttggacctttgtagagcaactcattttgtctaataattttccccttttgattttgtagtccttcctcttcatatatttctaacaggatctggcttcactgctcttcttggttgcttagaaataaacgtttatctgaatagggtgggggagagttgtgggaggtcttggtaagggctgtttctatgagcttttgaactagtccgcagacacagggtataatacagcaccctaagagaatgagcacccctattatgatcacaagggaggtgagaatagaggccattagtcctttccatctaccaaaccattttttccattacacctgtaaagggatcattcattcccgaattttcagctagttcatttcctagagtggtgaggccttatagacccttagtgatagttacatcaggggctgtattattggggatacaggtacaacattggacttccactaatatcatgtcaagagctattctattttcccaggccatttggctggtgaaacccaattgttcagctattcctttaatggcatccctggtgtaactgacaaatcgttgttggttatagtatatgtaat

SEQ ID NO: 346654 - DNA, 1000 bp, Homo Sapiens
tgatttttaaggtttaatgtcctgggggacttaccagtaatacttctatttaaaacacagtataaaccaattattcctgccttcagtatttgaaacagtagaaattatttcaaccaacagatctgcccacaccagttttcatgacatataacactgaaatttacagacatccctgagaagtttttaagtaaaccagtgaatctcaacagagtctcagttaacagtgtagatccattaaaaaaaaaatcttctccaaaaaaaaaaaaaaaatcaaaaccaaaactctcctaagaactgaagccgagtgtgtgttgtcactgcctctatatttttaatcccgatgggctgactccctcttctcttctctgtaagacacatttgctgaaatcttcaagctgagtttcaagacacttgcgtgaagaggtgatgctctagccgcctctggctggactcttggttctggctctgggccagggctcctgcccgtgtcctctcctggaatcctccctgggccagggatactgattctcttgtctccacagctcaaggcttgttgtcctgatgctcttggagggggttcaggggtaaggggccccgctgctctctgaggctgtggatgctgcaggtagggctgtgggcttgcagagatgggtccccttcagcgagcttcgagggcaaaagcagggcacacactcctgcctttcatccgggtcatgtcgagggtggactctgtgtctgagaggtctcatggtgtcctgcccctcagactggagcagagggtcatggggacaggctgagggtgctgtctgtcccgcgtgttcccctggatagcctcgggcacgccaggacttaactctgccaactctggaggttttgtgccttcggtacatgctagccatccagaacgtagctgcctgcttacttcattgatgaggcactggaggagtcagcgtaaacgtggaattatgggcacgcagctcatctttgtcctgttttccga

SEQ ID NO: 346655 - DNA, 1000 bp, Homo Sapiens
tgatgagtaatggaatgcagagcttttaataatggaagctttaagaaatcaagaataaacaaatggcttggtggctgtctagattctttatgagtccacacttaacattaaatttatgtcctttttttttttttgagacagaatctccctctgtcacccaggctggagtgcaatggtgagatctcggctcactgcaaactctgcctcctgggttcaagcaattctctgcctcagcctcccgagtagctgggattacaggcacctgccaacacacgtggctaatttttgtatttttagtagagacagggtttcaccatcttggccaggctggtcttgaactcctgaccttgcgatccaccctcctcggcctcccaaagtgttgggattacaggcgtgagccagcatgcccggccgcttattttttcttattttttgagacagagtctcgctctgtcacccagggtggaatgcagtggcatgatcttggctcactgcaacctccacctctcgggttcaagcaattctcctgcctcagcctctgaagtagctgggattacaggcacccgccaccatggtcagctgatttttgtatttttagtagagacagggttttgccatgttggtcaggcttgtcccaaattcctgacctcaggtgatccactcccctcggcctcccaaagtgctgggattacaggcatggccaccgcaccccacctagtgtatctgtttagacagaataaaacaaggtatctattcataagtaacaaatataggttaatagaaaactcaaacacaaatataactaatgctatatctttcagaatagcccattctaattatttcatttctcatttgctaaaattcaaatcaacttttttcataattttacagtgtatcttaatgtcagaggcatttaaaccagagtgactctattttgaatagtggctgggcaaattgaggttgagacctacagggctgcattccccggcagttaggcatt

SEQ ID NO: 346656 - DNA, 1000 bp, Homo Sapiens
atgctaatgctttattgggaggtgcaatcccaacaaccaaagtaagggacatagggaaataaagcaggaaggagagaaagcaaatacaaggtcatatgttaccaggatggccacagtttctccagagctccagctggttgctcaagtcatgtgggacatctccaggaagacatgtgaaacactgtggctcagaacagtctgtcataggggaggaaggccagatgatttatctgctggcttttttccattctctgtctcctactggtcaaagttcatgttacggaccatcaatgccttgcatgaccaggttgtgttaattgtgctaaccagcctccctgtcccaggacagccattgaggaggccaaagcctctatgaatccagtggagttaagctaggggcacaaaaactgttttcggtcccagcacagcaagtgcagtgggagccatgcaagcctggcagactccccaggggaggctgagcgcacttgggtggcaaagagtcaggccacaagcagtggtgcatctacaggaatttagccaaagttccagaaactgtaattgctgagtagagctggtggctcatagactggcttctgtgaaattggcatgtggcacaaaaccaatcttggcatccaatgtttcattgagaaatatcccaggaggctggacgtggtggctcacattgtaatcccagcacattgggaggccaaggtgggaggattgctttaggccaaaagtttgagaccaacctgggcaacatagtgagaccctatcttgataaaaataaatgaaaatttaaataaaaaaatttaaaaaagagaatagcccaggggctttggtcttcaaagtctttgtcccatctctttattatttccatctcttttccctagttccttaactttttgctaaagtgcagggaccacccctgcttagggtatgagatattcattaacctcttatcccagaccctagaggcccatgatgggaccacatgggagag

SEQ ID NO: 346657 - DNA, 1000 bp, Homo Sapiens
accgaagcgatgatctttattgaaatggaatatgctcaccagagtgggtatttagtgacagaagatgagatgtggaaggagattatgtgaaaaccccaaatgcttgtctataatggtttgacttgacaactctacaatcacctgcaaaattgttgttgttaccttagatacttttggttattaaattgagtattttagttaagccatcttgagttgacatttaataattcatttaggagccgtgcacagaatattacccagctcaccaaatccaagatgaacaaaattagttttgtgcactaaaaagattttgacaagcctctctcctcctctcctcactctcccctccttctcgtctcctgttctcctccttttctccctctcccttcctggcctctcctcctctcacagttagaagcaagcccgtaaggctttcttgtcctacagggcaaagacggaagcacatttacagtttttaggctagggtctttaagcccatctaggcgcagtcctaaaaccgtgtaggatgtagataggtcattaatctgtgcttgctttttttaagcagccctgattttagatctttcatgtccacttccttgagaaacaattttgcctttgtaaagtctgcaccagtaaaatccttcagtgacacccaaaatgtcgacacagccagcgggagggctgcatggacatgtgggctggtcagccgcaagctctgatatcccggaacacacgtccatcctcccgggtggacggcagtagagccatcagacccacatccgccttcgtctaccatgtggggaatgctatgcctcgcacagctcaatcctgcatgttcgcgaatcttcaggggtgaaaaggagaggaacggagcattcacagctacaatgaagctacaagcagttgtaggcaaaactgtatggtacagcatatgcacagtgcatgccttcccttcacacctcggaaggcagcaggactccccggcaagcgcaagctg

SEQ ID NO: 346658 - DNA, 1000 bp, Homo Sapiens
caggtgctgggtatttatttatttatttaattttttctgagacggggtcttgctttgtcacccaggctggagggcagtggtgccatcacggctcactgcagcctcgacctcccaggctcaagccatcctcccaactcagttcttttgccagttggcatccttttacttattcattgatgaatcccacatattcatttattcactctacagtggtgaaatctcttagaattattttcactaagtaataaaagttaacatcaccaagaatggaacacattgacactgtgtgtctctcgatgggataaaccacatgagttatgtggtattcctcccaaagatacataaaagatgaggtacatccaaattaaagaacactctacaaaataactgtcccggcgcggtggctcatgcctgtaatcctagcactttgggcagcagaagtgggaggatctcttgagcccaagagtttgagaccacactgggcaacatagaacaccccatctctacaaaaaataaaaaattacccgggcgtggtggcgcaggcctgtagtcccagctactcgggaggctgaagcaggagggtcccttgagcccaggagttcgaggctgcagtgagctatcatcgcgccactgtattccagcctgggcgatacagcaaagccctgtctccaaaaataaaaccaaaaaccaaaaaacaaaaccccaaaaaaactcaccaccaccaaaaaacaaaataagtaacctgtattctttgaaaatgtcaaggtcgggaacaggtaggatacacagaaaacaaataggtggaagatttaaatcgaaatattttagtagtttcattaaatgtacagaggagagtatgtgcctatcattgggagtctgagacaagataaaagcacggatctcataacaataaattactttgaaatcttctttcttgctcagtacaggtcccgccgccgcgccgcctggctctcgtattcctggttctcggcgggctgtg

SEQ ID NO: 346659 - DNA, 1000 bp, Homo Sapiens; identical to SEQ ID NO: 161467

SEQ ID NO: 346660 - DNA, 1000 bp, Homo Sapiens
ttttgcaagagagtttgtgttttaattggagcagaattcacatagcataaaataattttgaagtgagaatttggtggcatttattgcactcacagggctgagtatccaccacctatatcaaggtccagaacattccgtcaccccgagggaggccgagctcccaggctgcagccaccgccccgttctgtctccacggacttgcctgtcccaggggttgcccagtaccagggtcacacacacgatccagggcctttcccgcctggccgaggggaccccactccacacagccgcgccctcagacacggggcagctctgagctcccgcggagcctgtccagtttgttcacagcaatggccctgccctcagcctaggctctaggaactggcagggcaagggggcaggagggggcccagcaacagggccacaccctcaggggatgcccaggaaggacgggagaagccacgcagggctgagcgtggggcggctgggtgccctgatggagagccggggctctgtccacacctggacacctcccggccgtggagagcagaggtcggcctggaactgctcccgagatgcagtgtggggctgggggaatagagagcgagtcaggcgagtccccaggcagtgcagggctgggagaatagagagagggtcgggggagcccccaggcagtgcggggctgggagaatagagagagggtcgggggagcccccaggcagtgtggggctgggggcctagagagtgagtcgggggagcccccaggcagtgaggggctgggggaatagagaacaagtcgggggagcccccaggcctgaggtaggcagcgcggggaggcgggtttgggagaaaagcaaagaccacagttttagacacaagttcgtatgagagcaggacacttcagcgaccgttagggcgggaggccgggcccatgaggcttgaatttgaggcgacccacaaggcctcagcccggggtggctcagcccagctggggtctctg

SEQ ID NO: 346661 - DNA, 1000 bp, Homo Sapiens
taatttgcagtttgtttgatttatacttttgtttatctacaacccaataacagacatgagggatggccctgtctctctgggacagagcctcacagatgatgtccatgttttgtgtgaatgaaactcaaacactcttcagtttttagagtcattttctggtatcgagcgaccacaccgaggagcacaccctgcttccaaggctgctgccttctgcacacagtgggggatccccacccaccctggctcccctcaagggctgcgtgcacagtgcccgctttccagttacctgacccaccctgagtccctattccattttgctcggggctgacctcagacatgccctgtggctcagctctgccactactcagaacaccagcctcagcttccctatgtcccccagattcagcagcccagcagggattgggggaaatgctcccacatcaggtgggtggtggcctggtccctgcagactggactggcttttcagccatctccaggaagcaacacctagcagacaactgtcccttaaccccaagggtgatgcacacttctcccctggtctttctgccccccgatgcccctacatttacacagcagtgcgcagacccttgccgcaacctgcttgtcttgctgaccctgctgtaggagcgcctaaactgagtgcccgtctcccctccaaaggcagctggcttgaatcctgtgggaacgtgcccttcaccctttgccagcagttgctggggagtctttccggcccctttctcagactcaccacctacctccaacctgcgcagaacaatcagcgtcctgaccacttgctagagatggcttcaggccgaccactccatcctcactgcaggccttcattccttctggcttccatcactgcatggccccctaagaggtccccctcctggcccttgtcactgtgcctcatgacagccactacgccctaagcctttggaggccagggacaaagtctcgttcactgtcctttccgctg

SEQ ID NO: 346662 - DNA, 1000 bp, Homo Sapiens
cccagttaatttttgtattcttcctagagacggggtttcaccatgttactcaggatggtctcaaactcctgatctcagatgatccgcacgcctccacctcccaaagtgctgggattacaggcgtgagccaccatgctcggcctaggtgacttttcatggggagataacacacaggcatggtgagcagcgtggcagaggacctgtgtgcagggccctgtctcccgccggggaatccttcatctgggaaatctccgctgcgggacagggatgctgtgtcgtcaggacgcagcgtctctccagggcacccgggcctcctctgagcctctttgcgctctttggctgcgtgctttctttcccaaacagtgcagacatggaggagacagaaggtgaaaatggtttctgagcccctccagccgccctctggggacaccagcctggcgttcttcagacacaagcactccctgcagccaggaagaggaggaggcagccgggtcttgggcgcagagggaccaccctgaatcacaaagcgtggcgcctcggggcctggctcccttcacgtggcctgatgtctgcatattcatccgccgtgcagtgtgtgtccacggttcattttgtgttgccacggagcatctcattgtgtggccctagcccagtgtgttaatccgttcacctgctggtgggtgttgcagtggtttccagctcttggttatcaccgagaaagtgactgtgaacttccgcacacacgttttgctgaggacaactccttccatttcacttggttattaggagtggagttgctgggtcctagggaaggtgtgtgtttctctctaaaagaatttgccaaaccgatgtccaaagctgtaccatttcaggctcctgcctgaaatcatgctgtgattgtcatttcagggtccacgtctgacaagtccaccgtggctgcccttctgggcctgttgctgctgactcacgttcccacggccacctttccctgcgtctggac

SEQ ID NO: 346663 - DNA, 758 bp, Homo Sapiens; identical to SEQ ID NO: 161468

SEQ ID NO: 346664 - DNA, 1000 bp, Homo Sapiens
tttgacattatttttaggcttccagaaaatctgaagttgtcaaatacaactattactgacatagtgattaatgagttacagttcttagaaagcccctccacttctggcaaccaccacgcctttcctaagaggcctagacaaatatagctaacttctgtttgacatgagggatgcatggtaattcagaattcaatatgccaagtgacatagagacaggtacaaggcctcttggcatgcagaggagggaacaactaactttgcggcttcctggaggaggaaatatttggtttgagttttgaagtctatgtgggagttctctgtgaaaaagaagaagggcaaatactctctagattaggggacaaaaatgagaaaagcgcccttgcatgtctggggaatgaaggaagtcaagtagggctggagtattgggctcatgagggtggggatggtggtgagggcaggagggtggctgggcctgctgggtcagaaagggccttgactaacatgcttaatggtttggagtttatcatcttataagcaattgatgtgcatgtatgtgtgtgtgtatgagtgtgtgtgtgtgtgtgtgtgtgtgtgtgtgtgtgtgtcccatggagcttttgagagagagatatggggccaggagcggtggctcatgcctgtaatcccagcagtttgggaggccgaagcggtggatcacctgcagtcacgagtttgagatcagccgggccaacaaggtgaaaccctgtttctaccaaaaaatacaaaaattagctgggcgtggtggcgtgtacatataatcccagctacttggggggaaggctgaggtaggagaatcacttgaacccaggagacggaggttgcagtgagccgagatcatgccactgcactccagcctgggtgatgtattaagactccatctcaagagaaaaaaaggggggagagatatggtcaaatttgtggtttgtacaaatggctgtggcagtctgcagggaggtaggtg

SEQ ID NO: 346665 - DNA, 1000 bp, Homo Sapiens
gtgttccaataaaactttatttacaaattcaggaggcaggcctgatttggcctgtgggctgtagtttgccaacccttgagatggccccagtaggcctgggtccagcgtggtcaccagctcattcacgcgcctttcattgctctcctccccttcccagtctcacttctccactccctactggaacttccaggatctcttcttaaataaatgacttgatcttgaattcttgtctctaggtctgcttcaggggacccccaatctaagacagatatccccaatttcacatgaagagactgaggcagctggaggcaaagcagcttgtacaagaccccacaagaagaggaggagttgctttcttgaactgctgtggttttacccacagtcaccggaccgtgctgccgccctggtgggaggatgtgtctgcctgcacaggttgaacaatctcaagacaccttgctggaattggcagaacattgagctcattcggtcactaccagggctatcaggcacagaggatgaggcagtcctgccctgccctctagaaccgaaagtctggacagggagtggcagttaaatgtggggcagaatgagatcaatgtctccaaggggtaaccctgtcatcctctcccttggatcttctctgggagagctgcaggacatgagcgatcactctttcttttcagatgggtaaactgaggctcagagaggagatggacttgccccaggccacacggcttatacctggcagaactgagtctgtcccagggctctttgagcacctggggatgcagaagctggcggggtgggaggtggcggggactgtggaaggcttcgtggctctcatgggcactccagctcactgtctttactgccacagccactgcttctacatttgctatctcattggatcatggcgccttgaacaaaagtgtccttactcattatctaattgaactcccattttacaggtgggaaaattaagacccagagaaggaacttc

SEQ ID NO: 346666 - DNA, 1000 bp, Homo Sapiens
gccctgaaagtgaaatagattgaattttgtcctggaggtcaatgggatgttccaggacttaagccccataggactgacaatcaaaaacaggtctggctgcactgtgggaaatggattgagggggcgctggagtgaaggcaggaaggctgtgagacgtgtcagacaggacaggttgaacctggggctgagagaactgaaccaactggaaaggtctcttaaggtctcttacaaggtaaaaagagacctaaggcaggtgtgaagagcgataaggcaaggatgagatccaggtttctggcgtgggtgtccacggaaatgagaaacacgatgggggcagagctggggaaaagctggggagatcaatttctcgccgagcctgtggtgtctgaggggcattcagggagcgatctccaggggggcaggtctggaatgaaagaaggagctgaggccgggcatggtggcgcacacctgtaatcccagcactttgggaggccgaggctggcggatcacatgaagtcaggagttcgagaccaacctggccaacatggtgaaacccccgtctctactaaaaatacaacaattagccgggcgttgtggtgcatgtctgtaatcccagctactcaggaggctgaggcacgagaatcgcttgaacccgggaggcggagtttgaagtgagccgaaatcgcaccactacactccagcctcgacgacagagcaagactctgtctcaaaaaaaaaaaaaaaaaggccgaggcgggcggatcacaaggtcaggagatcgagaccatcctggctaatacggtgaaactccgtctctactaaaaattcaaaaaaattagccgggcgtggtgatgggcgcctgtagtaccagctactccggaggctgaggcaggagaacggcgtgaacccgggaggcggagcttgcagtgagccgagatggcaccactgccctccggcctgggcgagagtgcgagactccgtctcaaaaaaaagagagaggaga

SEQ ID NO: 346667 - DNA, 1000 bp, Homo Sapiens
tgggcattcaaatatgtttttatcataaaggttttaagggaaagagcagatacaccagaaagagtaaataaatcagtactaacaagagaaaaattcacagatactgatttacacagagggtaggatttcaaagatccttctattcccatccatgttcttcctgacacagaaaggacatgatgggttagtcgtatgatttgcacaataaaaagcaccattaatgcaatatttgaactttgcacacatttggtgtgagaatcattatttatatttgttctgccttgaagagcatttgggaacttcattgtcttttgaggcttgaaatatagcaaacagcacagtgaactcccctgcaacccccaaaaaagaatgagaattagggaggctagaatcagagtagtaacagaagctaacatctgtaccaggcactgtgataaatactttatatacattatctatttaggccccataataatcctgtgatgctactatgtcttgtattatcataattatttaactgatcaggaaactgaagggttgtgaagttaaacaaaatactcaaggtgacatagtaacaatgtcttaattctgacccctaagttcctaaatactatgctataaagtactcttagtaagtttgatgtctcataaaaatatatactgtaaggacacccacagtgaagttacatgtaaatgcagaaagatacaggatagagcagagacaagcttttaaaatggctggaatctgcttagccaatctgaatttgtagtagttgatttgagtttgtatgatagccagatccactgacttgaccataccaaaagggttgcaaatggaaagagtttaggtttttcacatagctcttaatagattaggcattattcactaatagattaggcattattcactgtgataataaggacaggtaagacatgaagaagggagctgggtagtggtgtgcagctgtagtccctgctgtgtggggggctgaggtaggag

SEQ ID NO: 346668 - DNA, 1000 bp, Homo Sapiens
gaatactttgaatcagtatttattgaagaagacaatggggaaattcttgttccaaggacacattttatggcaaagcagagaacggccttgacagagattcttcagtctctcaggagaaaggtatggagcaacttgagggactctgtgcagtaaatcaccaggaccagatggtattcatccatgggttccttattgcagatgattctcttctgttttattaaaagaatgatgctctcaaacccccaaattgatttcatggcccaccaacaggtcacaatccacagagtgtctgccatctcctctatgtagcctttcctgtttcacgcccttcatagagctcctattggcacttctactatattgcaattatttgtgttgcaggctctgttcttcctgactgtgagttccttgaagatggggattattttatgaatctctatattcctcacaccttgtctcacatattaagactgaggcaatacttaatgcctctacaaaatggcttaagctcctcagataaaagaaggtatagaaatgaagaaacatttaaaactgataaaactcttctgttcaaagcatgaagtaggctgtttaataaatatgactgtatcttgacccctctgtgacatcaaacctcagctctgctccttgatagttgtgtgactttgggcaagttacttgacctctctgtaccttagtcagcatctggagataatctttttattggcagggcgtggtggctcacgtctgtaatcccagcactttgggaggccgaggcgggtggattacttgatcccaggagttccagaccagcctggatgacatggggaaacaccatctctacaaatgtgtgcctgtagtaccagctactcgggaggctgaggcaggagaattacttgaacctgggaggcagaggttgcagagagccaagatcgcaccactgtactccagcctgggcgacaaagtgagactctggatgggtcttttgcaatctccccag

SEQ ID NO: 346669 - DNA, 1000 bp, Homo Sapiens
taatttgagtggtaataatgaatatttaatgatcctcctttcaagcaggaacatataacttttcatgtatgccttaccaaaattataaccattaatctagaatttatagttgcaactgagaataataggcaggaattacagattatggccaagtcagaatattgcataaatattctgtatgaacacaaacacaggggaatgtaggaagccccagctctctgttttcattcaatccaagtcctctctttgaactgtacggaagttgtgtgataagcagagatttgaatccagtcattaagatgctattatttctttcaagaaataagtacaatagccaaggtctttttcactctttactagcccacactttgtaaagaaaaataacatgcatataaaaatttatcccctataggggtaatatttttagaatgctctatttaaatcaagaaaaaagtgaacattaaatttgtcagaaatgcagaatttttacaccttaaatttcattgattaaatatgtgcttagttttcccagtgtgttcctttatcagaaactacaatgtgactttgggaaaaagaaagagaaagatctgaaaaatgcaagaggcactttaaaatcggctttgttcactgatggaaaatatttttggttaaatttccaatttatatcactcctgatatctcaatatctgaacaatttcacacgcctgtgatgttgcacagaaacacgtctgcctcttttgctggttagaattgcttccttgttacagggtagttgaaaaccagtgccattgcagttacaaatacgcaattctacatcaaatcccagtgctcgttattaattaattgttttaaaaggagtgtgcttataaaattcaagaggggaaaaaaagtctaataacgtggagaagagaagcaagtagaatctgaggtttctcccagttgtgaccctctttatcagaaattgtgtccggatgaatggcgcaccatgctggtaccaagc

SEQ ID NO: 346670 - DNA, 1000 bp, Homo Sapiens
aaattttacattttgatgatgaagccataggcctcactctacttgtctaggagctgtgttctgagttccacctgcagctaaccccgtgtagatattatgccgctcagggctgaggctggggaaaggcaggaatcaaaatagaggggccaagtccagtggaggctggatccatcctggaatatgtcatctgtgacatttaaagccaccaaaggcattttccagcaacctttaacatcctgggcagaggggtctggaaaaaagttgtgttccctcctttaacctccctttccacctggtgcttccttttccaagaataaaagggcgctacctgtgtgagttggccaggccactctgcagccaaagaatctgggggctggctcagtgccaggcagcaccacacccaggtctgctatcctgcacatttatctgcagaggccctgcacgctgctggggaggagaggtgggctttcttggctgactcatgccgaggaagtgaaaagcccagacacatttggttcatcaattcctcccaggtctcagcctgtgcttactaacccaggcagtgtgtactgacactgagaaactgggtgtctctgggagtcagtgatctcagatctgtgggtgacatataggacttgatgatttgatcttcatttcaagtaccaactgcttttttatcttcttttactttgttcttctttaactcattagggaatttttcagtaggattaagtaaaatagattcctcaaatttgtttccaagttcagatccaaccaggatttttcaacatcctcttggttcccttgtggacaactgtgcttgtcctcctgggacctgggaaggatggtgtagaactttcctggcaccatcccacttgcaggcgaggaatccgggggacgtgtctaccagttccatccgccactggcagagagcattcactccccagaaagcctggcctgacctgcctgtggccccagcacattcctgaggacaaagaaa

SEQ ID NO: 346671 - DNA, 401 bp, Homo Sapiens; identical to SEQ ID NO: 161469

SEQ ID NO: 346672 - DNA, 397 bp, Homo Sapiens
taatttcaaagatacatgaaaatcgttttatttatttaacaaacacaaacaattgaacaaacaatggaagcaagtccttttgcctaaaggaacacagagggtcatgcggatgttgctcctccaaggatttcggtgttccccaacggctagttttgggtctagttcttctggaagaccttattcttggggagctacaggttctggcgtttggggctctttcaggttctatctccattttcccctcaattcctccccattcactccaatctctccggtcttccaaggccttgctcagtcgtcctgccgggcgggccctgaggatgcaagggacggaggaagtttcgtgcgtgcgcccttcccaggaacgcttgttcgagcttttaaagtattcatgcat

SEQ ID NO: 346673 - DNA, 1000 bp, Homo Sapiens
aaaccaaatcattttattgtgcaatttccttctaccagaaaattactaaaaatataaatattaactctctaaaaaatactcagaatagatctgtaatcttcctcctcctcctccgaactggagccaatcttcttctttaaacgctgatggattgcatacatgtatgtcttccatatcagccacatacacaacattcagatacacttccctctgtgcagggggatacaccagcctcctgccaggttctggaagctcaccttataatctaccaggatacagctgtgtgctgagtaggaggttatggtggggttggggagtaacaaggagataaaagaccttgtggtcccaacttccttatgtggacagagaagataggtcctttactcctcctcattaccctgccctctcatggactgggctaactgaaggccaagctcccagagaagctggactcactgtgcgggattactgagggtgtggctgccaggctacagtcacaggaaggccagactgttgagatggacatggaaaccaggtgaggctttggatggaaagctggtctgggccaaggcctctgcaggatgagtagtagctgttcctgctgggctttgggcagcccctagaccctagcaccaggtactatgtgcagcatctaagaccagacaccagtctcagagagcctcccgaggtagcagcaacatccctgcagcagggggacgggcaggttgtaggcagttagattggagcagggtcccatggcactgtattcagtatcagacacaggtctgaagaactctggggtcaccctggcaatggtcctggacaacctggtgggatccttttgctcatcctgggtctaaggtcctggactccagcagcagctgggctatagagtggaggcagggtacttaagaaaggctgcacctgcaatacctgtacctatggctgccatatcatcgggccagagccgccctgggctccaggagaggagaagccccag

SEQ ID NO: 346674 - DNA, 1000 bp, Homo Sapiens
atgctttagttttcataggtatgatatgatgcgtcttggcatggaatttgttgggttcatcctgtttaaggtacactaaactgttgctgcttcttattcttcatctccttttcctcctcctacttctgtgctctccttctttttctttttcttcttcacctcctccttctttgcatgaatgaggagataatgaaaagtttgacagcaaagaaatgggccgcaagttctattatgcttacactaagcttcttatatctgtaatttgtaccttttgccaaaattggtaaatttgcagacattgttttaagtactgttttagtctcaccttctttatcttctcatgggactccaatgacacaggtgtttgattctttgctacaggttcgcatatccctgagattcgtttcagttgagcagtgattgtcttttctcattcaacttgattgtcctggttcttggtatgataagtaaatttctactgtattctggacatattgcgtattaggctatgagaatccagatcttatttaaatcttctgtttcagcaggcctcctctaataccacactggcagaagtgctacctcattactgccaggtaagtgtggccttcactgatacacaaaggggaagttgtactttgttactgatcggcagggatgggagtttaggctctcactaggtctatgatggcatcatcctatctgggaggaggagaagtaccttgttactttgtaccacatgacctctactgatactaggcagaaggacaaggcagtcttcattattgcttgaggtcataaatgtcctttatttttcctattcattctctttggacactgtgatggttaatactgtcaacttgattggattgaaggatgcagagtattgttcctgggtgtgtctgtgagggtgctgccaaaggagattagtatttgatgcagtgtactgggagaggcagacccaccgtcaatctgggtgggtgccatctaatcagctgcc

SEQ ID NO: 346675 - DNA, 1000 bp, Homo Sapiens
aaccagtaaaatgctattatctttattaaaggcagaaataatgcaggtaaaaagacgacagttgaggcatgatatggtttgagagtcaggtaagatattaatttttcccactgccaacataaaaggaggtttaacacaactctgcaatgggaccatctgattagaggtcatggctacaacaaatcgaagttttttactatgggtctctgttttacattctgctttccaaatccgaattgggctttgagccatcattaatttccacaattctggatgttctgggcttataattggatcaataatttttgggcttggaggagccataccgttctcctcccacttaatagggtaatttgtttcaattcttctatgtaattttggtgcattatctgggtagtcgtttgcaaaatagtctctctacaatcttcactctgtccagtacaatttactgcaaattgtcccctaggggcccaatcaatgatgattccataggaattattttgtagtacagcagcactgtttgcaatataatcttcccaggttagcacctctagcttttctgaccgtttaataacaggaggttcttattaggtttaaatttattaatctggcgatgtgtcacaacatagccatgctcaaggtatttaatagtgtccaaagattgaaatgttcttccactgattgcatgaataaaggcttttgatccgttatgtgcaggaacataaaccatccaactttgtgtatcataatttaaaaatcctgctgctggccccaggcagatggcaggaaagcgataaccaatagaaacattcattaacattcctcctcctcctccttcctcctattacaaaaataggtgtaattttgatctgcctctgctacaggaagactcaccaccaaggagattaccgccatcatagctaccattagattactggtggtcagcggcttgttctgagacctcaggttctcttctgcaatgtgagccagtctcttcatc

SEQ ID NO: 346676 - DNA, 1000 bp, Homo Sapiens
ccaattttagaacattttaatcaccccacaaagaaaccccatggagggggcaggcattccccattcctgccctccacccccaccccaagcccctggcaaccactaggtgcctcctccaagcagttcatataaatagacatacagtacatgtgcttttgtgactggtttctttcactgaacatactgttgagaatcagccatggtgtggtatacatcagttctttgctccttttgactgctgggtaatatccccttgtatggatggacacgccacatgttttgatccattcgtcagtggatgaacacatgggttgtttctactttttctggctatcactttcagtgctgtctggatatagtccaatgagggtcacaggagaacaagtagagggtgatttttaaacgtgagtaaatgatgcacacagaggtgcgttttaggccagtgatggtgcatagtttgcagcatgcacactgccaggcccataccctcttctgggttctcaaatcccttttctatgaagattatttcttcccttcttagttaatttccttagattcgataggcatcaatagtgtgctgtggacgaattccgccttctgaaagctctgtaactgggactctatgaacaactcgggtgcagagaaggatgagcctgttgagtgtgcaggatcctttactcagccttgagcctctctattcactggcattttacagtcacttcaggctggaagccatgctgtgtgcggtactcccagttcacctgcttagcctcaaaaacccccagtataaccttgcctgaagaagtcgctaaggatgctggcattatttgtaaatcgatggcaaatggtactcagatatgaagttcttctgcggtcttcgttaaagctttgtattattctgtctaaggtgtgtttcatggtgactctatgagaagcagattaacactcacacaaactattaagacttgtggctgaaaggactctgcttgcttcaggaaga

SEQ ID NO: 346677 - DNA, 1000 bp, Homo Sapiens
aaaaagattttggcatttttatttaacgactttgtgaaaggcaaataaaaagcttaagtgacaaatatacttaaaaaaattaaatctgctaaccttttagctaagttgctatcccattccaaaggaaatagactgcagtaccaattggctgactttgggtaagcaatggggtacattttacctaggtaaaggatgggatggggtgcagtaaagtccctcttggtcaaaagtggacttggcactataggattttaaccactattctctttggattaatctgccttgcactctttgctggcagctatggctgacaggattaggcatatacaggactttggaacatggagaactttttctccccaaaggggaaaagttgagagctgatgggactggaaaagattctttatcaaccaaccagctgccacctgaactattaattcagtgtctctgcaatgggtgggtctttctctggcccccctgaactcctcaccttagatagcgcagacaattcttctctctctcactccttcactgtgcaaaatggatgcgggaatggtaaaaatcactatctcttgcaaagttttaattaataggaaaaaggattcatgaggctagtcttaagctgtaacgaatctggtgaactttgtgctgtgaatttgtctttctgtgtcattctgccatgaagagaggtaccttaaaatagaacatgagcttaggaccccataagcttgctgttcaagatagcccagcaagctggtcagtaataaactttgttacagatccctgaaacaaacgaagaaacgggatgaggtctccatcttgtttatgtccttgtgaacttgatcttgtaaccatgtaacagtattttctcttggtctctgccgtcgcgagggtccgcggcttcattcttgaagtcagtgagaccaagaacccaccaattccggacacaatactacagagagtccctccatcattttcttggatttacgggtggtttccg

SEQ ID NO: 346678 - DNA, 1000 bp, Homo Sapiens
ttaagccaaaccacaaataagtatcatttatgttagatgccgtgctaggtgctgctgatacaactgagaatatgtcagatacagccccagccctttttgatttagagtctagctggtgaggtcatttaccaaataatgatgcataatcattccataaatacaaatgatggtgttatgaagataaaaagagggtgctcagaaagaactaagggggtacaatttattttattttagaaattcttttagattcagaaagtacgtgtgcaggtttgttgcacgggtgtattgcatgatgctgaggtttgggcttccaacgatcccgtcgcccaagcagtgaatatagtacccaacaggtagtttttcaacttttgctctcctccatccccccttctggaatccttagtgtttattgctcacatctttgtgtccttgtggggatgcaatttagattgaggctcagggacagcttctgtgagaaagtgacctttaggctgagcagaaggaggtggcaggaatgtggagggaagacaatccaggtgacgggaacagctccgaggtggggaagagctcccagtgatggaagaggcagctttgtggccagagctggtcagcatgggagagagtgacacaagggcctgaaagaggacccgtgtggccatggtaagcccattggtgatgaagccaggggcaccaggtggaccttttttttttttgagatgaagtctcactctgttgcccaggctgtagtgcagtagcatgatctcggctcactgcaacctccgcctccttcaattctcctgcctcagcctcctgagtagctgggactacagacacatgccaccatacctggttaatttttgtatttttagtagaggcagggtttctccatgttggtcaggctggtctcgaactcctgacctcaggtgatccacccacctcggcctcccaaagtgttcggattacaggtgtgagtcaccatgcttggccatgccggttgttt

SEQ ID NO: 346679 - DNA, 1000 bp, Homo Sapiens
gagatggagttttgctcttgtcacccatggtggagtgctggagtgcaacctcagctcagtgtaacctccgcctcccggtttcaagtgattctcctgccttagcctcccaggtagctgggattacaggcacgtgccaccacacccggctaatttttgtatttttagtagagatggggtttcaccatgtcggccaggctgatctcgaactcctgacctcaggtaacccacccgtctcggcctcccaaagtactgggattacaggcgtgagcccgtgcacctggcctatgctagaattcttaaatgtcataataaattgcaagctattggaaaagccttcagctggatttacagtttgaggtgcctctgcctgtagaagtttccttggaggggctgggtggtagctcaggtgcaagcccaagtgtgctctgggcttctggtgggttacaggctggctctgcaggttgctgtctgcattgggtcttaaatggccaggctaggggatgacatggaggaaacgtgtggcctgtggtactttgggctgaatcctgtccctccaggcccctcgctgtccagaattgttgcagtctttggtaggacagaaatgccctctctggccggagaccagctgtaagcccaggccggcttctgctgtgatctcaccataggaggcccgtgagaaaggagtccgcaccttggctcccagcttggggcagccccgttactctgtgacttcagtcaccagaccacaactcatggcttccctcagtatccgtctccatcctgtggactccacacagtgtgggcgaggcattggtggcccgccctcctccccgcgcatccccacggccggcgctcacgtttccctgcagcctggagttgctccatcacgtaactgtggctaactttcgggtgcacacatctggagttaaaagaagcgcctgggccgggcgcggtggctcacgcttgtaatcccagcactttgggaggccaagacaggcgg

SEQ ID NO: 346680 - DNA, 1000 bp, Homo Sapiens
cgttttctgtttgttttattttcgtttgtttgttttggaaggatggagtctgactgtgttgcccaggctagtctcgaacctctggactcaagggatcctccctcctcggcctcgccaggtgctggggattaaggcttgagcctccacacccggacctattaattattcttaattaaaacatttaaaggacacagcatttggggtcagcacagcatttgcagtggctgctccagcttcgggtccgcaggtcaccgcgggggcccggtgcctactggcccggccgccctgcgggttagctcatggggattctctggagaaccctgagcccacctcctgcgccccgcccaaccttgggtccccaggcccagcctccgaggccccgctcccagcgctgccgccagagctccaggctgcgctcccccaggcaaaggcgccaccggcgtgtccagcgcagcctcctcctccaggcggcgcgtgtgagtcaatggaaatgaccgtggcgggcggagcagccacctaggacatcgcggaagcctcctgaggggacttccacggcttgtcccaggagcttctacaacagctggcattgagagttcagttataatattttccgccagtttttcccagcccggcccccaagcgtctgattttaaagttcccgcctcaggctccggggcgcctaccctgcaagggcgccagttctccgacacctgctagggaatgaatccccatcccaggaggaaggcgtggcggggacggaagaaacaaccacacgatctgtgacagtgaccaagctttagaggccccgtgtgcctgccaggcgcctgagcccacaccgtccacgcttccctgccccggcgggaaccacctgttctccttgcaccggcgagggcccggggtcaccccccgccgggccgaccccaggcagctccagaaccccctcccaatcgccccgtcttgggagcgcagggagtctggctcttccctgccaataacgaaa

SEQ ID NO: 346681 - DNA, 1000 bp, Homo Sapiens
gttttcttgagaagcaactgtatttaagggactccttatataaaatcaagttcttcttagcaaggattgctttaaatattcggacttgaatgaaggccagccatgttctgccattttcaaaaatcttgtaattgaagtcttagagttgattttcttttcatttgtgattaatttcccagaataacattcccagctcccaccccacccagcatttacagtccagagattgagtgtaggaagtcttagtaaagcccgaaatctaaaacaaataagaccagtcagttctctagttagcttttttcctttcaagtcgttagcaatataaactctggaaagcctaaactttaatgcacccatctcagcaacatctcctataacgatggaaaggcatagaaaagaagaaaagggaacattattaatcttgtgggaacgctggagttttgtctattttcacaaacagcgtgagccccaagtcatttaaatcctctgggggtgggagacataattatttgcaagggaacattattagctaagtacaaatgggttgctatttgttttctctgttctttgtgatgattacaggctggggatggtgtttagtaacaggatccagcaggtcagttatgacaacttcatcatcactgtcattaaccccttctgtttgcagtgaagacaaaaagctgttcagtattaaaagagtcaagaaaaagagaaagaagagggggtggagaaagtgagacaaccaaagagacagccagggaacagaaattcatacactatgaacaccggaaaaaaatacccctgggtaattgagtcagctgactcaaatggtgtaggggcctcagttagaggaccaaattttggactccttgttctttctgccaaaagagtaattgttcttgtttgtaaatgcaaatgtttttgccattttagttctgagaaatgccctagggagatgttatttttggtaaggggtcttcctgcttcaagtgtaacaact

SEQ ID NO: 346682 - DNA, 1000 bp, Homo Sapiens
agttactattcacttattttatttgtgccatagaactcttttttctagacattatctcattaaagtccatgatacaagacaggtggatatttttatagatttatttcacttatggatgaagaaatggagaccttaagagagggtgtgacttgttcaagacaacacagaatgtcagcagcaaagctggggttggcctcttgacccacagtccggtgctcatttcatggtaactcatcagacccgtccctctctttcccacttattattctggtgtccagagtactcaactttggcttatcatgaggatggagtggggagccttgggagtggaagggctgaaagggaagaagcatggtcaggaagaagcaatgagcttgggctcaggtgatacatagacttaggtgtgcatgccagatctgccattacctgacttagtgacttcacctctctgagcctcagtttcattgtgtgtaaaataagaccactgccaagattaaatgagataaagctcatataggaggtaacacatggtaggtacttaatacatcgtagttcccatttttctagcaatagttgccaaaatactgtgttgtagggggatggtaggggagtgcttcaggagagtatatgtaatgatctcactgccactgtgtctttgcttgtcctgggtgtgagtcctggattccactcctggaaatgccaattgcacttcaagatttgatctcagaggacccagagtctccaggacctgtttgtgacatgagctttataacttgtcttgcaatattctccttaatgatgatgatgacaacatttcacattgagcaaacattgaatcatttcattcactcattcaacaagtatattctcttctgtgtcaagcacaggagatacatacggatatataagatagggtcccagtcctcccaggttgcaggctacagagggacatagtcatgcaaacagacaagttttaaagctttaaggtgtatctaatctt

SEQ ID NO: 346683 - DNA, 1000 bp, Homo Sapiens
tttcataacagtctcacttttattttaagagacagggtctcactctgttgcccaggctggagtgcagaggggcgttcatggctcacagcagccttgatctcctgggctcaagtgatcctcctgcctcagcctcccaagcagctgggaccacagtgcatactaccacacccagctaatttttgaaatgtttttgtagagatggggttctcactatactgcccaggctggtctagaactggagatcaagtgattctcctgcctcagatttccaaagcattagaactacaggcatgagccaccatgcccagcccagtctcgtatcaatatttaaaaggaaaaaatgttggtgcttaaaggtgggagggatgggggataagcaacatggtttccaacaaacaaggccaaggtttgtctgcacttttggcagagccatctgtggcatcctcctggtgagcgtcaccagttgggagctcagcaaagacagtcaccaggtcctcacagctttgtcatccttcttgccacacggacatcctctctccccaccttctgggagcaggtcagttggagagggctcctttagattgtcactttattagtaactaagaaaatcaagttcccttggctggaaatcctcatagtttcactctcgtgcatcaagaaataaagttcatagaattgctaacagactttgcaaggagctctcttccccccggctccccaccacccattttttttggttacagtaattgccgtctgagcctcaaaggctagaaatcgtttttcatctcatgcatggagaatttccatctgattgatgacagccacagagcctttccttacccacggagctgcactaatttgcaagctaaaacaatattagcaaattgttaatggcccatgaaactgcaggagcagcgttaagtgttgtgctcaggcctccccggcaactacagctgctcacctaaatacccacggtggcagcaagaggaggaggcttcta

SEQ ID NO: 346684 - DNA, 1000 bp, Homo Sapiens
tagctataaccataaacatttattaatgaatgcacaatataaattaaattttgacatcaatagcataaagtgaaggaggggagcagtaaaagtgtacagcgtttgtatgtaattgaagttgttatcagcttaaaacagactattataactataaaaaatgttatgcaaacctcatgataaccacaagaaaaaaacctgtggtagataccataaagataatataatcattgagtatatcatgaccaaaaaaatcatcaaatcaccaagatatacaagagaggaagaaagaatcaaaagtactacaaaacagaaaacaatttttaaaatggtcatagtaagtacttagctataaataattactttaatataaatggattaaattcactaaccagaagatatagcctggatatatatataaaaaacaagatccaactatatactatctataggagattcattttagatttaaggacatacagaagctgaaagtgaagggatggaaaaaagatattccatgtaaatggtaagcaaaagaaagcagggtagctataattatatcacagaaaatggacattaagtcaaaaactgtcataagggacagagaaggtcattacataatgataaaagggtcaattcaacaagaagatatagcaattataaatgtatatgcacccaacatcatagcagctaaagttataaagtaaacatgtacaaattttttttttcgagatgaagtctcactattgcccccaggctggagtgcaatggtgagatcttggctcactgcaacctccacctcccaggttcaagtgattctcctgcctcagcctcccaagtagctgggattaaaggtgcctgccaccacacccagctaatttttgtattttcagtagagacggggtttcaccatgttggccaggctggtcttaagacagaaacagaaaataatgcaataatagcataattcaatactatcaataatagatggatcattcagaca

SEQ ID NO: 346685 - DNA, 1000 bp, Homo Sapiens
agtagagacagggtttcaccatattggccaggctggtttcaaactcctgacctcaggtgatccacccgcctcagcctcccaaagtgctgggattacaggtgtgagccactgtgcctggccaaaggctcctttttttttttttgagacagggtttcactgtgtcacccaggctggagtgcaggggtacaaacaggctcactgcaacctctgcatcttgggttcaagcaattcttgtgcctcctgggtagctgtgattacaggtacatgccaccatgccctgcttttttttttttttttttttttttttttggtatttttagtagagatggggtttcaccatgttggccaggctgatctcgaactcctggcctcaagtgatccacccgcctcggcctcccaaagtgctgagattacagtgtgatccactgcgtgtggctgagaaggccccctttttaaagaaaagtcttatctcgtgggaagtcagcaggaaagccagggatggggaagtggttctggcactagatcagcaatggcagtttctcaggttacagctgtgtgaggtctgtgttcacggccttgggttctgaagtgtaagcttttggttaggacagtggggagataggggatttgggctctggtccagctccatactatgccagctgtgtgatggagctcctctcagagcctaatgccaccttgagttttacccatcttgcagagctgtggggctcagaagagaaggactccatctttggagagcatcttggtgttcaacatgctttcactcttcagcctccttagagggggccagtagttggagaaaatggggattggataatgctgagttccttgcttaaagtttgcaatggaaccaggattcagacccattagatggcaccctgaaaatgctttgaggatagaacagtgccatctgtgtggcagcaagccttcaacactagaatcctagtgaccttaagaggatgacacctagcagagctat

SEQ ID NO: 346686 - DNA, 1000 bp, Homo Sapiens
gtattttcaatctttagtattttgtgtgtttacatatattatggtccagaatcccagtgaatgaagatgtgaaaaatgaattctagaaagatgaaacatgacaagactttaaaagaatgttttaaaagacagagaaatcgctagcctaattggtaggtaacttgatataaagttaacttcttcacttcaggtctcaagaatgtgcgccgtatcatgtagaaagggtggctctctagaaattattctagtccccaaaaggactattccaccccacatgttcatttctagcctacaagtcagtctgtggtttgggcatcttcagtccatcaagaactctgtggtcatgcccaagtctagtttctgggcctgcaagtcatggaaatgcccctgggaggcagccgtccagctgtccccctcagcagccagggactgccaccctattcaagatgctacagccaagaattagagttaactgtgcccagcagtgtcctcccacaagaccacaggttcgcaggctttttctgtagagggccatccagtcaaatattttaggttttgtgggtgataaagtctctatctacttaactttgcccttatagtgggtgctcagcagccatagacaatatgtaatcaaacaagcgtgtctggattccagtaaaacattatttactaaaataggtggtgagccagattggcccacaagccatagtttggcaaaccctgcagcaggtcatgagttcttgacagtagtgactgagtatttcctccttggatccactcatatatgcctagggcatattacatcctcactgtgtctgtggaattggactgaatgcttttctcctaaatggcccacaggcctttgcatagtagtgatcacggtgaacagagaaccatcccatctgaaggaaccttagaggtaccctccttgtcagcaaagagatccttctgtagtatccttgacgcatgacatctagttagcatccttctgcgatgcctc

SEQ ID NO: 346687 - DNA, 1000 bp, Homo Sapiens; identical to SEQ ID NO: 161475

SEQ ID NO: 346688 - DNA, 1000 bp, Homo Sapiens
tatgttctgataaagctttatttacaaaaacaggcagtggggtagatttggctcacaggccatcatttgtcaacccctgctcaggacaattcaaccaacggactgtggaaagaaagtaatgtatgcccagccacagcagagagtaagtgctcaacaaatatattttgaataaaaattagtattaattaaactaaagcacacacacacacacattttactcaacactagaaaaatgaagctacctcgaaatcagaatctatgatttaaaaaaattagtgacttcttggaatcaacaaaactaagtagcaaatgaacatgaaggagacacagatttagcaaactggctctcattaatgtcaatgagcatttaaagctaatgttcatggaagctaagtaaaggcaaactgctcttcacaatcaactggccgcaaaggatgccactatattatacaataccatataaaaactgagatttacagttatgcccttctgccatcaaaataagagaatgttggagaaaatgttggctacgtcagggagatgtgaaatgttttttgttggttggttggttgattggttttttgagatggagtcttgctctgttgcccaggctggagtgcagtggcgcaatttgggctcaccacaacctctgcctcatgggttcaagcgattctcctgcttcagcctcctaagtagctgggactacaggtacgtgccactatgcccagctaatttttttatttttatttttagtagagacggagtttcactatgttggccaggctggtctcaaactgacctcatgatctgcccacctcggcctcccaaagtgctgggattacaggcatgaaccatcgcacctggcccaaaatgtatttatttttttaaggtacacattgaaatgagaagttttaaaataattatctctcttgaaaatatgagctttatttatctcataaataagcttcagatttgagggtaacattctggatctcggtcc

SEQ ID NO: 346689 - DNA, 1000 bp, Homo Sapiens
ggggattaaacgcattgttttattattctctgaataggtaatatatgcacatggtacacaattacagaggtctcccacctcccctcatctgtgcacccagcagccccatttcctccctagaaatagcctatgccatcagttcttcacatatctcagggattcctgagaatattccacctcaagggctcgcaggcttccctggatgagaatcacctggagggcctgtgcaaggactgctaccaccagcccctgggggttcttttctgattcaaaggctctggtgaatttgccttttcttttcctttcttttttcttttcttttctttctttctttttctttctttctctctttctcctttctttctttctccctctctctctctcttctttcttcggtggagtttcgctcttgttacccaggctggagtgcagtggtgcaatctcggctcaccgcaacctctgcctcccgggttcaagcgattctcctgcctcagcctcccaagcagctgggattacaggcatgcgccaccacacctggctttttgtatttttagtagagacagggtttctccatgttggtcaggctggtctcaaactcccaacctcaggtgatccacccacctcggactcccaaagtgctagggttacaggcgtgagccactgcacccagcctgggaatctgcatttctaacaagttcccaggtgatgccgatgctgctggcccagggattacactttgagaaccacagttgtggaggtattcacagaaaccctttcaatactctctctctctctctctgaagtaatttgagtatctgtgtctggcaatggaaatgcctctaagacagcattaatacagcacaattccttcctgtgggccttccctatgctggactcttcatctggaatactctcatccctcacctccacatgtccaaggcccagttcaatggccatttcctccaggaagtcttccttggttctctccctatactgcaag

SEQ ID NO: 346690 - DNA, 1000 bp, Homo Sapiens
ccctttctcataatttatttcattccaaatgacagaaggcaagtgcagttacagggctgtgccctactcatctgggtcagcagaagagcacagctttctttagaaaaacatttactttaaaaccaagcaccttgatttgatattttagtgtgcacaactttgcccgttgagccctggcccaacccggtgggcaccaccattctgccaggcctcgaagggccacagggtgcttaagagaatgtgagggggtgagtgcaggtggaggagcgcggtccccgggacatggttccttcactcctcgctgagatgatgcggcagccttttcttccaatccagttgtggcaggagaatccttggatgtaatgttttcaccttcttccctgagggtcttttctgaggaaccaggcattttcttgtccttaagaggtggggtcttggagtcctgacccaggcgtccggcagctgcacagtttctgagatgtcagactcatggaggagcaggctatgcccttccctccccattccccacccctcaagccccaggtcttactgtataatgatttattttccacacaaatctaccctcaaaattggcttcatgcagattttccttggatcccaatgctggagaggaaaggggaggggaagtgggagggtggtgggcagggtggcttgaccctgccagcctccccgggaactcaggaccatggctccccagcacaggctgaacaagtaccaggagcaaggtctgtggatctgcattagatctgaaggccttggtggcacttcttcaattttaagataatcaggctgagtattcccctgaacctactctagggaagcccacagctgaggcaaaatccccaaacaggcttgacagtggagctgggattctcaacagtgagggctttcatgtgagtttgctagaagaggaagttcacggtcagataattccaagagacagttactttcccaggaaaaggaaaataaaggcttcctc

SEQ ID NO: 346691 - DNA, 1000 bp, Homo Sapiens
agtcatggaagaaaggaatttattggctgagcagcggagaagttaaatcctgaggtgaatttggggctcccaagatgtctgggcctcctcactccccctcttccagctccacccctgatcactggcatcatttcctggccaggcccttctctagccttcagtgtggcaagagagcagtttcatttccggctatctcagagcactgcattcaacagaaaacaaagcaagccctttccttggagtttacaaatgactcaggattcactctgatttgaccaagagtcagaaccctaattggccaagcctgaagtcacttgtctacccctgatactgggaatagaatgcatggatgagagggaggtgggtggttccatgaaaaggaaattcaagcacttttcctaaaagaagggggaatggatgctgaaacaacacgtctcccacaaagggagcagacactgggcttgtgaagctgccccataccttccccacagaactgggtttccctccttggtgcccctgacggagccttgtcttcaccctccattatgtattcatcatgtggcatcgtcactgtttcctcctctgtctccagagtgtcttctcttagttctcagctagtaagagaaggaggctgggcatggtggctcatgcctgtaatcccagcactttggaaggccaaagtggaaggattgcttgaagccaggagtttgagaccagcctgggcaacaaagtaagactcccgtctcaactgcagggaaggaaggaagcaggagtgtgtgcttcactttgcttcctaggctccagacccccaactgcccgctgggaaaacaagggcagctcttgcccacatgaagcagggagcctcgctcctgaggcagggcgctggtggaggctgcctgaatgtgtgttctcactggcgacttggatctggtcctgagaagagttgacccgagatgtctttggccttgcaattccacatacagccccctccttgatgaca

SEQ ID NO: 346692 - DNA, 1000 bp, Homo Sapiens
tctgtttttttgcaagttttgtgaaatttttttcttcagaattgtgccaccatgtctttccatccattataaaaatattatatgtcgtgtttgccagaggagatctccaccccattgctctaggggcaagctgagcattcagtgcagtgtcaggcaggactgaagggctgtggggagctgctcttccttctgtggtcaggaatacatgtccgatggctgtttcttcctgatgtatgaggccaacccaagcagcaacagcacgatggccatgaggatggccacccctgagacggcggcgatgatggtgttcctctgcaggaagtgcagaagctgcccgcagggcatagtcctaaagtgagcatctggtttagctgctccttgaagtgtttctttatctatagtagttaactgctctcttaaatccctgtcgaacagacaggattctttaaaattcttctcctctgaaaggtgatctttatcaggaattttgtccacactgccaaggaaatattctggtttaggagaattccaagcaatgctggttccttttctcatgtctgtctttgtaatggatctgactgctgttgcttcgttaaatgatgggtcatacggaaactttggaaacacctgcagtagaatttcatcaaatattttagccaaatgttcctctcgctcatttgaacctgatgcaaatgcagcattgttcaagctcttctgttgggaatagcttttttgtgtgtctctctttgtaatggatctgactgctgttcttgtttcatcaaatgatgggtcatacggaaccttggaaaacacttggagcacaatttcatctgggcgtggtggtgtgcacctgtggtcccagctactcaggaagctgaggcaggaggatccattgaggtcaggagttcatgaccagcctggccaacatgatgaaatcccatctctacttggatccagcagagaacaaagaagagggccatggctctgctcatctttgcct

SEQ ID NO: 346693 - DNA, 1000 bp, Homo Sapiens
gacagggtttcactctgtcatccaggctggagtgcagtggtacgatggtggctcactgcagtctcaaccttctgggcttagatgatcttcccacctcagcctcctgagtagctgggactccaggcacatgccaccacacccagctaagtttttatagagatggggttttgccatgtttcccatgccagtctcgaacgcctgggctcaagtgatcctcttgccttggcctcccaaagtgctgggattacagaggtgagccactgcgcctagccacagctgaggatcctttcataggccattgatcatcctgctttcttctatgaattgcctgtcatgcccttggtatggacagttttttaacgtaggagtgtcatgcctgacatggtaaaggaaaggtccagtatcttccaatgggaatgtcttcccagcagaatgaccccaacaaaggaggcattcggtaaaggcatggaccaccccaagagccaggggatttgttcagtcagcacctgagcctcctcttgcaggtgttctaacagaatgaggccaaatgttgacttcacttgcagcgatccctctgcacagtccctttgaggaacctaaaacctttgcaggtggaaatgacgtgttttcaaagtgaacacgtgcatcaccaggttgcgctgagggaaaactatttctattcactttctgtggcagccgagacaaattacacaaaatgttgacgtaaaacaaggaaagtgtattatctcacaactgtggaagccagaagtccaaaatcaaggtactggcagggccatgcaccctctagaaacagcgcggggaagctgctcttaccccttccagcttctggtggttgtcggccttccttgacttgtggctgtgattctccaatctctgcctccctcttcacaggatcttctcctctgtgtgtctcatataagacacttgccattgtgagatttttatgaagggagtgtgtgtgtgtgtgtgtgtgtgagag

SEQ ID NO: 346694 - DNA, 1000 bp, Homo Sapiens; identical to SEQ ID NO: 161476

SEQ ID NO: 346695 - DNA, 1000 bp, Homo Sapiens
aaagaaaagggacaagaggtgttctgatgagcttcctgggagaccacacattagctctgtcctgcaggactgcctctccgcataaggcaagcccattaagtcggctggaacattgcacactgaaatagaatagatgttcatttcaaagaattttccttgagccagcaataaaataaaaggtgacaaaacccaccacgctcattgtacccaggtttagacagggaaacttccaggtgtgaggggggctagccagatttgttcctttctgcccctatcaaggtctcagaaggagggtgagtctgtgtttcacttacatttccaaggttgaaaactctcctgcagagttaaaaataaattaaataggtctaatcagaaagcacagtatcacccagaaactaaccaaatgaaatgtcttagtagcttggtcttgagaatctttaggtgacaatggtgaaaaagccatcacagaacaaaacaacatctacaaactattttaaattaccatttcatggggagaaatctttcaaatttcaaaatcgctcaggcaagtctactgattctactttgtacgccttaaagacttatgccaagcacagctttaaaaacgtttcactcctgaaagaaggtctttaactcttccaataactatttaatagttgtcctgaatgtttttaacaagagacgggtattaagtgagtggccttgagtcccaagcagtctgggggaatagaagtggtggacactcaaaggcacggagcagcctgcacctgaaacgggctttctgcttttcggtgaggaggggcggccgaggtcagcagtatttacatatgtacctgatcccacgggctttcctctatttatcaaagaggagggcctgcaggtgaaggggtggaagtgaggggagagaaagaccaaaagagagatcagttacctttcccctttgttcctgggccttgaactggggcttcaaggaggggaataaaagcccccagggaatgaa

SEQ ID NO: 346696 - DNA, 1000 bp, Homo Sapiens
cagatccagacctcctgagcccacttcccccatctcatcacagatccagacctcctgagcccactttccccatctcatcacagatccagacctcctgagcccacttcccccatctcaccacagatccagacctcttgagcccactttcccgatctcatcacagatccagacctcctgagcccactttccccatctcatcacagatccagacctcctgagcccacttcccccatctcatcacagatccagacctcctgagcccacttcccccatctcatcacagatccagacctcctgagcccacttcccccatctcatcacagatccagacctcctgagcccactttccccatctcatcacagatccagacctcctgagcccactttccccatctcatcacagatccagacctcctgagcccacttcccccatctcaccacagatccagacctcttgagcccactttccccatctcatcacagatccagacctcctgagcccactttcccgatctcatcaccagtgatttcttgggccctgcattagttttctattgctgctgcaacaaacagctacagactcagtggcttccatttctgtcttatagttctgattgccaaaagtcctaagaggatctcaccaggctaaagtcaaggtgctggcggggctgtgtcccttctggaggctcaaggaaagaatcgggtccctgccttttctagcttctaggggctccagcttctaggtttgtggcctccttcctccatcctcaaagccagcaacagcaggtgaagtccttgcccatcgtgcatcactctcccttctgcctccttcaactttttttttatatttagggggaacgagtacaggattcttccatagtcaaaaagctccttatagagaagctcggaactttcaatacagctttgcattttttaccattttaattttccatttaatttaaatgtattctctcatttgaccttcatactctgtggagaa

SEQ ID NO: 346697 - DNA, 1000 bp, Homo Sapiens
tttttttaaactttgtatttaatgataatgtaatgccaaaattgcacataattgtatagctctctgaattttcacaaacttaacatacctctataatcagcacacagataagaaacagaaaataccaatacctcagaagattccttggcattttatgtttaatgttgaacattcctttaggactattctactcatacacacacacacacacacacatgcacacacacaaacatgctgtatatatgcacacatatacagctattctacatatgaataatatatcctgacaaaatagttggagttgctttaagagtgtccttcaatagctatgagagttttgaaatttagttagattttcaggtttacttggggtgatattcaaaatatttaaccactgataacagcacatgtaacaaccaatccaaacagatgccacccttggacctggggcacagtcctgcagtctccctgctgtgctgatatgatctttccgttgctggatcataaagatatccagatgatttctaaggagaagcccttggagctagagtgtagggataatgcctgaggactaattaaccagttatataagtaggtcaatatttttaaaattaatacaactagacatggataaatgatttgttcagactaacatttatacaatttggaatatgtccatgaagaaaataaatacaaattgtcttactttcacaaataaagaaaagaaaaaaacaggaaaaaagattattactagggcctctaccaggatcctaagtataaataagtttcatatgatcagtttcatgaaaatctacctctggctatgggtgtactggaacataccagctgagtatttgctttgagtccagatgaatattccaggctgcagattctcagactaaaccagactacatgaagaccttgtcactgttaatgaccatgccagtgtagacacgatcagtgtatttttgtttgctgctgtttagtttgtgcatgattc

SEQ ID NO: 346698 - DNA, 1000 bp, Homo Sapiens
aaggacagttaacatttcggtgtatttcccaccaagtggtgtgaccagattgctttggattcttaaggaggtggcctggaagctgtatgaaggtgggaagaggaagagggcccttccacccacagtggcagggaaagctgttggaggtttcattgcagggaaaagacagcgagtccagtgacatgggagggagggcagatccaggtgacattgctctgggtgcctgagctgacgcaggtgggttggcagggctgactgtggcattgttcatgactgaactccgggagcagaaactgcacctgcacattgtaggcactaaggaaataggtgttgactgaatcttccaggccatatttacattacttcagaggccatactccttaagtgacatagtcctccttgggggaaaccttgagccgtggccacttgcactgccttggtcttgctggtggctgctcactgtttcccagcccctggggcactgtggggactgtgcgtctttgccgaggctggtccccatgagttcactcattcctgcacccacacctgctgcctgccagctgctgagctggaggctggggcatagctgtccgagaggcagacacggctgctgcctctcagggctgacttgagatgcctggagctccttaactaaagccatatccaagttccaacgtctcctttctaaaagaagtctccctttgctccctgtccttcattggaactttgagccactttttgctaacacctaaatcctccatcctgatgtgttgaggccaggagggcaggcgctgaccccatcttcctcatctttaagccttcaccagggactggctgtgccagttgcttagtggagtgcagtggttgaacttgtggaacagagttcagttcccaaccctcctccccactttccctgttggattgttgtccagagacaggagattcactgccgtggggactggccagaggtgtgtctgaacagctcccgctggtagacagt

SEQ ID NO: 346699 - DNA, 1000 bp, Homo Sapiens; identical to SEQ ID NO: 161477

SEQ ID NO: 346700 - DNA, 752 bp, Homo Sapiens; identical to SEQ ID NO: 161478

SEQ ID NO: 346701 - DNA, 876 bp, Homo Sapiens
aactgcaaactgaaaagtagcctttattctgaaggaaaatcaatttaatattcttccactaaattatcaaaacaatttttttggcggaggctggggagggggtggtggctgaagcctcgccagagactgaatgtggtgtgggattcaactaaagcagcacatcttcagtaggtcccccgtggagggtaacgaacatcttgggttgtctttcaccagaattgtgttcaacaactcacgttctggagccaacccgccgcagatcagaatccagcttctgcaccacacagccgtgatctcggacaagttactcaatctcttgtgtctcaaattctttacctggggtgggggaaggggagaaaggcggccagttcggatctgagccactcgcagggtcacgtgacatcctgcctcgccccgccccgcgaacaaacctaggcggggagggattcgggaaggggcgaggaagcggaaggagcaggcggactggcgatgatgggaagtgacgaagtggcgcagttcgctgcgtgcagcgacgtggcggcggggccggcaccgggcagcggaagtggctccggcggtgggacttgagtgtttgtgttttggttcgtgaaggagccggcggctggcgggccacgcctgggccttgctgccaggaagcttcggccccgcagctcggcttgctgcggtctcaggtaaccgaaccgcccctcctcctgcgcagcgggggcctggaccccaggttatccgcggtccccagcctgtccgcggccctgccggtactgagaccccccaccccttctccctcacgcgcagcagtgccctggaccagagaactatcgaacccggcgtcttgttctgccagccctggtgactcat

SEQ ID NO: 346702 - DNA, 1000 bp, Homo Sapiens
gtgttaaacattatgttttactgacaggcattgataatacagcaggaaccaaacactctttgaaatgaatatatgccctcaacatttgcataaatacatggagctccatttatagttccttgggctgctggcagttcattctatatagactttggaagccctttaaagtaatgacttttttttttttttttttgagacagggtctcactctgttgtccaggctgaagtgcagtggtgctaccatagctcactgcagcatcgacctccctgggtcaagtgaccctcctgcctcagcctgagggttgctctggctgaacttgaactcctgggctcatgtgctcttcttgccttggccttccaaagtgttgggattacaggtgtgagccaccatacccaccctaataatgactttataatttggcttcatcccacacatattcccactgctccctgaaatgctcccttactgttttgttgggaatcttgttctgatcttcagaatataaacactcttggctctagtgaataatcattacagatgatatgacaacctgggtggcttttaagtcatatatggatgaattttgaatcagatgctctctcaaggggattcttcttccagaatccacagtctcgactctgccttcatgcactcgtagcccagaatccctgcaggggctggtgtgcgtttcccatgcttgctgatcctgcatatatactttgtagaaaccacttacattacaattgctcctttagcttctgtgaattaaagtagttttccattttggtgcttcctcctagattatgacatatgttgaatttaggtcagttaaagggctcatgggaagagtttttgctaggactctaatttgtttactcaagatggaatggaagacctcttggcacatgtcccatgaagctgactggccagcagtagctgtattgagcaaaaagtccattcaggttctggagtggagactggatccagttgcttatcggg

SEQ ID NO: 346703 - DNA, 1000 bp, Homo Sapiens
ctttcggtagatctttattgtgaaggcttgagttgatctaatcaggagttaaactgtgtttaggtgtttttgttgctatggttatccacaggcttcaaattcttctagtattaccttaagtttagtgtgtgggatggtttgctaaaggagattttctcaatgtttgcaccactcttacctttaggccttcccttcattcctgtacctcagagaggggtctttctccatgtttttatccttcttttagcagtagattgctgttcttattgactcagcatttgatattttggtggtggtagaagggatggcattttctgttgtgattcagctttaatcttaggtaggcactgtgtctctgagacttaagggtggggtctattaagtgatgttgccctatcctcagctgtaggacacctccatggtctggaaccaggatgcaattctaccgctatttcgtgaatggagagctttttgttctctttattcccttcagttccactggatcttaaccagtccctaagggtgacaagatttgctttttcatcctcagaggcttagggcttttgttctgtaggggaaataggagagaaggacctggatggggattcatgtcttttctagcgggaaggttttcataagattcttcttgccttaccttcaattgtatgtgtgtatgtgtgtgtgcacacatttgatgatgtccatagagaagaatatacaagtgggtggaaattctgcttgtgtctgtggttcacaggagttctgtagtctctatattctcaggctagccaacacttggacctcagcaactcattaaacattttagctgatttctccttaacagcttacatggcatccaatggcatctgtcctatgtaaacaagtgcttacaaccatctcttcttgaaagtgcctgtcttacatcagattttagattaagtcgtttgcccccagatcttagctttctgatgtgttcaagagaaaattttagattatctgg

SEQ ID NO: 346704 - DNA, 1000 bp, Homo Sapiens
aacacagtgaagctttcttgtttaatgaaatgatgcataataattcatacttatctgggacagaatgatcaacaaagcaagtagttttacatacatgaccttatgcacagcctcatagtgtggatgagtctgttattggcttctctacagtttataggtgaggaaactgagccttgagaggcccaaggtcacagtgggaaagagcttggatttggagtttaggtccagggctcaaatgtcattcgactccacagacagtttactttggacatctttagaccaggtttccatgtttgcagacctttttgtcccatcacaggcatttgcataaatgaaacctgtgaaaagttcaacaaagcttaattccaaacaaaaaagatgatgtttaggccggtgggccccagacaagttcacaagaagctcatggggtgagtacctggtgttgaccagaagatgagatgtaggcaagtatagtaagagaaaacagaggtagaaaaaaggccaaaagatggtctcctgttaactcactcaaccaaccacaaacattgccaggcactgagggagatggtaggaactgggtttgtgcctttgagggatttccactccagttgaggccattggagttctggggctggcctgagcttggagacatgctccgctcagagatcagcgaggttcttctcttctggattctgtctgagggaaactggaggtgtaaatgctgtagaaccaccgtgggtttttttatgttccaggagtggttagaggtctgcagctctgtgtccaggacatctctgtttggagggagagataggcctgcaagagtccagttgagattgagcaatggtttctgtgggtggagggaggggaagcccaggaggtggtggccagtggaggttgtggtcagggacagacagcgtggctcatggtgtgcaactctctggaaactccttttcagcagtgtcatctgccactccctctctgactgggttacccttct

SEQ ID NO: 346705 - DNA, 1000 bp, Homo Sapiens
tgagttatgtccatattttactccaaataaataagccaaaataaaatcgggatagtcatcagagaatgaaatatgaaatgaaattgtacaaaactagcagaaaaaagactatcagatgggcagcagaaagctcactttgtcagcactgaagcaattaaaacattagaatgacacactgaacattagaataaaacaagaaagaacaacaggctagaaaatatttgcatcaatgacgacaaagaagtaatatctgtaacataaaaaaatgcttgttcaaagttagaagaggttcaagtccccagaagatggatatgaatagattattcacaggagagggaatgcatatagtaaatgcatggaaaaacattcatttttgaatgttgtgtcacctaagaaatgctaagtaaccttgaactagcaatagactattaaagtaggggggaaatggcactcaatgtttataagtgtgttaaactccttacacttgttccttggaggcggtagaataattggggcagctcttgggaaaaatatgacgctgtaagccaagaccacttggccattcatagccttctacctgggagcctttccactcccaggtatttgtcccaagtgcagaattcaaggatacgttagcaaacaaccgtaaagaaccaaaaacattagggggctgagtgaatagttaaggacacctgcacaccttaaaaatgaatcgtgaacaaataaaaatggtagtgaaagtagtaacaaaaaaagtgtggttgcaactatacacagtatatatatgtttcatgtcgtgaaaagttgcatttctttgtaacaatatggattactgtattctttttagatttttctttctccggttgtcatattgttttttcagtggtgctaaaaaaaatctggattcaaatccagccagcagcgtgactttgagcaagtttgtgaagtgggatatttctcagagcggttgagggaggtggcttgagctcgcacctggcac

SEQ ID NO: 346706 - DNA, 1000 bp, Homo Sapiens
tttaacctgttacatgtttattaaggcaagtgcttggaacagacaccgtggaaggaaagggaagaaagaagaagtgggtagaaggagaggttgggctgcatgtaggtctaatggctcaacaaagctgtcctaaattgggctgaaatgatacgggctttatggattcttctggatcagccattggttgtgagtccccagggaagggtgtgatcttggggaaggcagctctctgcaactgaggcaagtcctgaaggggctgatgagagaaggctgtctgccaataggacttccatcagctgcagcagcagcttgaaggggatccgggtggctcactgcaatcacatatggtctaatatgtgcgcctggcacctcacaggcaattaataaataataaccactagctggctctgacttcaggcctctttccatagcattcctatgatctctccccctataaccatgggagaacttcactgtctgcatcctcaaagtgcagagaactcagactgaaaccagtggacacagactgaatgagcctcaggaaaccaagacaatcagatgagaccctgctcttttaatgttctaatgttttctgggcagcgagttttgcccttaatgggctatttccaggagccctagatcatgcagagatattgctgcagtgcctgggatctggcccagggcaggaaacacctgaagaaggatgtgctgcctggcactctgcttcctcactcagctattcttccttagtgttcacagctagtgcagagctctggtactggctgcatctgacttcgccagtgacaaggcaactctctacaccctgagccaataaactgggttagtgttcatgctgaaagtagggctttctgtaaggaaagtctcagccatccccccaaatgcaggcaagggcaagtctgctactcgtcagttgcaacactgtgcaggagaaatcaggtcagatgagtatcataggcagcctttagcactggaagagacc

SEQ ID NO: 346707 - DNA, 1000 bp, Homo Sapiens
aagattttttccccatgttttactcaagagaaaaaaatgaatccaaaattttgtctaatagggtctctcacctgaaaatcacatcagtaattttcattcataattagttctcaaagccagcattttggtaagagcataaagagtctgtggttgatttctgatgagaggtttgtcaggattctgtgctgccagttgtgtatgcaagatacttttcaggctcatgatgtatccagatcctttctgtctgtcttcctcagatgctggcttcatcctcaggtccttgactgtttcaaggtagatgccacatcttcaggcatcacatcctcgcccaccgatatctcacagacagcaaaaggaattttgcagatgtgattaagtgaagaatcttgagatgggaagatgatcctggatgatctggatgggcccaatgtaatcacaaagtccttgtcctgaagccacccgccgcctttcctcgtccctcccttcgcggtgattttccggtcccggcgcccggcgagggcgcgcggctggtgtccgccccgcccgaaaggtaggggttcggctgtgctcccgcctggtccccaacgcctcaccctccgggagacccgcagcctcccaccactttgcaccttcctcctcgaatttgggggcggccaccgtgcaactggcgccagccgcggagcaggaggagcttcccgcgactccggaggcgctcggcgcagtcgcccgggattggggctggcgggagcctgagactccgggcagggctgctccctcctctgctcccccgccagatccgcggggaaggaatcgtgcccgcgccgcccctggcccgcgccaccttcctttggtttctgccggcctcgggcttctgcggcccgatgtggcaggcgccgcgagagaggcagcagccggcggccggcttcgctgcgggtttgcactgcccgggtgagggaaattgggggtgcgggaagaccggtctgggccggggtccgggcgg

SEQ ID NO: 346708 - DNA, 1000 bp, Homo Sapiens
tcataccaatgacttttatttaagatgatttatgagttgatgtgtgagaagggttggtgaagctatgtgggtggctctttaaataccttccattatattttcaaatttttctttattctattaaaataccttttattctctttattcccataaaaaggcaaccaagcagattatactctcaactaagatgccagcagtaattggggtatgatgcaagtcatcttggagcagctacataccctgcccactgcagtcagtcagcatctgcagttgctttttatagctgtttttacccccaaccccgcccccatccacatcctgaaatggtgaattggggctcaaagaaaaaaaccaaaacagtagcatctgatgtcatgaggcagaagcagagtattattcaggccctttttcaaacaggggagccatgtgtgcttctccatgctcttctttcctagagctcctttcttcctctactttctttcgggattttatctccatcctcaggcattctctttcatttctctcctttctgctttcaggtcccaaagaggcagaacgcttggttctaaagcacagttgccgttcaaaggactctgaaaatttctcaattttggaatgggatcttccttttgattccagtggctccttgaatgacccatcctctgagtattttctgtaatcccgtacgtggctacggcatcgaaattcttggtcctcatgagaatgccttctaggatggcagtcagatgatggaattctgggaagcacaggaagtgggcagggcagggaggttttcctgtgactggtggcttgcagtcggtggcgttcccggagtcctctctgatcctcctctctccagctgtggccccagaagctgctcatccatttggcaaaagacacatcatcatcatcatcatctttgtgctccatgtaaaggtgatgccaaatactgaaggcctgtcccaggtataatgtgaatcatatacgctgaatttaccac

SEQ ID NO: 346709 - DNA, 1000 bp, Homo Sapiens
cacaatagtcatcattttatttgaaggttttccacatggaagtaaaattaaacctgtctccaaaggcaaaactttcttcataaattagacttaaatttggggtcaaatttgaggaactgttttctaacaattaaatatactcaaggattaaagctgttttgcaaaacaggaaacatcctgacagaacagaggccagaaaagagtccggcaagaagaacataaggcgaacactggcattcattgagggtttggcctgtatgtagatgatctctaaggtcccttttaaccctgtggctctacaagagggaactggattttgaaagctgaatctttatagtgaaaacgtgttccttggtattagctgtccaggctgctgagtcgtgcacataggcagtgttttcttttgattagctcatccttgtctgatggacaggtgttgtttccagtgaagctggctcagctttctttgttttagttactttgaagcagaaggattaatcccctctggagatatttgcttgtttttgctgtcagagcagtcacacttttccctttgtatctcttagattgttttttgaagttcagcttcacagagaaataggcctcatgtttccttggtgattcactgagtctagatagtccctcctccacctccccaaactgccactgatggtttcttcatcctggtttgcagtttggcctccacaaggaaggataaaagaccgaccactttttgggccaaaacttaacaatttcttgcaaaaagtatctctcagaggtcaaacaggcacaggccaaagccatttctttcattcttttccccacctttatttgaggtgccttctgtttcccatggctattatggtaatagatgctttgggggtttcctggtgggtaaaagatgtatgcttctttcctctgcagcaataactttgagaaggataataggaagtcatgttctctgaattccatccaatttgttgatatctttctggtagag

SEQ ID NO: 346710 - DNA, 1000 bp, Homo Sapiens
gtttacttgaaaattgcttctcaagatttaatctagttttcagaaaatttttaaatttacattctcatgtacaaataaattgtatgctttccggataagtgacatgtttatatggtgataaagggaattataatgctcttaactcttatgtagtatgttctcatcaaaatcaccaagcatgagaacactgtttagtctcattcatcactcagcacagcctctttctgtccacttcagggccaagtctttgccatggccccacataacgtgtaaattagcttcagggatcaaaaatctttgaaaacccagtttgctgagccttgaaggaagcctttagacccagcttcaatgaagtcacagctccctgagggtcctggtggactggaggcggcctcccaagcctgggagctgtgtgcctggatggtctcactggggtgatgacccaagctcatggctccctctcaacctctaacccttcttaacacagtcacccctggtcccctgagcactcactgaagtccctttgaaggacatttctagtctcctaagatgcctgtttcctccagctgccaccctcatttcaccagccaggtaggcaggttttccagcttcgtgctggcatagagaatccgtgccatagcagctgccaaaaggaaaggtgtgtctgtaaaggcccaaactaggcggggacagtggctgctttccaagccccttccctttgtcagctccagggagaaccaaaggccagccagggggcctgtcttctattgggtcccagcatcagggtatacaatgcgctttcctccccttcttaaaatgtatcatatattaggccgacctaatactctgaaagcacatttactctgaaagcaaatgagggaaaaaagcgagctaattgttcaagtggatttttagcatacattgactgtactttcctgacacatgagtgttaatcatggggaaaggagtgctttttttgttctcagtgaggctgacacaa

SEQ ID NO: 346711 - DNA, 1000 bp, Homo Sapiens
tcatttctttcctgtttattaacattcactccaggctgtatactttggttaccatggtcgcgtggtgtctgatgtcacaggccaaaccatataaaatcacagaggccacaacaggcaggaggagcggcctggctttgtctgagtcaggcagcccagcgtgtgggatgccaggctggatgtgctgggcctgaccagccgcccgctttcctcttctcttgcctctgcctgccccctggtggacagctggggtaaagcatgggagtgcgcctttggggtctcagtggggctgaaatacgactcctcccctaggacagcctgccttccccagccttgttctccggcaaagtcaatttcctggagaatcgaggctctgcctcagatgttcggagcctccgcaggatgaacacctccatttcaattccaggggctttgatcaacctgtgcctcccttgatccccaacttgtgggcaccttcccttgagcagtgcccccacgaggtacacctttcccgggaaacaaaaatcattccttctttgggtcctgcaagctgtaaagaaccaatacagcactgtgctactgaacatgttgccactatagaagccccttgtgttttgaagagtacatctctatagccattcgtttattcatcagaaaccagctagaagccaggccctgtgctgggcgctggagacatggaagaaactgggctgaggctcccgccttgaagagcttgtggcccagggaagggacagttcatctgtcattgattgccacgtgacagtgtctatgatgctaaaaagatgccagtgctgtgctgcaggagcaaaggccgtggaggaagaggctttggctttgttgcgagtccttgccagagccaggcaaagccagtcaccgctttgttcagatgactcaggtaaataaatgaggccgcacaggctgtcctgacaccacacacctctagaataccctggctgtgctgggagctattggtgtcagctga

SEQ ID NO: 346712 - DNA, 1000 bp, Homo Sapiens
tttgtttaaagacaataatttaatagaaatatagtacatttactgctatggaaaaataattcataatacgttgggtttttttgtttgtttttgagacagggtctcactcagctgcccaggctggagtgcagtggtgtgatcataactcactgtggccctgatttcctgggctcaagcaatcttcctgcctcagtcttccaagtagctgggactacaggtgtgagccaccactccggctaattattttattttttgtagagctgggttctcactttgtggcccagactgctctcaaattcccgggctcaagcagttcttccactttggcctcccaaagtgctggaattacacacatgagccaccacgcctgtcccacatgttgttttgacaggaagttacaaagatgtctatcaggatgactccaatgtttaatagaaaatgtacataaagtcaaaacgaatatttaccaccatgaaacagtagctaccactacaattcacacttcataagcaaccttttaaggagctgaattggtgaagctatctgagattgactaaggcctaatattgccttactttctgctttatatctttaatattttctgtaatttactgaataaaagcctaggacctggatgtactgcaatgtgcagtatatagagctcatagcttttttttttttctggaatgcagtggtgccattttggctcactgcaacctccgcctcccgggttcaagcgattctcctgccccagcctcccaactagctggaatgacaggtgcctgccaccatgcccggctaatttttgtatttttagtagagacggggtttcaccatgttggccaggctggtctcgaactcctgacctcaggtgatccacctgccttggcctccagaaagtgctgggattacaggcctgggccactgcacctggcctagagcccatatctttatttagcacattagtaaacaaaatgactttatagttattggaagttaa

SEQ ID NO: 346713 - DNA, 981 bp, Homo Sapiens
gttgagccaaaagagcttgcttacttgctgggaggcagggccgggagagcccgacttcaggacaacttgggcctgcggcggtcgccgggaggcccaaccttggcgtggaggagcccaccgaccggagaccatttggggcctggagatgccatcggagggcaggagctcatcctggagaggccaccgtgaggcctgacctgggcctggggagcttggcttgaggaagctgtgggccgaccaaggccgccaggagatgggtaggcactgagtccaaagaggttgttgagaggcaggaatcgggcctggagacccaaccaggaagaagagctgggcccggagagaacgcccggagggtgcaagtgggtctggagaggccgacttgaggaggttctgggcccggagaggccgccggaagggaaaaactgggcctggaaaggccgttgtcaggaatgagccccatgggcctgaagaggccactggcaggcgggagctgggtgtgtagaagctgctgaaaggttgggagcttggcttggggggtccacagtgaggtagatgctgggcgtgaagaatctgctgtgaggcagacgttgggactgtagaggctgacgggaggcagaggctgggcctggaggggccaccaagatgcaggagctgggcctggagaggctgcaaagaagcatgagctgggcctggtgaggtcgacttgagaaagttcagggcctggagagaaggctgggaggcaggagctgggtctaaagaggccattgtaacgatggagctgtgcctgtggaggctgttgtgaggcagtagcctcatctgcggaggctgccgtgacgtagggtatgggcctaaataggccattgtgagtcatgagcttggtctgtagaggctgactggagaaagttctgggcctggagaggctgccgggaggtaggagcataatgtagaatcagtgggcgtgttaagcttgttttcccgcaa

SEQ ID NO: 346714 - DNA, 1000 bp, Homo Sapiens
caggaatgtggcaaagtctttaataggtccacaacccttactaaacataacagaattcatactggagagaaaccctacacatgtgaagaatgtggcaaagcctttagtaggtcctcagttctgaatgaacataagagaattcatactggagagaagccctacaaatgtgaacaatgtggcaaagcctttagacaatccgcaacccttaataaacataagagtattcatactggagagaaaccctacacatgtgaagaatgtggaaaagcctttagtcggttcacaacccttaatgaacataagagaattcatactggagagaggccccacaaatgtgaagagtgtggcaaagcctttggatggtccacagacctgaataaacataagataattcatactggagagaaaccttacaaatgtgaagagtgtggcaaagcctttggatggtctgcatacctgagtaaacataagaaaattcatactggagagaaaccttatagatgtgaagagtgtggcaaagcctttttatgttccagagccctgaataaacataagacaattcatactggagagaaaccttacgaatgtgaagagtgtggcaaagcctttggatggtccacatacctgagtaaacataagaaaattcatactggagagaaaccttatagatgtgaagagtgtggcaaagcatttagacgttccagagtcctgaataaatataagacaattcatactggagataaaacccccaaatgtaaaggatgtggcaaagcctttaagtggtcctcataccttaatcaacataataaaatttatactggagagaaactctagaaatatgaagaatgtggcaaagcctttggatgatccacaaacctgaatgaacataagaaaatttatactggaaataaactatacaaatgtgaagaatgtggcaaagcttttggatggtccacaaccctgaatgaaagtaagaattcatactggagaaaaaccctac

SEQ ID NO: 346715 - DNA, 1000 bp, Homo Sapiens
aaagaaggaagaggtttattcagccgggagcatcagcagacttgcgtcttaagagccgagctcccggaaaaagaaattcttggcccttttaagggcttacacctctaaggggcccacgtgaaagggtcatgataaatcgaacaagcatggggaacgtgactgggggctacatgaatcagctaacagaacagaaaattttgcaatgctttttcctacaatgtctggaatttacagataatacaagtagtttaagtcaggggtcgatattattattattactttttttaactaccagggccaggtggtggtgccaaggtcttctggctatttatcttacttctgttttttttttttttttttctaactttttgctttctctctttcctcctgtcttgtaaactaggcaaggtcgggggaggagggcagcaagagtagtagtggtctccttccttactgggaccacgctctgaagaccattcatccaagcaagcccctttgtctagcaaacaccttctgctccttcaagtctcatctgaagcaccacctcctccaggaagcctccctgacgttcctgcctgggtagccgctccatggggctcccacagcacaccactgtcacactgcactgtcaccatccgctgcttctcaatgtccttgactgaactggtagctcctcgagggacaggatgaaccagtcacacagctcctctccaaagagctcccagcagagaaggcagctgggagcgaggaaggagggagcagcaggtgcttcgagcgccactgggtggccgacacctgccaggcacctcacacgctccgctgcagttcatcctgcactttacttacccttgagtccccctatctctgatcattgtcactggttcctaggaaactgacactcgggtcacaaaacttgtccaaggtgtcacagaacaaataaaggacaaagccagggaccaaactaaagtcaacctctgcctttctacaatgccaggctgct

SEQ ID NO: 346716 - DNA, 1000 bp, Homo Sapiens
aaatgttgtacatatatatttttaaagcaaacataaagcaccctttctgccaggtctggctttaaatgctttacatgtatttatttaatcttcacaacagcccctcattttacacaagaagaaatggaggcacaaagagattgtttattacttcaaaattacctggctaatatgtggcagagctaaacttagcatccagacctctgactggagaggcctccctccaaactgcctttctaggcaacatttagaacatctctctgcaaggatccttcaggcttcatgagcctttggtagcttccatatttgtttgcttgaatctcaggcaaatacctgagattccttcccaggtgagctgtggtgtctttgaaaaatagttaatgtatatcgagtacttactatatacaccaggcgccagtaactgcgtacttgctacatgccaggcattattctaagccatctacaagtttaaactcatttaatgctcagcaaaaccctgtgggatagattctatcactgcacccaatttacagatgagcaaactgaggcccaatatcatgcaattagtaaaaggtagagttggggttgactctcaggttgtctggctgcaaatgatcctgtgctggatgtgaaaatggaggttccatttgttcagaggcctctgcattaatattcatcatatctttttctcccaatttacatacagggatttctttgatggaattttcctgcttatctaaagcttcaagcagcctaagaaaacagcagagccactatcttcaggcttgacctccgtcttcttaccagtaaaatgagcagctaaggcaactcttggaggtttgaggcttgagacgtgtgcctggaacctgaatagcagttccacagctttagggcgcgttcttacaggtgccagcggtgcgactacatccactcacggttttttgcctattttctaggagttacaaagtacattcacaaacatccttgcaaaatcgcaaag

SEQ ID NO: 346717 - DNA, 1000 bp, Homo Sapiens
gagaagtacaactatttattttcagtactgatgagtttcacacaactttttctacttatctacctgcctcatttactttcccaattaaaaaaaatatctaaaatctgtgagtcttgacacaatgaacagtaaaaccctagagcaaatactgcactttggcttgttcttaatatctattagaatgcatcccttgcttctcttttcttccatttcctgccatgtcttttgttgatttttaaaagtgcttttcattaatttatttatcacttttacatcctggactcttacaaaaacgtaccaactgatgtaagatggttatttaacttttcagaacacattgggggcttagcatttcatctctttgtctaatttctgacttgtcattaagacagattctgaacaatcacttctgactccaaacaatcttcagcatttgacattgtaaatatttcttccttgtgtaatttaaacctcacgagaggctagagatgaaatgtggtcattgactttttgcaacttagaaaaaaaaagcagaaagatatttagattaaataaaatgctatgttcaccctgttggagccatagcagctaaaacaacattccagataaaagagtaaaacagtctcggaaacccaggttgcttttccactctaggatgtcatactttcatgacaacacctggatatagttcacagtgatggtctacgattctgataatggcttctaagtggtttcctaataggaaaccaagccaattttcttttgtctagtctgtgattaaggaaactaaaactgaagtataatacacaaatctttctcatattaaaaacaaagaacatcaacaataaaagaaaaaaaaaacagaatcacagcccagagggagtggtgaagccaaaaacacaactgtgttgcaacatctggataatccatacattcttaatagttggcaatgagaaagctgagatggaagtcaccattagaagttcttcagcagtgatga

SEQ ID NO: 346718 - DNA, 626 bp, Homo Sapiens
ctactgcaaagggaatagagcaagtttattcaatccacagccctcagcctgcatgtggcccaggaaagctttgaatgtggcccaatacaacttcatcaactttcttaaaacattatgagattttttttgcgatttttttttttagctcatcagctattttagtgatagtgtattttatgtgtagcccaatacaattcttcttcttccaatgtggcctagggaagccaaaatgttggacatccctggaatagagcaatccaagatgtgtcccaccccactccccacagggcaagccaaggatgttggctgatccacaaagctggtacaacaacaaaacaagacatgcaaaattccagcaaaggagatccaagaaaccagcacctgcatcccagagcaacttctaaggacagcaatgacatgcagcccaattaagcaggaaatttcaaagccctccactttaggtccatagcagcccactagtaagaggagttgtaacaagaaccagttctgcatactccaagcccagggctctttctgttgcattctaatgctccagcataatgtgcatattttccggtgcctgtgatactagcaacatcagactcattaacatggccgatatcctg

SEQ ID NO: 346719 - DNA, 1000 bp, Homo Sapiens
tatacatttttcaaatattttattatgacgatttttcaacataaaagttgaaagaatttaacattcaacactcctacattcatcatctacaattaagctttaacatttagatagatttgttttatttacacatcgatccatttctctctccctatttccatccattatcctattttccttttgaagcatttcaaagtaagttgcagacatcaagagaggtaaccctgaaaatatcagcatatatgtctttaactaggttttacaatttgtctaaaattattttagggtaaaatttacatacaatgaaatgcatcaatattaattgcaccatttaatataagttttgacaaatgaatacagctatgtaaaccaaacccctgtcagggtacataaattaccatcaacccacaaagctccctcatgctccttcccagtccatcagagctccacccaatcaccagaagcaacatcttttctatcataatttgtttttccttattctagatatttctatacatgggatcatacataatatactactttgtgcaaagcttgtttaactcagcaaaatatttttgagattcagtcatgatattattagttataacatgcatttattatttttatcctaaatattattgtattttatagctatactatattttgatttttcatcttcctattgaccaacacctggtttgttgtgaagctgctaaaatcattcttgtagaaatctttttgtacgtgtttcttcattttgagtgtatgtctagcagtagaatggttgggtcatataatggatctatatgaagttttgtaaaaaattttaaaaattttttccaaagtggttgtgacattttcatttttaccagcaatgtatgaaaattttaattggccctaaccttgccaaaatttgatgttttcagtctttttaattttagccattcctagagggtgtgtaatgatatcacaatgttgctttaatgtaccattccctact

SEQ ID NO: 346720 - DNA, 1000 bp, Homo Sapiens
aatggtggaaatattccaaaattccatattttgggatttatacacaaaagataaacaaattagaggccaagaggctgccggaagggaaaaacggggcctgggaaggccgttgtgaggaatgagctgggcctaaagaggccactggcaggcaggagctggacctgctgaagtggccgaaaggcaggagctttggactggggaggccacagtgaggcgagagctagctgggcgtggagagtccgctgtgaggccgaggccgaggccgggcccgtgcaggcctttgagaggcaggagctgagtccaaagacgttgttgggaggccaaagtcgggcctggagacgcagccgggaggaagagctgggctgggccgaaagaggccactgggaggcaggaggagctgggcctggagaggctgactcgaggaacttttgcacccggagaggccgccaagaggccggagctgggcctggggaagccgacttgagaacgacttgggcctgcagaggccgccgggaggcaggagctggccctggacaggccgacttgacgacagtctggccctgcagaggccgccgagaggaagagctgggcctggagaggccgactggaggaagtccagggcctggagaggatgcaaagcagcaaacgctaggcctggaaaggctgccctgaggcacgggcttggtctacagaggccactgggaggcaggagctgggcccgcagaggctcccgagagggaggagcattgccccaggaggccacggtgaggaagaggtgggcctggagagcccactgtgaggtagaggccgggcctgtagaggccgccgacaggcaggggatgggcctgttgaggccacgagaggcatgagctggccctcaacaggccagtgtgagacaggagctgacacttgggcaggttgcaagaggcatgagttgggctgaaagaggccaccgtgagggaggagctgagcctgtacaagctgccaaaaggcagcagca

SEQ ID NO: 346721 - DNA, 1000 bp, Homo Sapiens
agatggagccttgttctttcacccaggctggaggagtgcagtggtgcgatctctgctcactgcaacctctacctcccgggttcaagcaattctcctgcctcagcctcctgaggagtgggattacaagtgcctgccatcatgcccagataatttttgtacttttattagaggtagggtttcaccatgttagccaggctggtctcaaactcctgacctcaagttattcaccctcctcggcctcccaaattgctgggattacaggcatgagccactgtgcctggcctgacaaatgttcttttaagagtgagtcagagggagacttgacacacagaagaggaggcaatgtgaccagggagcagagattggagtggtgcagcccccagaagctggggtaaaggaatgctggcatgagtaaaggaatgctggcagcccccagaagctggaagatccacagaatggattctctctagggacctcagagcgagtgtggccccactgtatttaggacttctagcctctagaactgttttagaatacattgctgttgttgaagtcatttagtttgtgtcaatttgttgtggtagcctagggaactaatataatgaagcatggagagagagagagagaggataaaaggtgaaaatcatgtgccaaaactaaagaaaagagatgctgacatttgtgattaaatagaataattgcactatttaagattaatcacttgagcctgggaggtggaggctgtagtgagtcatcatggtgccactgcattccagcctgcatgacagagagagagtctgtcttaggaaaaaaaaaaaaaaaagattaaagtggtccagaatgcacccaaggataaaatgcaaagattatcttgccccatgtatattttagcatactacttaggtactatttattttttaattatctcctttttacattttgacaattttaccccagtggtcaagccttgtattagaaaagacagaaagaaggaaaagaa

SEQ ID NO: 346722 - DNA, 1000 bp, Homo Sapiens
aacatttataggatatgtaattctacataaacacaaggcattaaacgtaacaccactaaaacatttctttgaagccagtccccatatggcagtaaaatgttttaaagttcaaactagtaagattacaatatcaatgagttttgatcttgatgtatccttaaaatgggtggagggttttctgtgtgtattccaggatccggcttctaattttcaggagatgagggggaggatgaagtaagggaaagagaaaaggatttgagtcagagagacctgcgtccaaatcctggctcctgtactctcttctggggtgatctctggccagttctccagatcctttgaggtgggattttctctctgtaaaatggaagatatactcttcagggatgctgggaggattgggatcaattaaatgctgcttatcgtacctgtcacctaagttgatgcctaataaacagtaattgctgttttatgttttgttaagctggcagggtaatttagtttctaacttacatatgtctatttgaaaatgcactgtaaccacttcaaattaaagattaaaattgtatggtatgagagttatacctcaataaggctgttaattttttttaatttagaaaattgaatctatcaagttcccttagaaaatgtgaaagtaatttttaaactgaaaaatttcacagcctgttctgtgggtgaccaataaatactgattaatggactttatctgtaatttttcatgagaccgtaagtccaagacctcccttatgtagcctgctcttaatccaaacattaattactactttggtatcataagattattatgatatccatactctatgcattgggaaataatttgaaattcatgaagaagtccatcctcatgctttgataaatgagtataattagttccaaaatttctgttcataagccaaaactggtgtcatcaatcattgagtattcccattaaaattaatgttaaaaacctcagtctttctcttaa

SEQ ID NO: 346723 - DNA, 1000 bp, Homo Sapiens
tttttatttttaacaacctagagtagatgctttgattactacatgaactttttattttttgttttacctcaaattacccttaatattagcatttagtaattaaaaaatccatcacactagtgtaacatagaacttttttttctcttgagttgaaattcgagtattaaaaacatgcatgttcttagcttaaatataatgccaggttacatttataatgtgtaaagaagcaattgttttctaactacagcctaataaatcggtacattgtgatacctgctacaggcagtaaagcagtagtaataaatacaagaatcattaaataaactttcattatgcctcaccgttcaagggtatcattttttccctcgggttcagtttttaagaagagtgtatgataatgtcatgggattctcagggtgtcacttcaccagctggaaacctatgtggccagtggtgcctttgcctgagttttgcttgggcccacaggtctcattccacccactcggcctggcaggctgcaatcggctggggctggatccctgaatcccatacctgccaagggcgggccaggtgcggagtggcgaagggtgcatgagtgagcatgaggtctggccactgtgcatggccaggcaagctggctgtggtggggcggggagctataggcaccagcatgggagccagctccctgcaaggctgtggctggaccaaatgtaccacagcagcttccacggctggcactgaggaatgcagtggcatccggaagcttggagacaccaggaaccatagagccccaaagagggtgtcatagccctggctcagggatctcctaggcctgggctcccagaagggctgcagctcttctctccttctcttgtctctccttcttgtcacctacaatatggcgagcaagggatgtgtttcagccctgtttgtgttacagcccttttgcaggtcccgagttcttgtcctgtgtccaggaagaatgaggtagacggacaag

SEQ ID NO: 346724 - DNA, 1000 bp, Homo Sapiens
ctcagcaaatgcacggcatacagatggtgaagaggtgattcagtaaagttttggtttcaagaaatcctggcccacctaagtaatctccagcatagcaaggtttatcttttcaatgtggctctgtatccttagcaaacctatggattctctgccagtggcagaatagagacagttgcaaactcttttcttctcccatcaaaagatgaagtctgatttccctctccttaacactggctttgcctttgagatttgctccaactgcaaggatgagacgtcacgggcttcagttgatcaacacagctcagcacctttgcagacagatttgcttagaaatgtccaaatagtctatagccaaggtggtatgttttagggcttctgaataaataagagcttttattctccggcttgcaggagctcctgaaaagcaatctccttcttctcctgagtgtgatgttgaagatctgtaactacagtcgccagtttgccgccaggtgggaacaccagttgggaacaacacgggcctgcgagggatgccgctgaaagcaggaaagattagtgacacagacagaagctggacgaagtctcacctcaggtgcacatctgggcttcgcaattttatgaacctgtaagttctctgattccaaaggtgagttgtattttggcttatgttttgcagctgaaagatttctaacttcttttccaccacagaatctttgaatgatttagatataaacttcaagctccatttaggtcagtgatttttgtctgtattgttcactgatgaatcccactgccttgagcacagcctggcaatattaggtgctcagtgaatatctgttgataaaacgcgcaaagttggttcagcctttaagaagatgaatgttgttaataacacatgcctaatgaaagaatctgagtacatattcctagaatacacacataaaatttaaaacacctaaaaatgcttaaatacatttaaaaaaacaaaaaacaaaactat

SEQ ID NO: 346725 - DNA, 1000 bp, Homo Sapiens
tgcaatttttttgatcttttcaacaaagttgaataaaagttgttgatcaaagagtgaagaaatttgaagatagaatttgccttaatttacagatgagccaccagaggctcagagggatgaagcgttttgttgaaattacacagtggctgccattccaatgacttgtgactccacacattgccttctgatattcattaggaagtcatttgaaggaggaattctaaactttttggaaacatcactgctctctactcttcacccttattggaaatgcttttatttggagaaccttcaccaccttcatggaaaccaaaatgaggatcttcaaagttcatgttccatgtagcattaaccctaccatgtgcttcccttgagcagggaactcctcttctaattgtcaggaacggcatgatcttccagttgacatcctgggaggatgttaaactgaaagtttccttgtctgactccaagactctggtgttgaaattcattgatcatttggaaaagaggacttctgcaaattcaatacacatcttgaagagcttccaagtgtagcgagtctcctggcatcaggtatggctggtatcatggaaacactcggctgactgtccaggagatgctggttaagaggcggaaggtgatggcgtgaaatcaagttcaggtgcaggggacactcctgagagcattcctgccctgtccccgtggcctgagcggccttctcagttgcacaggtaggttttctctgctctgcactccctctgtcccaaggtacccaggtccctagacctgaaagggtgaatacattcatgcagtaggtgtccaggatcctcatgtggtcctccttcatgcttaggaacagacacgctcatcttcactatgcaaaccagagcctgcgtgccttttgtggtccttcatatttgcagtgtgtgggttggagttgctttcttagccatgacagtgactatggccaaaaggcgcatcatgagtgtctcctcctgcc

SEQ ID NO: 346726 - DNA, 1000 bp, Homo Sapiens
gtgacagaaaagtcgtttattgagtgagaaaatcattgcatattttcagggaatttgagaacctttgtatgagagatcaagccaaggggagctgaaattcagtgaatgccgacctttgaaagagttgaaaacactttgcacagacgagaaaacatacagaagatctcagatgcttcctctgcgtcaggctcttctctgaattcagggaaattcagcaagcagcacatgaactaaaagagcactaaaacgtgttcagtgctgtgctctggttccctgtcttgggcactgagaagcagaggacagcccgtggccgcactgtccggaggcccctccagactctccgaggtgaccccatgcccaggcacctctgagggcaccatccagggcgagctggatggtgggagcctcctggacaggtagaccctcccctgggctgaggcttcatatggactccaggcccgggttcccagtgaggaaagtcaaggcaaggaagctcgctggggcactcagagcctggtgctagggcgcatctcccccggcgccctctgctgctcacttcagctcctggacagctgcggcctccctgtctatctcctagagcctccatggggctgtctgctcctgccctccaggcggccgtgtcacctggctgcattgacacctggccaacttgcctgtagaaggtgtgaggggaagagtagcattgccctcgtggtcccacccagtgatgacaaaggcagatgctgctgctggccacacggccccttccctaccacggggcagctccagccccttccacgctcagctgctgccttgtggggccgtgcacaggtttctccagtgaggccacctccggcctatacccacacacgtctttccaccctgccatggctatccaccttccagatggattgaactgtgtacctccccacaaatcttctgtgcttaagtcctaacccccagcatctcagaatgtgctcttatttggatacacagtctt

SEQ ID NO: 346727 - DNA, 1000 bp, Homo Sapiens; identical to SEQ ID NO: 161479

SEQ ID NO: 346728 - DNA, 852 bp, Homo Sapiens
ctgaataactgatttatttccatgtttactgagaatattcattgcaacaagtcagtagagaaacagtaaagagggcaggcatggctatgcttctatagaatctattgaagaggagataatttcaaataacccgataaagtaaatgagtagtcaaattttgaaaaggactattaactcacaaacaggaaactatagtagaaaatagttggttgaaggccgaatgcccagttcagaaaagattcctctgaaaagcaatatataagcatagacttcgaggatgaggagtcagtcattttgaaagagcagatgaagaaagtttcaggacaaagaaacagcatctgcaaagacctcaaccaagaaatcacacagaaaatgttgaatttaatctgttgctagacaaaagtgagctacggatcatatggtcttggatgagggagacagatgatatagtttggatgtcccgcccaaatctcatgttgaaacgagatccccagtgctgaaggtggagcctggtgggaagtgtttggatcacggggtcgaatccttcgtggcttggtgctgtctccatggtagtgcacctaccccaacacactctctctctcttgctcctgctttcaccatgggaagcgcctgctcctgctttgccttctgtcatgagtaaaagctccctgaggcctctccagaagcagatgccactgtgcttcctgtacagcctgcagaactgagaaagcatctcttcgttgcaggtttttggaaatgggctatattttttgaatcataaccgatatgtactgccataaacaagaggatttcaagccagctccatatggtcgaaaattattttatttatta

SEQ ID NO: 346729 - DNA, 1000 bp, Homo Sapiens
ttagataaagagagactttactcaaaaagactattgcaataggaagaacatgccaacctcagatatctgcaaatgtctcaaaatcaaacagaaataagcttttcctttgtatggagggagaagaaccagccagacctttgtggaggagaagggcatagagtgtgggcgagcaggtggcaaaaccaggatatctcaatagggagtgttttttcctatggtcagttgattttcaggatgagctgttaacagatgttctgctccttagtgtttcagtgcttgcttaaacttgggggacagccaaagtctaggaatctttgtggaggagagatacctgactaaagtttggtcaagccaaagcagagggtaagaaatgaaccgtcatgaacacgtggtcagttccccttgttccttaagacaaagtgtgtttttaaacaccattagcgatggaataagagacattgtgaagctgagtttgatctgtcattttcaggggtgggctggtcttcatgttcttcttcacctgtatgaccagctgtcatgttgtgagcatgctgtctctctgacgctggtggagggtcttagagatcaggcacttagcataaggtacaccttgtgatgttatctgcttggtccaaaggtctcgagaaagctctctacctctctgtttgcaagacctacctccatctataatggatttgctccctagaagtactcaacatctgttgttcctgtagcccaaagtgaatcagaaatgtgaatgagaatgttttgaatgtgggaattgtcaatggcttgggaggctgtgggaaaggcaagaaaactttccccaaattaaggatatcaacttggatatagtacatgtgccccagttatcatggccaggactgatatgtgacttcttccccaaattctggacagttcttgctccacttgaactctattgtccattattctccatgctacttttgtgatgaagaaaagacaggataaaaacctcagc

SEQ ID NO: 346730 - DNA, 1000 bp, Homo Sapiens
ccaggaggcggagcatgcagtgagctgagatcgtgccactgcactccagcctgtgtgacagagcaagactccgtctctaaataaataaataaataaataaattaaaaataaaaacacacacacaaataaaaaaataaaaagagtgtttaacgaagcagaataatatgtgccttggccacacaatcttatcaaaactaagcaaggatggatattttagctcttagcttaataagccattggtatttttcatctttttcctattagttattttcaggataattgtttaaaactaacttatggaacataacctatgtatcagtttcctaaggctgccataacacattaccacaaacttggtggcttaaaacaacagaaatgtattctcaatctggaggccagaagtctgaaatgaagatgttggcagggctagcttcttcttaggggttcaaagggagcctgttccgttcctctctcctagcttctggtggtggtcagcaaccttgccattccttggcttgagtcagcataagcaggatctgtctcagtggtcacacagtgttctttctgggtgtctgtgtccaaattcccccctctggttccgccggctggcccgtgcgtccttggccggggcaggagcagcgctgcgcgcggggcacggagcctcggccgccgagttttcggtttccaagtttccttcccaggcctctcccacttcctcttctcaccagtgcccgcccgcccgcaaagtccgggttgtgaggctgcgcctcccccaggatcgcggccgcctccccccgggactgaagggagggaattccccgcagctgattcatagccccggcccgggccgcctctgcacgtccgccccggagcccgcacccgcgccccacgcgccgccgaggactcggcccggctcgtggagcccttcgcccgcggcgtgagtacccccgacccgcccgtccccgctctgctcgcgccctgccgctgcgccgccctcggt

SEQ ID NO: 346731 - DNA, 1000 bp, Homo Sapiens
agatggagttttgctcttgttgcccaggctagagtgcagggtgcaatcttggctcactgcaacctctgcctcctgggttcatgagattcttctacctcagcctcttgagtagctgagattacaggcgcacaccacgacacccagataaattttgtatttttagtagagacgagattttatcatgttggccaggctggtcttgaactcctaacctcaggtgatcctcccgcctcggcctcccaaagtgctgggattacaggtgtgagtcaccacgcccagcctggaatggtacttttaaggaaatgacacccttcgcaatctttaatcccatctctttacacatcctaatgggctgtaattttctattgttctgtgcttcctgtgaagacattactctaagtgccaattataaacaaacaaataaataaatcttcaaagttttaaaatatttttcacccctcatgaacatccagtatgttcattatttctgtacttccagagttagtaatggatgaagtgacagtgaaatagagttctggcgcttcaaagttctaattacaatgcagttgtgataggcaaggagggcggggaagtgctaggagaacggcaggtccctggtgagggctccacccccgggcctgtgcccacggacctaggtgaggacaggtactcctgccttggaatccaaataaatgttgcatttcccaagaccaccctggcccgccatgccccattctgtgtctacaaacccccgcagagaccttaacaggccgacacacaagtggctggactttgagaggacgtctaggggagcatgctggtggaagagcacaccgacagacgccagcaggccatccaccagcagaacaactcgagtttggctggggcagtgggaagagagcccaggccacggagcagcccggctccagggtaaaaccatctgcctaccagctcccccatctgctgagacctacttccactcaataaaaccttgcaatca

SEQ ID NO: 346732 - DNA, 1000 bp, Homo Sapiens
aagagagacaaagttttgccatgttgcccaggcaggtcctgaactcctgggctcaagcgatcctcccacctcggccttcccgagtgctgggactacaggcatgagccaccacacttagcctgtcggagtccttttgataataaggtgacttgaggagacaggaaggaaacactaaagccagcacagggtgtcccggggcaagtgcattccaggccaggaagcatacgaggcaggatgtgctcggcatgttcaagacttcagggacaccaggggcagatggaggatggcagagaatggtgagaggaggccagagcaggcaagaggcctttaggactctggcttttactgagggacatggacgccgttggaaggtctgagctcggaatgacctgagctgacctgtcttacagggacaacttgtctgtgggggacactggcagggaggctggctgtggccacccaccgccgggcactggcaacctcgtccttgccttccacagtggaccggccttggtctgtgtgacccacagaatacagacatgatggggaatcaccctccatatcaggttttaagggaacaccatggcttccatctggacgctgctcgcagataccgctctggggaagccagctactaccaagctgtgagctgctctgtggaacgggccatgtggcatggaactgaggccttctgtcaatagccacgcgagtgagtctggaagcaaatcctcgccaggtcaagccttcagagacggcagccttagctggcatcttggccacttcatgagaccccgagtcacagccatccagctgagctgctcccagattcttgaccttcaggagccgtgtgaggtcgctttggctgcaacttgctacacagcagtaacagcaggatggcttaggccaggcggtaacaggtaaattgtgcatacattttaaagatcagaattttgatttgtcactagaagcccattgtgctacagatccacctcagaatttt

SEQ ID NO: 346733 - DNA, 1000 bp, Homo Sapiens
ttttttttttttttttagtagagatgggtatttgccacgttggccaggctggtcttgaactcctgaactcctcaactcctgatctgctcgcctcggcctcccaaactgctgggatgacaggtgtgagccaccgcgcctggcccgaacgtgtatttttgacttgcgatattttcaatatagagttggtttatccgaagtaaccttataaccccatcacaactgcgtcataagttgaggagggtaccaaatgcatatagctttcatagcattttaaaatagaaaattgtaactcaggatatgtctgtacttcctaatcccctcaccctctttggacagactattggaggtgtcttcctagtattctgctgccatctgcctttctgggcttcatggcctgtcctctgttcctgctccccaggaagctctggagtggtctgaagatggtgactgcagccctcgggcttcctacccctcctagtcccacctgagctctcctttccccattgcctgacatctcagagttgcccattatccaaattcctaggtctctgccctgcactggggttcttggctgatggtattttggggagggggacaaataggctaaagaaaggcaccccctcccagggacagacagataccaaggagaacttttcccaagctctgaggctttggtttctgttgccaaagccaccgcacactctaggccttctctgcttcgccaacctccagcctcactgagcttcagaccaactctcggttccagccaactgggcttctctgctgttgtctgaaaatgcctctgcaatcctgcctccatacctttgtacacagagctctccacctggaatgccgtcttcttctctgtctatccagggcgcgcccccagctccttagattttccctctctgagaatccaggtgtctactatcacacatggaatgacctcaactgtcccctctgtcccaaaccagggaacattatggcctgaggccccaga

SEQ ID NO: 346734 - DNA, 1000 bp, Homo Sapiens
ttcctttaaaagttgtttatttattgcacttacatactaagataccattctcaaaggaccacgaaagcagaaatggttaatatatgaagctgtctataggcatgatagaataaaaagtttaaaaattatttgggtcaggcttaaataactttaacaggttaaaaaaagtgtttgacaatattcaacaaataattcttcacctaatttcttattgaagcaatcaccttaatattcattggccttgataaatgtgaacactggtcatatttatgtaaataatggtcatgtggctttcttggcatatctaaattcatgttagatctggcttaacctgtgcttatgtatgtatatgttacagttatgtacattaaatgtgtgtgtaagagttggaattatttgaaagatagcaaaattttaactagaaaaaataagttaatatctaataatagttgacttgttgattaaaataagtagttattatgaaagagaaaaaaggtgatttcaaattgattcagaagaactggcctagcaactaagattgtatgctttcctttttttttaaaaaaaaaaagaacggatataatgttatgtgacaattaaatacagaaattacaaaactagttaaattgatgttgccattaaagcaacattaaatagttttgggggagaagaaagaagccgagaagatggtatctgtgcagttaagatggtcatgtcatttgatacatgtaaacagaaagcagcctgaggcccacacctgcaccatgctgaaagagctgaccagcgttatatgttcagtcctagatgaaatgctgcatttgttttttaaacactggtatgcattgttttaaaaatgtataaaataacagtgaaaagttaaagaatcgtaagaatgtagctaaaggtaaaaaaaatttgcaaagccataatttttatgatgaaacaatatattttttatcttttacgtataatgttttaatgcttttttagcccaatgaaa

SEQ ID NO: 346735 - DNA, 1000 bp, Homo Sapiens
cagataaatgaaggttttattactgttttcagttctggaagacttgggcctttgtatgtcagttctttgccatctgggtgacaagtaataagagcacttttgaaccttccaacatcaacaggagaaggactcctggttccaaggacatgggacctgagcaaggcacttaacagatgagtgcctcagttttctcatttattaatagggcaaacctcagtttttggttgcattagataatgtaaagtgcttgtaaaagtgcccaacatggccaggcgcagtggctcatgcctgtaatcccagcactttagggggccgatgcgggcggatcacctgaagtcaggagttcagcctgaccaacctggggaaaccccatctctactaaaagtacaaaattatccaggcgtgatggcgcatgcatgtagtcccagctacaggggaggctgaggcaggagaattgcttgaacccgggaggcggagcttgcggtaagccgaggtcatgccattgcaccccagcccgggcaacaaaagtgaaactgtgtctcaaacaaaaaaactcccaacatgtagttagtgctcaatacatattatcattcttaaattcctgaaaacaataatatccaaactcctgagcatagcacccaaaacccttcaatatcttagaatcattaggctctcaaagcaaatgccttgtggaaaggttatataattgtgggaggctacttgtaattgtggactgctgtcattgcctcctcattggtcttcctgtatcccctctagccccaccactgtctgccttctttgaagctgaccagtgcgtctatcaaaacgtgcccagccatgtcactctttcaaatctaatcatttccaggcacagaaataaatccaaatttccttccttcaaggcctgtagttactcctgcaacagcatctcgcagtcttccttgttcagtaggccctcactgtattcaaatctctgctcaggtgttacctcctcaaagag

SEQ ID NO: 346736 - DNA, 1000 bp, Homo Sapiens
tggcaatgaattcggtttatttacaaacttagattttttttttttttggctcattaaaaaagtcatgtttgaagtagcaggaatattgtacatgtggtttataagccaaagtggttgcctaagaggatgcagtgtttttaaggtcagcacgatttagctgaccaggttgtatttcgctctgtttccattgaaaagaggcagccacagttacatgacttctgtagatacagaatcaatgatgacagtgttctaagaaggccattggcctggtgtcaagccctttggaagtgttccactggcctgtagccccacaagtttcgtggaaatcctggaaccaggcccgccttgtgccagttttggaatttcattgccgcgtagctaccgtattgggcaaattagcaccagatcgaccatctgctctctaaagtagacacacacatgacatcaccgttgcagttatcgagtcattttcctaaaattcactgattctgagatgcgtcatcctttgaacgtgaattcctgtggttttcggagttcgtcctggagaagggctaggttgatctgtctcctcagagcagactgcacagccttcccgaagaaaaacatgcagggcctttcatttttcttggcctcttgcttcccctctctctgatggcatcttaaaggactcaatgttgaaatggtagcaggcagcagcccatctgaaggtagcattagcatttgagaggaaagatcttgaggactgagtgtgcttagccactgtgcacctcgaacctgcattgttcctcggttttcctatggagaaggatccccctgtgtgggactggcatcctctgaggactgcaggactgtacctgggtgatgagaaaggaagccaaggccatagcactataattgcagtgctctgccttaaagtccagcctcgagcctgcggctcgattttccagtaagctgagagcatggagaacaccagaaagccatttcggtttctgcttatttc

SEQ ID NO: 346737 - DNA, 1000 bp, Homo Sapiens
ccctgcaaagagcttttattattgatgctttccctcccaccttaaccgaatgtcttcctttgcagctggggctctgtcttcttgtctgaagcttccgaggccttgatttcccaccctcttttatcccatctcccccttttcggtgggaatgcatcataaccattaggctctgtgcgtctttgtgtctgtctcttcgtctctgtcacttttccccatccttttcccttcctgcccccacagaaggctgtggggccccaaagtttctctgggatgtccccactccgagcccagctcaggggcctgcatgcctgccctccactgcaccatctgggggatgggccggatgcagccctgatgcggagcttgcgcccaggcctcaacagacttggggccacactgcagccggacaggcaggttccaggtcctagtcggctgggaaagaaacaatacttaagtaaatgaattccagctccaaaacccatttaggaaaatgaaagcagcttctccacgaaccttctcaacgtgattacgactggaaaattgagcaaaatgtaccatatctaccttattggaaaccaaagtacgacgcggggagcgtacggctcaatttaagacctttgttgtgctcctttcccatcttaccctggccccaaagagaccctctggtttatattacttttttggttgtttacttgattttttccctcactgatttcaaatttgcagcatattgagcgtattacgggagatgcagtaggatctggaatttccttgcacatagacctggccctgtcttggagaaggctggagctcacacagggagacacagccagagagaagaggctgggtctgtgtggtcctcggggagggcttggaattgctcccagctcagaatctccctgcctggggttgggagggtgacctggcaagcctcaatggggcttctcccgggccccctcctggtccagaggatgcctccctttctccaaagagcatcttc

SEQ ID NO: 346738 - DNA, 1000 bp, Homo Sapiens
acatgggaaaatgttaatgatttattagaggaaaataactcagttatgaatattgaagcccattctaaagatagaatttttgaagctaaagaatatgccctagataactactataggtattgtaaaaacaatttgttttgaaaacccagagggcatattcaaaaacaagaatctaccatacagaaaggtagtcgccatctcaaaactctcatatatagcaaaggactttggtcttcccaagatagccatttggttgtgcctaagtcattccccagaactttgatgtgcctcgcacatgaaagcacccataaataatggcaagaacaaattcactacaaattttcaaaattattgttagaaaatttttctcaagaagctctatgggtagatgaatcttttcttctctgtgttgatcataaccctccaaaaaactaaaactatagcaaggcttcagttttccacctccagtaccatttgcgcatttacaaatggatttcattcagttttccaaaattttaaaaaattgaacgttgtttcaacaatattttcaaaagtaaaattgtgtaatttgggttggactgaagctttctcttctaaaagattaatactttaagttagtgttgtcaaatagggctttttacaatgatgaaaatgttctatatctgtgctgtccacctggtaggtatgacatgccacgtgtggctattgagcattgaaatgggaatagtacaacagctgttaccaaaacctaataacaagtatcattcaaagcttgcagattttgtttttccaactgggaaatacaaaacatttagcactgttaatggacagagaaatccacttcagtagtgaaattcttaagattctcccattaaaacatacactttttgtccttattctcaaaatctgagaaagcaacacaaatttatggtcttctttaaatcaacatttgaaaacaccatcgcaaaattacaactgagacagtgagagatctaaccta

SEQ ID NO: 346739 - DNA, 1000 bp, Homo Sapiens
acagtataattctatttatataaaggctataaataagcaactgttagggatacacagacagtaaaatctataaaagctaggtgacagttatacaaaattcaggatagtggttgcctctggctgcaggggagagagatatgaatgagagcatacgaggctcctgggatgtagtaatgttccatttctcagtctgagcaacgggcacctggacatttattattgttcttctaaatatacattttcatttgtgtattgtatattctatttcacattaaaaagaaaaaagaccaaaaaaaaaacattaagtgtgactcaagatttaagcagacacagtgcaaagaaatgaaaaggtggatataatttgaggtagatgatggatgcaggtttggacaaactgagttcctgaaacatagacttttattcttagccgtattaggtgtgaaattgccctgagagcaccagttgcttttatgctagatttggaggggaaagagggcagttgaactcagcaatttatgtgtccagcactgaaaaccttcatggtaaacaattactaataggttatatgttaggttacttttcagtcccactcagctcaaagggcttgtcattaccctactgatttgcacttctaagtcttctgcctgttgcattctgatgatccatttctatgcaaaacatagaatctaaagctgagacatagcaatagaggaccagagaacagacacagcaacgaagtttccatgaggcaaatcaggagggtaggaatgagattttgatgtgcatcctggccaaattccagaactagcaaagagaggtcagttcctaattccaatcaaagcaaattcagtcatcttattttcacacagaagtggtctacattgatttttaaatctctttaagggattagggagcctctgaaatgcaaaggaaactaaactgatagtaatgtaaaatgaacagtgacctatcataccagcaaacactgtcaaaaacagaa

SEQ ID NO: 346740 - DNA, 1000 bp, Homo Sapiens
tgactgggtaaagaaaatggcattcctttatttggttgacagcttttaaaaaattgctcaaatgcccagtctggtttaaagttcagtcccatttggaatcaggaagagtctccccagaccccaggtgtggctggctcctgtctgcagagaggggctcattgtcctcctgggtgtgggtcttggctcctccttctggccagaacagcactctggctggcgctctgagctggttgtagttccacgcggtccagtctagtgtccacactgaagtgacccccaccatgctgggcacctctgtagccacacagccttctgggtcctccttacagcatgtggaatcagggcaggtcaggaaaaccaagccttagtgacctcctcagcctgcctatgcaaggtggccaaggggcaggtgtgtgcccaggtggccatagggccactcgcccttcattgactttacttagcttgtgatggttctcctgctctgaagcagaaacatgaagaagggtttttctctttattctccttcccagaatcctttggtgcaggcagggtcaagtttttcccttctcttttcctacccagacctcacttaaataaaaattccttacagagtccaactcaccaagcctggccatcagcagactcctaaaaatgattcaggaaggtagaccctcttctttcagaaccaaagcctaggttgctacctcctgggattgcagcaaaagccttgctacagaaccaggagctgatgattacctgcaccacctctttcattttttctagaacaaaccagaatgcttccatatcaacttagccataatgtcaggccacctctctctccacttgtgttgcgggaagtcaggaaccccaaatggagggaccggctgaagccatggcagaataattgtggattgtgaagatttcatggacatttattagttccccaaattaatacttttataatttcttacgcctgtctttactgcaatctctgaacata

SEQ ID NO: 346741 - DNA, 1000 bp, Homo Sapiens
ttttttttttaatggcagcagaaccttttgcaagttcagaagaattagatttctttaatggtaacctgcaggaaatacattaaaaacacattctatcagttacaaatcttaatgtcaccagccaaggatgagggaattaatgccgggcccaaaaatacatatagtcagcaactccggggcaagggcagagacaatttatagagtgcgaggtctggacgtctggagcaggcaggctgagctcagcggtgaaatggaaacagggctgttttcagatggagcagagcagggggaagctgctcagggtggctttgattcaatcattgtttcccatttcttaatgtaaattactttttttaatgctatgaaagccaggttccggtctgtcacgagaagactgttttcattaagataagcgcctatcaagggcatttttaaaagaatcaatccccaaaaagaaagccacctccatcaaaacaatcccaaccctgattatctcctctgtctacatggatcaaacaaagggtatatccaagcaatgggctggctggagaatctggacaatgaagacaaaacatatgtataatttatagaattttacttcctttacagcaggtatttttctttatattgtaaaataaaacacaggagtaggaaaccatactaaaaatatgtagcctaaattatgatacgggaaatagtgggtcttttaaattgctttaatttttggactcagcgctcattttgccaaacttgaacacagtcttggaaaagtaaagtttcagatctcaggaatataatgtgctcattttaggaaggaaagttatctaaagagatatgcacaacactcaactggttagttgagggctaacacgttcccagccatgttcttccttctcacaaagaaagggcattaaaggagtcagtgggcaccaaggagctgaatcccacaagcaggggtggactttggtccccagtgtgtccccacactgtgtgttttgcc

SEQ ID NO: 346742 - DNA, 1000 bp, Homo Sapiens; identical to SEQ ID NO: 161480

SEQ ID NO: 346743 - DNA, 1000 bp, Homo Sapiens; identical to SEQ ID NO: 161481

SEQ ID NO: 346744 - DNA, 1000 bp, Homo Sapiens
cctttttcttagcattatcatttattcctcacaaaacccaatggggtaggcagcaaacatattagcaatatcattttatacatggtaagcgtaaattctcaaaaataaaacttaggtgattcatccaaagccatatttgtaaaagtcaatggagacaggactgcaacacagactttattcttcgttcagtacatccatgtatgttctccatgttatttcaaagtgatgtctctatttggaaactgtaaactaagggaaaactgtccagtctagaagtacatgtttcctttgccaacatcaaacaccattccactgccacgctgcagtgactcaatccattctgctttcaggttgagtgttctgctcattgtaaaaaacttcttcgtgatctgaaaggtgagacagcagttgagggttcttattctcactctgctcccaactgtcttctgatcatctttaaattcccatttcctatagtggaagactgatttctggatccaggccataataccaatcttcccatctcccaccttcacacaattgaacattctgattcttactgagcacatattcttcgtgatgaaaacgattttgtcttctttcaacactcagttgtatatgctacacattcagatacctgatgtaaatttttgaccttgcgttaaggtatttagacaatagaaatattcaggaaaaataaagatgcacattcttgtcttaaacatgcagaagttgggttcagtgtagcacatcttggtgtcacccatttagtaaaagcttccaggtacatgagtgatatttgcctcctgggatgcatctcagctttttaatattaagggtgaaaatagcctttttgtgtaagttcaaataaatatcttggatagtgtcttcaaatataactccaaatcctatgaggtttaccatcagctacctgtcacagactcaaagatagtgaagcagaaagcaaacaagagtgccaaatattttgcaaattatgact

SEQ ID NO: 346745 - DNA, 1000 bp, Homo Sapiens
gtgggcatgaggtttattagggagtgctctcaggatccaaacctgcaggaaggaaggggagggagaaaagcagggcagacgaagaggctgggtaagcccaaagtgactgggagcctgaagctgggatgtaccttcagaggtggatgcacctctctgtgggatgcttcacagaggcaaagggtaaggcctttatagtcctgtgctgacaagttgttggatgcaggctgcccctggaagagagcatgaagttgggtaaggtgactgtcttcagcctgtgggggactaggtccttcagtcctgatgggaaatttgagatgtgcagtttccatgacagctcagctcttgtgcttcatggatccacttctttctgcatgttaaggagaagctcctctaggatcacagttggcttctgttcctggggaatcttcctgttttactttacagtctagatttcctgtctctttttggtacctctgctggtctacttggctggtggaatgacctagcttctcactcttgagaagtcccatcattatgcctttgttaggtggagactgttgcatttatccatctattattaaaaaatgggcaagggaattctaagggacacccaggcaagttatctgggggcctctctgtggccttgtgtcagcagtcccatctccttctgaagaatgggattgattaatgctcatggtacggtgattcctctttttgcttggtgatctcttggcatgaggagcctgatgctcccaagtggcagccttaacctcatgttcaattgaatgcttgttgtattccctgatggaagcacatctcctttgggcaccaggacctctaaacccacagagcctaggcacaagttccctaaggagtcaattgtattgatggtaagtgaggctattgctgcttccactccttagctcccacatattttacctcttggggacacagcatcatataatgattgtttgtttagcatgtatattacacccaggag

SEQ ID NO: 346746 - DNA, 1000 bp, Homo Sapiens
caagcacggtaaggcaggttttatttaggaccattgcaataggtatagggaccactgctatcgattttgtagtcggggagtgggattgggctcaactctgaatgtaacagggaaaataacttatagccaaggagcagtgtatcttgctccttggctataaattacaagtgggtgtcagtggatggaaaattactaaaaggaaacgtcagcgttagagcagtcttgctgaagacaggacaggatgatcagccctcacctgaggaaaggtgaagggctaaggaactcgattgagggtgggagttctcggtaaaccaatttagcagggcttttgttaaaactgtattttacgaggaagtgcccagatgggcctagaagatccaggagcctgactaaagcttggtcactcaaataatctttgtcactgccagtctaagaggtcaaaagtgtaattttgtctttccctgattactattgaacctaggaaatattttatattattagccatttgcattttctttctctgtggtcttcccagtacatatcctttgccctttgttcctgttgcattattttcttaactcttggtgtgttgagttgataaataatcctttgtggtatatacattggaagtatttttctgctatttggttttctttcattttgttcttaggacgttttgttactcaggaacaaatccagttttgatgtgtgaaggtgtgtgtttccatacacatacggaggatttacaaatatgctgtagatgtctgtatttgctttgaaatgcccttcaataaaaaccatcccagcttctgtgattcttatcttccctttttagtgtgggaggcttcctgctttgctttgtctgcacatttacgtcgagcctgccgagcttaattttaacctgcttcaggagacaccagactgaactctttctctctgacgttctccttgggtccatcccacatgctgcctgggagcttcttccttgtcacctaaggtc

SEQ ID NO: 346747 - DNA, 1000 bp, Homo Sapiens; identical to SEQ ID NO: 161482

SEQ ID NO: 346748 - DNA, 1000 bp, Homo Sapiens
tttagaaagtttgtatgtttattttattacatccctgaggcacagctcttgggatagaaaaaggatggggagtagctgtgggttttgaaacactctatttcatcctgggccttttcattttagtttttttttgagagagggtctcactcttttacccaggcaggaatgcagtggcatattcaagactgttggaagaaaacatggcacatacaatttcctatcagtagtttgctaggagaaaatgtcagttgtttagaaaatacaaaataatttaacattgaacaaacggctgatgctaccatcagctgtataattagtagggtcctcaaaaacagctactggacacagtttcatgcttagaatgcacataagacagtgataacacgaaatcacacagtaatatcacagacgtgttaaaccttcaaggattgttgaaatagcaccaagaatgttcactgaactgaccttagtttctaaggtttatgcaatcatttgaattttactagccctatcaatagttaagaaacaaattcaaaaatggattctaccacttcacaagcaaacttgcaatttataaatcctggaaatacaagaaactaaccagttgtaaaaccagaggataatttgggatgaaacgaggtcattggcccatagggattgtttcctccaatggagccccataattcgtaaatctgaagaggatttcacttccagcaacatggttttgctttaaaattccaagtagggaccccagtgagctccccaaggttcgtcttcacggggccttactctcacacccggtcagtatctgtccctgtgcggggaggaggaggtgggagacgaatcagcgagccaagagtcttttgtgctcaggttatgggatttgaagaccgtgttttctttttctttctcttctttttttttttttttttttttttttgagacaggatctcacgctgttgcccaggctggagtgcacaggcacaaccttggctcactg

SEQ ID NO: 346749 - DNA, 1000 bp, Homo Sapiens
gtttccattgcttttaatccagtcattcccagccatagcaattcgagtcattttgactttggttttccagattactgcagacaattcaagttttaaaaacttcaacttggattctttccattcatactgtatctctgtgtttgcccagagaatttggtacaacgtatgactttagaattactgtataatgctcagaggtgtgaaatgccatttcgagtaatgcctttcttcagttaatatagataaatattgatggcagacagcagtaaaacaagtcattaaattcttcagtgcaagtgtgtcccacatattgctgcaagctacagaaatcacaccagactccaagaaaaccactgcctgtgattacagagcacttgtatttccagctttcgcattccagataggaatataagggagtttggatgagtcacggggaccaagaaccaatgtaaagagacagggaatggggcttagattgccctgctggtctattctatccactgttcttttctcgtccaccctaatgaattcctgggtgagccagaaacctttgaaaaatggctatcagctacaaatgggaggtctgatgctctgaaaacaaagaaactttaaactggtaaccctataaaaccagctgaagatttggaggaggaataaaccccttcctctgctgctgttttgatgatttgacatccgcggctgtcgtggtgatgcagaacttgcttgggtttcacagaagcatcggggtgcttatagggccagataacatgtttgctgtctgagtcttcagatgaaaaatgaaaggaaccatttcctcatttgataatgccaccctcaaggattccagcctggtatagactgtgaagctccacagcatggtgaatgctttcttcaaggtgtttttaatgggccctggattgtcaaagatgccactcataatgaggccgagagtcccacatgcggagaaagctcttttcatcataggaataattgaactgta

SEQ ID NO: 346750 - DNA, 1000 bp, Homo Sapiens; identical to SEQ ID NO: 161483

SEQ ID NO: 346751 - DNA, 1000 bp, Homo Sapiens
ttaaaagcaaaatgttatttatcattaaatattaacaatataatcacattttcttgcatctctggcaagtttcttggtacaacaattttaaggaacggactctttaacagcagttaaagctgcgcgatagctgacgcctataatcccagcactctgggaggccgaggcgggaggatcgcttaaggccaggagtttgacacctgcatgggtaacattgtgagatcccatctcaaaaaatataataaagaaaaacaaagcagttctaggtttagggggggaaagtagctctccaagccaaaaaccaactcccaaggtgctccggtaaactcgtcctgggaaaatttcctatttaatctcaaaggcaaaacgagtccacgggcgcccacgacacatttcccaaccgcaaggactggtcacccgcgctgagacaccgccagctgcctatgacctagcctccaaagcggcagagtccctccctctctctccctaaactgccgtgatggacatctctcggctctcctcccagacggttcggaagtagggacttctgctcctaaccccagccctgcagcctcgccctcagccacggggtggaagtcaggaccacaggcttcaaatcccctcccaactccgggacgcttctgtccccccagggcgacgggggatcaagtcccggcgcccctgtcgcggccaagagctgtggtctgggtccgagcgtcccagctaggcgcgttccagagaggtcatgggaggggccccgcgcgaccacaaatgttgcttcggagccagcgtcctggacggggaagtgagagccgggacgaggggagccgccgaagagggaggcggccgggaaatgctccgcgtcaggccttcaagggcttgtccgggcgctggagatgccggcaacgagcacgttagacggagaagccgcgcactgtgaggattaagggagccgagggcggcctggaactgggaaggcggagctgacggggctggaatg

SEQ ID NO: 346752 - DNA, 1000 bp, Homo Sapiens; identical to SEQ ID NO: 161484

SEQ ID NO: 346753 - DNA, 1000 bp, Homo Sapiens
aaattatcattcaccttaaacaatggaaaaccaagggacagagaggtcattggaaaagtgactctccatgatcatttccgttcagcacaattaaaatcagtggtttggtaaataagtgttatggagatttgtcagagaatagtagaaatctgaattctcatctctattatgaaagacgctcattttagttagagtactgctagttactgtaacagacaaactccacaatttcagtggcctttacaagaaacattttttttgctaacgtaacagttcattgtgtgtataactggttaacagcagagtggtgaaaggcacagttgccccactcttatttagggacaaaggcacagtggctttgccatcttaaatgtgtgccttcctttagagattttgatctttccagatttcaacatttgggattgtggtatttagcactgtgtcttttgaaattatggcccaaacccctcccaaggacaccctggaaaccaacacaaaccagagggtaggggaaaagaaaggatggagaaggcatgtcttcttctgacacataacacttctgctcatattccactgatgaccattcatcacagggcctcacccaaataggcatggagctgagaatgtagtcactgtccacgcagccaccttctgggtagaactctacactcttgaaatgggaatctccaagccactgggggatagctggggaactagttctgcagactgtataggcttctgctgctgggaaggtctcaggaaacttccaatcatggtggaaggcaaagaggaagcaggcacaatcttcacatagcagctctcttgctgtgaaagccctgcagctccccacagaagaagtctctttaagagtgaagaatgccaagcatgtctccatgctcttagatgcagaggaaactggccagattggaatgtaatacccaggagtggctttttgcttgaccataacagcaaggtccagcccccttaagtgtttctccat

SEQ ID NO: 346754 - DNA, 1000 bp, Homo Sapiens; identical to SEQ ID NO: 161486

SEQ ID NO: 346755 - DNA, 663 bp, Homo Sapiens
tcataatctcccatatctgaatgtactcaccattttgtagtcatctgagctagtccaacttgatacctgaattattttctttggctggagtacttcagaaagcagcatgaagtttttgaagtttctttcttttattttttttctttccagtatgagaaaactcttcttcaacaaaggactataatattttcttttctggtcaatatattcaacctcatttaacacctttgcgtccacctcgcgcagggacagtagaaaatggtcagggaagagccttgcgattcccttcgccactgcttgggttccatatcggccgcggcagcaacgatcaccatcgtcacttctccctctcccgaagcacggtggcagggaggcggcgttgacggtggctgcatttttccggctgcttctccccccgacctcttccgtttcttgctcctccatcgagacagcactagactcgccagctccgcttttatccggtgcccggagcctgcgcactggagcctcctcagcccctagtgggcgtcgagtgacaccccaaccgggttcacccagcgctggaggccagactgggcgcctccagtttgctatcttcgagcctccgcggagaggcaacggcgggcggcagcccacaagcaaaatggcgccgggcagcttcat

SEQ ID NO: 346756 - DNA, 1000 bp, Homo Sapiens; identical to SEQ ID NO: 161487

SEQ ID NO: 346757 - DNA, 1000 bp, Homo Sapiens
tcacaggtctatggtgtcgctgcccacgctcagctcgtcgatctgtcggcaggcgtccaggaactgctcctgcagcaaggcctcctcggcctgcagctcagaagcaggctctggggagtcgcgagagggtggggacagggcctggtaggatcctgaggccgggaggctggggctgcttcctgagggccgcgggggactgaggacgcagaccagagggcagcgcgggggcctgtcggggctggaacacagcagcatggacgagctgtcccgcgagagtccgcagaacgagccagatgagacgctgctgcctgcgggccaagccccaggggaggggagctccgggggcgcagcggggccagaggcctcccctgatctctcactggccctgcccccggtccccagcgaggcggtgcggtagagtccgagcccaggcagagcgtcctcgaaggcagggccctggaagaggccaggcgcaagcagggcctcgctgcagagggcctcctcgatgctgcgtcgcaggttgattggggagggcgggcggaagtccacggtgtaatcgctgcagggagaggaagccggggacggggccgggttggccgccgcgccttcgaagccccggcaacctccgccctggagtaggaggtctgggcctggccctgccagcgcgcacagctgcagcagctccgcgtccccgcgagcgatggcgctccccaggggctccttgtctgggggcccagtgacccagcctcccggcagcagcggagccgcgtggcccggggacaagcggaagagcttggcccagcagcgcggcggcacgcgaggactgcagagcgccgggtagaggcccagcagcgccaacgggagcgcgacgcccacctcgcccaggcgcaggcctagctggaaggcccaccagggccagggcccttccaggccggattggccgccgtagcccagggcgtgcagcacctcatagcccagcagcagcccggaaaggaaagcg

SEQ ID NO: 346758 - DNA, 986 bp, Homo Sapiens
tcacagttgcgtcattgtgtattaaatacttggaataaatcaagcaggtctcaacgcctccactatcctgtctgtatgccctgtccattgggtggctggagccccatcagagttgggctggggggtatggcaccaggccctgcctccccaggaaggtttgagggtgttgaggtactgggggtggggtgggggtgtgctggtgcaggtgggccccatgtcaggaggtctcccaggcttcacctactgcaagccactcagcaactcctgcagccaggcagcattgttgaggggtcatcatggctgtagaattccagcatcggggcctcacacccagctgccggaaaacgccctccgcagcctcatcatgccacatggtgcagccagggcacaggtggaagtacagcatggccagcgcctgtggtctcatctgccgaaacacacccgagtcgccagcaggtagggcctgggcctgcctggatgtccttgggtccattccattctttctcccagcagctgtgaagtgtccaagccctgtgagggcgctgatggagaggcttgcgaggaagccaggagctgcaggagtggctggagagaggcgagaatgaatccagccccttccagctgagctctttccttgcttggcctggtggggggagactcctctgctcagggtctcccctgacctcgtggtgggggcttctcctggcaaaggaccacagagggacagggaatagcagttcagactgtggaggtcatgtggcccctctgcagtttcaggacaggggagcttgccaaggaggacacaaagctggaatccaggactacatcattgtggaggctgacaagtcccaagacctgcagttgccaagctggagacccaggagagccaatggtgtagttccagttcgagtccaaaggcctgagaaccagtagagctgatggtgtaagtccagagtccaaaggcaggagaagactgatgtcccggc

SEQ ID NO: 346759 - DNA, 1000 bp, Homo Sapiens; identical to SEQ ID NO: 246653

SEQ ID NO: 346760 - DNA, 1000 bp, Homo Sapiens
acaacttcatttcacgaatttctttattctccactcaacgtcaaagctgaaaagtgacaaacagtgctttatgcacacaaagttcatgagtagtgcactaaatttcaaagggcaaatatcaacattaatctgacaagctaaaatacctcataaaaataaatgaagtaaataataatggaatctaaaatgcgtgagcaatctcaagatgaaaaatggcccagcataaactattattttaggatcctgaatagcttattgtacatttatttttagtattaaagttgtgaccaaaaacttttttatgatattgctatcagggaattaataacatataacatagacactaaatatttcttacatgcttcgtctgcatttaaattttgttctgaggaaagtgatttgatccatcatctgtcaaaattgacaggggagacccatgtttaattttttgaatgtcttcctttatcctattagttactacataaatgcatgttgggtaatacagtgactatcagaccttcagctaattcaggcatgaagtcccaactgtccctgggaaaacagaactaaaaatggaggcatcactcctaagtgagcagtgaagcttaagcaaagacaagaaggatacataactgtgtatgagagttggctaatggcatcagaagactgagataacactgaagcagactttgtacccagatgtctaatcagctgggtgggtgacattgatgggcattccaaaggtccagtctcagaatcagggatgtagcagacacaggctcccacaggaggcatttggccctggaatgacagactcaacacaatagaaaggagacagagctctgaacctggaagggaggctacagttccatgcaggcaggtcattagagctaaaaaatgaaaaaaaattcctatctaccactagcacacacttgttagaagctacataggcatcaaaatctcatttaaggatgagagattgttaatgcggttatctcaa

SEQ ID NO: 346761 - DNA, 1000 bp, Homo Sapiens
tttgatttttcatctgacctatgttttttgcacaggaggccatgaaataaaaagcttttatttccttttcagctttaaaagggttacagacagatcaagaaaaaagtacagtttcttttgcttgcttttaataagttctcagaatatgacaagatgctgcggatcatcagttccttcctgcagatgcctctgacccttactatgccctctaacatcccaccctgggcttctctgccattgcagtctgggtgccaggtgcctggaaacccaccagggctcacatatgcataagctggaaggcactgggggtgttaacacttggggcatgacctttgatcaatgggttttggaaactggtgaataaatgtttcttcctctattcacagttctaaaacatatttcatatggcttgtcaaatagtccttcaggactgagaagccaattacccacagtggaggccaacttgccaatgcccatttctagggacccttcctccttgctcacttgctgacactgtcattcacatcctctccttggaatcatgtatctcaggaaaacaatcacacgtaagtctttgcctcaagctctgctttcagggacacccaagctaagatagtaattaagttatagctatgtttactatattttacaaatgtgggttaaaaaagtgaaccatcattttatgattctgaatgtgtttatgaaataagtttagagaggtatgagcattgaatcacatttacttatacatttaataattctcctaaggctgggcacagtggctcaactgaggccaggagttcaagatcagcttgggcatcatagcaagaacctatctctacaaaaaataaatataaataaatacattaactgggcatggttggattgatagagcccaggcattcgagaccagcctgggcaatatggcaagaccctgtctttcttatattcaagaaataaaaataattcttttataagtgggatagtctcaaaactttat

SEQ ID NO: 346762 - DNA, 1000 bp, Homo Sapiens
atgttacatgaatttcaaaatttaataaacattttaagtagtcttacagaatttaggtaaatagatttcatactaactagcccaaaaaagcatgacctaaacacgtacacacaccctttcaaaattcattttttgtaaaacactactacttaatttcaccctaattttttttttgagatggagtatcactctgttgcccaagctgaagtgcagtggcactatctcgcctcaccacaacctccacctcccaggttcaagcgattcttctgcctcagcctcccaagtagctgggactacaggcgtgcaccaccatgcctaatttttgtatttttagtagagatgaggttttactatgttggccaggctggtctcgatctcttgacctcacctcatgatccaccctcttcagcctctcaaagtgctgggattacaggcgtaagctaccatgcccatctcacactgatttttaaacattgctccagtacttaattagaaacaatactttgtggtttctcagtctctgtctcatactgtctcactgatttccacatcattctgtgaagtaggccaggaaggtagtattatatgtgatgtacgtttaccaaaaaagtataaaaacatccattctcctaagtacaagaatctttgagtttcgttaactttttaaatattcacttgatgaaaaagcagtaaagaaggaataaaagaattaaaaaatacatgaaacgttaaaaataaaaaggaaaatagaagtaaatccaagcatatcatagtaacattaaatgtgaatggattaaacaatacaatcaaaaggcagagattgtcagactgataagaaaaatgtgatccaactatatatattatttataagagacacacaatagattcaaagatatacatgggttgaacataaaaggtgcagatagtagccaagacagctaaagtggtgatatggtttgaatgtgttccccaaaagttcatgtgttgaaaactttgtccc

SEQ ID NO: 346763 - DNA, 1000 bp, Homo Sapiens
tttcattcattcatttattcaattttttttaaaaaagctattacgttaaactcttaggatgaggacaagccttacaatggtgtgtgagtgtgagtatgtgttcatgcatacactcacatccctgtgtctgagtgttgtgggtgtgtgtgatgtctgtgcatttctatgtggtatgtattcatatgcatgtgtattgggtacactaaatttgggtttgcacagaaaagaataaacagaattgtactggaatagtttacctagtgcttcctctaagaacagcacacagctcattcagttttgctgattttcatcctctgcatccacaaagcacactgaggtctctcctatcaccttgacaatggggatttgaccccaaccatctccaccgcagttggactgacaggcagcaggtggtgctcatcaaagacagctctgaggaggctttcgggcgacacccaggtgccaggctggtgtgagagagtcgcatgactgggctgctaaaggcactggatcctaggctaggaggagaaagggtgctgtgaactggagttgccagagatccagaagagggacagctgcctggagatgagaccattctgagctccgcttcttcttctatggaatgtggataatcacttctacttcatgatcacaaggtgaagtcccacaataggccgtctgcaagctgagcagcaaggaagccagtctgagtccaaaaacctcaaaagtagggaagctgacagtgcagccttcagtctgtggccgaagatctaagagcccctggcaaaacactggtgtaagtccaagagtccaaaagctgaagaacttggagtctgatattcaagggcagaaggcatccagcacaggggaaaagtgaaggccggcagactcaacacgtgttcttatcttattttccaacttcggccagcttttattctagccacactggcagctgattagatggtgcccaaccagattgagggtaggttagcctctccca

SEQ ID NO: 346764 - DNA, 1000 bp, Homo Sapiens
ttaaatggtatccatattcccaatttatttatgtcttctgttcctgtgtgataaaagccagacagccaggaaagacaggaagccaggacacacttcaggcaggaccatgctgggccagaattccctggggccagggcaacacctgcccatctgactagaccagggtcaggccaccactttccttgttccccagcaccccatgcaccagagacccgtttcttccctgctttcagtcccctgttaatccttggatgctcagcggtcaaaactctttgctctgggccaggcgtgatggcatgcctataatcttagcattttgggaggccgaggcaggaggatctcttgagtacaggagttcaagaccagcctgggcaatagagccagagaccccatctacaaacacacacacacacacacacacacaataacagacacagacacacacaataacagacacacagacacacacacacacacacacacacacactttgctctgctctcctcatacccccatgaaaaccaggaatgaatggtttgagctgatccctgtcttctgagtagtcctttttccattgatcttccccaatagagatttcatgacagcaaagcacaattccgcctcctgagtggatgacttggtacaagctgaaggacaggtgaggcaggaaccagcagaggtgccgagttgctatgggagaggacactcataaaagctttgatgctgccccaaatggtgtgagatgcttgggtcttactccccgtccatctccacattccaaagtgttcacactctccttctaatgtccctttcaacaaatctccttttaaaaacaaccttgttttcctgaacagaaaaagcccaccctgtgccttggccagcatccctcgcttcatttgtactgacttggatagacctggctcctaatagtgaggttccctaaggacactttcagaagctgtggttgccttttcaacatggagtcacttctccatgtaac

SEQ ID NO: 346765 - DNA, 1000 bp, Homo Sapiens; identical to SEQ ID NO: 161489

SEQ ID NO: 346766 - DNA, 1000 bp, Homo Sapiens
gagacaggctctcgctctttcacttaggctggggtgctggcgggatcagggcttactctagccttgtcctcttaggctcaggtgatcctcccacctcaatctccaagctgggactataggagcatgccaccatgactggctaattttttattttttgtagagatagggtcccactatgttacctaggctggtcttgaattcctaggctcaagtgatcctcccgcctcagcctcccaaattgctgggattatagtgtgagtcactgtgcccggccttaagctaaacatttaaaaaataagaattaaaatgcagccacagtgaaacgggaaggggctgcttttacaggtgctgaacttcccggcaatagaagcatttaatgggaggttccctttttcctaggacctcaaagctggagtaccagggatgttgccttgaccttcccatgtgtggatttctgcttgaacacaccaagtacaggacaccctgtttagcagctaaacgtgggaattgcaccagctttactcccaacttgctgggcaatcttcgggagttgctgaccttctctgtgtctcatcagcaaaacagggagaacactagctctcccaacatgggctgtgtgaggaccaaatgagctgaggagcccagatttgaacccgggtctgcaaggttatgtcctctgagccatccccacccctgcccttaaggaccaggggcctctggacaccatcagcttgcccacctgtccaggatttgcacgcacctgctcggtgccagatgctgggcactggggacaaaccaggtgaggtgtggaccgtgacctgtgttgtcactgattgggggactttctggcagagtggagagtgcagtgggctgagagacaggatggccagtggagactgagctctcagaggcggcggcagctgatggggaccatgcaatgggaaggatggaggccctgggatagtctgcggtgaacttccaggcagaaggaacagcaggt

SEQ ID NO: 346767 - DNA, 1000 bp, Homo Sapiens
tgatatttcagcctacatgctttattacaactcaatgcttttgctgattcgaggagacagaccctgaggaaaagaccaaaggcagggacaaagggtaaggcctgcaagtagaaaggatcgattagtaattatgacatttcacacacatctggggctaaatattctatggtaataaggaaagctaaaaaaaaaaggctatttctttcctaggctaattccatggcctgaacataatatgctgttctttgtttcctcaactggagaaggatagactacttaaaaaacaagaaacctgaggaagccattggccactttaacaatgatataaactattccaaggtgacaaaataactctagttttctttatatacagaaaaaactccaactaatatgtggaagcaatggtagaattagaaaatccccgctgggtgcagtggctcacgcctataatcccagcactttgggaggccaaggcaggtggatcacctgaggtcaggagttcaagatcagcctggccaacatggcgaaacgccatctctactaaaaatacacaaatgagccgggcgtggtggcgcgtgcctgtaattccactcgggagtctgaggcaggagaatcacttgaacccaggagtcgggaggttgcagtgagccgagattgcgccactgcactccagcctgggcaacagagggagacttcctctcaaaaaaaaaattaaaaaaaaaaaaaggaaaatccccatttttcaacccctaattgaaattactgattccagcaacatagtgagcaaatgaaaggttgtagagaaaagatggaaagtggagtttgcaatggaggggttgtctggctgacgttactgacccctactgatcttgcctggtggacaaaagacccactgtgtcctttcggaagtgacgcagtaggcagtggaccagcatctcctgggaagtacatctccctcaaacatttgaacccatatcaaagaagcctctagatctgcttc

SEQ ID NO: 346768 - DNA, 1000 bp, Homo Sapiens
gagacagagtcttgctctgtcacccaggctggagtgcaatggcacaatctcagctcactgcaacccttgctcccaggctcaagcagttcttgtgcctcagcctcccgagtagctgggactagagatgtgtgcaaccacatctggctaatttttatattttagtagagacggggttttgccatgttggccaggctggtctcaaactgctgacctcaagtgatccgcccacttcggattcccatagtgcgggatgacaggcgtgagccaccgtgcccagccagaaagggggttaatttatgttttctttatatttactaatacataggggaggaaggtaatactcataatcctcccacgtagaaaagtggccccccaaatcttcactgaatgatccaacttcttttcctttgaaataggtgttctgggggaaccatgcagagggcacactctgggcaaggggtgcctccggagaacacaggatacgtgttaaggaccttaggtgatgagagcagaaagtcaccttccaaaatgaactcagccggggagggaccaaacttggaaagttttcatggaaaccgtttcatcaaagatatatatctaggaattttgttatcttaattaactcagaggtagcaccatactatgctaagaagactgagtgtaagacttgtaattacctctctttaggccgttaaccctatttggttactgtaagcttttcaaggattgaggccgtgtggttggtcatctctatatgcccaatgcataataatgtgcctggtagataacagacattaaacaaacgcttactgaatgcataaaacatgggtcctagatattctaggctaataccactttaaatagtccactgcttatgtacactggtttgagttcagaaacattgatcatcagagagttaggtctgaatgtgactgatggaatttccgggaatttccaagagatacttctcagcagtagccactataccagccatttttcg

SEQ ID NO: 346769 - DNA, 1000 bp, Homo Sapiens
ccttaaatatagcatggcatttattccatggccatgggagaatgggttttctgttaataaaaactgaatatccccttatttgtgatgaaaacaagagctttgaatgtaacataacattttaacttgtctggaattatctttcagttcctgatttttctgtcactccgaagtgacacaagtcattcacattctctaagaataggagtgacctgttggaatatagcaataaagtctcattaaaaatatgtttaaaatatcttatttctggctttcctgttaataaaacatattgtactttctgtggctcttattttctcttctgtttccttttgtggtttttctaatcagatttggaaaggcccataaaaggatatacattttcaattctaaggtaaataacttgttctcaggaagcagctctttggtttcagaatttcagggctgatttcaggcaactggcagggagcaggcctcgaggttgggttctgtgcaatgtgcaaaagtaatcaattaggagcaagtaagaagcggtttctagaaatgtccacttgagggtgctgcgtgcccaggtggcaacagaaccagcatcataggcacaccgtttacaataaattccagtgatatttcagttcctggtgtagatcagcagagccggcccaccgtgcactccggcgctgtctgttcactcactcctcagagctctcctaagccccatcctgtgggtcaaccccagctgggctgtcccaataacaaggatccctgaggctggagggcacagaaggctggaatgggaggagacgggaagttcacaggttactggaggggaaggacagggagaaggccctgggaggaggggaaggccagggaaggcttgctgaggagcgggtgagtctgacccatcagcacagcaaatcctggggactcgggcgtcacatgaaggtccagaagtcctgggcacttggcactggctgggcatggcgaacaggccccgtgaagagag

SEQ ID NO: 346770 - DNA, 1000 bp, Homo Sapiens
ccataaattacttggcttcttatattccatctcttcagtgaaacagtacatcacttaaggctaaaactatgtcttttatcactgtaagtccccagtactgcttacaccctacacagagtaggtgctcaataaatgtttgatgatttggcaattaatgggataggagggaatattaatatgtgtcaataaattactctgaatattataaataggcttatgagtatggaaaagacccaccctcaaggaatttgtgatcttttctcttacatcatactgctgttttcaatatgccataatttttcttttcttcagggtggggtcagggaaacaacacaaaatagctgtggatgctgtttaacaatcagcatttcataagcagttaagaatttctgtactttcacaaaaatgaaaaaatctctctaaagattatgtgagcccaatctatgcccaaatctttttttttttttaatatagagaactgattatgttcacttgtaacctgtcattccaaaattcttcaggatgtttaatgttcaagtgtccatattcccagtcccactggatgcctggcaggatgcaaccatctgaatgagtggaagtataatgtttgcaccaggtattatattaggagccttgaacccagaatatgtctgattaagtcttttagcccaataatttgccactgctgccaagtctggtaattttgaaggagaaagttcaaccataacggggtgatacagggcacccccgtactcaaaaaactttcaaagtgctttctaaacaagtttctctttctccttgaatacaacgtcagtcacaactgatggcagtacaatcgatccatccatacactgctctaagaacatcttgatggtataatatgctgtcattcatgctctacctgctactagtttaatttggtcaagtagctctttccctggagactcaaattctactagactcaaattctattagaccaaagacaaatgatctcaaccat

SEQ ID NO: 346771 - DNA, 1000 bp, Homo Sapiens
ccgccgcccgggaacaagctacccgcgggctctggggacaaccgcccgtctgatgagctcggctgagcgtgcacgcaatgtcgaaatcaaggacgcctggatgcttttcatggcagagtgacaaaagtttaccaacaagaagaggagcagggctgctgaaaggtgcggtgccgcggcgccagaatgcgggatcctgagccctgcatgcgagtcttcgcggggccgatcgctgcgagcctcgcttaggtccagccgcctccagggagggcaatatccacgagacgcggggagtgagggcggtgctggccgcacccctggtcctggggccgcgggagccgtgctagcaggccgccttccactgccgcctgcgccgggtcgggttgctgcagcggtgcccgctgcaggagctccgcgcctgctgcttctccgacgtcagggcgccgccaggatgacaggtgcaggaggctgcggctgtgggcagatgtggtttccagccccaggtcccggcggcccctggcttcccagcccgctgtctcggtctgagagttcggagcgctgaggttcaggcgcgcgcctaacggcttagctgggctcactcggtctgagaggtcggagtctgcgagtgtcgctgctgaaggctgtggtggaccgggctggatcgcggattctgaggacattcgggactgggaactgcggaagatccacagggctgccatcaagggcgacgccgcggaggtggagcgctgcctgacgcgcaggttccgggacttggacgcccgcgacagaaaagacaggtagctcggggactcagcccgcggtgggagggggccgcaggcccggcttccctgcagcccggcagcccctggggcggggaccttggagggcgccgggcaccctcggagcagcggagccaaatggagcctcagctgctttccgtcgctggcaattccccgtccgtcgcgagccaggaagaggcttgtgccatcgttctcctggaatg

SEQ ID NO: 346772 - DNA, 1000 bp, Homo Sapiens; identical to SEQ ID NO: 161490

SEQ ID NO: 346773 - DNA, 1000 bp, Homo Sapiens
agtgtcttaaaataaccaccatttttattttgttcatacatctgcagtttaagcagcgcccagcaaggacagcttgcctccgctctcagagcatcagctgcggtggctaggagatgggaggctctgcaggatcactcattgacgtgttgggcagttgatgctggcttggctgggacctcggctgtcgtggcctctctgtgtggctgctgggcttcctcccagcatggcagctaatgtccaagaacaagggccttgagagtcaggcagaggctgtgtcatcttttctaatcaaacctcaaactcacacattgtcatttccaccactgaagccagcccgtattcaagggaggagggttagactctatttctggatgacaagagtgtccaagaatttgcagacatgcttttaaaccacagctcttggcaagttacttgtcactgactacgagctggtctctgtgtgccttagtatacctgtgtgcaggtcatcctgaggtttacacagctgatggaggcaagtctctcagcacaatgcttatccatcaggggatatttgctatggatcatccagccctgaggacaacttgaacccagagcactgtctttcagaagtctaccaggtcagcccaaatccaaaatgactcctgactctttagaatgtgagccatcagtgtgcatggcagggtgagaatcttttacagcttctcctgcctacattctggaaatgcagctatgctaagcaaacactgcaatgggcctctgcatgggcatggactcaggtcctgaatgctgcaatccgtgaagatctgtgctggaaagccaccgtcggttgtggagtggtgagattgctgaaccacagaggctggaatgccctgtcctcctcctcagcctgctttgaaatctctattacgtctttcctgctgcccctgctgccagatgatcccagcagaatcttgtgctttttaaaatttgagtgttttgttttgcacagttgagtttt

SEQ ID NO: 346774 - DNA, 1000 bp, Homo Sapiens; identical to SEQ ID NO: 239941

SEQ ID NO: 346775 - DNA, 1000 bp, Homo Sapiens
ttaattttaaatgttttattacacatttcctttgaaattttcaatacaatagtgcatttttaatccgcaaaaaatgttacaatggtagtatctatgcacacaataatataaacatgtaggaggtgtgtgttcacatttttggaaatggacagaacaaaggggaagaagcctgcacctcaatactcagggcagagataggcccctctagggctgcatttgaggtcagcaccaaccgtgtgcaaagctgatctgggcctgctgcagaaaagaggctaaactcatgtaccccacctgtcctcactttcctcctgtcctctgtgaaagggacaggagaataacggtcccttacctgccacttggcagctgtggcccttgggcaagtaagtccctttcctcctctgagcccactttcccaaggtactcagtcacagagagaagctagacctgagggggatgttaaggcctcctcccaagtggagagtggtggacatccatcaacacctccatcggcacggaattagctcgttttccagaccgccatgatctatttcacagctcagtttagtgggggaagaacaggactgtgctggggctcctggctagaccccagctctgccttttgctgcaagcaaggccttggccaggacacagcccctgtgtccccaggttttctcctctgtcatatgggaatgatccgatagggttatagggatgattagactgaacaacagcaagggtataaaattgtgcccagcataagcaatcagtggtgtaataggtcaggagaaggtgacctgcagggctcagcggtgatcgggagaggtgatcacaatcagcagctggagagagcctccaggtcttgggaaacactgcatttcgacacaggcagtttcacagcatattcaatttcagacaccatacacaccacatgcttaggatacccggactttatgttggtgtattattctttgcagaaagcattttagttttagtttaggtt

SEQ ID NO: 346776 - DNA, 1000 bp, Homo Sapiens
tttcattgccgggtttctcatctgttccctcgcccatgaacgtgaactccttgagggtggcagtgtctgttggctttgttcactgctgctcccagcacctggagcctgaacagtgttcggtgaatccttaacatccaagtgtttcttggtgtcgtcgacagaattatgcccccgccacaagatgtccatgtcctaatccccagaagctgtgaatcccattacatggccagggggaatgaaggaggcagatggaatgaaggttgctaatcagccgaccttcaaacagggagatggattatcctgggtcatccggtgggggggccagtgtgatcacaggggtccttcagtgtggaggaggaggcaggagagagaacagagagatggcatgagaaggactcaggcctccgctgctggcttgaaggtggaggaaggggccacgagccaaggaacgcaggcagcctctagaagctggaaaggcacagaagtggatcctccccttcctgccctggagcctccagaaggaacacagccctgcagacaccttggttttagccccatgaggcccatttcagactcttgacctccagaactgtgagattataaacctgcattgtttaagctacttcccacctactggccctctggtggagataaaatccccttaatcagggtttgcaaccagactcctgggcaggggagggcacagtgggggcagggggcacatctcaaggtctgattggaggcacggtgctcctccagacccacctgagtccggctggcatggaagctccaggggagccctggggcgggcgtggtgggggtggctggcagacccctccttgtcctccaggaagtccaagctctgtggggccccctcagccactcaggtctttggggacacagtcacaggtgcctgccctcgggaagggcccaagagcctggagctgtgccaccctggtccagggaacaaggggtcagggcaagagaaacagcggtgggg

SEQ ID NO: 346777 - DNA, 1000 bp, Homo Sapiens
tttagttaatactcagactttattcaacatcagaaaatatgcaatgaagagaaaatctacaatttaaatcagcttgcagatacatttacttctggatcacaacttactcagcattagaaaattcacactggctgggcgtggtgactcaccctgtaatcctaacactttggaagtctgagggcaggaagaggccttgagtccaggaattccagaccagcgtgggcaacatagcgagacactatctctacaaaaaatttaaaaaattagccaggtgtggtggcgcacacttgtcccagctactcaggaggctaaggtggcagggtcctttgagaccagggtcctttgagccgaggctatagtatgccatgatcacgcctctaaatagacactgcattccaaactaggcaacataatggcatcctgtctctaaaataaataaataaataagaaaatatttggctgggtgcagtggctcacacctgtaaccccagcactttggaaggctgaggcaggcggatcacctgaggtcaggagttcgagaccagcctggccaacatatagtgaaaccccgactctactaaaaatacaaaaaaattagctgggcatggtggcgtgtgcctgtaatcccagccactcgggaggctgaggcaggagaattacctgaacccacgagatggaggttgcagtgagccaagatcacgccgctgcactctagcctgggcaacaagagccaataactccatctcaaaaaaaaaaaaaattggctacatgcagtgtttttatcacattaaccggtattatggtgaagttaccttttgaaaagtcatctggcgaaaacaactgttaacatcagatgacagtgactttgacaaagcattatactactagggtaaaaatgactgaagagattggcgcaaaatgaggaaaggggcttcgtttctgagaataccagctccactcaacactggatactctcctgcctatggaaatccacaggggc

SEQ ID NO: 346778 - DNA, 1000 bp, Homo Sapiens
ttttttgagatggagtctcgctctgtcacccaggctggaatgcagtggcgcgatctcggctcactgcaagctccgcctcccaggttcacgccattctcctgcctcagcctcccatgtagctgggactacaggcgcctgccactacgcccggctaattttttgtattttttagtagagacagggtttcaccgtgttagccaggatggtctcgatctcctgaccttgtgatccgcccgccttggcctcccaaagtgctgggattacaggcgtgagcctccacgcctggccatttctagcttttgatttaaggtgaaacatacatgtctttcctttcacttaaacacttggaaatcattgtagggttattaattggcttaatatcaatattgttgtatttcagggaatagggaggcccaaggagagtgagagagtttgaagaagggctagtcagtggaacagtctgaacacataaaacatttaccaattaagttcactgtcttatctgggcacagttgtggcaccccaaaacaattacaatgttaacatcaaagatcactgatcacagctccacataacagatgtaatcataatgaaaaagtttgaaacattgagagaattaccaaaatgtgagacagagacaaagttagcacatgctgtcgagaaaatggtgccaacagacttgcttaacgcagggttgccacaaaccttccatttgtgaaaaacacagtatctgcaaagtacaataaagccaggcacaataaaacgaggcatgcctgtataaacagcaactgtcaagtgatgttttccaactagaattaaaagattacataaggaattttttaaaggaattcaatctggaagaactgagcaacaattaagaatgcattataaaggatatgatacttacatatgtgaaataaatttaaatggccaattctaaccagagtgaatgctgcagctgggtgttaaaaatcttttaaccatactgagtttggcagtg

SEQ ID NO: 346779 - DNA, 1000 bp, Homo Sapiens
tcaagtgtgccaggcactcagcaccgagatgcgtctacaacaagcagccacctgccggctctggcgcccctgcttcctgtctcccctgttccttgggaagcagccatccggtgccaactggggtggtgactgctgcgctacctgggccaagagaacggaggccaccaggctcagctgccggctgttctgcgtgtggtcccaggccaggctgaggctgtcagagggggacatctctcgcaggatggcggcgcaaagcacctggagctgctcggggcatgcaggcaggccgagggtggcctgcagcaggtctacgcatgtcttctccagcctggaaggcgagatgcccgtggtgggcggtaacacgtcacgaccgtggcaggagcacccggtgccccagagcacctggccgggcaccctccggctgtacttcgtggctgagatgatgaggaagagcctctgcagggagtcgagggtgtccggccccaagtcctccgcctgcagcagtttacagatccgggaacagaacttcttcagctcctcgtcctggatctccctaaacaaagaagaggacttcaggacccagaagcactcgcctcccacggttccgcaaagccctcggatggcctccagctccccagcctggcacacagccttattccttagcaggcctccggacactgtgactttgcgttcttgactgtgaggcactgaaatctcccggctgcccgatttcccgatccccaagtctcgagggcgagtccagtcgggttcctgcaaggctggcgcccaagcccctgccctgtgagacccacccccgtgtgcccgtggctgcgtcacgtgccgcatcacatgagcaggagggacaggttgccgaccaatgggctttggcgtggagcgactggggcggggcgtaggtgccgcggccgggggtccgggtcggcgcctgggagctgcggaatcgcgcgaccccggaacctcggcactctggagccccggcgcc

SEQ ID NO: 346780 - DNA, 1000 bp, Homo Sapiens; identical to SEQ ID NO: 161493

SEQ ID NO: 346781 - DNA, 1000 bp, Homo Sapiens
ttctgagctttcagatttgcttttattggtagggaaattccagagtggggagccacccaggaggagacaggggtgccgaggcttctgggagtctggaagctcccggatggagaggcttacagcccccagccttccccagcaggagcacaggcaggggactggccaagtctgtcagctcagagcaggaccggcttcagggcctgacttcggtctcctcttgacccgccccggaggcttgtggtgggctctgtgtttgcagctctcctgaacagagctagatgagggtgggaggcccccgttggctcacacagtggatgctaccatctccggcctctggatgtggagctctgtgccagagtcaacagtctccagggtgggccggaagttgttgtaggcgttctcaaggccgaatctgctctccctcagattctggtcttcccagatggccgtcttctggaagatgccaggggtgccttcctttcgccactcttgaggcacatcatactgttccctgtgccgttttctctgggataggctgaataagatgattaggatgatcaatgcgagcagcagcaccgccatcacagcccccacgatcccatacacgaggctcttggcgatgttgaattcacaggtctctccccagtaccagtgtgtgttcgtatttgggcacaggcagcgggggccactgcgttgcagctgacatgtgcccaggttacagttcatttgcgacttcgttcctttggtgcacttgttcacacaggccagcttcccatccaagacatccacatagtagaactgggtatatccttcggcagccttctgggtgcattgctcctggaagtcaaagcccggagtcaccgatgaatccacgaaagtgtcctcttcactatagcacagtatggcctttctgcaggaatcaggatcaagaagagttgttctagtttcattcataatcttggcctttacaatctctgccaggttttcaaacagttcctca

SEQ ID NO: 346782 - DNA, 1000 bp, Homo Sapiens
accgtgataagtcttttttcttttttttttctgcttgtttgattttttctcttaactgtgcaaaaaaaaaaaaaaaaaaatcaaaatgcactcactcatacacacgttcacacacgcagcttccatccagcaaatctgtgttaaatacgtttgtgtctctttcctccccaaccctttatatgtgcaaaaatattgtagtgaccgaggtacttcctcagaccgtctcccacatgcaccctttctggccttccaggtcctgtgactgacttcttgggagggaataaaatgatcaaggatagaaaagtcaagcttctccacctggtactgcacttgccaaaacctttggttatttattttttttcttcctcttccaatgcattgtttcccattttcctcttcccattaggttgctcatgtcttttccaccatctgtcctctgcgatgtcacatgatgccctgtggaacattcatgtgtgtcctgagtgaggaacatgggtgtgtatgcttataagagagtgtgggaacatgtgcatgagcataggtgtgggtgcatgggcacttgtctgagtgtgtatgtcagggagtgtatgtgagtgtgtgagtgtgacagtgtgtgagcatgtcagggagtgtgtgagtatgacagtgtgtgagcatgtcagggagtgtgtatgactgcatgtgtgtgtgtatgtcagtgagtgtgtaggcatgtgcaagtgtgaatgtcagtgtgtatgcatgtgtgaatgtgagtgcatggatgtgaatgaatgtatgtcaatgagtgtgtatgtgtgtgaatgtgagtgcctgcgtgggtgtgagtgcatgagtgtgtgtgtatgcttgtcagtgtgagtgtgcatatgtgtgttggtgtgtatgcaagtacgaatgtgagtgcatgtgtatgtctgtgtgtatgcatgtgtgagtgcatgcgtctatgtgtgcacgcatgtgtgaatgtgagtgcatgagtatgtgggcatgtgtg

SEQ ID NO: 346783 - DNA, 1000 bp, Homo Sapiens
gtagagacagggtctcattatgttgctcaggctcagactcttttatgtatgtgatcatttaacacttaggaacaagaaatccatcccgttgcactgattcaacatctgagattcagaaattatctgctgttttggaagactacaagatgaaccaggcaatctcttcagtttctgttgtcagggaactttacttagattttctgaaagagccactgagcagttttgagtcatttgcctcttcaagagattgttcctatttcagaggtctttcatttttcctttttgtattttgactagagtttatctgatctaaatacatgttttctcacagaaggcacaaaatgcttcataaggagtcattttgtcctttctttcttctgatgaacctgccctctcctcctctgcaaggtttcacagtgatgtgcaacgtccactctccatgctaagtgacagtgactgtaatttgctgagagagcagtgaccaaaccattggctccttcagaggctggttatttcaaccatctggagaaaaatggaggctcctaatgcagagtgaggaccttaagttgtctagggcaaagactcatttgttcattcattcattaattcacccatgcactcattggacaaacttgaatagggtactatgccccaggggtgtgaggaaggataaactatggagtggcccattcacaacaactgcacatcagggcagagcagaagtgctctaacagcaccagctccaggtcacccaaggatgaccaggaaggctccaggcagatcaagcattcgagctgggcttggaggaatatccttgattctggaggtggagttgggaagcagccatcccagcaaagaacatggcagcagagaagctgaagacaccaggatgaggagtggaccagtcggaatccttactcctggatgtgctgggggacagatggactcctccaaagagctgaatgctgggctgaacagttttagtccttaggagctactg

SEQ ID NO: 346784 - DNA, 1000 bp, Homo Sapiens
gagacggagtcttgctctgtcgcccaggctggagtgcagtggcgcgatctcagctcactgcaacttccgcctcccgggtttatgtcattctcctgcctcagcctcccaagtagctgggactacaggcgcctgccaccacgcctggctaattttttgtatttttagtagagacggggtttcaccatattagccaggatggtctcgatctcctgacctcgtgatccacctgcctcagcctcccaaagagctgggattacaggcgtgagccaccgcacccggccgaaaagatacttttctaatccacccactttaatcaactaaaagcaatggaataaacaaggcagaagttttgcaaacatggaaaggggagtgtttggaaaggatgcaatggtacagcagctcctagttttatatatatgtaatgtatgtatcttacacatatatccatatacatagaaagcaaaggaagagggttacacagcatgacatgatgttgacaagtgtgagattcttcctcctgaatcccctgacttatcagtctgtactttaagataatgtgacaacagtttcaaaagagaggaaaaaagaaagaaaaaaggcacttaacaaagacaaaggcctgaattgagcatgttttagaggagtaatataagcattttaccagagctaagaaatgatttacaaagagttaaacttttccccttaaaattttataaaataaaattgcataacatgttgtgatcatttatctactactgcacttttcttctgcttcattattacaaacacaaaagccccctcaaaagcaaaaaacaacaatcatacatgcacaatagaaagtaaaagtgcctcttttgagaacattaggtcagcagaattacagtgctgaagcacaggaaagttctcaagtttggcctgattatagatttttctcattcttctatttccaactttaaaaaaaaacaaaaacagaaacaaaacaaaaaacaaacaaaaaaaa

SEQ ID NO: 346785 - DNA, 1000 bp, Homo Sapiens
gttgaaatagactctgctttattcaggtagcaaaaggttaggaatcaaacatggtttttaaaacctcctttcatctttgaaaatagaggagagaacatccctgggccagtcacagttactgtatttggctaagcacacacctgtatgagggacccgcccctccacactgttctgataggtacttagcaccctagaaactcatcctctgcaggagagagaagcaagggtctggagcgcggtcacatactctaaggtatcttccaggacagggggctgggctccctcactcccacctggagtcgctatggctattgggatcaaactaccagttacatactggttacttggaatgtcagacccggtgggtatcagtcatcagggagagggaggggaaatgccaggacacgtacatacggatgctgtcaagactacaggcaaggaggagggtggcgacaagcgctgggactccagccaaagcgggagtgcatgcttcttcccctcccagagccctgtggtttttcttcttgtgaggcataaacaggaagcctctccaacaagggggtctccagcactaggggctgaaactcagccagcctctccaaacaaagcaaaggggccagcctgggccagggcctctgataaggatgctcactgtgtttccacgggggtcctgaatgaggaagttcaggaataagatggcagtcatcttcttccttcttggccattggctgacaaaggggaacggagcaggcctgtgccccttgagaaatcgggtagtgcaaattttatgacaaacagcattctcagtggccccgctgcacagggacccccctttcccaccacctaaggaaggcactggccggtgtcctcggagcacgctgatgctgacgtggagagggcgagttgcttcccctagcttccacctcagctccagaactactcccacagagacccactcacggctgctcacaggatggcctcctgctctgagggattcttc

SEQ ID NO: 346786 - DNA, 1000 bp, Homo Sapiens; identical to SEQ ID NO: 161496

SEQ ID NO: 346787 - DNA, 696 bp, Homo Sapiens
ctaccgtccccgtccaatcagacgcagaataaaaatgaaaaggtcgatgatgtccaagtagatgttcaggatagcaaaaacatacccttcagggtccagggaataatggcggtgccctcccagcatgagctgcacatcgatcaccaagtattttgtttgtagagcaaacaaagtgagtgctagcatcaccagagtggttgcagctgttgcccatgacacttcctcggccttgtagaaacagaaaataaacacactggtaattaccacagtgagcaacaactgaactgacaggaggaagaacactttgataatgaaagctctgcggacagatgcgtctgagaaaggattgcctaaagttgcattgttatcacctggggtgacgtcatctgaaatttctatcacacaggtattcaactgctcggtgtcctttggccgtggcttcttccgagtttcttgtggcccagctgaagatgaaggtgtgtagcgctcaccagattgggactggatgcttttatctgctgcttcctgaatcagatgttgatgacctccagaaccaaagtctattggttcgctgacctccaagtccaatttccttgtaacatttaaatcatgcaaattagactgcatgcaggcactgacaatcccctggggaattcggcattcctctttttcccttattgtgaaatttaaggccat

SEQ ID NO: 346788 - DNA, 845 bp, Homo Sapiens
cttttaaagaatttattttaagcctattataccacacagtatgttttaaacactaactccctaataagatatataactccctaataagataaagcaaagacaaaaaaagttcatcttattagaaacaagatacaccatcccttattgtcttcaaaaattattgcactttaattttcataatttgacaaagcattcatgaaacaatctgcagactagttttaacagacaaataacacctgtaagcagacatgactgtcctaaattattaggtacgaattttacaaatttacttatattagtggtaacggtggagctggagagtatcacgccttctccaagctgcctgcagatgtcagcccacacatctccctctgcttgtggactggtttggtgatcgactgggtgtcaggatttcttctgataacttcatagaatggatcaatgaggataacctcaaaaaatctgtatgtggaatcttcaccaacccagtaagaattcaggactcttagagccccacagttgtgtccaactcgctcctctgcaatggactgaaggcttcgagcaaacttcagctggttaacaccatgatggacaggcttgccataagttgcacccttaggaattgggcatttttgaccaccatggtgaacatgaatcctatatataatgtaaccttgcttggccttgtagcccagctggcgtgctttatcaggccaggtggggcagggagccccgtggacagcagatagctggcagtactgccagcagcagaccctcagaagaaagcgcatgacatcagactgcttcttcctccattgctcctggatgtacttgtatgcatccat

SEQ ID NO: 346789 - DNA, 1000 bp, Homo Sapiens
ttaccttgtcccccaggacccacaggggccgtccttgtggctgctgtcactgccagcaacatccatcagcagtggcatcagttggggggtgtggacagggccaagggggaaaggaagatcggcccttcgcacaggtggggggctgaagagtgggggggtcaccaccctctgagcaccctcactgggttgggtgggggccaaagtctggtcagaagtcagcagcatggggggctctggaaaggtatccagaggggactcctgagggaaagggtcaggctttggctccatgggcacagcaggtaggatctcagctgcagagctgcattgactgctggcagggccaggggctgcaggattgtccttgctttctttcccattcagtttctccatttttcgccacttggcccggcgattctggaaccacacccaggctaccgctgagcgctcactctgcaattcgagtgtttcaatggtgggccctccgccactccaccctgccaccagtgagccggccccctttaccatgatgcgctggggggtcacccccaccgtctgggcaatctctcggcgtttatcactgtcaggatagtggtcttcttggaatatcttctctagctcctccagctgatctgagcggtatagggttcgtgtctttttcctaatttggcaggtcacttccgggggcccctgcttgtggtctctgttttggttgctctgcgccaatgtactgaggagattggccaggtggcagggcccccggcctgacccacagggcactgggttgtgtgtggcacgggctgagttaggggcacccggagatgatgttggggccagacccatggcattaggctttttctgcttcccgggggctggagaataggacctctttcctatcttcacctctcccactgggagggaacaatcttccccctgagtctggggcctggagcgggctagagttctgtctttgtggggagccctggagcgggggggcgggcac

SEQ ID NO: 346790 - DNA, 1000 bp, Homo Sapiens; identical to SEQ ID NO: 161497

SEQ ID NO: 346791 - DNA, 1000 bp, Homo Sapiens
aaaaattctggaatttttatttcaataaacaggaacagtttttccatgagctctgctcagttcccctcacactagtaaaatgtaaatctctaaaaagcacacacacatagcccctagcctaactaaatatacaaaagggctttttgctcagaatgaacagtgactccttcttctgtccctctctgagccaggtggctggggtgtcttttccaggcccctccaccaggcactctggtacaggccacagcctgtgcaactgtccacagcagcccctcctgatgctcactctctcagacagtctgcaagtggaaaacacacatcctgtccatgtggatttattcatgtttcccgtatcagtaaggagatggagctataacacattaaatatttacaattaccagagaaaaggcagtacacagcactgaactgagataagaatacagtttcaaaatatttacaatgaacacgtcttgctttttctggttcttctctttggtctggcactttaggtctctgatctctttattgtattttctttccaggttccctgtaattttgaaaatgtttgacagagcctcctaagtctgaggaggattgctgtgtaagtgagagacatttggggagtctggttcctgtgtctccaagcaagagggccttttttggagccccctttatgctgatgtgtgtgtctcctgcttatgcccgaatcaagtttgtggctggttctatctatggctctaccaaagacagcaccagcgagaggaaagtggcaggcccctgagcttgtgctaaccaaaataacttatttacactggtctcttgaacatctcaaggtcttttagacagccgcagttaacatggagccaggaatgcattggtttatgtttcctttaattaattcgactttaaagtgttccacattattacattcaaaagtagctccttcgttgtgtttgattttaatctccattctttgaaagatctcactctttccttttag

SEQ ID NO: 346792 - DNA, 1000 bp, Homo Sapiens
catgtttagtagagatgctttataagaaatatttttgatttacatcttttgaatccaggattgcagaaaccgtgaatgaggagggctgactctatctatgtttggagtctgtgaatatgaactcttcctatgttggtaaatggaaatttctttcaccaaatggctgaactgctttttcactggcatgttcaaaaaacttacaagaagaaggacaagaactgtggaaagtccctggtgaagtccgctcccttccagcctgttcctcaggcccagcagtaatgagttgttcttcctccaagtcattccgttcattggcagcaaaccctgatattttggatagtagttgcttttgatcttcacaagccatgccatgttcagagagcgctgcagcatcaagtaaggcgtgtggggcatggagggtgccaggggaggtgggcaatccgcagggatggggcatctgaggccaagtcccagcagcacaagaagaattccacggagcccagggcaacaggccactctctgggggcccagcggctcaagatgtggcaagcctgttcctatctcaggatagaccatgggatttttggcgatttctgtgttggaattctctcccaaactccccatggacctggacatccggggctcatggtgtccacaatgcagctttgagcagggattccaaacccctgttctttctacatcttcctccttcgaaggaggctccaaggtggggaccagagctgcagcaggaggaggacctcctggcggccctgaaataggctctggcaggatcccagagtctgccgttctgtgcttctctttctccttttccttgagggcttggaatcttcccccatttgacggtgagtcttgaaatacagtgtatactcgatgattttcaaagaccctccctctacactcacagggcttaaggagaccttgtgtctgctgctgggagatgacaaaacttggtaagagctccaagtacacagagccacag

SEQ ID NO: 346793 - DNA, 925 bp, Homo Sapiens
cccaagatgcctgaatttctcaacattaagttttcacatcgtaatacagttttctttcctggtgtttcctcttctctctgcctagtaaaggatgttataaaatcgcagttcaatgtttttttctcttcttgtattttccactctgctggttatggccaatgagtcaagattcaaagtgttcccatatatatctctgcagctcaaactctccagaacttgggcttgtatttccagttactggacttaagctgggcacacccacagtgtccctggactgggtgaggaatgctggaaaccacatgtcatcaccatctctcaactctgcacagacccagtgctgtccctggctcttgaagacactggtttcttaacctcagcttcatggataagtacattttgtcttttcttcattgatatgtgctctcctgcattctgttattgtaagacattacagttacaggaatctttttcttaaatcactgttaatgtctcacaggaaattagctcttcagtggaaatcagcagcctccctgcatccttttgcccctgtcctcccctctcttggatgcaaacggcaggatcccgcgccaggacgctcgcagagcccgagatgtggcaccaggcgcgccacaagtccaggtcccgctatttctgctccatcggagcccaggtcggagggagtcagcgcgtcctcctcgcacaggagcctggcgcgcggctcggtcgcacagaggctgaagaaaggtccgcactgggctcgaggcccttcctgccggcctccccacgccgggcctaggctcccctccttcccggctcccgcctcctcccgtaggctgccaggcggacccagcctgcctctctctctgccttcaccaggcgcgcgcgcgcgttcccactcgcaccacgcaggagtggcccccggcat

SEQ ID NO: 346794 - DNA, 1000 bp, Homo Sapiens
gcagtgatgtttacttaagctttatttatatatatagtgcgtaggttcctggagcacaaagaagaaagttgctcagatttatccagacctcacataagtttatagatttcaagtagccactgtattttattacagaaaatacattcttcaagaggaaaatgttaaggccatagaagctttcaccttagctatctaagcttgtattaggtcatcattaaatagtatctgtatcattcttatgtgttccgtaagttatgccacaaataccagaccaagtacactcagtctagaaacaaaaaagtgggaaataaaggttaaaacattctaataggtgtaatgggctgatagatgactttatattacaaagctacttaagacaattctacttttctagaatacaacgcattaatataaacatttgaaattcagaagatttggcctgtggatgctttgtttctcaatgcaattcttgttaatatgttagtaagtaataatttattaataccaataataaaaaattaacatggttgagagcaggtgtatctcatagcctttatcaatttaatgcttaataccaaaatgctattcatatttttatttcagcctattaaaaaaatttataccacagctctgggcaagtggcagggtggcgccagtgacaggaatcagttctgcgtatttcttgattcctagctcatcttcctttaattcttaaacacaagaggtagctcatctgcgaggagacagggcaagttccagcctgaggggcatggcttctgagatggttccagtccctcttcctggctcgttccttccactggtactcacagcttcctcatttttcctgttcagtggtttattctgcttcactaaaagtatctccgtttcttccattttcctcccagcagcgggctgcgagctggagcagacgttaacaccgagggaggactgaagggaacgtcttgatttttctccgaatagcaatgcccaccccacacac

SEQ ID NO: 346795 - DNA, 1000 bp, Homo Sapiens
gtggtagacatgaggtttcaatatgttgtccagtctgatcttgaactcttgcactcaagcgatctgcccaccttggcctcccaaggtactgggattacaggtgtgagccacggcaccctctctgttgagctactattatgtctcaagcactgtggagggtatgcggaaacagagagtaacaaccaaaccaaaacaaggttcatgcctgcaggagtgtcttcaccagctagaaaacccaggttcccactggatgacaaccccaacccgtatctgggagacaatcatgaagtgttgagatgctagttatgagcaattaaggaaggaagagctcagaaagggcagggaacagagtgattaaatggcctggggtgctggggtaggatccagggagctggggcagagtggaaaggaataaagattcctgaacagctgttctccatctcttcactactagaatccctttttaaaaatttctcccaagtgtgttttcattttgaaatgaaattgttccactaacaaagaggacatgaattaagaagaaattagttctccccagttctcacattcaacaacgagttaagcatctgggcaacccagaataaccaatgtcaccacactaagtggatgtcattttagtcagacgcaaggacacctgctgtttgtcggccccgcagtgtgagtgctgggacctcgggggtctgggaaactgtgggaggagccaggagggcaccaggcagtgccagtcagcagccggccccaacagaggcaaaacgtagggccctgagcaccaaggggacagaggaaggcagtcccaaaggaagcggatgggggcacagttccctgcattggctgttctgtggggtcctgggaagtagctgtggaacagtcaaaacagcgctcagtttggagcagaggccctagttctggtttcagcccttgctagctacaagatcacaggcaaattactgcatttgtccaagcctcggctggcacatctgtg

SEQ ID NO: 346796 - DNA, 1000 bp, Homo Sapiens
gggtgtgaattcctttattctacaaatatttattgggccttcgatatggagaaggcccatgctaggcaatgagaaatgctgttacactatgaaatgttctaacaattaaatgcttctgtgtgtagaatggtttataactaactcaaagtgctctgtgcaaaggatccccgaagtgagcggcgtgctggccacgaagagtttcatcacttactgtaaatcacataaacaaataacagcattatttaaatgagggccctttacttacagaaaccctattgcagttattttctttcaagatctaattagatttaaagcttcatttggaaaacagaagatgaaaatgaacctcttatcctaagggcatctggatgagaatcaaatgcatgcatgatttttttttatcatacagcaaatttgcccaggtcataagcaaacaaaagagctctgttctacggtgtagtaagaaggaagaaaaaataaactgagccatgtcttgtgacagtcgatgctcatgcttagtgtgttcatgattgattcccttgtttttgacactgttttaggaaaattagcactaatttgatcagtccctgtacatttgagatacataaatttagggattgtactgaaactcccaaaacaaacatacactacaccatacttttaggagtcaatataaagtattctgaaattgaaaataaacagataagtaagttacacccatccttaaagatgtacaatgagtaacatggcccttagtggggcctttaaatatttgaatgattggctggatgagccagtgagacaactcagcggacaacttttgaacttggcccacttggaaagcacatgcctttgtcagaagctcattctatcaggccacagtatttgttacaaaacatacaaatataactgctttctgattgtagtaactatattttttaatgttcctaaaacaaagcatatgaagaagaaacacgcttgtattcttcattttgccaaa

SEQ ID NO: 346797 - DNA, 1000 bp, Homo Sapiens
gttccctctctaataccagcagttatagcacaccccattgtggtaataggatgcagccttagagacactgattcctgctttccacaagttagttaacaaacaaggcatctgtattatttaccctaaaaatcattcagaaataacttgtgaagggtgcttctgcatatcccattattgttccactgtcattatgcttttaaaatgaaagaaaatagaaaacctatgtaggtattcagtgcttggctcttgcatacaatggtaactgaaactcttaaaactgtggtaatgaatcatgaacccctcaaaaggctcaacaaaggagagaaggaagttgttttggttaggaaagtcagcagttccaactgttcatgtaccagtaactgcggaacagtgtacagaagatactcctgtctttgctgcctagtcagtcgtattttctgaggcttttaggaaatccacaaatatgaatatatatagtatgtatctatatccatcataaatatgaggtcaggattcagcagatgtatcaactataggttgctttggtggtgttgccaacacagcctctgcttcttcatgcatttgtagaaactgtacatcttgaaataattcttgtatgaacctccgacacggaagtctgaatgtgcagtgtgacagcaaatgggaaacctcagagtaaaggcatatgtcatcaaatgtttgaggatacttctccttaattgttaaaagcccagtctcatgacatttagttgaaactgaactactcaaattaatgactaatcttagaacttctttgcgaaggagtatacggcacattggtgtatcatctggaattgttttaacacctagtaacaattctgtgcttttggtgctgctagctgagccttcttgagacaccccatcactgcatccagaaatccccgaaaacttagagggaaccacttctaaaggattatggatagtctgctcacaccaatcagaatatggaatatcttgaaag

SEQ ID NO: 346798 - DNA, 1000 bp, Homo Sapiens
caacttcagaaaaaactttatttattcactcattcactcaatttgtcagtaagacaaaacaaaacacaaacaaaaaaacccatacattgtatctatcgaatcacaggcactatcctgggagaagcaggaaatatacacagaagatagattctggcctatattcaagaaatgttagagacgtgaaaacaaataagaacagaaaagtataattcaccagttctacaatttaagtcaatataatacataagggcacaaaggagagaacaatcagttttatctgaaaagcatagaaaatgctgccataatggggccatattgggaaggacagacaaagtgcagagtcaggatacaaagactctaggtgcaatagcatgtgtaaaataataaggcatgaaacaacatggcaattgaggggtgccaaggtgatgtcgtaaaactggaacacagaggaaagagatgaagagataaaatggggccaaaccatataagatatgtgtcacgctagaatgtgaacttaccccttcgtgtaatgggtattcactcaatatgcagatgagttacatcattacaaatacattttagaaaggtgacccttccagcgatgtaaagatagatgaacatggggagatggggcaaaactagaaaggagtacttcaaaattataggtagagagttaattatggtaataagatatggaaaattataagaaggtagaaaatacaaaattaggtgtgtgactggatgggtgacatggaaaagggttgaagtttaggatgtgggggagggttgaagtgcaggtttaagtgcttgagtgtttcaccgctacttcctaggtgttatttcctaggatggggaaaccagatgacagagtagattacgaagagtcagaaaacaggaacagaataaaaatgatgctttcagtttgagacctataagatttggggcacccaaggggcttggaagaaagatctggataaatacatttggagtatgagtagat

SEQ ID NO: 346799 - DNA, 1000 bp, Homo Sapiens
ttcatgtcatcatgaatttattttcaggcaatatgacaatctattaacactcagcatactctgaacttacagaataagtaccacgccatacttcctcattaatgactatcattttacatgagcttcttccacaatcacaatgagagaacagattgctacatgtttgctggtaaatacattcagtaaggcactcaaatcctagacacgaactaaccacagaacgctcttccctgctttaataaattgaaacatgatctcatttccttcactttcaatactttttatagaaagacacgcttgtcttgaacttgtctaaacataggtttatataaactaatccattatcattatagttataatcaaggaaatgatttcacattgacggttttttaggtagggataagcgaaagcactgcagcagtttctgaaggagtgtcttctctgtggttccccatacttagtacgatgcctggaatgtagcagggactaaatacagtgaacaaatgggcaaacctttaattcccagggatctgctacatattgccttgactggtagatcatttctccagaagaaaggaagaaaccaaaagacaaaaacaatctttttaaacctcacaggattttcttagaaaaaagttttaatttatatatctagtgcaattctctttgtaaaatatatttcataaaaaatccaaagcaaaagccctgtcattcatttatttcaaaagacaaatcatttcagtacttcttccttgaaatgcctgcaatttcttcctctggcctcagagacgggcattggctccatgctttaccatgtcaggataaaaatccaggagggagaaatcttgttgtaatggatagctgttttcatctaacacaaaaaggctctgaatcttcaatacacaaggttctgcgctgactgccaacaaggagtggaacaggtctgccacaaccatcccataggtgatctctgaggaaggaactatcactctgttgaggc

SEQ ID NO: 346800 - DNA, 1000 bp, Homo Sapiens; identical to SEQ ID NO: 161498

SEQ ID NO: 346801 - DNA, 475 bp, Homo Sapiens
ttccaaaacaaaagttctttattaattcttcaagaaatctgttttttacttagtcgattaatgtccatctcatgttgcctcaatagcccatgtatgaatcactcttcttgcagattttgttcagttttgttgtatgtagacccatctttctttgagttggtttctttgattgagttgatttgtctgtagtctcagctactttggaggctgaggcaggcggatcatttcggcccagaatttcgaggctacagtgagctataatcaggccactgtacaacagcctcaaaagaaaaccctctgtcttctgagaagctccggaaggtccaacacgttgcctgtctttctgaaaagtgtcttgtctgttaatgtcatatgagcctgtaagggaagaaagggaatgtctctgaatcccatccgtgtactgatgccaagatgaactgaaccagggatgaatttttctcttatatggaaacat

SEQ ID NO: 346802 - DNA, 1000 bp, Homo Sapiens
ttttccaagacaactacatttattcacacttacacacgaggcccccaacacactgcttcccacccccactccccagccccttccccccagaccctcccttcctgccctccccattcaggccaccctctccctcccctccctcccctaccctccaaagctaaggcccagcaagatcagcactgggggagaagaagcttttgaccgctttggggcatcggatgccagagccccatccttggggatcggccccagagagcctgctcagaagcccctactggctacaacgctgcttcttctccttcctggagaccaaggggtcaccctttctcttttgagactgtgaggggccacccagcccccaagtcagggattgctccccagagaccctgagcccaggccctgggtggggtgtcttttcagcaggggacaggcttccaaagagaggtcgcttcttggccttgttggcaggagaaggtgctaggttgaggcctcttctctcagcagatggggactgatgagttccctggggtccccacttttctgggctgagaaggcccgaggcagggacagggctctggggtagccaccagggcagaagcttgtgctgggaacccaagaggaaggccaggctggggagttcctcctcctcacttgacccctgagccagcccatgtgactccctgacaggagaccctccagggagatccaaggcatccttggtacccacgccagggcaggtgggtctgtggtcctggggaggagaggttggccgggcagccctcagcccaggggaatcctgacatcccaaaagcacaacagagtctttggacctggccatgccagtgtgtgctctgcctcgtccctgagagtcccgggcagtcgtctggggtgggcaggtttccatgccaaccccttgttgggggtcagggacgtctctctctgctccttggccagctgcaaacttagaagaacttgagtccaaccgggctgtgccacgact

SEQ ID NO: 346803 - DNA, 1000 bp, Homo Sapiens
gtcacattagagatgagtttattttcttctttataaattgtattttccatgttttctacaagaacgatgtatgccttttataatgagagaaaagcaacacatcttatattttaaatgaacaaacattacaaaaaaacaaaacaaagaagacaaggccacaggaatcaattcacattcatcaggctaataacagctttctttacaaaacagaataccaattttatgtattcagctatgttcaaggtcttataatagtagctgaaattatatgaagagggttaaaaatcaatctttgctcacaagggagattaaattattgtttgtgtggtgcttatggcacacggagctgaggggatagttagcagcagataaaaatattatatttctttgattaataagggctaactagatgtgttcatattttatgaacatgcaatttaatttgatgtagcataacattttctatcctctgatttgcaaaatgtttccattcttggatgaagatttaggagatactctaatacactttatcagcagcacattgccaaagcatctcctagagtaataaaacttgaagaatgcatatcattacctatgctattgctaacttcaatgtcagaaaaagcttgtcttacatttttaaagtagagtaacgcaatattaataatagcaactacacttaatgggcatttactttgtgtgagacattttacattgatcatttcactggatcattcacaacaaaaaagaatcacaggtctataatctcttaaaaactctggggaccaaatgtgttttggaaatgagaattttttggaattcaggatgaaattggaatcctttggaatatactacataaattgcatacattttgtaacattccaaatgggtacaggacagtactatgtaatgaaacacattaatcttactatttctgcgaataaatgtgtgaaaattcacactaagtgaaacaaaaccataaataatattacaatttatt

SEQ ID NO: 346804 - DNA, 1000 bp, Homo Sapiens
tcagctgccatcaggggagcccctagagcacggagctgggctggcccggggtgtgggcaccgggggctgcagggacatgcccgtgagcctgctggctccgcgggtgtccctcagtctcactccaagggagaggtggtaggaggagcaggacaaggaggggggtgggagtgggaagaaggctctggaagccccgtcagcgggcggttcaggagctgtcgggccccagctaacagaggcgcctgccgctgccttggtgtggcgagccaggcagaggcagttttgggtggtggtctgccagatgtgcctgaagaaggcgtaggctgcaaggcagcagtcctcgtagccctcggcgcccggcgacagcaccagggccagcaggatgtgcacgcgggccagcgcctccagctgccgcacgctacgcagctgctccaaggacaccgcctcctcggcctcggacacggggctccgtgggggcatctccacagccacgtactccccatccggcgtgggctgtggctcagggacatcgccgggcggcttcatggccagcaggatctcgacagcccagcggaggtggaagaccacgtcctcgagaggaaagtgtctgtgatggagccactggccgaactccatgaggtactccaccttctgccactccatctcaggcttctgcaaggcctggatggcgttgttgtagcaggccagctctccagacacgctcggcgagttcagggccaggcggtgccacatgcgcgccaagtagtcctcactctcggccttgaatttctgtatttccatcgaaaaattctgcccgagcttggccttcacgatgaccatgtgcttgaagatcaagaggcggtgggccgtccttggcagcacctgcacagcctcgtccagcaccttgaggccgccctcccagtcgtcctggtcggcatggctgtggaagagcaggccgtagagcgcagcacggagcgccaggtcgtcctcagccctagaggcc

SEQ ID NO: 346805 - DNA, 839 bp, Homo Sapiens; identical to SEQ ID NO: 161500

SEQ ID NO: 346806 - DNA, 990 bp, Homo Sapiens
ctgctgcaggacactcagcagctttcagtagttcatccagacatccagttggaagtgggatttcctttagtatgaatttgtttatgtggtttaggggacaaaagattactaagggattttccacactgtttgctgacatagggtttctttccactatgagttaacaaacactgaattattgtggaactgtgagtgcaatcttctcccgaatcattacattcaaaaggatcctccagaatgagagagttctccattgtcatactggtgggtgcatcttttctgatgataggatgcatggatatcatgtgtgttttcttaagggcactttccctgtctggattctggtcttgaagaaattctcttccttcctgccacagctcttttccttgctccagctgcaaaattatataggatttgcttatctggtacccgagggacaccaggtgactgatattttccagcatcacatctctgtacagctttctcttggatgtgtccatcatggcccactcttcctgggtgaagtcaatagctacatcttcaaaagtcactttctttagtgaatgcattgtcaggaactcagtttctctctgtcttcctctggatttccacttgcagacactttaggcactaagaaaagctcaataaggtaaatgaatgaaatttaaaaattgcttgagaaaatgatctttggagttctggagccctgcccaccactggtctctctccacagtgtccggaattggtgggttcttggtctcgctgagtttaagaatgaagccgcagaccctcctggtgagtgttaacagttcttaaagattgtgtgtccagagttgctcattcctcccagtgggttcatggtctggctggcctcagaagtgaagctgcagaccttcgcagtgagtgttacagctcttaaaggcggcgtggacccaaagagtgagcagcagcaagctatactgcaaaaagcgaaagaacaaagttcccaca

SEQ ID NO: 346807 - DNA, 827 bp, Homo Sapiens
tcagatgtcagtgccaggagggcccagaagtctatggaggaccacagagggcaccccaaacacatatctaccctgtctggggatgctccctgacagccgggcatcccagcagatggcaggaagggagggcgtcagcaggcgggggggtccggtgcggggcggcacgggtggaacgctcagctctgccaaatgccgcttagcaggcagcgggggcagcacagggtctggggcagctgtggatggggtggtgaagcaggtgggcggaaggcagctcctccggggcgggatgggtggggcagcggggagcccctcatcctctgtagtggtgggcagcggctcgggtggagtggcaggcacaggtggtgagcggaagatgtggcgcttcatgggcacaggccgtggggtggggcggggtgcaggggccggtgaggtatgggcacggagcaggccagccaggatgcggcggcggtgaccagggagtagcatgcccatgtccatcaggcgggtgtcgctgaggccttggcactcagtggcccacaccaggccatgctgctcaaagagccccgtgtactgctccaggtgcaatgcccgcagccactcggccaccgatagcgcagcatccccagcctctgccatggttcctgccagcggaggcctgactggcagggctttgtccagagcagctgggctgccaaggacgcccgggtcctcccagagacagcagctattctgaagggctcctcatctcggcctgaggcgggagctgttttgagtaaagactccacgcggggaccaggcgtaccggcgccgccaccgacttacaccgc

SEQ ID NO: 346808 - DNA, 1000 bp, Homo Sapiens
gagtttcctttactgtattctcaacttgggccttgcttcaagcaggcaaacatacattgaagaatgcactttggtactgtttaaataacaacacatcagcccacttgattccatgccatgtccttgctgacagaaacatccccaacagggcatgccctggtccaagtcctctgtctttgtcaaaatgctcttctgatgagttggagaggaggcagccagcagtggcagtccacaaggatccaggtaccttctccaatcctaaagcagacagcaggttgaataaaaccaatacacaacctattttctaggcaggaggggaaaaggcccttaggacaataatatttgtacaaagagttgagagtaaacaaacagtgtatcaggttcaaaaaaaaaaaaactattcgttggcatttaaatttttttcccttgcatagtatctattctctcactaggacttttaagtgctctgctggaggctcagcgttggtaataccatgtttgatgcaaacttgaacccaatgctctcattggtggcacagctttggagggtggtggccccaagaaggggcaatctgcctgctgctatattaatctggaaccagggccaacagctactcttgaactatggtatttgaagagcgagttcattgcctgttttaccttaaatgacaggaaaggaagatgaacaaaccttgctttgccttggcttcaaactagttcttgatttaagacaccagaaagggagagagggagtctgcttagagtttgaggttgcctctcacaagatgacagttaaaagttgccaccttacttaaaaggcattaaggaggcatttactcacaaaggagagagagtaaatttttttcttaagaggaaaaaaatactgataatacatagaacaatctgcacatccagtcttggcactttttccaatttgactgatctctaaactggtgacccttgcatatatcttagtctcttttctacaatcttcttcaga

SEQ ID NO: 346809 - DNA, 451 bp, Homo Sapiens
tgtaccatcaaggcacagtagtaaagggaggaatggaatgccagcctcctggtattctcaccttatacaggtcatggctgcccagaacagcatcaaacagcatgtagagatcgttgagcaagcccaccgcctcaatgggttcactcagggctgagatgatggtgaaacccacaatgtcactgaagtatatggtaacctggtcaaaataccctggttccacagttgcccccattttccgagcttcagccacagacgggggaatcatctgacagagcagcctttctgtcttctctctcttcagctccagttcctcagtctgctcctgaatcaggtcctccaggttctgggaatatttctccagcaaccacagcatggagtcagcaacactggtcctcttgccttggttgatgcttttgaactgaaaatggaacaaaaatgccaagtcatccat

SEQ ID NO: 346810 - DNA, 1000 bp, Homo Sapiens
tgggcttaaaacaatacacatttatttttatttttttattttattttttgagatggagtttcactcttgtctctaggcttaagtgcaatggcgcaatctcggctcacagcatctttacctcctggattcaaccgattctcctgcctcagctcccgagtagctgggattacaagcatgtgccaccacgcccagctaattttgtatttttagtagagatggggtttcaccatgttggccaggctgctcttgaactcctgacctcaggtgatacacccgcctcggcctcccaaagtgctgggattacagatgtgagccactgtgcctggccaacaatacacatttattatttcacagttctgtagttcagaagtcctaaatggatgtcagtgggctaaaattaaggtatcatcaggataccatctcttcctttccagaggctccaagggaggatccattttcttgccttttccattttccagtctgctcccaaaagctggagagtccctttccccaaatcctcaatttactcacatctgcagagtccttttgtcatggaaggtaacatattcatagttcccagggattggaatgtgaacattccattggatgagccattattctgcctagtgcagagatcacgaaaagacaatccagattagagtcaatttactgggttaggatcctgggttaagttacttaacccctctgtgcctcagttcccgcatcaataagatgggtgaggataacaacagtatctaccgtagagggtagaggtttaaagacagtgtttgtaaagtgctcagaacagtacctggcacatagaaagaacaataggaacatttattaaatacattttttttgagacagagttttgctcttgtcacccaggctggagtgtggtggtgcaatcacagcttcctacaaccaccgcctcctgggtttaagcaattctcctgcctcagcctcctgagtagctgggattacaggtgcctgccactac

SEQ ID NO: 346811 - DNA, 1000 bp, Homo Sapiens
aactatggctgaacaagtatttattttatctttatactctatgtagctgtctttgtgctgaaagattaggcttctattatttacctcttcaatggatgacatggttggagtaaatcctgatagcatttttacatctataaccaccatactggatttattgcgaattccagtgtatttgagggtcactgtgaggtcaaaagcagtcgaagagtagttctttactatttccaaggaaagagaaaatccagatgccttcttaggtaggagaacattgtacttaagggtggcctggataaatgtacaaccgtgtccttccacatctactgtgtattctccaggtgcctgtgttacttctgaacgttggaccagtaggcggttatgaccgttaacctggaaaatctcactggatccttcactggaggactgtgggtattaggtgtccaagaagaaagctcagatctgccgacggtaggtacattatttggaattcactatccgacaggggtccgaatgcagcccgggatcacaaagaaagcatgtcctttgcaatctacgggagcctaagggcagaaggcaggtgacagaattcttaggagctgtggggttttggagactgtggattccaaactttgcagtattagccaagcctttgtatgaggtcacaaaaggggcagggaccgggaagctttggaaaggggatgccaacaacagcaaggctttcatgagttaaaggaaaaacttctggcagccccagccctggggctacccgaactgacaaagcctttcccattgtatgtgtcagagggagaaaagatggcagctggacttttaacccaaactgtggggacctggctgaggccggtggcctacgtctctaaacaactagacagggtttctaagggatggcccccctgtttgagggccttggcagcatctaccctgctagtactagaagcaaataagctgactcttgggcaaaacctgaacataaaggcccccc

SEQ ID NO: 346812 - DNA, 553 bp, Homo Sapiens
ggtttttcttttttttttagtttaacttttccttttttgctgtctggtcatcctcgtcggtcttctgcttctgggtatcgacatcgtcatcctcatcatcttcagctgcccgcttgcccgtagctgactcagctccctcatcttcatctccgtcctcttcctcaccatcaccttcttcctcctcctcttcctccccaccttcttcctcttcttcatctacctcgttgtcagcctccggctccccattttcctcattagcattcctgttagcaggggcgtctcttccattttccgcctcttccacaacttccttcttctcctttaagtcctcggtggtgatttcggagctggtgtctacggctgcgtctgacatggtggggcacgccggtgacgcgatgcaggggataaaaaagaaagcgagagttcagggactctggcgataaagctgccggagtccgcggcggcggaggaggcgcgcggcggaggcggctgcggcgagcaaggaggctgacgaggcacaatgcaaagatggcttttcagagcagccagtggg

SEQ ID NO: 346813 - DNA, 1000 bp, Homo Sapiens
ctaaactacggctaaacaagtatttattttatctttatactctatgtagctgtctttgtgatgaaagattaggcttctattatttacctcttcaatggatgacatggttggagtaaatcctgatagcatttttacatctataaccaccatactggatttattgcgaattccagtgtatttgaggttcactgtgaggtcaaaaacagtcaaagagtagttctttactatttccaaggaaagagaaaatccagatgccttcttaggtaggagaacattgtacttaagggtggcctggataaatgtacaaccgcgtccttccacatctactgtgtattgtccaggtgcctgtgttacttctgaacgttggaccagtaggcggttatgaccgttaaactggatctcactggatccttcactgctaaaggtgacagtgttttgattcttagagaagagcccctcttccccgcatattgctattaatatcaggcctacattaatcacctggttggaagaaaagcctccatgggaattcatctgttgggcaagccactgcacaatcttactagcataggtgaggtcaggaattttccgggaaatgacagccaacagcacatagcaactcttctcagtctgagcagaaggtgcccagggaataaaggatggaaattcttctgtcttgggtttcctttctctttcccagtagatgacattatttagttttgtggcagattgatccagggtttggagtaaagattccacttgcttctcttttccagctaaggcaaaagcataagctagaattgcatgattgtagccattagtgacaccactgtccaatgccgcttcaaggcaaaagagtgcgtttcgtagagcaggaaaagtggaattgagcccagcttcaaagaacatcccaacaacatatgcagtgagtgaaatgtcctcttcatctccaccctcccaggcgtggttgaaaagctggccatcattcttaaagcagccg

SEQ ID NO: 346814 - DNA, 1000 bp, Homo Sapiens
ttacacagtgttatcttgctattttatttgatttttaatattttatttatatagtttttataatgagtttaaacaacgaaattagtcatggggccacagaagatactttgctgtctgtgttaggataaaggcaaaactgccataacaaagaatttctgaaatgcaggggctagtgatacagaagtttatttcaccctcacacaacagtcttcggggtgagtggcccaggtgggtgagatgactccacatggccacatagggatccaagttgttgggtccaagttgttccatcttgtttctccaccttcccctagggccttgtcctttgctgcacaaagtcgggctgcagacacagccatgttcccattcacagataagacaaagagtggaaatggagggcggtcatatttttttttaaaccaatgaacccaagtgcatacatcacttccacttacattccactgtcacgtggccacacctggccacaagggtgactaagaggtgcagtctttaggtaggtagccataggcccagctaaatgctgttcttctggaagaaagggagaatggcctttggtgaattcatggcaggctccacttcactgtcggtctccctctatgggaccctggcattcctccctgcagtggcgcttttttgtatggtggcaggagagagcgtccataggggaaactccagacaccttcactgtaagagttatccaaagtgtctgtgatggtcctataggcttcccaggcaatcaagcagtgtcagtcttcagctgctgagccgagaagatctgggaaggagtcagtcagagagccttgggccagagttccaggggctctgggagtggctgccgggtgagttggacagtccattttccagtggggtcccgatttgaaattggtgagatgttccttgagctggttggtctgaggacccgaggtcgtaggtgggtctcctcacagagtgagggcaaggacagcggactggtccccca

SEQ ID NO: 346815 - DNA, 1000 bp, Homo Sapiens
gacagatgaataaatctgacattttattttttaaataatattttaaatttaggggtcaagcttatttgtatctgtgaaaaattcccaaactagtactttttcttaaaagacttgtcaacaacagaattaaacgctgtccttgaagatgattttgctcaatgctgtgaatgccacagttcatcccaacacacagatcagaatcagcctccaatccaatcttcccaccacgcttgatattattacttacatgtttggaaatacatgttggttcaaaaaagataaaatgtgcttcctaaagtgttctaccatggagtctctctttatgtttgtagcaactattaatctatttctgtattttattattagaaagttcttgacaattatttgtgggcacaaaattaccagctttcacaataatcattcattgtgctgcagccttctgccactgcaacaacagatacaggttcatatttcaacaacagaacttctaaatataaaatcccataagggttttttcttttttttttaatcccaagtcacctgaatacacacccacatttagaagtgaatattctggctgggcacagtggctcacacctgtaatcccagccctttgggagggtgagacgggcagatcacctgagatcaggagctcaagaccagcctggccaacatggtgaaaccccgtctctactaaaaatacaaaaaattagttggatctggtggctcatgcccgtagtcccagctaccgaggaggctaaggcaggagaatcgcttgaacccaggaggcggaggctgcggtgagccgagatcacactgtggtactctaaagcctgggtgacagaacaagactctgtctccaaaaataaaaaaagtgaacattcagaaactcatgattgtaaataatatggcttatttatattataggtacatagtcccttatccaaaatccttagggccacacagggtttggaattcagactgtttcagagaagtaagg

SEQ ID NO: 346816 - DNA, 1000 bp, Homo Sapiens; identical to SEQ ID NO: 161502

SEQ ID NO: 346817 - DNA, 1000 bp, Homo Sapiens
gcccttctgccaaaaatgtttacttcaaatcaaggagccacgacaggtcccaaattacaaaccaactctcataaaaggtcaacaggtctttgggttttttttccctggagctcccaaggtctccaacttcctaaggcatttggtggatgccagataagccccgccttaaaaccagagtttagagagcatcttcttcaggtacttgttgtccatcagtgatatactgacggcctctatgaagttttccagatcaggggtggtcgcgtaattcaggagcctattcattttccccagaaggacccggatcttctgggctgttgggccgggttctgcctccaggatggttttcttcttcatttcgctcagcacctctgggatcacaaacttgtacctggtgcccaggtttaaacaaatctgcttctgttcataggtgaagcagaagatgatcttatcctggctccttatttgtacctggatgtactcattgattttcaaggagatgggctggacagggggtgcgtggacatggatgttcagattccaccagttccaggccttctggcgtttgtctttggggaagtagtagcccaggttggagctcaggttcaaccagatatcactattttcatcatagaaggtagcattgcctgagttgttgataagggcccggatcctcccttctagactgtcttccagaatgatgtatgtgaactttttcattttcgcatataagatgagcatagccaggtttcctgatggataatgtatctggcctgtcccatcaggaaagagaatttgatagacattcttgttggggtagagaattaattttccatcaccttgatgcaccactgtcttcttctgtatccattccttatctcgttctaatttcttcctatgatgaacaacacgttgaggcttttggatttcttctgtctcaggcttctcaggtgttggtttgctcattaaatgaaatgtgaaactggtcatctctgttaac

SEQ ID NO: 346818 - DNA, 1000 bp, Homo Sapiens; identical to SEQ ID NO: 161503

SEQ ID NO: 346819 - DNA, 1000 bp, Homo Sapiens
ttaattgggaactctcagtttcccctcttttgtcccctggatcagttcttcaatctcattctcaaggggttgttcatattctgtggctaactgcttatcaaattccatatcccaaagtgaaggtgatgtgtactctggagaccatttgtactgagtttcttcatttattttactgtttctaagatcagcagtcttctccaggccaggataattgtcatagccttggtcaaactgaatctgatgctctggccttatattaattctagctgtagcacatctggcaattttcatatctgatattttgttattgaaactaactaggtctctctccatctctctgtgcccctgactcttcctcatgctacggagctgcctgagcagttctggcttgtttgcttgttcaccagtcttttgatgtaggaccaaagcctcttttttaaacacaggaccactgataaaaggttctaaggcatatattttacatacatcacacccatcctcttctttggagcatgtcctaaagctctttgaggcccgccagttgtagcttttaagtgaacttctgttgggtggctttgttgtttgtacatttactgtgctcaattcaactttcgtgcccttaataatgtctaacaagtctttttctctgttttcctttacactgtcttggttgtctgaagtctcttggggtttatgaccagtactggcacgctgtaaagttttccaataatgaaagcacggggcacagggatgcccgaggacctgcggagccaaaagtgctgaactgcggtacctgacagttccacgccgagcagcgagtagcaaaattgcagccgctgatgtctccgggcttccaggggacaaagggtggcaggaaagggtgcgaagaggtagaaacgccgagactcccgcgattctattcctagaggcggagtcctcgccagtgttcagtaaggttcgctggcctaggaggattccagaccgccgagaccgccgaaca

SEQ ID NO: 346820 - DNA, 1000 bp, Homo Sapiens; identical to SEQ ID NO: 246655

SEQ ID NO: 346821 - DNA, 413 bp, Homo Sapiens
acaggagtagcacgtatatggaatttcttcaggttgagtcttctgtgttctgctcatcgacttctgtgagtcctgaattattgtgtatgttcttcatgaagatagagccatactggtctggtttattgttgagtcccgaggtctggtatgatgtcaactcttgattatttctgctgaacaacaactctgttccacggggagtcactattttgccagcaatataaaagagcccagggaaggagccaagaaggccgaataggaacagctctggtctacagctcccagcgtgagcaacgcagaagacgggtgatttctgcatttccatctgaggtaccaggttcatctcactagggagtgccagacagtgggcgcaggtcagtgggtgcgtgcatcgtgcgcgagccgaagcaggg

SEQ ID NO: 346822 - DNA, 481 bp, Homo Sapiens
atttaaagcaggttcttgttggtgcacagcacaaattagttatatacggggatggtagttttttcatcttcagtcgtctctgatgtggcttatacgaaataattgttctcttaactgaataccactcagtggcttttcttgacttgccaaatcagtgaatggtactgctcgttccctctttcttaaatcttgagtatgtttcattttctttcttcttcacctcacaaacagatcgcagatccaggtttctcaaactggagcatctgcttaattttcccataaaatcagtcttattctttctgacagctctgagactcctccggccacgactaggtgctgtcctggaggaaacggtggaggacggccgcacaaaaaccaatctacctgatgaaaactccgttcccttctcgccagaaacataaaatgcgatggagctacggccaccgctgccgagacaaaatggcgccgacaagcaatccat

SEQ ID NO: 346823 - DNA, 1000 bp, Homo Sapiens
caggtcctgaattatgtatattatttcatttactcctcataaaagggttccttctaggagctaggggagaaaaccagccattatatagtcaataataatattaatggtaataatagttattatatataacagttatatattacataacatatgctggcccgaattgaacatattctctaatttgatttttgaatatttaaaaatatacacatatatttgttttttttttttaagagatggaggagtctcaccatgttgcccaagctggcctcaaacccctggcctcaagtgagcctcccacctcagcctcccaagtagctgccaccatgcagtctctaatttaaattttaaacaaaccctagatgttattattatcttagagtaggctgcttctaaaatagctcccaatgatcctcttgctggtctttacatccttgtgtaatctccttgagtgtgggctggacctaatgacttacttctaactcacaggatgtggcaacagtgatgggatgtcacatctgtgattggattacgaaagactgtgccttctgttttgctattactgtctctggtgagtcctctctcttgctcttgcttgcttgcactgatgaagtaagctgccacgttgtgagatgctcaacgaagaggcccatgaggcagggcaccgagggaggcttctggccaacagctcctggggaaccaaggccttaggaagtgagtccttgttccagcgtggaaagcagcgtggcacttcccggtggtgaaagcaccccagcttgaaagggtgaaaacaccttctcccagatagtctccctttgtttagccagtgcttttgccttaaggaaatcaaatgaaggtatgctccttggttggctgctgaatctgtccttcctgccatcttggtcgtgcccaagtggctctgaacagataccatctgcaggacctccacagccagccatgcaacaggaagctgcagactcccagactccagtgttcttgt

SEQ ID NO: 346824 - DNA, 1000 bp, Homo Sapiens
tcaggggtcaccagctttgtgctgcctccgtaacagcaggagggttctcaaagcaatgttccactgatccctggatgccactgcagcattaaagacagggtcagtccccttgaggggaaaggtggcttcaaggctgttctctgggcctgtttgcaggagatccgcaggtaccaggagcccgtacttattgcttatttcagtggtggccacgccaacgggcagcaagaactgctcagaatagagccgccagctagggagagggacagggcggccatctccctcctcttgcctgcatccccagccctgggcctgcatgagacctgctgggtaggaagacagcctctctgggctcttcaggtggggctgagcagcccaggaagggcccagggcagcctccagccagccacagatgtggtgagtggccttgtccacatgccggggacccagtgcttggggggcctggggccaggccacggcatttgggcaagaagtggtgccacctgcgtcaagacccaggtagtggtggtctctgtccagtgtgggtggcagccggggagtagagggtttgatgagtggcccctccatcccaggcaggacagaggagcctggacagttcccaggctggatctcagaagcagcctgcagcctcttgctcatggagcccagggcccagagggggaatgaggcgtccgggccgctctgctgcaggaacagtcgcagcgtctcgtcttcccaggttgctggtgtatgaggcgggagatggcggcttgggccagtgcatcggacccatggcagctgggccagggcgggcagcgtcaaaggccccttgaactggttcccagacaggtgctgccgtatggagggcttggagctggctgcatctcccagctttctccagaccacccagccttcgctgagcattcgagaaatggagtcccacatggggaagggtatggccatgctgggtggccctggtcgcactcccagtgccaagcctctg

SEQ ID NO: 346825 - DNA, 631 bp, Homo Sapiens; identical to SEQ ID NO: 161504

SEQ ID NO: 346826 - DNA, 1000 bp, Homo Sapiens
tttcctctttattctttttattgagcactcttatacatatatggttatgcagagataacacactgtcaatacaaagattttcagaatttatttgacaaaatgacacaaaactaaaaatatcatttacacatgaaattcaaagaacgcattatttttccttacaaaattgtggaaaaattaattcagatagtaacatagaactagttctaaaactaaaatgctagtgtgaatgtatataggagatatggtttgactgtgttcctacccaaatctcatcttgatttttagttcccacaattcccacatgttgtggcagggacacagtgggaggtaactgaatcacggaggtgagtctttctcatgctgctcccatgagactgcataagtctcatgagattggatggttttataaaggggaattcccctgcacacatgctctctctcttgcctgccaccatgtaagatgtgactttgctcctcattcaccttctgccatgattgggaggcctccccagccatgtggaactgtgagtcaattaaacctctttactttataaattaccagtcttgggtatgtctttattagcagtgtgagaacagagtaatagaacaggcaaaatgaaggagtttattttaaacctgctttaaattatttcgtggttaaagtatttaaaaccttttcttctatttttaggaaaacaatgagaaagctaaacacaggtctaacttgttattcaactaaaaattattttaaaaatatttgagtactgacttctggcaccagccaagacaaagcatgctcaccaaggcctatttctctttctgactgaaattaaaactctggacataaaaagcaactatcaaggactcttaaaagtaaacaataacagatggattgaaggcaaaatcaaaataccaatagtgacctgtaacaggggtgggtttaatggctattttttttttttctaacccaggtgtgcaaaatttctactgtttttag

SEQ ID NO: 346827 - DNA, 1000 bp, Homo Sapiens
ctttctcttgtgggcatttagtgctataaatttccctgtacatactgctttgaatgcatcccagagattctggtatgttgtgtctttgttctcgttggtttcaaagaacatctttatttctgccttcatttcgttatgtacccagtagtcattcaggagcaggttgttcagtttccatgtagttgagcggttttgagtgagattcttaatcctgagttctagtttgattgcactgtggtctgagagacagtttgttataatttctgttcttttacatttgctgaagagagctttacttccaaatatgtggtcaattttggaataggtgtggtgtggtgctgaaaaaaatgtatattctgttgatttggggtggagagttttgtagatgtctattaggtctgcttggtggagagctgagttcaattcctgggtatccttgttgactttctgtctcgttgatctgtctaatgttgacagtggggtgttaaagtctcccattattaatgtgtgggagtctaagtctctttgtacgtcactcaggacttgctttatgaatctgggtgctcctgtattgggtgcatatatatttaggatagttagctcttcttgttgaattgatccctttaccattgtgtaatggccttctttgtctcttttgatctttgttggtttaaagtctgttttatcagagactaggattgcaacccctgcctttttttgttttccacttgcttggtagatcttcctccatccttttattttgagcctatgtgtgtctctgcatgtgaggtgggtttcctgaatacaacacactgatggatcttgactctttatccaatttgccagtctgtgtcttttaattggagcatttagtccatttacatttaaagttaatattgttatgtgtgaatttgatcctctcattatgatgttagctggttattttgctcgttagttgatgcagtttcttcctagtctggatggtctttacattttggca

SEQ ID NO: 346828 - DNA, 1000 bp, Homo Sapiens
ttatctccttcttcttggcagccaagcccaacaaaataatggcacacagcagttgctgcccaagcctgggtgctcctggtggtcctgcacgatcggctgtgcagtaggcttgtcaaggagaggatcctccctggcctctccttgggcagaggaggtgagggtcacctcacgaagatcaccatgcttgtctgcagccccaagctcctggggggctggggctcctggaccgggctcatcagcagagttgtgggcagcggccaggaattttctgtgcccattgttgtagttgctgtaagccgcaataccatctgctgcagctccagcagcttcaccttcatctcctccctgagctccagcctgatggtgtcctcctcccagtgctgcatctttggcacggccccctggttctgataaaaggtgatggattttctgatggcatctctcttgccagtattgaatgaagcgaagttcttgttttttcaccagctcactcaggtctgccttctccttcaggtggtccataaagctgctagactcgcccccaggccctggggctccagggcctctggctgcctctggctccttctgggccgaggccaccgggtgagccaggcgctggcagcacaccctctgctctttcacctgctcttgtaactgtgcctgcttctcctggacactagctccagcggacttgaaaaatgccaccatggcctccctgctctccgggtcctctgggacactcggcatgggccgaggtgcctcctccccctcactgtccagatgttctcctccgtgtccttccccagggagagccatgaggctcagctgggccgttagctgctggttctgctggctggccgcttccaggtgctcctccttctcacaggtcagctgctgataggcggccacctgctgctgataggtggccacgtactgctgcaggtgacccaggtaatggtctggctgctgctgcagactctgagcctcttggctcttcagc

SEQ ID NO: 346829 - DNA, 1000 bp, Homo Sapiens
ctaagatgtagtgctataaggaacctgaagactaccataccccatttgcatcagctctgacacggcaacagccgtggcggctgcagcctcgaaggatgctgcgctccagtccagagccaaagcccaaaggggcagctgcgccgacctccaccgaggctccgccccacaggccacaggccccgccttcctagcacgcgccggcctgacgagagccagggcgacaaccagtctctcgctacgtgtccccagcttccctgtttccgagcgcctctcaaggcgcacgctctggacttgttcagatgggggaagggaactggtctggaactccccactattcccgaggttcccacgcctccagatccggagaggccgtttcgctccagtggcctggcccccctgccccctcagcctagccgttcttgatcgtaagtgctgaaaattgtcatatagggatccagttttcacactactgacttcttgaaaccgcagcctcagaagcaccctcagtggaagagacattgcctctgccttggccagttcctcctcttgctttgcacaggactctgttgacttctgtagtcttgccttcatttcctccaggatctgctttgtggtttcttcttcaaggccaatatttgtaaataaccctgaaatctttttctgaacctccaccacattcctgcttaggattgcgttacttttctccagctttgctgtctctaattccagctccctcagggattcctcctgttcatctatgacatagttcaactcctcctcctctttggcttcttctagtgacaaggccagctttctttccaggacatcatccagtggattctgtccaacgtcttccatcatagcgtccagtcccctgcgtactgaaggcagtttcctaggcagaccaccggcacagcccagaccgcaggggcctgtgagcggacgaacctctgaagttatgtggctgctgtcccgagtggtgtacacgtttctcaccgca

SEQ ID NO: 346830 - DNA, 1000 bp, Homo Sapiens
tgcatgtgctcaatatacatccatttattaaagcatatgccagaggatcgcatcacactatgcatttagaggagtcattaacaaagcagtggcctaacagtttaacatgaattagctcacctcactggtctgtgatttcatactcagttgcagaatggttctgacagtcatgatactaagcacttctgtacttaacgtattagatcagcttgttcacaaagcacaatcataacaggctcttgtttctgcttctgtaagtagtccactaacagttatgaccataagttataattacaaagtactgttttacagccatatattttggcatagactctaaaaagtcaaatcataacaatacagaaaatgcacatattcataaactgttttatattcaaaaaccaacttagctatatttttaggtaccaagctgtattacattgttctcctactgcatttgatgcatttggggcttataaatacaaattacaaaattttaagcaatttcttccgacttaattttactattttttcactaagtggatgaaaacatgacttttggcatcagtacaatatatagtaatgctgcattcaatactaatcattgaatatttttaaaaataaagcattgaactgattatagagtcataactgtcagagggaagatattaacaatatagttacttacaggtattttcagtaaactttccatcccatttctaaaccattaatgactttttaaagaatgaaatatggtaaagccaagacataacactatatgacaaatgcattaacttaccatttttacaaatgtgatgtgatcttggcagttttagagaacaaagttttgtcaatatatatcaaacattgttaacaaactctagcattgctttatgtaagtttgctttaacagcatttcttcacagtgatatttcagaaaggttggaaactggtcagcagaaaatatttcccaccttttctattttaatgtgtatgcaaaaat

SEQ ID NO: 346831 - DNA, 1000 bp, Homo Sapiens
catgttccatttatttatttatttattggtggtcttgctgtggtgtccaggctggcctcaaactgctggactcaaaggatcctcctgcctcagcctcctgagtaactgtaattataggccaccactctaggctctacttcttggaacgcaaaaactaccgagagtctggaattttatcatggtccgaagaatacaggatggagtgaagccatctgtgtccatagcagagagagagatgaaatcgcgaaagtctgcagcttcactcctgagccagcgagaccacgaacccaccagaaggaagaaactccgaacacatccgaacatcagaaggaacaaactccagacgcgccaccttaagagctgtaacactcaccgcgagggcccatggcgtcattcttgaagtcagtgagaccaagaacccaccaattccggacacagtatgattccatttatgtgacattctgtaatcccagctgcttgggaggctgaggcaggagaatcgcttgaacctggggtggagatgcagtgagccaagattgcaccaatgtacttcagccctgctcaattgctgccttaatcccaggtcgcacattggaatgtgggaattcagcgtttacatttacccacacaggatcagccttcagctgctacgatcaacttcagtattttcatataatcacttttttctttccttagttcttgaattattaattccttgagaagagtccaatcagaggtagtctttcttcagtattttcggtaatcctaatttctgtgcaaaaaaatttctgttccattttaaccgtgcagaactttctgttatctaaaacacagtttctctatgagagttcagtgaaaattccccttcccaaactgattctatgaatgactgttagataagcttcaccactgcatgtagagggtgtaccaggaacccaagttagtagctctcctcaaagacccaacttttggagggggtcatcgtctggttcctggtatg

SEQ ID NO: 346832 - DNA, 1000 bp, Homo Sapiens; identical to SEQ ID NO: 246656

SEQ ID NO: 346833 - DNA, 1000 bp, Homo Sapiens
gcaccttgaaacaatttaataatgtattacattacagtagcatcacagaagcagtcaataatgccactttagacaaaaatcagtatttccattatgcattctgtgtataagaattcataaatcggtaaaagtcattctaagaaaacttggcaaatacagctttggactggaattggcatttctttgtctacttttccttcccctagattctttgttttaaactacagtattcatattttaaaatgttttaaattattttaagacgttaatatagcagttacatttttgaatagttatttgaaagtgactgtaagataaagttttagagaatctattatggatagggttgatttacattttcacattttctaaaaatcagctttggttttagaactgattgtttttcattttgggaaaacctaccaggtttaatcaattactttaaaaataattatcatattttgcagtctttaaataggtgttttgattctttactccctagagaaattcaaatttattcagttgaagtcacattttaaaattctatgttcctgctgaactctaaccttctaatgttgccttctaagcaaattaaaggctgccttatactgaatgaggtagagaacaaatacttggctgaatgaggtactgcaaaagactgcatgcactttgaagaaagacttgagttattgtcataggatttccattctctttagctttttcttaaacatatgacaaaatacctacacaaagagtcgtatttgaattaatatagtatatttatttttcagactgacattcatcttaaatatgccagtatgtgatttaatccacaggtacctgatgaacacattattgtcagattggttacagttgctaaacgctatctgaaggtcattcctattcatttatacgtgtcagggtaaaagtgaagcgatttgaactataaaaatacctttgaaataatttatcaatgtattagataagctcagtttcagaa

SEQ ID NO: 346834 - DNA, 1000 bp, Homo Sapiens
ctaggatcttgtgccctcattagtggcctggaaggacgcccagaccttccagttcatcaggggttgaagtgggcgatagttgttcaccatcatcttcttctcttcaccaagtgcagaaaacaggagagtacgaaatgcagagagttggcttggggccacttcaacgggctccttctggatgatccaggtgaccgactcggtcagcggcggggtggtgagcgagcccacataggtccagtaatcccagcaggtgggcagcagagcggaggggtcgaaggggcgcatggccgcctgcgcgtcatgggcgtggggctcggtaggtgctgccgctgctgctgccaaagctagaagagcccccacagggcatagagccattccctggatcccctggacctggtgggctgtttccagctccacaaggcagccaattccccggtagccctgactcttgcgaaggcagggaggagggggggccccagcagcctgaggagcttgcagcttgtccaggcatggagggtggggaccctcccatggggaagaaatgctccagaaccttccccaggaggaaaacagcccttgggtaaagggtccttcacagccagctcttttctttcccaccaagaggtgggaccacctggtgtggaaggtggaggctggctgggaaaacaacccctccccaggtttcctctggctgtggagccgcgcggaggaagaggatggggcgtcagagctctcagaaccgtggccttgtgaagtttctgagcaggcagatggggcggcggggggtgatctggtcccagtcccaggaggccgccccgaagccagcatcaaggcgaaggccacgtacagatcaaacggctccttgaaccgcgaggaagggcttgccccagctccatctggaccagcccgcaccattgttaacacaggttgaagcctcatccttccgcacatctgaggcttgcgttgactccttctgccctggaattcttttgtttgctgc

SEQ ID NO: 346835 - DNA, 1000 bp, Homo Sapiens; identical to SEQ ID NO: 161505

SEQ ID NO: 346836 - DNA, 1000 bp, Homo Sapiens
tatggggtgcatgagatgttttaatacaggcatgcaatgcataataatcacatcagggtaaatggggatccattacatcaagcatttatcctttgtgttacaaacaattcaattacactctttgagttatttaaaaatgtacaattggctgggcacagtggctctcacctgtcatcccagcactttgggaagctgaggcaagcgaatcacttgaggtcaggagtttgagaccagtctggccaacatggtgaaaccccgtctctactaaaaatacaaaaattagctgggcgtggtggcacttatctgtaatctcagctacttgggaggctggggcaggagaatcacttgagcccaggagttcgagactagcctgggcaatttagcaagaccccatctcaaaaacaaagctacagcttaaaagaaaatcagaccatgtcactctctgcttaaggccttcaagggtttcctcatgcattcaggatagaatccgaagtccttagaatgacccagagggactgacacagttgggcctggcctcatcccatggcagtctcctgctcgttcaattaggctgtgatgcactagtccctcccccacgtgctccccagatttatttcattttattttatatttttttgagacagggtcttgctctgctgcccagcccggagggcagtggtgtgatcatagctcactgcagcctcgaactgctgggctcaagctatgctcccacctcagcccctcaaaatatgatgattacaagcatgagctactgcacccagcccctagctttaaatatttaaagcatctaaacatagaagagttgaaaaagtggtataattgtcactcatacacctatcctgaaattcaataattaccattttgtcatattttctttgtctgtgtgcatgtgtgtattttgctgaaatgttaattaatttatttatttgagatggagtctcgctctaatgctcaggctgtctcttccttttattttatt

SEQ ID NO: 346837 - DNA, 1000 bp, Homo Sapiens
ctatagagattctctagtatgaattctcttacgttgagaaagggtcgagcatcgattaaataacttgccacattctttacatttgtagggtttctctccagtatgaattattcaatgtcgagtaaggcatgaactataaataaaggctttgccacattctttgcatttatagggtttttctccagtatgaattctctggtggacaaaaagacttgaggaacaggaaaaagatttaccacatgatttacatttgtaaagtttttctctagtatgaattctctgatgtttagttaggtatgacctacagttaaaggctttgctgcattccttacgtttgtagggtttctctccggtatgactacttcgatgtcgagtaaggcgtgaattacgataaaaggctttgccacattctttgcatttatagggtttttctccagtatgaattctctggtggacaataagacttgaggaatgagaaaaagatttgctatgtgatttacatttgtaaagtttttctccggtatgaattctccgatgtttagttaggtatgacctacagttaaaggctttgctgcattccttacatttgtagggtttctctccagcatgaattctctcgtgctgagtaagggctgaagacattttaaatgatttaccacattctttacatttgtaaggtttctctccagtatgaattctctgatgcacaagaagatttgaagaataagtaaaacatttgctacccactttacatttgtaaagtttttctccagtgtgaattctctgatgtctagtaaaatatgaactagaattgaaggctttgccacattctttacatttgtatggtttctctccagtatgaattatttgatgttgagtaaggtgtgaacgatggttaaaggctttttcatattctttacatttgtaaggtttctcttcattatggattattttatgttttcttagacttgacaatttactaaggattttctcaccgtta

SEQ ID NO: 346838 - DNA, 1000 bp, Homo Sapiens
tcaagtgctaatgttggtgctgggtcctagtgtaaagccaatttcccttatcatacagtaactgagcacaagttcacctactggtttcagctgattcaatgggcaaatgtgacacgtccgcatgtcagagaactgcacggtgattttgcccttcggggtgatgccagtcacggtgtcttctccaaactcatcgtgcacaatttggccgcccaggcacaggcgaccatcgatgcctccaatcacagccaggaccgccatgaggccccccacttcagggttctcggagtcggggaagtagtcctctaactgggccccttcagaaggccttcccacaaagctgtgggtgatggagcggagctgggagttgatgtacttgttgatgagcccattccactgagtcagggagtgcagcgtgcacagcagtgccaccaccacctccaccagtgtgctgctatgggtggcagtcagcaaggcctgcgggcgcaccctgcgccacctcggcatggactctctgagtaatggcacgtcagaggagcaggtactgagcaagctccccaagaagtcaaacagcttctccaccgggcatttcatgtccctcgcccttttggtcttgtcccatgacggaaggactgcttgcaacaaatgcacagctaagatctgcctctgcagcgaggcggcagtgaagggtgtgtgccctttcatgaccttcatgagcagcgtgatccactgcggggagctgagggcgctgcacacctgcggcgtgagagcgatgctccgcacaaaccccagcatgcaccagctccggtgttgctccctgtacaccagcctgtttggagaaggtgtcttgtccgtcgttccgctttccactaatatttgcagcagtccgcataaagtcttggtggcttcgctctgcatgatctcagcatgaactctggcaggcagacaaagagtctgcagtaagttaatagtgctggtaaacatcattgtagtggggtgaatg

SEQ ID NO: 346839 - DNA, 1000 bp, Homo Sapiens
gtgaataaataaaaatttatcattccatgcaaacacactcattttccacaaaagacaacagtttttacacaagcggcggtgtcccagtggtggccgtggcacgtgtggagcggccccgcagcggcgttctcatgggtggcgtcacagtggctccaggtcctcatccccgcatgcatactcgtacaggtccacggcgcccaggggtgagggcacctcgaagaagggcctctgggccagcggggactgcagcgcactcagcttctgctccacaggtctgagctcggcctcgaacctgcaacgaggggatggtgaagacgtggacagcggcgtggagcaggccctgggccctgttttccgagaaatgcaggctgctccgcagccaacctccagcacgagaaagtcccctgagccgaccttgagctccagccgctgaccccgcaacaggctcctggctgagaaagccggctccaccaacgctcccgggggaggggccagcggtgcaggtgaaaacccacccaggacgggacggagccccaggcatgaggtgcacagagaggaaccgggcgggctcatcttttccccaaagcgacacgacggtgactctcagagggcagcctctgagctgcaaggggcctgtgtttacacaactgggtcatggtgtctacacaggattggagaacaaacgggaccacggtttggacaaattctcccaaagcacagaagctcctagtggaggccaccacttccattctgaccagaacacacagcagtgcgaggactggacgcgcaccttccgttaaggtctcggcagtgacatcgggcgctactccggggaaaccagcgcggccaccgacaacacagtctcatagagatcctgcagggacacctctgctttccaagatgccccccacagcctggcactgagctcccactgccggagcaggcatggacacggtgaaggcagtcaaccccagtgtggtgctggccactggtcaggtgt

SEQ ID NO: 346840 - DNA, 1000 bp, Homo Sapiens
gtggctcacacctgtaatcccagcactttgagaggctgagttgggtggatcacttgagaccaggagtttgagcccagcctggccaacatggagaaaccccatctctactaaaaatacaaaaattagcctggcatgggggcacatgcctgtagtcccagctacttgggaggctgaggcaggagaatcgcttgaacccgggaggtggatgttgcagtgagccgagatcacaccactgcactccagcctgggcaacagagcaagacctctatctcaaacaacaacaaaaaagtcaaatagagctttaaacctgaatcatttacatctttactttataaaatgtaaaactacttttttacccaagacttaaaatatagaattatgtaacttctactttaaacaaaatgaaaaatgttttgagtatcaaacagtatattatctaccttgtagacagcatcttcatctaacactgccactgtgttagcaattcttaaatgacatcaaactagaagaaaagctgctcctacattgtttttatttaataagacaaatttggcactagactttttctagaaatagcactcatagtatatcgatataatagtaacatcttgttttaggttaatgaattcctattaggaagcagcactttgggacagtttttagtgacaccaatttaattctatcattatagtcctctgacctgccttaattccaggatcatctgaattctaggttaaggaatgattattagccaaacctggaaacaactacaaattgtactattataggtaaccccaatttaatagtgactaaaagtcataattgtcaccattaaaaatagacgtatttcatatcttcaacactattctatttacaatactttatataataaataacttatagcaatatagtaacaggcctcaaaaacgttcttttttcactaattcctagaggtttcttggttactttccttcataaaaacacatcaaatgtgagttta

SEQ ID NO: 346841 - DNA, 998 bp, Homo Sapiens
cctgtcaaattccaacagctggcattgttgttgttctacgaataagcacacacagaatcctcgtgaatagttctttgtctcttgctctagtaaatcataacctgcttgtagcttttttatgaaccttcaggaataactcttcagaggatgctaatacatcattaagattaaattgaacctcaaaggtgggttttttttccaaaatgataaaggccaccaacactgcaaggtttgccgtcattcccttgatctggtaagtgacaccgtcttcagggtttgtgtactcaaagatatgattaataaaacggtgaccaagacgtgtgacgtaatgctggtcatggacctgtggatgcaggaaataggccagaggcaccaggaatacatccttaacttcagcaggattcggctgggcctggaagttgtggtctattaaacccacaaatggagttatcaatgtatctgtacctgtaatcccagcactttgggaggctgaggtgggaggatcacttgaggccaggagctcgagaccagcctcatcaacatagcgagacccccatctatcaataagacatggcaccaggcagcagacaacttccacttggtgaggacggagacccacttcctcctgggcttcccggagagctgtggctgcatcatccatgtctgtagggtcacgcttacctccagggaagcaaacttctccaggggcccttcttagcttctctgaccggacggtgaacaacaaatggagttttccttctttagccaccaatggcaaaaggacggagtatttgttatatggcaagtgagaatatttgcctccaatatcatactttcttaagcgggccttagcatcatctagcaaactgtttctgactggctcctcgggaagaccaagtcgtgacattgccctggggaatgtttgtttccgggcggactcctcggagctgctcggtcggtcgcgcttgcgcagagcagctctgggcttgggagcggcc

SEQ ID NO: 346842 - DNA, 1000 bp, Homo Sapiens
aaatagagacagggtctctgttgcccaggccggaatgcagtgaggtaatcacagctcactgcagcctcgacctcccaggctcaagcaatcctcccacctcagcctccccagtagctgggaccacagatgtgcaccatcacactcagctaatttttgtattttttgtagagatggggtttcaccatgttgcccaggctggtcttgaactcctcggctcaagctatctgcccacctcagcttcccaaagtgcagtgattacaagtgtgagctgccatggctggccaaggctgtcttttaaaaagctaaagatgtgttggttcaagaccagtctgagcaatatggcgagacctcatttctactaaaaagaaaaaaaaaaaatcagctgggtgtggtggcccatgcctgtagtcatcccagctactcgaaaggctgaagtgggaggatcgcttgaacccagaaggttgaggttgcagtgagccttgattgtgccactgcactccggcctgggtgacagtgagactttgtctcaaaaagcctcggaaggagtggcctagggagatgagcaagcattttgtttctagtttctgaatggccctgtgcattgagagaggtcttcggcctcccagcctctctggctgaaggtggcgattctgcatggagtctctccaccacttggtggcattgctcacagtgacttcttacttctaaacactattgaattggagcaagtagatgatttgccacatttttcccagctagtttggaggctgaatatagaattttactggggcacaccagaatgtgtacgttggggagcagcgatccccgttttccttgataatgtgccgacagcttccttagtattgaaatcacaaagtcagaaatgcacacacctctatgatgagagatccatacaggagagagcaacaaaaagaggccttttaagtttgccagacttcctgaccagtgggaagcaagagagtagataagtgtgcaacag

SEQ ID NO: 346843 - DNA, 1000 bp, Homo Sapiens
ctaggcctgtcccatggtcccggggctgtccaggacacatttagaagggacatggacccagcagctctgtttgaaatcgtcatgggggaaccaagggccccccacatccaggtccgtcgggagctggagcatagagttccactgcaggaatctccaggaacgccgaggtcctccctgagccggggccaggctgggcatgccctgagtcccaggtgcccccagagagtggtctgctgccctgggctccccagaagcccccacatgttcctgggccttggcctcatggacagccccaccaggacagggtgtaggacgaggtggagaagcggaccaaatgggccgctggaaccgggctggtgggccgggaagggccttcctgtcccccttgcagagggtcttcccgccatgtgatgccagcacagacctgggtcctgaggaccctttctcgggttttgctgggggtggcaggtccccatgcttccttgttagtttagcgtcatcatccagggcccagatatggaagaactggtctcgaaaacgtgcccacaggccagacctggacatcttcatgtggcgctctagggacaaggtgggtatcaggccaggagagttccctccctctgggccagaacagagaatcatgagaacagtgtgaggaagctgcccttgggctagttggggtctgaccccagtgctccccaggccccactgggcacacgtggacttgctcctctgaaccttaaaggcagtgcttgttatcagcatcaacatctgttccccttccagcaaatatatgtcccacaggcacggggtgagcccgagagagatcacatgctcctgatggtcttggagcccctgaactgtcccgccatttgggctgtggaatctttgaggccacgacagggggtggccagaatagggtgggtgctgggcttcgtggtcgtctcctggaagtggggccgggccaggggacacgggatggggagatgctgccatctgg

SEQ ID NO: 346844 - DNA, 1000 bp, Homo Sapiens
tctgggtgacagagtgagactcatctcaagaaaaaacaaacaaaccaacaaacaaacaaacaaaaacgaaacaaacaaacaaacaaaaagatttgattctccttaggtaagatatttgaaagggccttttccaagtctttcattgtttgagctgttgtccaatagtaggattcagggtaaattacttgcgagtttaaatcatactggcagcttgtcttgccttcagggctcaagtagaagatctttgtcatgacacacacttttttagtgtaaccaccaatttttgccagcttctgttttaaagtttgggcagtttgtgtagaatagtctttaaactcctcatcctgtaccatgtggaaggtgtataggactggaggcttgtcctgggaaatcagaagagcatcacagaggactttgtggttctcttgcaagcccagatccaaagaccagctcctagagaagatcagtgagcccttattgacagagcccatttcttcacatattaattgcttaagtccttcatgttgtgagaacagatttctgcagaaggtttttggagcacaagttatcttttctgatagccctggaaggtgatatctcagtggctgaattttgaagttaatatattcacgaagaggataactctgggagacaggtgatgatgtacttgctggagagggcagttcctcacatactggttctgaatccaccatgaactggatccattccttctcggtcaactgcttaactctgttatctttcacgtgccaggaatcaggctttttagcaaacactgcacagcagaagcgttccactctgagtgcatacacatatccacaaagccttcctttatcatatactccaaggaatttgcataagtaatttatcgtccccttctccacacagaagtgatgcacaggcagtttcccaatggaattttttgttacttcttctaacttagtaagataactcttctctgctttaaagccaattacttctt

SEQ ID NO: 346845 - DNA, 1000 bp, Homo Sapiens
tcaaggaagtatgaaagggtattatcagcgagtgataacatatgtgaggacaaaggtcacatatacaggtctctgccactctcgggaatggcatgctacaactatctgaagacagggttcttgccagcacagctatttcctacacgtccggtgaggtgtttgcttcttctggatctccaatctgcatcggctacgctcatccaaccagggtagctcaaaattctgtggagttaattttggtaatggtcgtccaaatgctacaacaggcaagaagggggtaatcatcaaactttcaacatcatctggctcagggaaaaatgaggtaacctcaggctcagattcctgaattcctttctttttatacattctgagctgcagtcgctgtaaaattctttgttccctgatcctctgaatatcccatcttttccttctcttctcatccagctccagttttgcatgccgcttcgaaaacacactgtcatccaggttctccaaaaggtctgaaggatttgggtcccttagaggctctactgagtggtccctccaagaaggaacagccaagactgaagtttctcctgcaacacttgatggcatcagacaccttgctacagtctcctccttctttggagaggattcccgtaatggtaacggtgatgggggaggctggtgccaacgacacaaatacatttctgtggtggaaaggtacggcaaatcttctatctcacttgagaaggctttctccttgggatgggtgctgggtcccttttggggagtggagagtcttggtggggtgtccactgaagaccggggcttttctggggtttcttggctcctcaattcacgtttacaaacagtttcagataaggaaccacagggttcctctttaataggagagtgcttaggagtttttgttttgacttttgaaaattcaggagccagctttttaacaggagtctttctttctgtacttccaaatggggatttccttttatgtcccttt

SEQ ID NO: 346846 - DNA, 1000 bp, Homo Sapiens
tttttatatgagattaataaagatgtttgcaaaagatccgcgtcggctccatgcctgccgcagccacccgcagcctgtttccgctcagcaaacgctttacttgcacaagctcttcatagcaggcctctgcaaaccagcgggcgccggggagaagggctgcttcttcactagagttggcggcgagggagcccgcttcgagggggcggaggctttcgtggctggcccagtatccatctccgcgcgtgccgcctccgtcaccgcctgccgggtccccatttcttccgggcctgcccccgctcctcgcctgcccctcccctccaccagccagtgtcgccccatctgtctgtcctccgggcacttgtcccgcccctcactgcgtgtccctcccccgcccgccggctccctccaggttaggaatctgagagtacgggctgcgcgcacctggggcgggtgcctcatcaccccccgtgccaacttggagggcacaaagccccggcccagcagcttgaacagcatttccaagaacagggtctgcagtccctgggggtacagagctggctgttcctcacccggcttgggggcaaaaaaggtgaaggagggtgaggagggggcaccccctaagccaggcccacccctcctccaccagccttgcccctcacccatgcactgagccaagcggtggttgtcatcgaagacacccaggaagtcaatgaagcttacgattccatcaccatccaagtctgcctgccgcagagcctcgaacgtctcctgtggactcagctggatacccacattgcccagggcaactttcatgctgtgcatgtccacggtgcctgttgggctggagctgaagagtttgaagatatcctggaaggctctgagacccagcatctggacctgactcggctggatgggcagcttcacaaggccctgggtttctcttgccctcctcatggtgtgtgcagcctttgtggccatggctgctgctggctccatctgg

SEQ ID NO: 346847 - DNA, 1000 bp, Homo Sapiens
tcaggcgaaaacgttctgttgctggtacttgcgtcagcgagcacagcgggggcagcccttcttcaccacagcctggcagctctggtggaagacggtcttgcacttggcacacctgattgtggtgtcaaactcagaggggaagatgatgtcgtggtgctggcagatctggcagatgaagctgcgctgggtgcacaggtcgcagtggtagacatgctgggaggcaaattcaatcagggccttgaggaatccttcatatacctcatctgcgatctgccggaggtcagcaacacggaacctatgcggagactccaagagataattccggtggttgagcctcttgctgagctccttcagggcgccactccggcacaggcccaggtaatcccccaggagcttcagctgctcccggctcctcccaatgaggtgcatccgctccacatgctcgtacagagacgcgttcaccatctgcaggttgatgaggggctgggcccggatctgcgtcagaaacttcagggcctgcctgcagatcgggcgcttggtgaggtcccagttgtggatgatcctggccggaatcactgaggcatcgtcttggtggcagatgtcacagtaatagaggccagagaaggcacagagcttgggtcgtacaaaggagaagccgatctgccgggagcagcctgcgcagaagcagccttgggagtcaaggcctttctccatggggatggccaccaggtactgcagcaggaagccattctcccgggtggcaaatttcagcacctcctgacagttttcatccaggctcccgcccagggtcaccgcctcctcggctgtctccaagtaggatgccaggactttgcggaccagatccctccacagggcggcttcctcggcgtttccggcctgcagcttcaggacagccttggccgtgatgattttgaagaaggatgggcccccaaggctggtgtctggcaggatgtcccggatggtctccacgccgtggctg

SEQ ID NO: 346848 - DNA, 1000 bp, Homo Sapiens
gagatggagtcttgctctgtcgcccaggctggagtgcagtggtgcaatctcggctcactgcaagctctgcctcccaggttcacgccattctcctgcctcagcctcccaagtagctgggactccaggcacccaccaccatgcctggctaatttttttctgtatttttagtagagatggggtttcaccatgttagccaggatggtcttgatctcctgacctcgtgatccgcccgcctcggcctcccaaagtgctgggattacaggcgtgagccaccacacccagcctcttccctcctatcatttttgtgttctggagacagtagcatacttggccctgggtttgacataaaactagttctacatatagaaagctagggacaaaaatgagttctggacaaaactaaaggactgaataatcatgtgaacagccaactctcctacatatgctaagcactgatgaagtgtttcatatattcactcacctaaatttcacaacaatcctatgaaatgctaactagcatgatccccagtttaaaggtgaggaaattgagtcacaggcagaataacttgctctgggtcaccaagctaataaatagatctgggttcaaacccaggcagcctggctccggaatcaactcttaaccacttagagcatcatcactgagatcgggagagggacaggctgctgtaaagagggtgaagcgaaaatgggaggagagcagcggttaagcaatgatgtgatggggctaaataaaaatggatacaaaaacgagtaaaagaccagagtaaaaggaaaagactggagaaggggcctaacattaaaagagaatgaggagaagggagagttgacaagcaaaggtgaaagcagaaagtcagttgtccatatggcttggggagataaagaaggcccaggaaggcctccaggaaaaggctgccatgtcaggcaggacacagaggacaattgaggaaaagtgattcttacaagatggtgaaggtgccat

SEQ ID NO: 346849 - DNA, 1000 bp, Homo Sapiens
tcaggcaggccttgcctctgcttgtccctctcccatcttcctcacctctgaggccctgtcccaccgagccagccctggttccccgttggacagctgacccttgtgccagccactcctctgctccttggagaaggaaaagtcgggagcggcagccggctgcactatgtcggcaggaaagagtccggaacggcccccggcagagccaaactgccagcctggctccagggtggccaccggcagcagcttgatgaggtccccacggtggaagctgaggaggctgcagttgtcagtgatgtagctgcgcagggcgatgacatagccggagtccttcttaagctcattcaggaatagctcaaccagcgcctcgatggcccttgcccgggctgtgtgcagcaccagctgctcgctcttcagtgacagctccagggtggagccgccccggcactccacacccagcacctccgcaaagctgtatgagcagagaatcttcagctggtcggggcggaggccggggccttgggtcaccttgagcagtcgcagcccacggtgggacacggctaacagctgcacgtcgctgccactctcgcccgagacaggaaagaagcgggagaagtaattggcccagttgtcccgagcggccaccacgatgcgcttcttgacgctgtcttcggtggtggtgagagaatccaggtccacctccaagcctcccagcaggtctttcattttccgccgctcattctgggaaatccggatacaggactcggagaaggtgtcccgtaggatctgctcacagaggagcctcaggtagtagggatggctgaagttctcccgtgggtagaacacctccttgcgtaggaacaacttccagggcgtgccggtgtaggagaagcacacgctgccagagggcgcgagtagctgggtggagaccccctggtcctccacgggctgtgtcaagcaacgacgctctgctgaaagggtccctgggtcctcgggcagaggc

SEQ ID NO: 346850 - DNA, 982 bp, Homo Sapiens
ttttttttttttattttttatttttttaatttcataaacatttattcacagcccctttaaaagtatagcagtgaagtaaaaccccaattaaactactgcccattaacttgttacttaaaatttagacttaaaaaccaatagactttttttttagtttgtatgcaattacttttataaacacagtttaggttggaataaggaagtcctaattcatcatgttggagcttgccctcactgctgcaggctgttgaagtgagcctccttcaaggtctggttgatatgggagtaaagaccttggcatggtacatacccctcatgcaagaactggggaaagtttgcattgggttcagtaacaatctggtttaagttgctttctggtccacctgctctctctgggatattaaggcggctgctgctcctttcattatcactccatgaaaactgtgtcttgagaatcctgaaagatagggtttctcttattccttttgggctgggtggaatgatggttgccctctttactgccatttcttcttattttccgtacagggcagcctcccatagtcctgccctcggacgagtatccttttaaatacctagtcatttctatgtcttctttggagaaaggtcatttcaaacatttaccattctaaatcaagttattaacattttgttgttgttgaattttagaagtttatatcttttggaaattaacacctacgaaatatgtgattagaaaatatttttacacttttttgttatatgtatgtatgtatgcacatatattaccctatacaagacagggtcttgatatattttcatggctagtctcaaacttttggcctcaaatgatcgttctgacttggcctcctaaatttctagaattataggcatgagccagcatgcccaggtttcacccacttattaggtgacatttgtatgccactaaatttttccttgatgtgtagaatacttgaaggttaat

SEQ ID NO: 346851 - DNA, 1000 bp, Homo Sapiens
taaggtatgtatgaccttgtttattatctatcacagacatcaagatgatcatagttaataccaatttaagctttatagaatactcttttaggcccaatattgatatattaaatgaaggtatcagagaatcttgtatttatggcatcaggttataaagatctactcaaaaccatttttgtcaaagtttaagcactggaacaaaagtcaaattctttctaaatgagacacaaatgattcttgctaatagtacaaattttgtcccatgggcaatactattgtctttttcttttttaaaacaattatttcgattttttttttagattcagggaacacatgggcaggtttgtcagctgggtgtactgtgtgatgttgaggtttagggtatggatgatcctgtcacccaggtagtgagcagagtccccagtaggtagtttttcagctcttgttcccgctccccacctacctccccagtgtctgttattcccatgggtcctcaggtattactgttttcaagtttttttctttacatgaaactactgaaagcgaaagtatgtcatgcttataggttactctgtacatttatcattctattaataaacatcttaagtaattaagtagtatattaaggccataaaccaagtcattatctcctgtcaaaggactactgttattcaattgtctagaaaattcattttaggcaggatgcagtggctcacatctgtaatctcagcactttgggaggccgaggtgggtggatcatgaagtcaggagttcgagaccatcctgaccagcatggtgaaaccccgcctctactaaaaatacaaaaattagctgggcatggtggtgtgtgcctataatcccagctactcaggaggctgaggcaggagaattgcttgaacccaggaggcagaggttgcagtgagctgaaattgtgccattgcattccagcttgggtgacagagagaaactttgtcttaaaaaaaagtaaaattcattttaa

SEQ ID NO: 346852 - DNA, 1000 bp, Homo Sapiens
aaaatctccttatcatctacctggtaatatgaaaaacacaaatctttcattcattcctttcaactgatgaggaaaatgaggcatcgggagttagtaaaagtccacattgagatatgagacccacgactggctggacgcagtggctcacacctgtaatcccagcactttgggaggccgatgctggtggaacacctaaggtcaggagttcgggaccaggctggccaacatggtgaaacccccatctctactaaaaatacaaaaattagctgggtgtggtggcaggcacctgtaataccagctactagggaggctgaggcaggagaatcgcttgaacccaggaggtggagtttacagtgagccaaaatcacgccattgcactccagcctgggcaacaagagcaagactcttttcctggatacaggtcttgataggtctcttgatgtcatttcacttcagattcttctttagaaaacttggacaatagcatttgctgtcttgtccaaattgttaattcagcttaactatcattcagctcaggaagatgactcagggccttatccataccttgaagtttgctcttagcaagtaattgtttcagtatctatatcaaaaatggcttaagcctgcaacatgtttctgaatgattaacaaggtgatagtcagttcttcattgaatcctggatgttttatttttcttaataagaggaattcatatggatcaggatgtttgtctttctttgtatcggtgctcagctgagtctgcagtgcttcagaggcagctttcattttataaaaatctatgatttctccttccagttgttttttctcttcctcgagcttccttatctcctcctgttgaatcattttaagatgctcgaacttgtcctgcagctggctcagactcttgacgctgccctggctgccccaccactgcttctgcccgagagtcacgtgaggctgagagtaggggcaggggcagcagtggtgccagttggggggc

SEQ ID NO: 346853 - DNA, 848 bp, Homo Sapiens
gaaggatgcatttcattcccatgcttgctgtggggggggatacatgtgagggtccctatatctgtcacccagtgttttttcagtgggtggccttgggcgtccctgcaatcacacgtggctaggtcgcacagggtgctgtttggtgaccccagtgtgtgcctcaagacctcaaaattcagtcctgacccacttagcatcccagagcctcagtttccccagctggactggttgtggggaggagtccgtggacagagcccccaaagggtgcctggtccgtgctgagtgctggaagggtttggctttattgttgctgcctccatctgtgttgggagtttggggtagggtgtgtcccgccaggccggcgtggtctgtgagcctggagtatgccagctgtgtgcctctgtgtctcggccagtggcaggcagagcaggcccagccctggaggcccaggagagccagaccaagggcccctggtgggcgttgtctcctcagtccacggcccagcggagtcccaggagtctgagctgctctgctgggcctctctaggatcaggggccccctgcccgtggcccacgtggggtggtgggaggcagccggatcaggacctgctccggattccctgccgtgtccaccacacgcaggtttgggagccccaggaaggcctcagccgcgatgctcgtcatgtgaagcctgttggccctgaggaagagggcacgcaggcggggtgtgctgaggaaggcctcggggcccacgtggccgatgcggttgccctcgaggtgcagctcctctagggcctcaggcaggtccgggggcacaaaggacagctcattgtggctgaggtccagcat

SEQ ID NO: 346854 - DNA, 1000 bp, Homo Sapiens
ctatctctatggtatccttttcttacaccaggtctctattcctcatccctgggctcacaccagtgtggagtccttccccatgctccctggtctgtggcccagcattcgacgcatctcgtgcgtaaccccgtcccagtgccccaggccagccgacagtgtccggtgcattctggatgcaggcaggctgctctcccagcctccctccagggctgcaggtgctgtggcagtggccatggacccaaaggggtccccaggctctggacaggttgaatagggggtccgacgatggataccctgctgaggctgagctctggggctggccttggagacttcggcagggcgggcgaggtcgtcttcaaaggatggcggggacaactcatggagcccacggcgggcagcccgggcagcccggaggagagtgtgggtcagcacagccaccagaaccagggtgcccgagccgaggatggaagcagctgctgcgcctgtctcgatctcgaaaagtagcaaggcatagatggacagtgctgctaaatagacggagatcccacagcagaaaaggccaagggccacatgtctgaggaggcggcagtcgtagagaaaccagtcagacctcctggggccaggcccccgcgccagctcggcgcccaggtggccacagagcgcggcgagcagcaagcaggtgaaccccagcacgagcaccagcgcggccagcgcggcggccagcggcagcagcgtcccggccgcgtcctctggcagcccggggccggcgcccagctcctggcccagcccctcggcgcgcagcccccgcagctcggcgcggcccgcctgcagctgaaacagcagctgcgcgcccagcgccgccagcacggccgccgcgatgcccagcagggtcattgcagccagcacccggccgccgtaagaacgggccatggcgggggttcctgcgggccgggggaagagttgaggaattgaagtggttttagagggcaggggagttggg

SEQ ID NO: 346855 - DNA, 1000 bp, Homo Sapiens
ctagctaaagcctttgccatatttttcacactcatggggtttctctccaatatgaattttcttatgtttattaagaattgaggactggttaaaggctttgtcacattcttcacatttgtagggtttctctcctttgccacattcttcacatttgtagggtttctctccagcaggaattatcttatgtgtagtaaggtttaagtaccgtttaaaagcttttccacattctttagtaagggaagaggaccagtaaagccctttgccacattcttcacatttgtagaatttctcctcagtatgaattccaatatgaatgaccttatgtatctgtaagatcagctggaccaccagctggcagttgagggctgtacagtctgaattgccttttttcaactggggtgtggctaccataccgtgtctcttcatattccagggatcttttccttgctcctgacagttgatcagatctggcctagagaaaccaatacccaagaagaccaggtttctgtagttctctaaaatcactttcctatacaaatcctgttgagcagtgtccaggcattgccactcctccagagagaatttgatggccacatcccttagagtcacatgagacacaattaaaacaatgtgaatactttcacatttgtagggtttctctctagtatgaattatcttttgtttcataaggattaagagccagttaaaggatttgtagggtttctctttggtatgaattctcttatgtttagtaaggtttggggactggttaaaggctttgccacattcttcacatttgtagggtttctctccagtatgaattatcttatgtttcataagggttgaggactggttaaaagctttgccacattctttacatttgtagggtttctctccagtatgaattatcttatgtgtagtaagatgagaggacagaataaagcttttgccacattcttcacacttatagggtttctctccagtatgaatttttttatga

SEQ ID NO: 346856 - DNA, 1000 bp, Homo Sapiens
ttatttgtcagatttttctacagcatgaattttcttgtgtgtagtaaggtttgagcattggttaaaagctttgccacattctttacatttgtagggtttctctccagtatgaattaccttatgtttagtcagagttgaggaccaattaaaggctttgccacattcttcacatttgtagggtttctctccagtatgaattatcttatgttgagtaaggtttgagtattggtaaaaagctttgccacattcttcacatttgtagggtttctctccagcatgaattatcttatgtctagcaagtgtcgaggattggttaaaagctttgccacattctttacatttgtagggtttctctccagtatgaattttcttatgtgttgtaaggtgtgaggataggttaaaagctttgccacattcttcacatttgtagggtttctctccagtatgaattatcctatgttcagtaaggtttgaggaccgcttaaaagctttgccacattctttacatttgtagggtttctctccagtatgaattatcttatgtgtagtaagttgtgagaactggttaaaggctttgccacattcttcacatttgtagggtttctctccggtatgaattcttttatgtgtggtgaggtgtgaggatgtgttaaaggctttgccacattcttcacatttgtatggtttttctccagtatgaattctcttatgttgagtaagagttgaggacacgttaaaggctttgccacactcttcacatttgtaaggtttctctccagtatgaattctcttatgttgagtaagggttgaggacacattaaaggctttgccacattcttcacatttataaggtttatcaccagtatgaattctcttatgtttagtaaggttcgaggattggttaaaagctctgccacaatgttcacatatgtagggcttctctccagcatgaattatcttatgtctagtaagggttgatgattggttaaaagctttgcca

SEQ ID NO: 346857 - DNA, 1000 bp, Homo Sapiens
ctcgaagtactctgaggcttgtaggagggtaaaatagactattagactatggtgagctcaggtgattgatacccctgatgcgagtaatacggatgtgtttaggagtgggacttctaggggatttagcggggtgatgcctgttgggggccagtgtccccctagttggggggtgggagctaggctggagtggtaaaaggctcagaaaaatcctgcgaagaaaaaaacttctgaggtaataaataggattatcccgtatcgaaggcctttctggacaggtggtgtgtggtggccttggtatgtgctttctcgtgttacatcgcgccatcattggtatatggttagtgtgttggttagtaggcctagtatgaggagggttgtggagtggaagtgaaatcacatggctaggccggaggtcattaggagggctgagagggcccctgttaggggccatgggctgggttttactatatgataggcatgtgattggtgggtcattatgtgttgtcgtgcaggtagaggcttactagaagtgtaaaaacgtaggcttggattaaggcgacagcgatttctaggatagtcagtagaattagaattgtgaagatgataagtgtagagggaaggttaatagttgatattgctagtgtggcgcttccaattaggtgcatgagtaggtggcctgcagtaatgttagcggttaggcgtacggccagggctattggttgaatgagtaggctgatggtttcgataataactagtatagggataaggggtgtaggtgtgccttgtggtaagaagtgggctagggcatttttaatcttagagcgaaagcctataatcactgcgcccgctcataaggggatggccatggctaggtttatagatagttgggtggttggtgtaaatgagtgaggcaggagtccgaggaggttagttgtggcaataaaaatgattaaggatactagtataagagatcaggttcgtcccttagtgttgtgtatgg

SEQ ID NO: 346858 - DNA, 1000 bp, Homo Sapiens
agacagagtctcgctctgtcacccaggctggagtgcagtggcgtgattttggctcactgcaacctctgcctcccaggttgaagcgattcttctgccttaccctcccaagtatctgggactacaggcgcgtgccaccatgcccagctaattttttgtgattttaggagagatagggtttcactgtgttagctaggatggtctcgatctcctgacctcgtgatccgcccacctcagcctcccaaagtgctgggattacaggcatgagtcagcacgcccggccaagccaccccttctttaagagcttcaccatagctcatgcctggaatcccagcactttcggaaagagctttaccgccccctgatggagaagcgtgataaccaccacccaaggccatggggactgcagggtgagtggcatgccctggagccatgtagtcatagcctgcacctctgtcagaggaagccctgtctaggatttggtggctgagggcccctgttctgagggccactctggagagcatgccagtgccagcaatcataactcatggagcatttgctaagtaccagtcactatgttaagccctctatgcagatggtctcagctcatcctcaataccttccactatcctatccctatttctacaggtggggaaatgaaggcacagacaccttgggtagcatcaccagtaagcgaccaagattagattcaaacccaggcaatataaccccagagtcagtgttctagtaacttccctggccccttgcctttctacatgctcaggtctgcgtggcccttcatatggaaacttcttagcaaatgaaagtgctttcctgctgtgcattaggtcaacatttcccaaatgtggttgtggaccctctgcatcaggattaccagggctggaccagatttgggacctgggtatctgaatgtctaataaggaccacaacctccccaccacccctccagtcctcccagctgtccccagggcctccacaacag

SEQ ID NO: 346859 - DNA, 1000 bp, Homo Sapiens
agttatgttttcaaagaacatttaatcacagaaactttcaaaatattttgtacattgaatagatccgatcaccaagcagtgcatagagtaggatcctaactttgtaaaatatccatatgtcatatataaagaaagacaaatgtatatgtgccaagtaagaagactggaaggaattatgaacagtggttatctctgtgattgattatgggtgtttgtattctggtttttgttattttcaaaattttccccagcacacagataacattttcttacgtgagaaaaaattttttttaaaaagcagggggtggagagcggcaactgtttgctcaagacttttcagtaaggaaaggaacctggggtagaaagctcccccttcagctgcccatgagggcacaggtgggaggattgcttgagcccagcaggttgaggctgcagtgagccatgacactgccactgcactccagcctgggcgacaaagcaagaccatgtatgtctttaaaaaaaaaaaaaaaaaggcagccaggacctgatgccaggtcgacttggctccaaaacctgccctctccttttcacagcctcctttcctgtgaaataatagggaatttctctaaagcgcatcgcccggtccctatgtaaagacaaagaaacaggactttgcacgctcacctggcattagggccagcactgtgctgcagttgtgaagatggccactgggttgggggttgttctgcaccaaatggccccagactccctgtcagtggctacttgttgcagccagtgggcctgagctgaccacccttatttatgctcctgatgtgcagccttgaatgcatcctgggctgtgggaggcaaccaggccagaagatgaccttgatagctgagcactgacccttcatcagctgtgtgtccttacgacctcctccctttctgaggccttctgtatgtgatgtcatttggtgggtggctaaagttgctagaagtctggccaccaggaaggcca

SEQ ID NO: 346860 - DNA, 1000 bp, Homo Sapiens
tgtgggcaaacacctttattctgtgtcccaaattccccagggcaagagaaagaggttgctggggtcagtgctgcagggaccatacagactccaaccgcaagtctggcttggggacagacatgctgtgtttcttctggctgtggctggagatggctcaccagagggggtcagttggtcttcacctctaagtctacctcggagttggagagggaaggaagccgaactccagcgagggtgtggaaccctgtgacctgctcttgctcttggatctggtctctgaggcgctggatttctaggcgctgcatttcaatgatcctcccagtttcttcttgctcattcaaccttgcggtgggagctgtgctgagcatgtccctgctgggttctgtctctgaaacttcttgtggtcggactttcttggtcagtttcagagctgcttcaaggtcatagacttgggaccgagtgaacttcagctccctgcggagctcattaatttccttgatcagagagacattttcctgcatgatgcggacgtagtctgtgcggtgcagctcgccctccttgaccaccttcttcttgagagtggccaggttcctctccaggtgctcccgctgccgggtgtactcctgctgcaggtctgtgttcagccctgcgatctccaccatgtctgctcgctgcacgtacttctcaaagagacctcgaaccttctccttcagcagccgcggttcctgaatataggctacgcagttgtggaggtctgttttaaaccttttgaccagcgcttccaagtctcgctccttctgtctctctctgcgcatctcctgatcggtggctctcagtttctgccacaattctgtgatgttcagctccagttgagtgttctgcttatggaaattctccagttcagcttccatctgaggcagggttccccagagaagcaccttcctcacctgctttctgaagttgtataagtgaatctcgaccctctggggccactttagaa

SEQ ID NO: 346861 - DNA, 1000 bp, Homo Sapiens
acaaaagaaaaaggtttaatggactcacagttccacgtggctgcagaagcctcataatgatggtggaagacaaggaggagcaagtcacttcttacatgaatggcaacaggcaaaaagagagaatgagagccaagtgaaatgagtttccccttatcaaaccatcagatctcatgagacttattcactgccatgagaacagtatggggcaaactgcccccatgattcaattatctcccaccaggttcttcccacaacaagtgggaattattggagtacaatttaagatgagatttaggtggagacatagagccaaaccatatcattctgcccctgacccctcccaaatctcatgtcctcacatttcagaaccaatcatgccttcccagtagtcccccaaaggcttaacttatttcaatattaactgaaaagtcaacagtccaaagtcttgtctgagacaaggcaagtcccttccacctataaacctgtaaaatcaaaagcaagttaattacttcctagatacaaagggggtataggcattgggtaaatacagccattccaagtgggagaaattggccaaagcaaaggagttacaggccccatgcaagtccaaactccagcagggcagtcaaatcttaaagctccaaaatgatctcctttgactccatgtctcatatccaggtcatgctgatgcaagaggtgggttcccatggtcttgggcagctccatctctgtagctttgcagagtacagccaccttttccaggtgaagtgtgcaaattgtcagtggatctaccattctggggtctgaaggacagtggccctcttctcacagcttcactaggcagtgccccagtaggcactgtgtgtgggggctctgacccacatttcccttctgtgctagcagaggttctccacaagcaccctgcccctgcaacaaacttatgcctgggcatccaggcgtttccatatatcttctgaaatctaggtggaggttcccaaac

SEQ ID NO: 346862 - DNA, 1000 bp, Homo Sapiens
tcacttccaggttaatccaaaaagtggcttcactttctcataggccacacagccaacgcctactgcaggaagcacctttatgatgtttgaggtgaaacccctgtaaaatcccaattttccttctttggtatatatttcttgaatgagctgaatcatagaagttgtttttcctttttccactggggctgaagcctgcatgcgagttctaataaggttcacagagaaactggctaactgaccacaagtattagacaatgtactacatcccaccaaaatcattatcccaggattcacagagtttcctgcataattttctagccaaaaattcttcaaaatctcataaacagcaagatctatgccggcataaggtacaatgcctagcaagttaggagtataacctttgaaaaaggatctgacaccttcttgttttagaagcttcttgccacaatcaataatccctgaatactctccagttttacctatagccagtctggtctttagtacctccatggggtaaatacaggtctgggcagttacaccagccaatgagccaaatataaatctttcaagaattcctaaatgaacaccatcaaaactaagcaatttcttatactgttcataggccccaaccttgagtgctgtctctggtgcaatttttaaaacatttacaccatttcctcaccaaagggaaaaaatccctccttctttcaccaactgctcaaggccactaatcaatctcattttccttgactttaaactatgaacctgcatcatgactttcaagcggtctaaaggtgccgtgcatgtccgtgcaaccgcactagctattcctgctgacaccaaacgcttccaccaatctccagactgcttttcttgttcggtaaattcatctggaatagctatactctctcctatatcaattaaagtagaatgcttccagaaatgaatcatttcagtgatatttgttgcaggatgcagtaaaaagtagtacttccattca

SEQ ID NO: 346863 - DNA, 1000 bp, Homo Sapiens
taacattgcttttcatagagcagttttgaaacattcttttcgtagattctccaagtggacatttggagcgctttcaggcctgtggtggaaaaggaaatatcttcacataaaaactagagagaagcattgtcagaaacttctttgtgatgattgcatggaactcacggagttgaggattccttttgatacagcagtttggaaacacactttcggtggaatctgcaagcggatatgcggacctctttgaacatttcgatggaaaagggataatctttccataaaagctaaacggaagcatgctcaggaacttctttttgatgtttgcattcaactcacagagttgtactttccttttgatagagcagctttgaaaccctctctttctggcatctgcaaggggacatttggagggcttcgaggcctggggtggaaaaggaaatatcttctcataaaagctacatggaagcattctcagaaactgctttgtgatgattgcattcaagtcacagagttgaacattccctttgatagagccatttggaaacacacttttggtagaatctgaaaggggagatttggaccgctgtgaggcgggaatatcttcacgtaaaaagtaaacagaagcattttcagaaactcctttgtgaggcttgtgttcaactcccagagtagaacattgcttttcatagagcagttttgaaacattcctttcgtagggtctgcaagtggacattttgagcgctttcaggctgagttgaacattcgttttgatacagcagtttggaatcactctttcggtggaatctgcaagctgatatttggacctctttgaagatttcgatggaaaagggataatcttcccataaaagggagttgaagattccttttgatacagcagtttggaaacactctttcggtggaatctgcaggcggatatttggacctctttgaagatttcgatggaaaagggataatcttccgaaaagtttgtgatgattgc

SEQ ID NO: 346864 - DNA, 1000 bp, Homo Sapiens
gtgattaacttaactttaattcagacctgaatataacgagaaaatgagtgattatcttgaagttgacacagaatataccacatcccacgaattacttaaatttactttccaatgaaaaaaatcagccattggcgatataactacaacaactatggcagaaatgctttcaggctgaatattgctgcttcataaataagacaattttagcaactaaatccagacacaattagttggagatgacttccaaaatagatgaaactttagagatggaaaagtgatttggctgagggatgatactccctatgccatctgcatattggcaccctgctttggggtttgctgcagaaatggtgcaatcagatggatgtgaggaagcagttatggactggctcacaacttctcagagaagctacactggaatctttacagcttaccagtttctcaattatgtcagatacagaataatcaccaaaaaaggctttagaggggaaaaatactctaatattttgaattttaaaaatagatttaatttacctttcctacttaccttcctagatggcataatctacacttaaatgacatttaaaattagaaattatattaacttcagcattgttttgtgtcctaaagagatattgacaggtaaattcaaaagttgtatttgtgacttaatcttatttttacatggctaaaagtggcctatgctcttctgtggagttttcctcttaatttcttctattcttgatattaaacgggaggacatatagattgaattctcttttcctgaagaatttttatattccttatgaactttgacagagttgtcttctttcaaaggtccttatctttctaaactatctatcttcagttgtttagtataaagagagaaaattgtttcacattgaagcttttgctcctttttacaaggtattcttaatcgattaaatatcacaacagtgacaagacatacactaggtttcaaaaatattacatcatagga

SEQ ID NO: 346865 - DNA, 1000 bp, Homo Sapiens
gaatttattattattatactttaagttttagggtacatgtgtacaatgtgcaggttagttacatatgtatacatgtgccatgctggtgcactgcacccaccaactcgtcatctagcattaggtatatctcccagtgctatccctccccactccccccaccccacaacagtccctagagtgtgatgttccccttcctgtgtccatgtgttctcattgttcaattcccacctatgagtgagaatatgtggtgtttggttttttgttcttgcgatagtttactgagaatgatgatttccagtttcatccatgtccctacaaaggacgtgaactcatcattttttatggctgcatagtattccatggtgtatatgtgacacattttcttaatccagtctatcattgttggacgcttgggtggattccaagtctttgctattgtgaataatgccgcaataaacatacatgtgcatgtgtctttatagcagcatgatttatagtcctttgggtatatacccagtaatgggatggctgggtcaaatggtatttctagttctagatccctgaggaattgccacactgacttccacaatggttgaactagtttacagtcccagcaacagtgtaaaagtgttcctatttctccacatcctctccagcacctgttgtttcctgactttttaatgattgccattctaactggtgtcagatggtatctcattgtggttttgatttgcatttctctgatggccagtgatgctgagcatttcttcatgtgttttttggctgcataaatgtcttcttttgagaggtgtcgaacagacacttttctaaagaagacatacatgcagccaacaagcatacgaaaagaagctcaacatcaatgatcattagagaaacgcaaatcaaaaccccacaatgaaatgccatctcacaccagtcagaatggttaatattaaaaaataaaaaaataacagatgctggtgaagttgtggagaaaagg

SEQ ID NO: 346866 - DNA, 1000 bp, Homo Sapiens
ttagttgataatttttctcaaaatctgacagggcttgagcccgcagctgggcagcatgaagcatgaagcaaggaccttcaggtccttgcacttggacttagatgtgagctgactctcagaattctcactcctcatgacattctctttactttccccactgaaatgaactttcttcttaattactgaggatggaagattaagaagttctggactacttgccagagacaggaacttctgttcctttagcaagctgtaattcttcaacagattttctggtatagccagtctgtcctctgctagtctctcacaaacacaaagctcctgttctttctgctccaacctttcttctcctgctttgagagctcgctcttgctcctctaactgaatttcctttagtttcagctcactcaatacaaggctggaatccggcaatttttctggctctcctaattgtcgccctcttctctcaagatttcttctttgctcttctgcaaccaaatctgctattaaagggttctcgagaatttcttcaacagaaggtcgatggtaatcctttaacatcctcataataatttcattcaattcatcagagtaatggtatagaattcgcctgaatttgccttctctgattttcccagcgagttctttctggctaaaagctgtaaatggaggcattaatgcacgcgactcatacggcaagcagcccaatgaccagatatctggtttctcattgtaggacatgtgattcgtttgttcaggagacatgtaataaggtatgccaacaaatgtttttgcaaaactcgtgtcgtggtttaatattctggctagccccaaatctccaagcttgacgttttgcttgccatccaggaaaacactggctggtttcagaccccgacgcactacagtatgatcaccaccacttcgtagtgttgtgttggtccggtcaataatacgatcatagtaatgaacgatgtttggatttttcagtttacaaagcaaa

SEQ ID NO: 346867 - DNA, 282 bp, Homo Sapiens
ctatttcgtccagctgactctgggaatgtaatgctccgtgagtgtgtccaggtgtctgttgaagtcctccactctcggggtccacttgtccaggccgtgctgcttctcctcctcattctttttgttcattcccattgattccgggagtttagctttgtctttgtccttctttttcttcttccgcttggtcactctgagctctgcgacgcctttcagctttagaagtcctttttgtacctgctcgtaggcatccacgacactccccggtgctggccaattcat

SEQ ID NO: 346868 - DNA, 1000 bp, Homo Sapiens
ttctttcctagtccctttttagggagctatcccattttagtcatgatttttttattcctggggctgtatagggaggctgggatagtaatctctgcatgccattgttgtaacaagtctcggccccataaattgattggaatgaagtgatcacaggctgaaccgtactttcttgattatcagatcctggacaatgtaaaatcatggcactttgatacacttctgaggcagtacctatgccgatgacagaaacatcagcctgggtatccactaatccttcaaactctttccctgaatagtgactgtacacacgggtctatcctctgagacctgattagcccaataagcagcttttcctgcagggttggtacttccaaaccctcctgttctttcctttttgttttccccaattttaacataaggcaaaagcagtaattgagcaattctatcacctggattggcactccggggaacagtggagctgatcactaactgaattccccctttataatctgaataaattaccccagtatgaatttggactcccttcaaatttagacttgatctccctcaaaggcctaccctcccttctggcagcgggccatatacccctctaggaatcttttgtgggggctttccagggagtaaaaagaccatttgggtggaacataaatctactgcggtgctgcctgctgtggcgcgggacagctgttggattgttgtaattggctgactccctgaagtggtggtattttctgtaggggttgttgtccttgaaaaccctgaggaacaaacagtttaactgggaatgccccagtttgttggggggcctgaggctggcccctcttcctgtttccagacaatggttgcccatctttatcaaatttagaatgacattgattggcccaatgttttgcttttccacattttggacacaggccagatggctttttattttttgctgttaatagcttgatttattatattctgtttatttaagcct

SEQ ID NO: 346869 - DNA, 1000 bp, Homo Sapiens
ctagaatttctccatcttctccatgaaggtttggtctgggagcagtacctccacggtgtagctgatgcgtttagaatgaaccaggctgtaggtgttgtaaaacctcaggacatagctgccggcctggaggcaggtgagaatcccatcttcaggcaccatgtgggcattgtagcgctggctgggcagcacctctgtcatctccctagccctctgccgctcccccatcttggtcttcaggaaaaccccaaagccaatgtccccaccatctgaagcaaactgccacctgagcacacagcccgggaacaggatctcgttctccacctgcagggaggagccgcggcccacggacctcgtgtgctcatactgcagcctcacctgcttgcacaggtagtagctcttgggcacctcacccccgtagttgatcttggtcaggcacttggggttgccatcggggtcagtcatggtccccccaaactccacgggcagctggtcggggctgatgaattttgtcagctcctgcttccagttgtctggcagcccaccaggcagtgggccctcaacaccagttgggtgccctacacctccgagaatcaccaccttcctgcgtgtctcttcactcatgtaagacttgaccaggttgaaggctacggcgaatagcttgggggctctcacaacaattaaactcttcaagatctcagggtaatttgcttcaagtgctgagaaaaactcctggagaagctctattcctggcttccacagatccctcaggcccagcccttcgagaccaaaaatagctatgattttctccaccctcttccccagcttctgactctgcagctcacactcccgcaggagcagctcgcagctccggaagctgtccctgagcaactcctgtttggaggctgagagcaagaggcctttggggtccaggcttcccacaatgtggtaccagacagggctgccctcaccgtcgtggccgcatatgccgttagcgttgtac

SEQ ID NO: 346870 - DNA, 940 bp, Homo Sapiens
ttcccactttggaaacgtttattctgagcaccgggaaggggggcggcggcgggcgcctcactgggtgttgagcttcttagtgtactcctcgagagcgctcaggaagctgaccttgaagctctccagcacgggcagcaggccttggcggaggtcctcgagcgcgggcttggccttctcgctgagcgtgctcagatgctcggtggccttggcgtggtactcggccagtctggcgccgccgttctccttgagagcctcaaggcgcgcggccaagcgctggcgcagctcgtcgctgtagggggccagatgcgtgcgcagcgcgtccacatgggcgcgcgcgcggtcgcgcatctcctcgcccagtgggctcagcttctcttgcagctcgtgcagcttctggcgcgcgccctcttggagctctgcgcgcagcggctccaccttctggcggtagagctccatctcctcctgccacttcttctggaagtcgtccaggtagggctgcaccttggccttcacctcctccagatccttgctcatctcctgcctcaggccctctgtctccttttccaggttatcccagaactcctgggtcacagggccgagctgttcgcgcagcttgctgaaggtggaggtcacgctgtcccagttgtcaaggagctttaggtttagctgttttcccaaggcggagccttcaaactgggacacatagtctctgccgctgtctttgagcacatccacgtacacagtggccaggtccttcactcgatcccaggggctctgggggggttcatcttgctgccagaaatgccgagcctggctccccgtcaggaagagcacggccaaggtcagcaccgcagctttcatcctgaagggccgtgggggacccagaggcccggcctggggcaaggcctgaaccttgagctggggagccagagtgaccggg

SEQ ID NO: 346871 - DNA, 1000 bp, Homo Sapiens
aggctaaggcatgagaatcgcttgaaagctgggaggcggaggttgcggtgagccgagatcacaccactgcactccagcccaggcaacagagcaagactgtatacacacacacacgcacatgcacacgcacacacacacacgcacacacacaagtaggtaaattttattccagggatctctctatgccagtgctacttggtagtatgttgaatggcagcctcagcctcagctgggagcttgttagaaatgcaaattcttgaccaacccagatctactgaatcagaatctctaagggagggggtcaagcaagctgtttttaataagcccttcaggtgattcttatactgtacagccataccgcagggatattgtgggcttagttccatatcactgcagtaaactgaatatcacaatagagtgagtcacacacatttttttgtttcccattgcatataaaagttatgcgttttggccgggtgtgatgtgacaggcctgtagtcccagctacttgggaggatcacttgagctcaggagtttgaggctgcagtgagtcatgattgcactccagcctggatgacagcatgagaccccatttcttaaaaaaaaaaaaaaaaaaaaaaaagctgtgtttatactatactgtagtctataaaatgtgtaatagaattgtctaaaaaacatacataccttaattaaaattatttattgctaaaaatgctaacgatcatctcagctttcagcaagtcgtaatctttttgctggtagagggtcttgccacaatgttgatgggtgctgaccaatcagggtagtagttactgaaggttggggtggctatcgcaatttcataagataataatgaagtttgctgcattagttgactctccctttcataaaagatgtctctatagcacatgatgctatttgatagcattttactcacagtatgacttctttcaaaattggagtcagtcctctcaaaccctgctttatcaattaagct

SEQ ID NO: 346872 - DNA, 1000 bp, Homo Sapiens
tcaaatgactccataatgagaatcattactctgatttaaacaagtaacctgtaaatggatttcttttaatttttctactgcctgcattgccctttcatctagctctgatttatattcttgtagtttactaagttctaccatactgttttccatatgtgtcttaagatttaatatttcttcttccaacatcttttgattctcctcaagtttttcacattcttgttgtacttttttcatagataataactcctgttggataacttgattgtctttagacaaattgacacattttgaagatacagcttcctcctctgccataagatcatcaaattgacttttcacttgaaataatttcttctttggggcctgtgtctcatccaaattaatgtgataatgtgatataccttccagtggagactctaacatagttaatttttttaggctgtcagctgcttcttgttgaagttgtctcacaattactactctttctgctttctctctctcatattgaaagagactttcttttaaatgatcacattcattcattagcttcttatttttctcttctagcacgaggtctttccactctcaataaagcctctttggatattagttactatctctttatgatactctttctgatgaacatcatctagttgctgttcaatgcacggattttcatgttggaattgacatatcctctcttctacacagctccactttccagtggaattacccactttagcttctgcattttgatacatctctttcatttcctttatttgctgctgtgtttggcttaggtcgttttgtacagtttctgaagccaatgacttttttctgagagtatctcttgtcttacggaacttatcttttaaggtattgaatttattttgtgttttagaaagttgttcagtaagaaactcattcttatcttctacttcggaaatatcagaactcatttttacttgtacggaaacatcttgcgttctctctaaag

SEQ ID NO: 346873 - DNA, 1000 bp, Homo Sapiens
atccaataatgaaacggctttaatgtgtacatttttatatcatataaaaatccataaaatattttataactttgaaaggtaataccataatttatacactcaaaaaaaaaaacttctccactttataataaagcaagccccaaacccccaagctggaagaacatatatccaaagaaaacaaaacatttctagatgttgtaaaatgttttgaaatatgaaagtcaaaaattttcttttaagtttccgtaacacatttgtttcagataaggatgaagttgtttaatccttgcttttcttgacaaaccaatcctgattggcctactgcatgtcttaagcggtcgtactcttgaaatgccatgtggaaagtgactacctcctctcaataaataattaaattcttctttacattcatcagggagaaaagcaggtcttttaggtaaaggtgtttcacaatctttctcagaagtagagtaaagtaattcttcctctgatctacttggataacaactctcattaggaacttcctgttctccattattgggtacagttttccatttaaataaactttggtgacttttgcccatattaggacctgctatagtatcatggaacgaggaagatgcacgtattttgttgaccacaaccattttcaaatctttttctatctccatttttaccttctcagcatcattttctccaaagtaattttcttgcccattgtttgtttccacagtgcttagaagttcattttccctactaatttcatgaaacatacgaagttcttcaagtactaagtcaaattttctcttcatctcaaaatcttttactattgtcagagcttctgttgataaatatttagcagctaagtcctgaaaacattcatcattcccttcactcagaccagtttcaaattgatgattaatatataatgcagagtcattctttctgtgaaaatcctttgaattagctatctccctttctggcaaaatactctcatatt

SEQ ID NO: 346874 - DNA, 1000 bp, Homo Sapiens
tcagccgctttgaatatatttctttatcacgacgcagccgtgtctgaacacagggcagggcatgtgggggaggagggtccatgtgttggttgtgggctcgtaggcctccatgttgcccagcgcgggcccttcactgctgacaatacctccagttgcataaatcttgccatcaagcaccacagcactgcagaactggcgagagtggttcatgtttgggcccgccttaatgtttcctttctcagggtcgtagatggtggtagctctggcataagccccgcccaggatgaaaacgaagccattgagcgtgacagcgggggcatacttgttgtcaatcattggggactcgatgaagctccacgtgttggtctgaggaacgtaagactggaggacgccggcagctcggcctgcctcgttcaccccaccaaacacgtagatcttgccgccacacactgtggctgcagcagagtgtactgccttgggcagagggccaccgcctcccattggttggtgatggtgtcgtacactgtgcccatgctgaactttcacagccagaaggagggccttgccccccagggaaggcccatacaggcaacccctggtcttggagaactgctccaggaccctctccacgtggtccacgttgcctgccacgccaagtcccccgagggtgtaaatcttcccatcgtagacgaggctattgtgccgacagcgggggactgtcattctggagacgaggttccagttatcaagcagggacatgtagcaccagacatcagccagcgtcacccctgattccatcccacctgagaggtagatgttgtcccctgcactcactacactgaagaactcgcggtcatagaagggcagcgaggccaaggggtaccacttgttgttctgcgggttccagcaggtgacggccaccagcgagcgctgggtcatccccaccatctgacggcccccaaccaagacgatgacctcagccacacctgcagggacatgg

SEQ ID NO: 346875 - DNA, 1000 bp, Homo Sapiens
catggtcatggctaaagattttattccaagcaagccaggctggtcacgacccaggatctcaggcatcaggctctgctctgaactaaaagtctcatgctctgaactcaaagtagcagtctctctttttccgctcctgtggagagaccctcttccctgatgggaaggtctggtaggtcttcaggttctcgggggctagtcttaaaaggtgccacttcttctttgggcacagaggaggcctaggggtgaggatgggactggtgttatgcagtgtgccagggaaggaaggtggtgcgtgcccacccacagccccacgtgcccactttccagctcaagctgacctgccggctactcgtcagtttaacacctgataagtccccctggacttggggtgggaataacctgtatttacataatggcacagtggttaagagtgaggacacagatgtcagacagacctgggacggactctggtcctaactcctgctagaagtgtgcatatttaagaatggcccagtggtggtatccccctcttagctttgacttgaggaataaatgcagtaatgcatgtgaagctctggacaaggagtaaacacacaacaaatgttctaagaaatggtgatggtgctgatggaggggattccgggagggaggggcttgccccaggcctgtcactgaccctcttctcccaaccacctggttggccctttgcgttcgttgtgaaactgtcagcagcagtgcaagtggccaggcaacctgaagaaggaacagagttgagatgtcccgctctccccacagtgatggggatggggggcagatcctggccagagccatctcaagaggatacctgtccccaggagagtcccactatactctagggatggactggctcagagccattccaagattagagagagcccccgagtcctagaggtggtgatgggagatgctgcttcctttccaagctctgcctccaaccatccaggccacgcagcacaagttc

SEQ ID NO: 346876 - DNA, 1000 bp, Homo Sapiens
tcagaactctgaacactgaaaggtgggagtaggctccccagccaatgctttgtcccagcaaaggcccaggtagatgatcatcatgggaggggtagggggagcagcaagagaactcacctctgcagcatcccaagcaccttggacctctttcaggagcctcacccgggacctgcagtttcgggcctgcaaagcgttctgctgcaggctctgcaggggacccccaggcaagctgctgagctgctgttggctccaggcagaagcactcctgttgttggcgagttctgtgtaagctgttctctcctcacagccgaagacattagagagcaaattgggtactgctacagaaatgggctcccaggggatgctcaggaaacacttgctgagcaacatgtaggccagtgatgtgggtgctgagtctgcagccttgaacatcggaaggcgtttagagctggtggctgacagtgggcccacttctccaacggtgtgtgatactaagggtgaaggagtggagggggctggcctggggtcccgcagcctgggccaccagggctgcttgtgtgtgtgctgctgctgctgctggctgcacagcttctgcagagctgcctcttgctgttgctgccaatgacccaaggggtctcgatagctctcttctctttcatttctgttggatttggtagcctctctgtcctcaggacactctggcttctggaggtatatccctttgccatcttgggttaagttttggaagacatcctccatgttctctacacgcagcatcaagtggatgaaactgacaaagtccatctggaggcgggggccgccgtagcggatgagcatcagctgacagacgtcatcactgagcatgattcctgcctccctcatggcagcgtgcagctgctcccagttcaggtatcctgacccacggtcttgcttgtggaaaaccttctgagagagcttcagctgcttccacaggtccctgaattcctggatgctcatagta

SEQ ID NO: 346877 - DNA, 1000 bp, Homo Sapiens
tttttttttttttgagacagagtctttctccgtcacccaggctggagtacagtggtgcagtggtgcgatctcggctcactgcaacctttgactcccaggttcaagcaattcctctgcctcagtctcctgagtagctgggattacaggtgcctgccaccaagtccagctaatttttttgtatttttagtagagacagggtttcactgtattagccaggatggtctcgatctcctgacctcgtgatccacccgcctcagcctcccaaagtgctgggattggaggcatgagccaccatgcctggtccattgtatttgttttttaacagctttactgagatgtaactcacataccatacacttcattcatttaaagtgtacaattcaatgctttttagtatatttacagagctgtgcaatcatcaccacaatcaactttagaacatttttatcacttccaaaagaaaccccatccccattagcagacactaccattctcctgaacccccacccctaagcaaccactaagtgttttgtctttatagatttgtctattctggatattttatacaaacggaatcatacagtatgtggtcctttgtgactggcttctttcatttagtatgttttcaagatttatgcacattgtagtatatattagtacttcattccttcttattgccaaatatgtcattgtatatactacattttatttattattaatcaattaatggacttacagattgatcactttctactttttggctattatgaatggtgctgctatgaatattcatgtacaagtttttgtgaaggtacatttttgtttatcttcttgggtatatacctaggagtggagttgccaactggttccatttgaccttacctaattttctgggttaacactcctatattgtgtttatgtgcgtgcatgtgtgtgtgtgtgtgtgtgtgtgtgtgtgtgtgtgtgtatggcagaaagacacacagagagagacagaaaa

SEQ ID NO: 346878 - DNA, 1000 bp, Homo Sapiens
tcacatcaccattggctgtggatttccaagaagcaaaggagccaatctcagcaaagctcgcactggcatttttagctgcttaaatttgaagagcagttcagcaaagcttgtgctcccttctagtcctataggtggcaggtgctgtggagctggcacagagtggtagacgaggaagcaggccagcatgctcagctgtgattcctccaagggctgcccgctgaggtaggcgtgcacacacatatcacccccgacttgtagccactggtccagggtattatcaatggtgcacttcacaacagggaggaattccgagttcataaagagcccccgcttagggtggttctgcagccgctcctgatggcttcgggagctgaaaaactctaacaccaactttatctgccaaagttcagaagtctcagacatttctcttctcccaagtcttcttatagcctgatccattgctatgtatgcaggcaacatctctgaggtctcctgggtaacacattcatagagtactgaagaaaagagatccagaatttcctgtttctgacccatgttcacagttggcttgcagaaatattcagcaaatgacagaagtgctggatcagaagtgaatgctgagattgtttctggcttgaaagcccgggcttcagagttcctgttagcaacagtctgagccaacaaactttgccatcccattggatcttctttgtaggagagctgacccgcccggagtttaacatataaaaccccatccttggaaaggatggacttcaagtgttgtgttcctttgcttaaatctatgagcagttcccagtatcttgggccttttactttaatctgctttaaaagatggagttctggaagaagggtaggagccatcaattcttctttggtttgttcataccactgagtgcccttgtaggtaacttctaagagggcatagcagggcgtgtttgtgtccacatccacaggcactagaagcctgggctccgcggcc

SEQ ID NO: 346879 - DNA, 553 bp, Homo Sapiens
ctaaaactgagtggccacattagctgtctgtaaaggaagcagctggtaaaatctagtaaacactgatggtcttgttgaggtttttgtttcatgttgaatcactgtgggaggtaagttataatcctgctgacagtaataaactgcaaaatcttcaggctgcaggctgctgatggtgagagtgaagtctgtcccagacccactgccactgaacctggctgggatgccagtggccctggtggatgcaccatagatgaggagcctgggagcctgcccaggtttctgctggtaccaggataagtagctgctgctaacactctgactggccctgcaggagagggtggctctttcccctggagacaaagacagggtggctggagactgtgtcattacaatttctccggtggtatctgggagccagagtagcaggaggaagagaagctgtgctggggcttccatggttccgtctgggtcctaactgagcagttcctccccagggctctgacccaggcattgatatgggccctggaaggtagggcagctgggagggacatgc

SEQ ID NO: 346880 - DNA, 1000 bp, Homo Sapiens
gtatttttgtagagctggggtttctccaagttggccaggctggtcttgaactcctgaccttgggtgatctgcttgtcttggtctcccaaagtgctgggattacaggcatgagccactgctcctggcctcaggcatggttttctacaggcaattttttgttctttattaatctttcaccttataaaagggaacagtctgtaaatagcatttataagcatacttagtaatacagtccctatgatcatatggaaacaaataaatgaaagctggtgtaatggtaaatgtgattcagtctcccttgggtctgggccttttgggtttgggtccctctgtgcggccaaggcaggtcagttgcagagagatggtccagaccttgccaaatggtttctatatgaggcttctgggtcaacactccctttcaataaagacctgggctatgatgactccagccgtgttctgcgccacagtgggtggagtgctcacagtgggtcctcgggccatgggagaccccattaaatacactgaacaacatgccatcaaagcacttcccatctgacactccccagggcccatagaaagccacagcagcatcacagcctttgccagcacaaagcccagtgtcctttcggtttatctgtgtgtatgagtacacacacttaggctcgcctgtgcacacactcacaccatagtgtacactgtccacagtggcactgcctgctacttagggctgtgcctcttatcaagtcttatttcaggctggctcagcatgaggaaattatgtatgcaacactgagtttcaactgagtcactggaaaattactcaaatcaattcaggtagtgtgtgtttttcttttccctgtttctttcaaaaacaacctccagaggagtttttaaccacttatttaaaatgttaatgaaggaacctgtgagtgcagaggcacagaaacgagcagctgactcaagttattccaatgcataagcaagttccaaatgcactgag

SEQ ID NO: 346881 - DNA, 1000 bp, Homo Sapiens
agtgttaataagaatgaaaaatatgtacaatatgcaattactattaaatataatttgcccatagttgcacactgaattcattatcatggcagttaagtatcagagcttctggtttctcactcttcattcatgtattcagcaaccatgtgctaaggtactaggacaagcactggaattacaagataaagatgatacagtccacccctcaacaactgtatgctataatctgaaaaaacaaacaggcaattcccgtacagagtcatacatacaatgacaggcataagacagcacttattggaagacatagaagggatactagcccaggtttgtgtcaatattgtaggctttttggtagaggcaattcataggttgatatctgaaggggaaggaaaacacatgtaggatagagggaagaagtaaatgcaaacagctggaggtgaagacgatcactgtggagctccatgtagtctagtttggctggatgcttcatctagctctcaaacacctgcagcatcaaacttgaatgctgcaggattttctcaaaccgctcaatttgttcatcctgttttttaataatttttctcatcatgacattttctacttcaagcttttgtgcgtcgccttccatctccttagtacatcttatagtagctgtaagttgatcctgtatttcttgaaattgacttctcatctggtctaatttcttccttgaatcctgcatcccattttctaaatagatgcagtgacgcgatgaagcatccagcaaagcttttgttgctgatcgtttgtttaagacatcatcttgtttttgttgaagctgtctcacagctacttctctttctgctttctctttttcatattggcattttttttctttcgaatgattcaattcattcaccaacattttattgtcttcttctagtaagagacggtgctttctgcactcagcttgaaggttttctactctagcatcacatctggcttgaatattaagtattgc

SEQ ID NO: 346882 - DNA, 726 bp, Homo Sapiens
gccccagacagaccctggctgtgtggccttgggtaggtcactgtcctctgcaccgcatggtctcaaggggaaccagatccccactcgacataccttcccatcagattttaaccctccctactcaggagaccttcagcaacagaagggcatctgtggacaggttcttcgggtggggaggtggaagggatgtgatggtgtaagaggaaaagggaagagaggaacacctgccgcattaggaagaaggggctgaggcagggagggagcgcgccatgctcactcaccgtacttgctggagagcaggaaggggacctccacgacaccactaccacccatgggccatttgttgctggttgctgacagcagtcggaagggactcggccggatgatgtccccctcgatgaggaagctgctctctggggtttcttccaggatgagcccttggttaattgcaggaatgtccttgtccccggaggcctgggttccctcaggggtgaggccatctgggaagctggtaccacaggctcctgcgcagctggaggccaggggcgctcctaggatcacacctggtccagacagacaggggcatacacagatgcctggagcacccaccggtgagaccagacagcaggacatggggtgggtgtgggggatcagacggtaagactcagtccctggcaaggagagcagacccagcacccaaggccagagaccccctacaccctccat

SEQ ID NO: 346883 - DNA, 1000 bp, Homo Sapiens
catctcaaaaagaaaaaagaaagaaagaaatgctaggggaaaatgttttaactagtcattcttcccagtagctaatgaagctgacttttaaaaagaaggctgtgagctttgcagatgctgctgccgcccagggccccctgcttccagccatggtcaaccccaccatgtttttccacattgctgtcgatggcgagcccttgggctgtgtctccttcgaggtaaggggcctggaaagcaagaagtgactgctcatctaatccataaaactatgttaacagattggagctgtttgcagacaaggttccaaagacagcagaaaatttccatgctctgagcactggagagtgtcagagtggtgacttcacacgccatacagcattggtggcaagtccatctgcagggagaaatttgatgacaagaacttcatcctgaagcatacgggtcctggcatcttgtccatggcaaatgctggacccagcgtgaacgtttcccagttttttatctgccctgccaagatgccaagacagagtggttggattgcaagcatgtggtctttggcaaggtgaaagatggcatgaatattgtggaggtcatggagcacttggggtccaagaatggcaagatcagcaatcagcaagaagatcaccattgctgactggacaactgcaataaatttgacgggtgtttctcttaaaaaaaaaaaaaaaatactgtgacagaccaaggtaaattgtttttgataattacagaagtgtgatttcttaatcagcagctgtcaaacatagtgttccttaatttaaaagcttgaacactaaattataaattggagaggttggaataattacggtcatatctctagaaacacaagtctttagtagcaaaaaagaaattagcaagagaagaaaactgttcagtactttgaaaggaaaaagttttcagtgatagtttttttagatgaaaattaacatgataaagaagtgacaggccaggtgtggtggtt

SEQ ID NO: 346884 - DNA, 1000 bp, Homo Sapiens
taaacatatttaatagaaatattaaaataatcattacacttcctctcattgcagaaaccatgaaagaatatgccttttgtaatcaattttttatcatgcaaaaaagtattttgttatgacatttgtaagtggagactatatttcaaaacaagtttatacagacttcaaaaggtctcaagtcaaagagaaagtgaaatatatttaaatatgattagttacatctaatgcagctggcatactcatattcacagtttataaagtaaaaaaactaaactcttcatgtcggctctgaaatagatgcattttcattcatacattcgctagttaggtctgttcttctaaggaggaaagacgagacatatgagatattttttaaagaacaaactcaacatatcagcagcaaatttcagttaaactaaattggaaaccaatgttctgtgtaaccaaagtgcaaagtcagttccccagctcagaaagaaaattaagagtataaactgaaggcttaagagaacttcagagagcatactatgtgattaatacataaatattaaaaattatccaatttttgatttaagaacaacacagtttggatctagtcattaaaacatatgcagaggtgtcaaaggcaagtaacactaccacctaaggttattcagaggaactgtgaagatgtagcacggacctctaaggtgtctaaaatcccttctgatggaaagcttatggaacactatctgccaaaaacactgaaagcaccacttttatatttagatccaatgctgagtgatatagtcactgttgggataggtttttatttgggaaaatggagaggattctcaaaacagattcatggcttgcatgcagtgacaccctatcaagagcctggaaagacaccatgaaatcacctcaactcaagtggtgggcccacctactcatagtcagtgttacattagccagctctagggctctgacaacataatgagttttgagatagtatacttta

SEQ ID NO: 346885 - DNA, 1000 bp, Homo Sapiens
ggttatttcatttattcaatgtagtaacatgtttaaacctctcccgtcctggaaaaaaaaaaaagtcctacatttaaccctatctccctctttagcttaaagtcatctgtaatctttcttgccatttatttactccatgtcccaggttgaacagtatccacacacccccaaaacttcatgttctccctaggaatcttagaatgtgactttatttggaaatagggtggttgcagatgtaattagttaggagtggacccttaatccactatgactggtgtcggtgtccttagaagaagaatagagggaacgcagaggcacccacagagaggaggccatgtgatgatgggggcggaaactggggtggtgtatctacaagccaaggaatgtcagggcttgcaggaaaccccaggagcgaatggaaaggcatggagcagattcttcctagcatcttcagagagagcatggtgctgccaacacctcgttttgaacttctagcttccaaaactttccccactcatttctgtacagcttcccatgtgcgttgttttccagctgatcagaacactcttccatctctattgcagcacagatcacactgcattataaaggaccatctcctgtctctctgtccatctttcagagtttgctgtattgatcttagtgacgtcagcacgtggcactcagctagacaaagaaagcaggctcaataaaggctggtagaattaagtaaagaattgtataaaggcattaaatagagatggggtacaaatatgtcccaggctgcctgggatagtcctggtttaggccatggtcctgatataattactaacaacaccctctttcactgtcaaaaatatctcctttggacaatacattataaggtcactctaggtattagagctgtgattctcaccctatcaggcccaattttctctttgcttaacagctattttagaataccctatgcactatctttaaatgggattgataggcaatagaa

SEQ ID NO: 346886 - DNA, 1000 bp, Homo Sapiens
tcaaggccagcccacacccccggacgcactggacaccctcccgggcgccggtggaggaggctgagtagggcaggcaaggtctctgcctgcagccacaccaacccagccgctatcctcccagcggggctgggcagagcatcgggaggactgcccgggtcgcggaagggcgtgcgctggattccaggcgaggagctgctgtgcgaggcccgcaggcgggctcaggcgggagtggctatgggccgtgggctgcgagggcagagaactttggaaagcgatttggggatggcagctgtgtggccacaccgcgggagcccttgagatggctggctgcagggcggctatcgggtggggggaagtgatttctggcagagctcctgggccttgtgcgggggtgctcgtaggtgatgagggcttgagcccgcagctgggcagcatgaagcatgaagcaaggaccttcaggtccttgcacttggacttagatgtgagctgactctcagaattctcactcctcatgacattctctttactttccccactgaaatgacctttcttcttaattactgaggatggaagactaagaagttctggactacttgccagagacaggaacttctttagcaagctgtaattcttcaacagattttctgctctagccagtctgtcctctgctagtctctcacggacacaaaactcctgttctttctgctccaatctttcttctcttgctttgagagctcgctctcgctcctctaactgaatttcctttagtttcagctcactcaatacagggctggaatcctgcaatttttctggctctcctaattgtcgccctcttctctcaagatttcttcttcgttcttctgcaaccaaatctgctattaaagggttctcgagaatttcttcaacagaaggtcgatggtaatcctttaacatcctcataataatttcattcaattcgtcagagtcacggtatagaatttgcctgaatttgccttctctg

SEQ ID NO: 346887 - DNA, 1000 bp, Homo Sapiens
tcgtcatttcatttttaatttaggtttgttttatttaagtttaatgctaattccatgctgtgtttcagtaagaacaataaagattctgtatctgtggttccagtcagatatccaggagtacaaattagcttcaagttacacatactgaataaaagagattgagcgagcgaaggaggggaggaatgaggggaaggaggtagtgggagggggaaggagaagaaacaaagaattgaacaggcatgcaggcttttccataccaccttcaacgctaacctgcttcagtgggagagtaaagtaggcaagaatgagcagccatggatggttgaactgttatcggcaccatgcttttcagcaacatttcagcacagtttgaaacattttttacagcaaaaccattacaactccctccccaaacgacctgtaaccatctcaggctaacacccaattactttcaaacattggtataaaatacagtttaaacaattagaaaaatgaaaactgataccacttatgcctctatagtgtgattaacctctcttagatgcttgcattacctagaagtctaatggctttcaaatgtaatttccatttctaatggtgatcttgccacatctggcacagagacaacacagtaatgctgaaaaagcctccatgcagtcctgttagtgtcttaaagaacctaaaagctgggaccagtaaaatccacagaaattcactcttgcctttaagaacttttgaaaactgtttttttaaaaaaaaaaaaaaacagggaaggaacctaaattctgagaccaaatgtaaaagtcagatttggtggttctcagtgacaatggggagtttccaaggggtgggatggggaggagggggtggtcagagatggtttctcttgttggcttatgtctccctgatttttgtcttccacgtcctgcagcacttctttattctgctcttcaccatcaccctgcatatctgaagtccatagtgtcagattatcacgtaa

SEQ ID NO: 346888 - DNA, 1000 bp, Homo Sapiens
taaagattagatgcctttattaaatataaatacaacaaatataaacgttaaagggctaatttttagtcaagtaaatccaactacacattgaatgctataaacatttaaaacatttaaagaaaatgcagacttaaatgttaatcttactattaataaaaatgcaacttaaatattatattacttttaaaaagtaagcaattaaagaactatctattctatatttctatcagataaggcataaaatcagcctttgaaaattgttctaacaatacaacaaaacttttcacaaaatgaatgcaagcactatagggaacattggaatttaagtactttaccaaagcacatacaagtttacccttcccagggaaggctaacacacctgaatgttttatactgaagtcataaaaaatgcatgaaatgtatcatgacagtaatttaattatcttggaagcctgaaagcatacacattccaaaatgttgtatgatactgaatgtatctatacagtttatttatctgttatcctataatccaatgtaagagtcttaagacaaagttcaggtaaattacattttttatgtatggaaatcatttcacaaacattgatgtaacaacaaacctccttcttggtcaatacattttaaaagtgacttaataaaggtttttaaaatggacaagacaatttctttagatcacaaatatgcatcttaatgttctaagtaacaaaattgaaataaaaaaatttaaaaacttattaaaaattatattttaactttaaatatatagagaagatcttaatattgtatagacaactgttgctagattttaaaggagggatataaagtagaatattttaacagcttagcccatttatagagcctatttaattacatcatcttgttattactactttttcctaagtgctgtagaacattctctgaaggaggaaacacactttccaaggaagttctctttattgttttttgaattcctaactggaag

SEQ ID NO: 346889 - DNA, 651 bp, Homo Sapiens
tcacagcctcaggcttctcagcttggacttctcagcttggacgatgctggcttcctgggatggtttttggtgtatcagggacgtttctaagacttcaccagttgctggtgcttgcagggctgacagaatctgcctgaacatggtccgggcctcctcttcctcctcgatgtggccatagtggtatatcatgcggggaaggtgccaaggagtagacacatggacagtcgttctggtgtctcctggtggggccagactgggcaccatggtttaaatttttgctgagaggaccctaatgctgcatgagcagaagggcagaaccccagccaccatgtggtataaaattactctgaggctctgaatatccatggtggcacattggtagccctggccaaagccgaagtctgcgatcttaacgttaccgtcctcatcaaggatgatgttttctgggttcaggtctctgcgcaatttgctatggcatctctggagagtgatgccaagggagccagccttggggatgattttgatggccatttgggtcccaatcagcatgtgatcctggacctcactgaacgtgccacggccaatggtgtccaggattttacagttctggagctcctggtcaggtgtggtggaggctgatccctgctgcat

SEQ ID NO: 346890 - DNA, 1000 bp, Homo Sapiens
aattgtaagaaccctacaattggttacttattaagcttttaaaaaactgattctcatacagtttctgttacccaataaattgtatggtacctttcaacagtacatacttttaaaggatttacttgatgaatgaattaatatttttagtaaatccttgctcaagcatctcccaaataatgactattaccacctggtatcaaaggatgattacttgataatggtacataattacatactaaataataaatgaatatataatgaaacaatgacaaaaaatattacaggaccttaagaactttttaaatggtgataacatatatatccttttgtatcttttgaattttaaaacatttcagctgactgcagtggttcacgcccataattccagggagactgaggcgggaggactgcttgagctccggagttcaagaccagcctgggcaacatggtgaaaccctatctctacaaaaaatacaaaaagtagccaagcgtggtggcacacgtctgttgtcccagctacttgggaggctgaggtgagaggatggcttcagcccgggaggtggaggttgcagtaagccgagatcgtaacactgcactgcagcctaggcaacagagccagaccctgtctagcagggggaattcctctcttataaagatccatcctcactttttctcccacatgtctataaatctccactatagccaatattgcagcatctctcacctgactgttggagtctccaaacaggatacacaaatgtggtatcaatttgctgatgactagtggctgagccccaaaaatgtttaaggtttcaataagacacagacacacgccttctcgagatcgaaaattcttgtgtttaaaaccagaagccaactgctcccaaatgtacataggtggtgctacttgatccattaacttcaatatcagagtctgagcttcatctcgaaccttgtctttggcatctcccattctgtctattaaagctacaataaccat

SEQ ID NO: 346891 - DNA, 1000 bp, Homo Sapiens
tcaagggaaaaaagagtgattttgagggaacacatagcctgcctcagctacgtcagatttctctcctatatgggtttgttgatgcctgctgaggtgtgacttctggcaaaaggttttcccacattccttacattcataaggtttttctcctgtgtgtgttctctgatgtatactgaggcctgacttctgggagaaagttttcctacattcattacatctaaagggtttttcccctgtgtgagttctgtgatgtacaaagagttttgacttctgggagaaggttttcctacattctttacattcaaatggcttctcacctgtgtgagttctctgatgtatggtgagaactgtcttatcgtaaaaagttttcctacattcatcacattcatagggtttctctcctgagtgagtcccctgatgcgtactgaggtttgacttgtgacaaaaggttttcccacactcattacattcataaggtttttctccggtatgggttctatgatgtacagtgaggactgacttctgacaaggtttttccacatttgctacattcatagggtttctcccccgtgtgaataccttgatgcttctgaagatttgccttctgatgaaaggattttccacattcattacattcatagggcttttccccggtgtgagttctctgatgtataataaggtatgatttctgacaaaaagtttttccacattcattacatccatacggtttttccccgtgtgagttctctggtgtatggtgaggaatgacttgcgatgaaaggtttttccacattcattacatacgtaaggtttctctcctgtgtgagttccctgatgggtgctgagatttgacttctgacgaaaggtttttccacattcattacattcatagggtctttcccctgtgtgagttctcttgtgtatcccaaggtttaacttattgataaaggttttctcacattcattacattcatagggttttttgccagcatgagttctc

SEQ ID NO: 346892 - DNA, 1000 bp, Homo Sapiens
tgtttcctacatcttttattcttcagaaaataaacattcccagtcttccaatgtcttaatagtgtggggttttgacttctttcttcattcttcaaaggtcacctgagcactacagaatcaggcaggactgtaaccaccaccctcaaccttgtccttcattctctattatatttaaaccaaatcacacagctcataccatggtcactgtgagatggctttagcacattgtgaactaaaccccctaaatcctttgtatataataggattctaaagtgagcctgtccacctttaactagaagccatgcaaatggacttttttagaccaaagtgaagagttggtttatacccattaagttttacatggtttgatctgtacattgttccagccatgccaagatatctgggaatcctggtctgtcatccattgtgattacctgtcttccctgatttttatcacctccatactggaaggccttatcttcatccactcattccagagccagcaccagatgtcctgactggataagccttttttgaggaccatttccttgatgctttcaaagtactttatactgaggtgaagtaagacactatgaagtattgaaaccacacattgcgtcactatcagcccgcatagctgtaacgggggggaagcatgttggtaccagaggcccagctcttctctgtcaccatttcctgctacatggtctctacagccatctccaggtactcccatcttgaagatacattgacttctgtgggcctctgtcttgagatggatggcatttaggacggatccatcagtaacctgggaggtggaggttgcagggagctgaggtcgtgccactgtcctccagcctgggtgatagagtgagactccatctctcaagtaatttgcaaatattaaggctaaaaatgggatcttcttcataggtaagtcatttagatgtaggcaaaagattgatagtaacatccttaaaaaaaagatccaaaaaagtgc

SEQ ID NO: 346893 - DNA, 1000 bp, Homo Sapiens
tttaatgttaataattctttttttcagctgataaatgaaatatggtttccacaaagtcaacaactagatggttatcaaggcatttttttcctttctacctgttattattatctatagcctgaaagaaaccataattgtcaagaagaaaaaaactcaacattatgcctcttacacaaggatgtcctccaccagggtgtgaagggcactgggatttcggatcagtttgtcaaggaagctgacaatgtcagtaaattttggtctgtgatttctctccttctgccagcagtggagcatcagctggtgtagagatgctggacagcccatgggagctggaagtctgtacccttcttcaatggacagaatgacatcttggttagacatttcccaataaggtctctctccataggacatgacctcccacatgacaatgccatagctccatgcatcgcttgctgaggagaattttctgtaggcgatggcttctggggctgtccaccttatggggatttttccaccagttgttgtataagcagcttctggatcatcttccagcactctggagagaccaaaatcagaaactttgcatactaagttgctattgaccagtatattccgagccgctaggtctcgatgaacataacccatatcagaaagatacttcatgcctgatgcaatgcctcggagcattccgaccaactggatgactgtgaagtggccatcatgcttccgcaaaaaggagtctagggatccattctccatatattccaccacaatcattactggtctgccagcaggaatcctggggggcaaagatcctccccctggcactggatgcggggcctggatgctatttaaaaaccctgccctcaggaagctggggcaaaacgcctccaccccaatggccgggaaggatcttttggtgacaaccccttctaggcgaatgatgtttggatggtcaaactggcccatgatactagcttctcttagaaaatctcttctt

SEQ ID NO: 346894 - DNA, 1000 bp, Homo Sapiens
ctaactgtgcagattattaatgggattgtgagatacttttctgtcaaaaaattcaatcagagctgaactctcttcaggaaaatattcaacattggcaactcttccccctccattatagggattttcaaagaaaagttttaaactgtagtcatcagcaccaggtggcaggttttcaaccctgattgtgtttgtcacttccagaagtcttggagaaagctgaagttgtttaattgaatggtgcttggtacaatcatcaacaaatcttatagtatctatgtgcttttgaaaggtaacaacagcaacatcaaaatctcttattatttccacttgaaagtcatcattagacaggccacttatgttctccactaacaagattagcattatgtcagtcacatttgccttgaggttttcaaatgccaccaaagaggaaatattttcacattcctctgggatatcttccattttgtctaatccaccatcaagagggagttttgtatccaattcttctgacacatctggttctttaacatcttctttggtcttggattcttttgttagaagttcctcttcaaagacatgatcgatttcatctggggttgcaggtaactggacagttaacttgaatgttccttttccttgccataccaactcatgattttttctctccagaaccttctgccgaacgtcctccgggtagaagaacaccaggaagcgggatgggctcctgggatcctggcggacctcacactcgccgcctcccgacctcttcgggctctggaagtacatctgcaacttggtgttcaagttcttcggggggtcggggccccaggagccctcgaccagcagcgggaaggagccgggcacagccatcctcagctccgctctccgccggactgcaggggccgcgccaactccgggccgctaactttgactctttcgctttcgtttcctggaaaactcccaggccttggtttccttttgccttcagcctaacacagcg

SEQ ID NO: 346895 - DNA, 1000 bp, Homo Sapiens
gcaaggcatcagttatcatttattaattcaaagtgttctctgtagagattttcagagatggtatggttttttcttaatatctgctattataattttaataaaatttaatatctaagatgtgttaatttcaatgcttctaaacttggccccacttttttttttttatcagaagaaccaaagaaaccaagaaatcttcatctgaatttgatcgtttgctagaataataataattaggagactttgggagagagaagactttccttataaatgaacatttcaaatataataatgaaatgactatagcattagctatttacacttcttagaatatatatatatatatatatatgtactttttgggtgatatattaagtagctatacatgtttattctctaatggcaatctgatggcaaaagacacaaaagagttaaggaataagattccaaaacttgcaataagccaaggaagatgatgcacaaagtaagtattcttgtgacacgtagcagctggtgcctttaaaaccacaccaagtccatacgtgaagttcccaatcatggccaatgcaaacagcagaaatgaagttccttccgtagatcttcttcagaaatttttttcttctgattctttaacctgtagtacatgaattgtgagagtatgattacatccgtgttcatgtcgaagatggctgtaaaaatctgaataggcagttggttagtcaggtagcagcctttgaaatttgtcaggtctccacctatccagcaatccagaaaacccagagagactgcttcatccactcttccatttctgtaggctacaaagagctgacttctaaggcaggtcaagtgctctccggacgtatcagtgcttgagtttgcagtgttgactctatagtttcccacgactttcatagcttctacagcatgaatgtagaagactctcaaggaaatgtaccgccgtgttcgggcccaacctcaggcaatgagaggaaactgaaggaga

SEQ ID NO: 346896 - DNA, 1000 bp, Homo Sapiens
ctacagtattaggttcagcattgccatctccaagtgctctttgtagggaaacagtttctggtcatgacaagcttccacttcccatctgatcctggcctggcgccttcgtgtgccggcttgtttgtttactctgtagttaacgggctgccccacgtggacagtcactgggtcgtccgtgtctctgtgtgcaggcagaggctgctgtgcgtgcatctgtgcacatggctgccaggaggggctgtgctcagggggagctggggcaaaggctggtggcaatggggggcttggatgtagtgtggagacctgcgagccaggtggccgggctgcagtgtgcgggagctcgggggtcacttggcctccgtgtgtcctagtgtatttgtcacggcctctgcccgagttccccgcatggtgtgggagtgtggggcatgctagctttacgccggcgcccagttctttcacttccactggagtcctgcagggacagctcggggaccatgcaggcccgggtgggcgtggggactcaactagctcagtggtgaacagctggcacgtctgtgggttgtggacggtaaaggccacgtagacctcaggagcccgctggtgctcccggcaggcagccagcctccgcaggaccccgactagcgacacgatggcttctgggcaatacagcacgtctacggtgaaatctgctgcaatgacaacatctggctggacggcagagagctgacagaccgtcgcgacgtcccagtccagctgggccactgtcaccctggggccgtctaagttggcagtgatgtctgcctctaatgagaggccattgagaaggacattccctcggagctgctcgaggacccggctgtgacagtcgctgaagatgtacgcccgggggcggcacatcttgcagatggccaggcctgtgaggccggcgccactgccaagctttaggacagtcctgtgagtgaaggctgctgggttctcggcccattctgcaaggtagagg

SEQ ID NO: 346897 - DNA, 1000 bp, Homo Sapiens
tagagttcatgaaaatataaagtgttttatttattctaatccaacaagatatatgcccaaatatatagtcatcaaacataaaattcaggggcactggagatatatataatattagatgattataccaatagctagactttgaactccagttattattaacataaaaattacagtatgactactaaataattagtacagtcaatgtggtaaatacattaaattacaaatatttacatttgaacatagctcattttacaaataaatgttttaagccccaactgtccaactttcactgaaacactaaatgttgctgaacaaaaagtctgcaataaatactccctccagtgagtgggggaaatgattttacatacactctgtgttacaatgaatgtctgagtatatatttaaaactttaaactcctcatgtgattattgaaaccttgtattctggaaaaactcatattgtaaacaaaatttagttatttatttaaaaagtaaatgttctcattatgctaatattattcatggttaggttactcccgaaatcataaatagatttttcactgcccccttaagtttacctaatagttaattttttaagtgaacctttgataattacaattaggtatttttctttgcttatttatgaatatattcctatcataactcaatgaacaacttatatgaaaaagaaacatgtagcccttttctaagcaatatagctgaatgtccagtaaaacgtttttagccagtttgcaactttaaagtcaaactgctgcatattttgaataaaagtagcatagattgaaatgtaatgatcacatgtttgcaaaaccagaaaacagttctctggtttagcctttctgtgattggagacaggaactttcaaattagaaggtgctgtgttttcctagcatgctcctccatgacactgatcagttacaagggaaattttctcagaattgcatgtggcaatgggagcagggctccacctgtctgc

SEQ ID NO: 346898 - DNA, 1000 bp, Homo Sapiens; identical to SEQ ID NO: 161512

SEQ ID NO: 346899 - DNA, 549 bp, Homo Sapiens
gaattcttacgggcatttggggaatatattttctgttgagtcctatactagtaagattttcaacacaaggtgactctcgacctcgccttgtaggaagagtgctgagaaaatatttcacctgctctttctccataaagagctgatactgatcattgctattttcttattcgatctgtaaatggatttcttctaatttttctactgccagcattgccctttcatctagctctgatttatattcttgtagtttactaagttctaccatactgttttccatatgtgtcttaagatttaatatttcttcttccaacatatttttatcctcctcaagtttttcacattcctgttgtacttttttcatagataataactcctgttgaaaaacttgattctctttaggcaaattgacacattttgaagatactgcttccttctccgccataagatcatcaaacgtattaggaggagacagcaaaatgcctaggcagatacggaagggtccccggagaatctccaaccagccccacaagtgtttacaccagatgttat

SEQ ID NO: 346900 - DNA, 1000 bp, Homo Sapiens
cctgtgttttgctcgggcccactgggttcattccatccactcggctcatgctagtggtgtggatcccacacctgccaagggtgagctgggtacagagcagtgaagggtgtgtgagcaagcaagcatgggatctggccactgcacacagccaagcatgccagctgcagtgaggtgggcagctccaggtaccggcacagatgccagctccctgtgaggctgcagctggaccagaccgactgcaaacagcttccactgtgtgtatcagggaatgcagtggcgcccagaaacttggagatgcaggaactgcagagccccaaagaagacatcacagccctggcttagggagctcctaggtctgggctccctgaagggccacagctcttgtctccttctctcttctcttcttcttgcctgcaatttggcaagcaaggggggcgtttcagccctgtttatgttacacctctttcagccctgctagttggcaggtcccgagttcttgtcctgagtccaggaagaatgaggtatgtgggcaagtagaaggtgagcaaggtgaagaggtgctttattgaacaacagtacagctcagaggagaactgcagtgggtaactcctttctgcaggcaggtcatcccaacgtcttttcagctctcagcagctgagagagacacactgtggttagctgtgcccacattgccgaggctgttcgagctgaggagtgccttcaggccagtgctgagccactcttagccccacctcaacctccgtcttgtgctcgtcactgcccaaagtctggagggggccgaggtggcagggggctggcatgtcagcactgccctgagcttgcacaaactgggccgggttgcgactgtgcctgggttcagcctcaacttggatccgaagttggagtggactctgggagtggagagatgccaggtggtgggaccaggtacgactgagcctgcgggggcaggggggcttgctgggcctctgagagtgcaaag

SEQ ID NO: 346901 - DNA, 911 bp, Homo Sapiens
tgaagagcctgcctcatgggaagggcagggctgtcctgggaagagtcagctgcactttggcaccatctgaggtgcctgtccaagcctgacctgaataggactggtcatgtgaggggtcagtcctgcaggctgccctcacacctcttctccagatctgccatctcctttaggaccagggccacgctgtaccgcagctcctggaacttggctatggggacctcgaagcggtatgctaacccatctgaaagcttcagctgcatcaggaccctcggctgcaggaagcgagccagggcactggtggagattgtcacatccacccaccactgaaagtcagcaacatggggcagccaggccccctgctgctgggccacagaatcaaggaggggccgctggctcccaaataccacgctggccaagtccccgaccaggtcttgggggatgcagagttcctggagctggtccctgaaggtgttgggcttcaggctggtggggggaagatggagggcctgctggagcagcgtgtgcatgcctgccagtagggcacccagccactcctgcggcaggttggtgctgaccccaagacactgcacagcctctcggcagtcctccccttgcaggctgctgaccacaaacttcagcaactttctaaacatgctcctgtttaggtcccctagtagctggtccattgctgccacctctggaggaagctgggcccccaagaaactcactcggccactgtgactaccaccaggatgatgcaatacagagctgtggcccccacagcagacactgctgctgcttcctccttgattagccagcccagggggtgggtcccagatgcagatacctctggaatggggactccctgagggcagaagcatatcctttaagtctctctcaaaggtctgcat

SEQ ID NO: 346902 - DNA, 679 bp, Homo Sapiens
ttttgtatttttagtagagacggggtttcaccatgttggtcaggctggtcttgaacccctgacctcgtgatccatctgcctcggcctcccaaagtgctaggattacaggcatgagccactgtgcctagccacagctaaatttctaaataaaaatttttgtttcaaatatatactttattatatacattttatcatctaatctttacaagaatgctgcaggaacccattttctacataaagaaactgcagcacagggagttaggaaatttgtttaagatcacatacctggtaaataatccatgacagagacaacttcaggttctatctgattccaaaactcaagttcaaaactgctatgtggtattacccctctcttatttggattagctagttcctgaatcctaggtgatgctttggaatgagtagtagcataagatactggccaatgggcatcacggtcaggtagataatcttgatgaacagacttggacttcgctagagctattgttcgggggctaggtttagctatcatggcagcaggaggtacaggacggatgggcagttcacttctttgtctttcatagcacagaccctctaacttgatccttgggtgggcaagctctataattcttggagttgcaatcgcactcagggtagaaagtgaaatcttggtttgcat

SEQ ID NO: 346903 - DNA, 866 bp, Homo Sapiens
agaactgggctctatgagatcctgacagctaaaacacaggtacagaggagcctgcataaacgttttggtccaggtcttggcctccagtcttatgatgggctggtagaatattgcttcatcagatgcttgtgacagggattgcaaactcgctcaagcttgatacttgaaggaagaggcagttcatttgttgaacaggcatcacagaaggttccgctgcagttcttacacacattctttgttaggctgccgtcttcctggcatagctgacacaactgtggcttttcagagagcagcagctgatcctgttcatccatagggtggggttgcagcctgtggctttcttccaggggcttttttagtttaacattttcctcttgcattttgtgcttcccatcttgcaaagttggctccagatatcagttacttcttaggggaagtataattttttttttcttttccccagactgagctctgaaaaactggtaaaaccaaggatggccatatacagcagactataatcctctggacgttcaatcaagttgatgccccagtgccacaatatttttctttctttttggagacagagtctcgctctgtcgcccaggctggagtgcactggtgccatctcgtctcactgcagcctctgcctcccgggttcaagcgattcttgtgtctcagcctcctgagtagctgggattataggcgtgcatcaccgtgcctggcttatttttgtatttttactagagacgaggtttcaccatgttggccaggctggtctcgaactcttcaccttaagtgatccacttggattcaagtgattcttgtgcctcagcctccagagtagctgggattacaggcacacgcca

SEQ ID NO: 346904 - DNA, 1000 bp, Homo Sapiens
tttttttacttatttactatatgctttaattaaattgtcattttttgataattatagattcacatccattgtaagaaataatacaagatactatacaatgataatatcttgccaaactacaggacaatattatacccaggatattgacattgatacagttaagatatagaacatttccatcatcaaaagggtccctcatgttgccttattacagccacacccagttccctcccacatcaacctgtccttgactcccggaaaccgctaattttgtcactttcaagaatgctatataaatggaatcatatattctatgattgaacaaagaacatgtgagattgccttttttacttcataatttgctggaaattcattcaggttgctgtatcaatagttcattccttttcactgctgaggaatattgcatgaatggatatacatgcttctttttttagcaatgtcaagaaaattaataagacaaatttaaaactagataggtttttctaaggtctaaaatacttatatagtgccgggtgtggtggctcatgcctgtaatctcagcactttgggaagctgaggcaggtggatcgcttgagttcaggagttggagaggtcctgggcaaaatggtgaaatctctctgcagcaactatgataatatctgccagctgcgtatgaatcttcagttgctctttgggggtgtatctgtgagctattgtcacagttgcatcacctcctggccgttcatgctctccatcagtgtgtaaaagcatggcaataggcatccctacgttcttggatcttccagccacaaccacattttttccaaatgtttgaattcctgttctttttattatttcccaaacagcactggcagtggcaggtatgagagaatgctgatcaaggcacaatcttccaatattgataatatgaaatccatctacatctttttctggggcaattccattgcatattgttcgctcatcaacgtggtctggtagt

SEQ ID NO: 346905 - DNA, 960 bp, Homo Sapiens
aaagctcatttggcaaatgtggccatgaatgtgtgtgtgtgtgtgtgtgtgaaatgaggttctatgtcaagtcctgtgagtgtgtcctactggcccctcccccactgtcacacccacctcaccagcaaggaaaaactgatggtttacacctggtcagtctgatattcagaagcttctgacaggctttctgagaagcttaggaaattctcctggtactcagagcaaacaatctcatagcggtaatgccggaactccacggcaaaggtgccaaaataagacaggaagcacatgaccaggccccactggaccctggctgcatacatgtggatgctttgggccatgaggatgaagtagaggaccacacagagagtgatagatgccgacagaataacccgtggaattccaactctccgtccttcattcttgatgttgaccttgagtgtcagcgcagcctggatccagcaggtcaatgtgccaaatccaaaggtcaaggaagttccgacgttatggatttcttcatcatttgtgagctgaaaattaccaagtaaggtcattccgaaggaagccagacacagagccaccaatccactaatattcagccacgggtttaaaaccttcggtttcagttgtatgaagcgcagaacagctaccacaagggctaggaaggctgccatgttcataacttgactaaacacacagcttgcaggaggatcatcacctgcaatgcttatatatggtgcatgcttcacaccaggtttcctttcagctgaatttaatggtaaaattttgtcatcttccacagctatgaagtatactatccacaatccagctgaagtaaacaaagtaaatacaagaggtaggaacatccatacgctgcatttcttcccatccatgcctgtaccactgctctggtgcggcggggccgctgtcgcctcgaggggctgtgacctgctgcggtgg

SEQ ID NO: 346906 - DNA, 1000 bp, Homo Sapiens
tgttgtgaaaggtctgctttactgtggagagtacttatgtcattgtgtccaatggtaatgagtactaatataaatcctattattaagaagcaaatagaatggtttaacaaatctgtacagatgaagaagtccatttcagggagcagcttggcacaggagacataggggttcagaaatgttggctatttagtttgcttgtaggtcacagcatggccgggctgtggtggttattcacagggctggacttctgtttcggtggagatggcaacatagcactgggaaatcccatgttgttcagagcctccaaagttccatcaggatcaatcatagcattgattgcttgtagctgcttttctactcttttcagttcctgtaagatagaagaaatctccatgctcgaggttttcacaatagggacttcactttcggctcttaatttgctttctatgtcatcccaattccgatctttgtctttaaataatattctgatctttccagctgtcttatctatagattgtcttatcttcttagagaactgaaagacggatgacagcagcagattatctcccatgacttcatccctgctccaggttctccgccttgtaattgttaagtgatcgggaggctctgctgcttgaggtcttggatcaccagatcgaccgttgtttccttctggtgttttggaatgaactaatggaggaatcttttggaagttgaggctttcatcaaaaacacgatcaaccaatgtggtactaggggcagtgcctgatgaagtcactgaatctatctctcctgctacatcgttgatctcccgagcaatgagagcaagatcttggctgatcctggctatctcttctcgatgagcagtccaatctcggatgtagtcttcctgctctttaatccggtgtttgaatgaagaactagtaggcattgctgatccagcgctctgcaagcgagtggttttcagggctgaagcagagccatgagctgaggtcatact

SEQ ID NO: 346907 - DNA, 1000 bp, Homo Sapiens
ctataaactaaaattttgttctctttacctaagcccagagcttcctatcacgtcagtatctatgttatgaagaaaaggagacttaggtgagatgtttttatttatcacaactgctgcatcaattgcctaggacctcaacagcttcatgaaagtctgggaaatgttcatgcataaggttattgccttagctgacttcaaattgctccatacaatggtacatataaacccttagtgaagccttttaaaaaacaaacaggttgaaaaatgggttaaagtaggcaaatacagcatctgcctttagggctatcaactgaggaattctctcaattatgaaatcttgcagagaagttattttctttctcaaaatccaggtgatgaaatatttcttactccagatctggcattttttcatcatcactgtcttgtgaatcatcacctgcttcatctacttctggtaaatctacatcctcatccccacccatgttgttcatcatctcggagaaacgatcaaaattagacctgtcttcatctgaaccatcttcccagtctttccaatgattgaagtccatactaagccagttaagctttgccctttcttttgttaaccttggccatgactggccagattctccttttcgtaaacaacataaaattgatctgtccgttcttttatgcttggaatcatttggatcaatagagtaaaaaagaccaatttcatttaaatgcttaaaattatcacttcctccaagacaactgaatgtaagtttggatttttcaaaatttacattaacatccttattgtcttcaacacaagattcagtgaagacacagtcccttcgatcgtaccactttgcaaaagcaggctgcattgtgaatgcggcagggggacgggcgaacgggtgggcgggcggctgtctggcggcggctgctctccggtggggactccgcgttttctccctggtcgccgctgcctcttctcgctcccctcaggcgacggcgg

SEQ ID NO: 346908 - DNA, 1000 bp, Homo Sapiens
caccattattaaaatattttattacccatgattgaatgtggtaatgaaaaataactacttgtcacaggcaaatattatcaaaagtgcaatagggcaacgagggccacacaaccaaaaatgtaatccatttttctttcatggaagaatccaataaagctagagacatgcaatagtataactaaatacctcttggtttatttgtgggggagaaggagaaactaagggaaacaatgacactattttgatattatttatctttaggtgctccaataattcttgcaatacttaacatgtctggaaacatagaatctttgccatttatggaaaatatgaaaaataaagctaaatttagaaaaagtcacatattctaataaaatatactaagggaattagttctggccataagataaattgatcacataaatctccagcaaaatatattaatagctacagtaaaatccaataaaacaaaattagcagctttatgcctcggggcacattcaacttctcttacagatcccaacttccagccaccattttcagctcaatgccctgtctctctgctttaaaatgcattttgtttttaagaaatccattttttctcaaataaggaatgtttgtattagaaatgtacaaatgttttaaattagcatttgaacaaataactagagaaaaacttacatttacttgcctttctatcatttgtagtttaaaaatataccaaaacaaaaataatgtttttaattctggaagtaatgttcccataggcatgtctactaaatgaaatattataatgaagatattttgcaaactctaaagtaataaaatgtaaggcagtattgtcattttatttgcaaggaaacacttaagacagagactttgtaatataagttggcaaacaaaacattactaactgtcctacaataaacgttttgattaacagaactttgatattttttaaaaacactcttttgctgatatattaaaccacccaatctgc

SEQ ID NO: 346909 - DNA, 1000 bp, Homo Sapiens
tcacactgaagtcactctcatcacaacctcccccgagctgttatcttctgataagtcttcatggggcctcatccgattgaacaggtgcaataacacatagccacactgaaaccttggtgaggttaactgagttgggtggaccaagtttctgttccgcagagctgtcaatggcaaccacaaagtcctacttgtggaagactctccccggctgctttcttcgatgtctgtggctttgtcataatttaacacatcccagtgcaaattcacagctcgccagcgcttaaacactctgtaaactgcagctccttcatgaacaatgagacctgtcaacttccaaagctcggctatcctcagtgaccccaggagctcagattccaggcttggtaatggtggcggtgattgagtggtaatcaaatggttggatttgggctccaaaagtcttgtgatgaaagtcttttgatgaaaattgatgacacttttgaatggtgtgcagctgctctgcttgtacagctctgagatgcacggggctgttggtggttggcagctgtggtctccacttcccgtagagaaagtatcttcactgtgcaagtggtcccgaatcagaccacactggattctggtggtcttggctctccacagggagaccaggaaagagcttagtctactcagacatccccaaaccacataagccctaaagtcttcagtggacattttgattgttctcttggtagttttacattcttcacttgaaactacctgataaatttcatatttattcataaatattttacagcttaagaaatcgctacccctcgccgactggtcaccatcgcgatgcctgtgcacctcacacacgccacataaatgctgcatgattggcttccgttttctcacagtaagtgtgttaacgttgaaggtcatggtcttacctatgcacactagatccataaaaccatacattccatagcagatctgaaaaaggatgtccttcctctgccac

SEQ ID NO: 346910 - DNA, 683 bp, Homo Sapiens
ctataacttgtttctaacatccacaccccatatccttatcaaaaactcctcgaagcccatacttaatgcaatgatacgtttaactttctcttcgatttcttgtagagcttttttccacagctgaacagacttttcatatgatcctaataaaaaacattcttccctatcatcctttgcatgtatcgtatcaaacatagatgcaaattccaatcttccttccttcatactactacacagcacatcatctcttttgttccaaaaaggacataagttgtctggaaagtgtctgccttcgttagtttcttctgcttcaaaatcctgaaaatctgctgcattttcatttattgtttcttctgcctgcaagaatttggggacagtgaaatcggctgaactttcatttccttggtgttctaacaggctagaccttagggaattcagtgatcgcaagttcagtcctttgccttttggcttagacaatatcacactttgatatattttctcaagcctctgggttgaatcaagtagaagtgatctcatgtgtactgatggagataggctatcaagaaatcgaagggttgtgaccatatatccatcagatataacgaggtagggtaaccgtgagtgtgcttttatagaaaatctctgtctcatagggtcactatcagaagctgatgaatcaacag

SEQ ID NO: 346911 - DNA, 947 bp, Homo Sapiens
tttcattcttcccatttttaaattactaagaatcaagatgcttaaatctatgcatgaaataaaaaaagaaaatgtctaggggattctttagtaataaaaatatttatcaaatctaaaagtgtagaaatactgctttattggataaacttacttccaaattactttcatgttttttaagaagtcctaatgagcattcaagaagaaaacatgtactgcttccacaggaataaggacaaataaaatgaggttgacgcttaccacaaatgatatttcctaaaagaaaaaaacgtaatatttaacttttcttctgttgaggcaaggtaagtgaactgcatacatcataaataagattttcttggtttacaagaaggaagaactgagatcctgttttttgaatgcaagttaaatacaaaatccactctctgaccaagatgaggggaaaaaatcattcttcaacatttcaattctcatgcaatgaaatccaaaggtctgtggaatccaccttttcgattcatctactgcccgtacttcctcttctgagagacaattatggcataggcatttacagagcaatccaccttctcaccttttgtggagtcaaaggagacaaattccattaacttcatcatttctatttcttcctctgttttgccctctaagtcttcctcagtaatttgccattctttgctctttgtttctttcttttcctcatctcttctttcgttcggctgagaaggggaaggagatgtggatttatgtcgtcttggagatcgggagcgtcctaggtgcggggttggcgagcggttccttctcccatctctctcccgagacctggacctttcttggagcctgcgttctctctcacgggatgtggaccgggaacgcctacctttcctccgtggggagccgctgcgactgccacccatttggagtctcgctccccggaa

SEQ ID NO: 346912 - DNA, 1000 bp, Homo Sapiens
ccatacacaatttatttcagaaaatattactaatgtcaaaagtacaaaagtcaaacaacaaatttatgttgggaataaaaagtggtacagcatgtccaattacacctgcatttttagacacaatcgctgatcatatgtttgctgtccttcctaatgtaccttcaatttgattattttccttcacaaatcaaaaaacagcaataggcttaagaacatcccatggaggctaaagattcatccctttcgataagtctaatgatttctatgtttatatcgaaagagtcaatgatacacatacttctttttaaactcctttttgttgagatataaatcacgtatactacataattcacccattgaaaatgtacaatttcatatattttagtatatttactaggttgtgcaaccatcactactaattccaaaatatctttgtccccctaaaagaaaccctgtacccataagtcactccccatcccaatcctccctactctctttagcctctgacaacgactaatctattttctatagtgtatctatggatttgccctttctggacatttacataaatcaaatcatgcattatgtggtcttttgtaactgctttcatttagcatattttcaaagttcatctatgttgcagcatgtgtcagcacttcctttgtatcattaatatttcattgtgtgaatataccacattttgtttatcctttcatcagttgatggatatttgagctgtttccaccttttggctattgtgaataatgctgctgttaacattcatgtaaaagtgtttgtgtggatgaattgtttcatttctcttgggcagatacctaagagtgaaattgctgattaataaagtaactctattttaaaattttgaggaattgggctgggtgaggtggctcatgcctgtaatcccaacactttaggaggccgaggtgggtggatcacctgaggtcaggatcaagatcagcctggccaacatggtgaaaccccg

SEQ ID NO: 346913 - DNA, 1000 bp, Homo Sapiens
tcaaccctttccttcaatcacctgcttttcacctaagctgaggattgacactgatctcaggaccccgatgctgacttgcagccaggggtcggctgcattgaggacatgaaggcgggtctgggaagccgtcccaacaccgcaggcagaaggaagcttccactcctcaggcagataaggaaaaggcttcgctgtgcttagcaggttccgatgtgaggcatcagaatatgggtcgcagatggaagaggtgcccatccatccagagccggtatttggtcccaaattccacagccacagagttcccgtctgacgactcagacctgacttgctcaggagagccagcccgatccggtccactttcttgaggtctgacgtccaatccacctcactgggttccaacagatctccacttttggaggaaggatcttcacttgattgtcttttttcaacggactcatgatattcacgtgttctcttttcaggagtcggtgaccgaaaggtattagtgaaattaattctatggtcactaacaggcttcagagacattgtgtccacattttcttgaagggacactgaaggagtctcagtgtgtaaacatccatccacgtccaaaactgtctccgcatctgatgccacgtgcttatgctggtgaggagactgtgcctcactccagagggctgaggggcccgggaaatccactggctggcggcccttccggatgaatagggcaccaaggcctgtgtgctgctctctgctgagggggttgtctgtgcacagagtgtctataaatgtcctgcaggaggcactgagcccaggcacgcacatgggcgccttcaggggactggacctccagatataggttttctgatgggacaacaagagaatgagggcagccatgggcacacaggcattgtctgccttcccctggtcatgccgcccctgcacactcacgtttctgcctcttcggggattttccccactttttctgcaggtgccgggagag

SEQ ID NO: 346914 - DNA, 719 bp, Homo Sapiens
cagtttattttagagaaacatggacaatactattgccctcatcccaaaatatatacagagcccttatcatgtgcatggcataatgaaaagcaacaatattctattttaaggaattaggtgcctcttatagtctaaaggtcagatctagaaatactgttctctatttgggcttccaaatttccctctggtctgaagaacagatctctcccttgagaagttcagcttctcaaacaatgtcaggcacataataggactcaggaaagatcatcaatatcaccttttttccattttctccaacttcgagaattgggagcccaggcatggtggctcatttctataatcccagcactttgggaggtcaaggtgggaggattccttgagctcaggagtttgaggccagcctgggcaacatggtgagactccatctctgcagaaaatgaagatgctaaaaccagaagaggccagactctggggaagcaggagagaaagcagccaaatctggtgagtatcctcaaccgagtaccctcgattatctcagcattgccttctggtacataacttggaagagggtggtggtgttgccatagggatgtataatcaagataagtcaatcgaagattttgcacacagttccttccaaatggctctaaggattggcctttgtagctgagcaccaaaaacactattctgaagaaatatgatggacgttttaaagacat

SEQ ID NO: 346915 - DNA, 903 bp, Homo Sapiens
ttaacccagcttagttgcaagttcttgagcctttgccttttcgagcttgccaatgcaagccacagacttgggacccaggacattgcctccccagtgacggcggatctcattgtatctgtcattgtagtcagtcctgatagctcccactagcttagccaaagcgcctttgtcttctgagttaacctgtatgaaggcgacagtggtgcaggtcttcctgtggactagacgtcccagtcttgcctcccccttgataatgcagtaagggacccgcattttatgacacagggcaggcaagaagacaaccagctcgatgggatccacgtcgtgtgcaatcaccaccggctgagctttcttattctctagcaaggtggtgatggtgttaactcctgctcgaaggacaggtggtctcttagtggggatgccccctttgccagcagctttctttttggccagggccaacagcctctgtttcttctcttgcttagtctctgatctgtacttgtgggccagctgaagtagcagagcagctgtttggtggtccagggcctgggtgaactggttaatctcaggaggcactttcagccacttacagaggatggctctctggggctgaatgtcctgtccaatgtcaaaattcttaggccgtttctcaaacaggggattcaccactttcttaacctcctgcttcttcacgacagcagggccggagccaccttctttcccttggccttctttcctttcggcaggaggagagagcctgagggtgaagctacaaaaattgaagcgttcttcagacgactctacctgaagaaagaaccctgctacagagaggggtgagtaggccacaccaactttcatgataaagggcctgtaagagctcctcgagccttggttcgggtgcat

SEQ ID NO: 346916 - DNA, 1000 bp, Homo Sapiens
tttactttacaattgttttattcaaaggaaattaaatacaaatgtatatttttcattaaaaatggggatttaaaaatagttttataattagtgttatgttgctttatcttatctttgcataaattatgtattattaaaggtttctgatatccatatacattctagtcttttttaggcagctatgagaagatttcatattcaaaagccaatgccacttttctaaagaaacgatctttgtgccaaattagtagacaattgctccaaatctctggtcttgacttccggttgtgtgaagagcagtgttttgtttttttcagagaagggaaagagccttcattctttaggtttgtttttgcctcaaagacatttctatatgggtatctaaagttttagtttataagtctcataatgatttgacccatgcagtccaacttttagatagtatttccataccccccaaaagctggcaggtggtagtcgcactagattcagaccaagactctccgcattgtcatcctaggtccttctaatgaagaagacaatactctagtttatttaacaaataaaggagtctaagtacatggaagttaagggagtaagggtgggggtaatgagattattacattaaaataaagacttcacacacgtgtgtcccatgtctaaaattgttgaaaatctgattggagaagattagaagtaattagcaactcaattatttataaacaaatataaaaatgcacaaaccaaatgatgcaaaaaaacctttttaatctaaaaattcatttcccagggctaattgatagccaggccctaccaatttttatcagtttatttgactaacaagagctattcagcattttcttcaaagtaagataatatataatagattttgataaatctttctgaattaggacatgatactgtaggcagttcaaggaaaaaaaaatagccataactttttctttggtgtaaccaaaaggatatccaaaagttagcaaat

SEQ ID NO: 346917 - DNA, 1000 bp, Homo Sapiens
gtgatttaaaattttattgagccatattaaaaaagtaaaaagacacacactcttctcgtgcgacacagaaccgggacccccgtacagaacattttactgttttcccttaatacccaggaaacatgcactaacctggtaaatacctgcttcatggagagtagtctttcaggattcataccctcaggacattgttggggacctactggactgaacaaaggcgggcaacacgggaataaaagacaagagacaacagagtatatttggaagaaggggttaggggcaccttgcctttagtggacaagggccctgagctttacacagccctccgtatttattaggcaaaaagagatagcgagaaagctgggggaggggggtgattgtcagtctgccgtttggttcacagtagtcttgcattttttggacaataggcactagattttttaggcagataactttaaggagcccggagctagggagtgatgtctgttagcaaaccttttggtggcagggcagtgtgagtttgcccacatcctgcattcatgataaacagtttgctgtttgtagcctccagcggaatgctgagttggtcacgtcccccacgggccttcggctccctgcaggacaccaccgcctagacatttgcccacatttgctgacctacacgcagacactctggctggtctagacactcagggcctttactccggctcccgccagaggcctgagaaatccacacctcactgatagctccatagctcaccagcgtccgtggtgagccagtttccttggcggcagcatcctccgccttgggagaggccgtggggaccgtactgaagaaactgccactccgaggcattgctccgtgctgggcactgccattgagaagtgcacctaagcggccaccagtgagcgacgaccacgcatgaacaggaatgttctagagcggaatgcacctatgaaggctgaggcctgcgcgagaacctgcacctggaagccaccc

SEQ ID NO: 346918 - DNA, 1000 bp, Homo Sapiens
tcagcgccctgacggctgcgggggaggggcgggtcctcggaagccccttctgcgcggcgcccaatgacacccttggcagacacgcccggtggtgggggatccggggtggtccacgccctccacgcgctccaggtcctgagggtccggggggtgcggcccgccttccgccttcccgcccctctgaccccatccgagctgccttacgcgcatcggtgctgcgggcctcagtttcccgctgctggggctgggatcccgcggccgcaaggaccggctgagagctggggggcgctgtgctgggggcgggagggaggcggccctgaggactgcgcgccccccacaccggggcccgggcgggacacacgcccaacgggacccctgagcccccaggctggggaccggcaggggctccggggaggctggtgaggccaggacggagccgcccccacgcgtagccgtgaagcgggaggtacgcggccccctggagctgccccgactgcagccgagggcgcgacctgtggtgccaaccgcctgaccctgcttggccgccgccgcctgcgggtctccagcaggtcccaccccacgcgcccgcggggcccgctccagaggctcctccaaggccgctgcagaggcgcggccaggctcccatttctgcgcatccctggcgctcagacacggccgcttctcaaacaaaaacgggttgtcaccgcggctcttaaccctgggcgagccacggagcgtttcttcccgggatcgggatcgggccgcggctcgaaccggcatctgcagaaggaagacccggccctgtaggccgccgccgccccaggaccggactggtggcctctccacgtcgtgtccggacccgacacatcgcgccagctctgcccggcccggtggttccccgcgcggggggttccgtccgggccccctctgggcggcgccccgggcagaggggcccacgaggaagggtctcggggtgcgggcagccctcggccacagcccc

SEQ ID NO: 346919 - DNA, 1000 bp, Homo Sapiens
tttaatgcatacagagtttttattgcagatgatgaaaaagttttagatatagacagtgccgatggttacacaatattgtaaatgtatttaatcccacttacgaatgattaaaatgataaatcttatgtttatttcatcactaccaaaaggctgtgggtgcaggggtgctggtttctggtcctagcctaagagactggcagtttccaccttctatctcttgggacagtagctctgggagccctgagctgtcatgcaggaagtccagctaccctgagaccaccatgctggaaaggccacagggaggagctctgtggacagtcccagctgaaccttgccttccagctgtccctgtcaagatgccaggcatgtgagtaaagccatcatggaccctctagaccagactgcccaccagcagggtaccatctggcagccacatggagcagaagaaccgcccagctgagccacttccaaactcttgacccactaagtcatgatccacaatgaacccatcatagggatggttggctttgcagtgtggataatgaggatgtcatgtgagagacagctgaggtactgacccagggtgtgactgatgctccccatgtacccagagctcacttgtgaaatgaggaccatgggacatcatgaggatgagaggcggtgatccaggagtgtggacattcagccaatgcctgacagagctgggatataaacacctcagctccctctccctcagggaagactttgaggcgtgtgctccagcagctgcccacagtgggggtaggcatggagacacacccactgtggcccatcttcccttacccatctcactccctgggatggttaattttatgtgtccacttaagtgcactgtggggtgcccagactacacactgtgtctgtgagagtgtttctggattagatcagcatttgaattgtggactcaggaaggtggactgccctccccaagtggctgggcataatccaatccctcaagaac

SEQ ID NO: 346920 - DNA, 1000 bp, Homo Sapiens
agagtttttttcttttttttgaacataaactcaagattttattgtcttcataataaaagatgacgcttagaactggatcacttggccctttctcttattatctcctcccagttcaaaatgcttgcatcttttaataggcagcattctcttagatctgcagttgggctcaaggcactcaagccttaggacaatcttctttgtagctttagcctttttctggaaaatcagcttggtttgcccaccatagccactctgcttcctgtcataacgccgctttccatgggcatacagataatccttgcccttcttgtactgtgtcactttatggggttggtgcttgccacacttcttacagaaagtccggcgggttttaggaacgttaaccaggcttccgtgagtgctatcggcacggaaagcaggaatgtgctttttaaggttaacaagtatccttagttcttctagggaaagtttatctgcctgcttctctccaacctgtgggtaagatatgagaagcccatataacaaaatatttctttcttttacttcctttgcaaattctctaatctgcattaggttttccattttctgactgggaggtactaatttaaaatcaagaaaatgaacaaagaaggaagcataagtttgagaaaaatctgcattaatttcacttactgaaacaacaacaacaggatataaaatgcaaagactactctcttcaagcatgctcagtaacttctgggtttcttgaaaatcagaggttgtaacattcacacaaacaaaattgtagcattgatctaagatgatttgctgaagatgtctgccagcatgacccagagcctcagatgtgacttttacatgatttaattcacttttcagcacttcttcaagaagatgacctacatgtttgttatcttcttctgtatccataactacacaaatctcttgggaaattctctccttaataatcgattcagccgcatagagatctcgtttgtaggtc

SEQ ID NO: 346921 - DNA, 1000 bp, Homo Sapiens
atgcttaaggtatatcttttatttatttatttttttttttgagatggtttctcgctctttcacccaggctggagtgcagtagcaccatctcagctcactgctacctccacctccgaggttcaagcaattctcctgcctcagcctcctgagtaactgggaccatgggcatgcaccaccatgcccagctaattttttgtatttttagtagagatggggtttcaccatgttggccaggctggtcttgaactcctaacctcaaatgatcctcccacctcaggctcccaaaatgctgggagccactgtgctcggctggtatatctttagagtaatatatttgtatatgtaactctatgtaaattgaaactaaaagtctgtttttgtttgtcagcagagatgccacatgtgcaaaaaatttataaaacaaaattttaaaaatatttaatcaagactcagaaatgtatgggtattaattatactcatgtaatttttatgatcataaaatgaccctgtggttaatagtaattcaattgcacatattgaaataactaaaactgtataatgggattgtttgtaatacaaaggataaatacatgctcaaggtgatgaatgcctcatttactctgttgtgatcattaaatattatgtgcatgtgttaacatatctcatatatgccataagtgtgtatgcacactacccacaaaaattaaaaaaaaattaaataaggtaaaaaagtacaaatttgtcctatgggaacaaaattcttcaacttgtttgctgtgtaaaacctctagtaggccaggcatggtggctcatgcctgtaatcccagcacttcggtacaccgaggtgggtgtatcacctgaggtcaggagtttgagaccagcctggccaacatggggaaacctcatctctactaaaaatacaaaaattagccaggagtggtggtgcctgcctctagttccagctacttgtgaggctgaagcaggagaatcacttggaccc

SEQ ID NO: 346922 - DNA, 1000 bp, Homo Sapiens
tcaacatccagaaatagcctttgatttgttctttctctgatgtcttgtgtccttgggatcaaagcttctttcattggcaccaaataatgcccagtgaggagttctggccatataatcctttgcgctgaacgtttttgatccaccactatcttcatattcctggatgagctcctggaagcggttataatcgatccatgtccaccattcaccaccaattttaaactttctgtgtgctatcaggaggcaattagagtgttcgtgttcacatgcaatttcatattcggggatcagatccaccagctcgcggacaaactgtaccacttcctcatgccagggcacatgggccatggtaagactgcttgctgaactttctctgcagtaggtaacgcccttcacttcgatgaagtcaggattccccagggacacgagctgcgcgtaggcctggagctcgtccacgttccatgctttcacgagcatcagtctgtagacagttcgttgttgcttgactgccaaggcttttaaactgtcaaggaattgctgccagaaatccttgaagagtgggcggtcgattttcttcaggctgtctttggtactgatttccgcaggaaattgtgcatttgtgaccaggaagctggagattttacactggtggagtagcttcaaaaacctgttgatctctgggtacattattggttctcccacgagggacaatgcacagtgctttaccgtcattccttcttcaaagcgttctgctttgacgcccggtactcctttaaactgcttaatcatgttctgatggttttcaatggcttccttcaagatcatttcaggctggtccatcttctaccgccattcagtgcccacagggttgttgtggtgccaccaacagaagacacatttattagcacacgccaagctcggggtggtttccatgcagcgatggctctcaattccatagaatgtgtgtttgtaacaagctcctctccctcggagcatcgac

SEQ ID NO: 346923 - DNA, 1000 bp, Homo Sapiens
gcacttaaccactaaatctttattgaatttttattgtaacagcaatgcaatattagcaaatagagagaaatatagagtgaagagaatacagcaataaagttagaaggaggggtaggggcaatggggttcagtggtaggaggagggctactgacaggggtaaaagcaagggtttttatttatcacttttataacttccatgaaaatttaccatccatcattgacaagttcattctagcagtaatttatcagaggtcactcatcctctattaaattattaatctaatcacctttgaactttctcccactggggtttttatccatgtccaattcgctctaaataagttggtctccctgcagttccctccgagtttatttgaaatctttaaggatagcaattatagggtaaagggttacaagtaagtacgcatgtccacttatagcgatatctaatacataatattattctaacattctaaataaccccacccacttaaaattacttaatagtccctcccaccctaaaatgcttatgattatatatcccctattacttaaacttgattacacaaagaaataaaagcaatgcaattttccacagaccaattcaataccattctacaatctaaaacaacaaagaactttcagtctcatcagatgtgcattctctctttagatgaaaatgtagcatggttcccgcagggctctccatttctgcccaggtctttccagcaggttgttctctgttgtcaatcttggaactgtctgtatctgatgtgagatgtctgtggtggatgacaactggatcaattcagaagtccaagaggtacctacaaacttaaacagaattccagactgcaccatatagatgtggccctcttattttgtgcacctgcaagttcactgtattacttcacgatttgatcagactaattctccttttttccactaagacaaatacctcactgtccaaactaaattgacccttcataaatgtatgta

SEQ ID NO: 346924 - DNA, 1000 bp, Homo Sapiens
tattcaaaccatctttatttacgaaatactatcctgagaactattattccattaaacttcaatttgagaaaagtgcaatcacttaagtaacagcagttacttaaactgaaaatgagatcagtcaaaattacttttgaagaaagcaacaatattgtcaggtttcttgctgtggttctggatgtccagtagcaggctcctttgaaggcggaatcaatcctgaagggaactcgcttctaccttcagaatgtggggttggggtaaaatccaggtctcggatgaaggtaaggaggtaaacccctcggtggatagatgtttctcattgcaaatggagcatgtggtggacctgggaaatcccttggtggaaaataacctcgagaagctccaaacatggttcctggaggaggtggggggaaaggaggtcctcttctcatgaacgggccccttgtatccactggaaacaatggtcctctgactggagcaagaggtggaggaataaagccagggccagttgcttcattttcagcagggagagatgaatcaggcacatttaaattaccaagatcatctttggcatcatttctactggattccatttctgaaggcattgacctatccattttatccaaagaagtcattttaaaacttctgggttctgctggtccagacagtctttcagaattagaataaaatctgtcttccctttgtggaggaagagttgaatcaggatatgattgccctggtggaggaaacatcatcctacggtcctgttccaccggagatgacagggacccagtgtcagaaggagccctgtgaggatcgattaacctgtcatagcttggttctcctctttcattggtaatctgatggtccaggggattccctgggctgcttgggcctcttcctcctccccctggaagcacaggtgagagtctgagtggatcctccaacaaagtttgaggagagggaaaagctctcgtttcagatgaaggccgacccaatg

SEQ ID NO: 346925 - DNA, 1000 bp, Homo Sapiens
catcaattcattctttattcaacatacacttgttgatgcccggctctgtgcccgacaagatggtagctgtggagactgatctgaaaaagcatccttcgtgacaggtggaagttggatgggaacaacccacccagccaattaggttcctcagttgcatgacaccaaggagctgctgtctgggaaatgcacttattaggagagggacaaactgtgactgagccacaggctcacctcagccagtcaaaaggacttgggcactgcctcattcaagccaccttggagcagacgtggctacgctcccagcagccctgtacccatcggccactgaagatctcagctctcgtcagccttgcaaagcttgctgcatctgagtcttgggctcccggtccactgcttaaaaagttactatcacacaaagtcgaaagtagacagttcctcttgacctggaattgtccaagtcagcaccacagctggttaaggcagcccctctctctttcctcttcttattttcttggctttaagtctgcttaggactcacatcttctttagacagaaatgtagtctcactgcagcaagtatggcttaaacctgcttctgaaccgtgcacagttgtaggcctgtctcaagtgttccgtcgttgacttgtgtcccgcctcgccgggcaatgatgtatgtgtggagcgcagtcatgttctttgttacgcaacacagttttcaccttgggctaagatgatgtgattcttccaaggtttgtggcagaaatcccatttaataaactggtccagatttcttcatgccgtaaaattgtttaaagaagttatttattctgcctagcaaaggatattatttttattccattttcatccattctacaatagaaaatatacttcacacttcacagctttcttctacacatataaatcttttgaacatgtgaatcgtttccacacaccctccctggccttctgtgttgaattttctttgccattttctcagggaa

SEQ ID NO: 346926 - DNA, 1000 bp, Homo Sapiens
tcatctttttgagaattttattcacttcaaaacaaattcaacacacatatttacaaaggcattccagagcccagttttcgaggctgaggaaagaccccgagagcactttgcacagcacgcttcccagcgtccgaaacactgctctcaaggcggagcacagaggaagggctgcacctctcagggttccctaacttttcccttattcagtcatctaaagagcaaatacacagtaattccccagtttcctattgacgtcccagcggaagtctgactccagcgcatcacgcagtttctgacgcaaagaatcactgacgcggaagcttttcctggcgcgtttccggagacccatgcgaaatacaacgtccctcaccagaattcaatgaggcagagtccctgcatctgttctctgcctggcctgggctcccacatccacagaagcgccacagccggggagcatcgaagtcagcgcagagtctgctctctgctctgcgctcctcagtcccacagtcccctccaagtcacgggagctggaggccaaggagcccctgccacctgcagtctcactccaggtcagaatcgctgtcctctgaggaggaggaaacctgaaggtcctcatagaggacgctcggtgggacacgaacacagggagcctcagacttctctgacacatgagggctctgagcgaggaaggctcccggcttctcaggagagtgaaatgagggggccgccaggaggctggagctccagcgtccgttttccagtctccggaagagcactctgagaggctgggccccatcatggctggccgctgagtgatgggacatggtgcaggcctgggcagtaggcaggcaaggtctgctgtgcggaggctgccgttcgacgctgggcacctgggccgaagtcctcctgcccatctggggcgacgtacttggtccaagttcggttgcggctggcggaggttggagattctccagggcccccagctcacctccctggatgg

SEQ ID NO: 346927 - DNA, 1000 bp, Homo Sapiens
ctgtgtgggggtgtctctctatgttggccaggctggtttcaaactcctgacctcaggtgatacacctgcctcagcctcccaaagtgctgggattatacgcgtgagccaccgtgcccggctgtgcgcttatgtttgatttttgcagaaccacccttccctaatggttgtctcctagatccaaggtgactttattcattttagaatgaacttacccctttgatactgtaaccagagttggcatacatcacgattggcagaacccggtcatgtttagccatatggaagtgttctggaaactcctccttcttgtagatgtggaggtgagggtacgcattcttcagtgcctggtaaagggcttcctcttgccccaatttgggcaggggcatcccaaagccaccgtagcccacgatatcaaacttgactaagtccctgaacttgatgtagttggacaagggatcttgttgacattgggtcagatacccgatggcgctgtcgatttgctgaatcatcaacttcctgttctctgcctctggcccgaatcggtgtcccacgttatctggctctctgtagcacagagccacaaagtcaaagtcttccttggtgaaccagttcatgacggtatcgatgttctccctccgctctgtctcgctgctctttgggtgagtgtaggactccaccagggaccgcttgacagcctcaccctcgtatttaacacctcccttggaatagtggaatgatgccactttgttccccttcaaccgggccctgggttcgctctgattgcagcggtttcccgccagctccttggagagctggcagatgacccagccccacagcaggagttccaccttcttgcaggtggggctggggagcaaatacttagaggagaaacgaacaccctttgtaagcatgtgaaaagtttctgtgatggcagtgaagtgggacggggaggtcattgtcacaaggggcggcatgaggtacttggccttgacgccctccc

SEQ ID NO: 346928 - DNA, 1000 bp, Homo Sapiens
ctaggctcccaggagtggtttggaaagcgcgccatgtgctctggaggctgtggcagggcaggcgcggattggaacccgcaccatgtgctctgggggctgcggcagggcagggggagtcctcgtgtcccctagctcggtggtgaacagctggcacgtctctcaattgcggacagcgaaggccacgtagacctcagaagcccgctggtgctcccggcaggcagccagcctccgcaggaccctgaccagtgacacaatggcttctgggcaatacagcacatcctgctgtgaacttcgtgtttcaggtgtctgctgattggtctgctggcttgcaggggtgggcctttgtccctggccagcgctggacctgtggatttcaggactgtgacccaggaccacaggcagagctgtcccagtccagcgctgggccattgtcaccctagggctgtctaagttggcagtgatgtctgcctctaatgagaggccattgagaaggacatttccttggagctgctcgaggactcggctgtgacagtcgctgaagatgtatgcccgggggcggcatatcttgcagatggccaggcctgtgaggctggcaccactgccaagctctaagacagacctgtgagtgaaggctgccgggttctcgatggcccattctgcaatgtagagggcggcatcccatgtgaccagacccgtggtgctgtgggagatgatggccatgctttcggagagtgtgaccgagcctcccgagggcaacaaatagctccggtggccctggggggactccttggccatcagggtctccgccagcgcctcgtacagctcatccaaaggctccgtgtggacagcctcgtgctttttgatgagttctgagagaaagcaccaggcatacttgactgacggcgggtgcttcacacacacaggatgcctcacagtcttctgcaaaatatcctgcagcagctcagaatctgatgagtctcttaactttgcctctaagctc

SEQ ID NO: 346929 - DNA, 1000 bp, Homo Sapiens
acgatatcttgtgctttaattaaagaagatggaaataaagaagcaaattcaaaaatcagtatacaaaagtcgattgattccctctatgtggagggaagacgagcttgaataagagaagcattctgtgttacgctttaataatcgctggagatctgccaccatgcatttgtcaaatcccatagaatttcacagcacaaatagtacatcttaatgtggctcaggagtacatataatgtcagccacagtttgtgggtaaattacatatttaattaaatagattaaacaataaataatgatatgagctctgcctggacacagtccttgcctctccaaccagtttgccaagggcttgaatttcttgctcattatcctcacacttgacataaaccctggctgcagagtaaaatcaatcactcgtggagattttttaatatgatgatgtgtcaatttcaaccatggataaggccatttagccttagtaaggccgatcgtattaagattctgcctgtttgacaaaatttcaagtcatcccacttgatattcaggaaacattttctcttgagttttaggttcagtggtgaggctccttcacggacaatacattttccaattctgaggacaaggcagaggagggcccctctgtgagaactttcattttgcttcgggaaaagtacattgaatcaaatatagaaaaggcttgcaaggtggctgacaggttcggctgttttatcatgctggtgttttatcttctggactgcagtaaaaggagcacagctgtgtctgtctctgtgtaataactcaggactcacctgaataaaatgtggggtgtcatgagatgaactgctacttccagttagagaggctccagggacaaaatttcaagagccttctgagggatagaagagaagagctgccttattctctgatcccaggtaactgctcagagacagaggcaagagctggggacacccaaatgcatatactaggggtctttgataca

SEQ ID NO: 346930 - DNA, 903 bp, Homo Sapiens
ttatctttttgcagcaagaccctgtttaatggcagctgcaattacttgtagcttctctacatcaacccccttgtcttcctcatctgtttctgcaaaaggttttctttccctgtgctcatcagtttctggatccttttctccctgttccatttcctgggtggccatgacctgagcctccaactggaccttggcagccctcctgttgctcctcctgccttgggtgcaatcgctagttgtcctcctaccgccgcccggccggctacgagcgcagcgtctcctctccgcggcgccgcccctatctccgtgcgcggcgccgagcgctaggccgggccggaaccgcccccgtggcctgggctgttgctgcgacccagcggagcctgcgtcctggcgccttccgtctaaacagaggccgcggatcgggacgccgggaccccacaaactggcagccaggaggcgggccagccgaggatcgggggggctcggactccccctgcacccagtccactgttcggagggacttagagcagggtcccttccctgagggcctcgcccccgaggacgtggcgccggagccgtgcgacccattggcttcagcgggtgggaagcctggggccgggacgcgcgttcgccccgcgctggggttgaacctgcgtggatgtgcggcgggtgaggaaccgcggagaaggcggtgggggcgcggcctgcagcccggtcccgggcgagccctccgcgcgtctcccctcggcgcgttttccctccagggtgactgggaagccgccgccgccgccgccgccgcctgggaggggccgggctgggcgcttttgccccgggccccggaccccgggcgtttgtccggtgcgctggcttaagaggcggcccctcccagaggggtcgggcaagcat

SEQ ID NO: 346931 - DNA, 960 bp, Homo Sapiens
tgatcagaagtagtatatatatatttttaaagcaaagaaacagaccagcaagataaaacttctaaagcatgtgcacatgctcacatttgtagaggggctgtatctgtgagactgcccctgggggaggccattaatatgaacgccatgccccagctgtccctcgcttggagcctcttaaggcaggattgggaggctgctcccaggattagcatcccatccattctcacctttctggcagcttttcaagatatctggttcctcagctcccagaagattcaggacccaaagttccttcccctgctccagctgggagatcaactccggcttagggacagggaatcccagagaggccacgttcccatagttctccagcatcacatcccggtagagcgcccgctgctgggggcccagctgccgcccctccgcctgagagaagtacacggccacatcctggaaggtcagcggcatctcctggtgccctggaagctggaatgtggctgccattctgtgtgcatgggctgctgtggtttccaagagaagacaggagactgccctggcctgaagtctccccgaacttaccttcagtggggagaactcaggctcagccccattcaaccaggggtgtggaaggatggccaggaggcagaagctgattgctgctgtggcctcctgggtcgcgggaggcaggtcactatgcagcacgggccgacgtgccctactgctcagtgactcctgaaatcccagaacggccagagccagagcccggggggatccagggacgcccggctaaggggtgaaagctggcagttcccgtggtccagacctgctgaaggccctggaaatggggtgcagggccgttctacctgcctggccaacctggggcaaagagccacgtgagggtgcagcctcaccaaggctgaggacgtgagaaggaggccgcggggatgctgccgaaggccc

SEQ ID NO: 346932 - DNA, 1000 bp, Homo Sapiens
tttggtcagcatccagcctttattcgacatctggaagttcacacagggtagaaatcttatgaacatactggatgtggaaaaccctaaaaataacagttctgccccgttagccatggaagagcagactggtgaaagcagtgtacaaagtaataaagacaatttgctaaaggtcatttaaaccacaggacagactagatcttagagaagtacagttcctccaggatgtgactgctgtgtgctgtgaccagaaagtaaattgtactctactagtttcagctggaaaacagtaaatatttttctgaaatgttaatctgatcttgcctctccctgcttaaatcctttaatgacttcccacatcctatagcagcatttctcaaagctgctaacagcagaggtaatgtggaaggaaaatgaaataaaataaataacattaaagtttaaaataacaaacacaacataggtaatagttaccatttagtgtaggctatttagaagttatacataggctaagaaatttaagcagccactctcagcattgctaagaagttgcacctgcgagcttatctcaaccttccaagcttatctccggcctcgcgactccctcatacttccgtaattcctgttttcccttaccccagctctgtccagcttcaaggttgactggtcaagataactaaatgtaagttttctcagaattgtcacaggttgaataatttactgtctttgtctgaaacttgtatcctgccttgtttttcacgcctgaaacgacatataagcaagcctgctttctttgtctgggtcggtagccattttgggcatgagcctgctctaggctcgggtgcccgaattgaagttctctttggtctccaactgtctcttcgtcttccttggctagagtcttactgcaacagtaagtgctcactaaatacccctagtgagtttgggatcaagggagtaggaaagcaggaagaaaagaaataacagtcaacaggggaagtga

SEQ ID NO: 346933 - DNA, 776 bp, Homo Sapiens
ctggaggaggtcgttgatgatccgggctgcgtgctcgcacctgtctggggaccccattatatgagcaatcttctcgggccctgtcccatcatcttgcttgaactgtatcggcacgccagcatcatcttcactccagcgtattcctgcagctgcttcatggtctccccgcccttggcgatgaccaggccggcgttgcccgcagggatcatgtcctgtacagtgccattctggccccctttggcggtgtcgtggaactgtcctgggggccccccatgaccccgagacacaatgtcatccagcatcatcttcgctttctggagagattctggggctcttgtcaaggacacactgtgcttgggtaggccactgctgcctggagtaatcacaccgtctgggaccctgcactcttctgtcattgaagtccttgggggacgatggatgggtccaagttgagaactgattgagtctccctgggaagccagcttcttgctctccggttgatctccatcttccaactgtctcttatggccccctagaccaaaatctggagtgctgttattcactgtcgttgcagcatcacctacaattttggctgcgatcttgggaggagccagtctacagccccagaggcattgagacagcccaggagccggtctgtttcctgaaaggaggcaaagtcctcccattctacagacctccacccctccaggccatggggaggctgtaaatggagctgaagaggtcagtcctagcagcacgtgacaccttcttgtcat

SEQ ID NO: 346934 - DNA, 1000 bp, Homo Sapiens
tttttttttttttttggttttggccaaactttttatttagtattctgtagttgtttaacacacacttaaatggtcttattgggggagggggaaagggaggttcttgcagattcccaaggaaatgtcagaaaggcaaaatggccagcatcatccatttgcttttttgggtttactgggtgaatagcactttccttacaaaggcatgtgatttcaggtttttcatactgaaaacattgagatttcagttggaagacaccctgaaatcttatgagtagcataccccaaccaccctctaatagctagcttgtttgtataggtagaatgattcatctctccattttagatggctagatgttttgtggaagatcttagaattgcctgcctcatttactgggaaaaatcagataggaagtggcctttagggatacttttacttggaaagttacaacaccagtacaagtcttaacacatttaacgtttgcttgttgaaaagcaatgcaaaagtcaaaataaaattaaacatgttttacttttctcctcacaagaacataaaaattatggaggggaacttaacagggaatttttaaaaagtaacacaatttttccttttagtagtccttgggtagttatgatagaatagcttccactttttgtttctttgaactgggattttggtccaaagttttgtttgtttctagtatctgcttctacctccccctctatcagatcggcttcctccacagccaccaccgcttggtgctccgcacttgaactgctgtaggaatcacgtggaggagggtatcctctttccatagaaggggtaagccctctttcttgtctgccaacccgatcacgaccacttgagtagagatcacttcggctgcttgagtaactgtctcgacttccaccatatccgtcacatgagctgctgtaatcatcatagcgactgcttccaccataagatggtgggggccctcgtgtaggtggagcactacgtgag

SEQ ID NO: 346935 - DNA, 846 bp, Homo Sapiens
ttggaccaccaagttttatttcttcaggccaaagaacacatttatagcccacagtgtcctataatggacataccatgttgcatattgtcttcatctcctagggctgccataacaaagtgccacaaaccatgtggctgacttacagaacaaaatgcactgtctcacagttctggagactagaagtctgagatcaagttcttggcagggctggttccttctgagggctgtgagaaagaatctaatccacacttctctcctagcttctggtggtttgctggcaatctttggcattcctgggcttgtagaattctgccttcatcttcatatggcatatcccctgtgttatctctgtgcacaaatttcctgaggaggcatctcttccgtgcaggcaggctgtcctggggacctcagagattctctccagcggcagcggaaaatgggcaatgggtggattcgggtccagattctggcaggagggagtttgggatcgagatctgcgcacgcgtcgcagccatctccgcgcacagtggtggccaccgcgactggtgctgaagtgtcggcgcgtgccgggcgctccgctgggaccggggttgctggccctgagtctgagctttctcatctgtacgattgggacaagtacagtaaccctcgcccgtcaagacgggccagggctgtcgcgagggtccacgccttagagcaggcacctatcttctgcagggccctgagatggggtctgactcagttcctgcggggaacttcaccagtacccagtcagtgcccttcagttaaagaccaccaggagcacacttgtaattacattgcagcaaggaatggggtactatgggt

SEQ ID NO: 346936 - DNA, 769 bp, Homo Sapiens
tttagtttaaatatgcattaaacgaaaaggtattctctcaaatgagttaaaatgcattttatttttagacaacctacatacatgtttttcttaaaaacaatgcctccactccgaataaattatggtaaaaataaatgaagagctcaagatgatattagtcccatttgtcttaggtcctggtgttgtgtggatgacaattagaagcgagttatgatgacaggtaatagatccaaactaattgccaaatttgttaacatttttccgtttctaaaccatccctaaagaaaatcatatatggggtcacaccatcctcaccgtagtccagtagagcaaccatgccatctggattcatgttttcaccaataaagaaatggtagtttttgaaattagcaaggatgtgcttgatttgttctgcagcccctgtcataaaaggttttactctttctggtctcagttcttcaagtttgcctttgattgatttcatgtaatctttgatgtacttcttgtgggcttcttttgtgaaacttgtttcctgcaggtgatggttcatgacaacatcgacagcagtgattactgtgctttcggtaccttcaccctcggggccttcagcggagacatttccaccaatgagcgagtcatcaatgttaccttctgtcctactgaccattttccccaccacctcccagcacagcccgtccacaatctcccagatcttctagatgtcggagaacatctcattgtgactgatgaggtcctggtagataatcat

SEQ ID NO: 346937 - DNA, 1000 bp, Homo Sapiens; identical to SEQ ID NO: 161521

SEQ ID NO: 346938 - DNA, 1000 bp, Homo Sapiens
acttggaatttccatggatttatttctaatatactataaatgattttagaaaaagaatgttactggagcaggacagctcatctagggtagtggctctcaaacctagctaaacagtcgaatcaccagaagggctcttaaaatccagatacagaccatttaaaatcccgatctctggaggtggagccaggtaaaggtatcttttgaatctcctctggtgactccaagataaagccaagtttaagaaccacactgatccagtggtaaaacaattttcaaaacagaatcacatgtttaaaaaattttgtcccaacatactttagaaatggatataattcagttatcattttataataatctttaatacacattctaactgtatacatcaatcagaacatttcttcttgactatttttgtaattctgctaaatggaaaacagttttcatgacaagaaaacatttgcagaagaaaatttaaaaaagaaaacatttgctgtaacgaactaaataccaaaagcttacaactaattggcgctgatccgtagtacacatgtaatcactggactattacatattttttatctttttatcagctgtatatttcttgacctcatcatttaggtgggtagctgcctgctacaacagagaagcagggcttcttgccacagaggagtgcttgttagttgactaatgaattctggcaactgattttcccaagaaaatacatttttaaatgttttccttttatatattggaacaactattttcctgtttttatacagaacacatagaattgtagtaattcttaaaatggaattcccataattaacattatatatccatatgcacaatttggaatgaattgtctttttgtttttgtgtgaaacttacacattttaataacctcattcaatgtaattagtaaatagttttcttgaggatgatgtccagaacccagagacaccagcttaactgtggttctccttattggctatactcaata

SEQ ID NO: 346939 - DNA, 1000 bp, Homo Sapiens
ttgttaaaacattctttatatttaatttcaattttataatagattacaggaagatgcttatgaaacaaatacatttgtttcagtatatgtctttaaatgatagactgataagtatgtaaacaactatataataaaaggtttccaaacgctgcctgtaagaaatcaggcaaattttaccataagcaataaaccattccaagccttccaaacagtctccatagccacaccagcgtggcagtaagctttaaccaaacaaaaacaaacaaacaaacaaaagcactttgcaatttgttgctgcaaaatagggagagaaaagagtgtataaacttgatggaatcacgacagtcaatataatttaagagaaaataaagttaataaggttgatggtgtttattgtttaaaatgtcgaattctgctgtttgcttggggctctggacaccgtaccactgaacaaatggaaaactccacagagtctcgctatctgccagtgggggcgccgtccaaactcacggcaaataaacggcatcaggtgctcaccatccacaacaagagggcgttttattttcatgcatgtggatgaaatacaatttcttcagcaaactcagcaaaaactgttcaggggcaaaaatgaactctgcacttaaaagaaaaataaaaaatgaaagcacaaaatactaaaaagtaaataaacgctctgcatcagcacactggtatcaaaacacacatccacagcacgtcctaatcctacaggaaacaatccttgcttatcagaggtgcatatctaaattaaatagcttaccaatatcttcttgggagtaggacaaaaggaaacagaaaacctacattaaaaaaaaagtttcttttccctaaatgttttcctgaagctgaatttgaagtggggaggacgtcagtcgtccttgtcattctcgttgaagtcatcatcctcctcgtcgtcctccccgacgtaggacaccggggtctccaccctggagccgctgta

SEQ ID NO: 346940 - DNA, 647 bp, Homo Sapiens
ggaaggtaggagtagaaagctgccttgtacttgacgatagatttgtacctcttttcagtgaatctgccaagatccacattgccctggggggctgtgatgaggtccagggtctacccaatctcagtctgataggaactctgcaggaagagctcgattaggtccaggtaatagggctgctccaggcaatagagcttcagcaggtggtagatacatacttccagaagcatagcatcattgatggcatccaaacccatgcccggcttctgataccaccagatctgtccccggcgggagacggatgaatccatgatgtcatctgccaccaggaagaaagcttgcagcagttccacacaccagcccacggtcagggcctgctggagactatcagcatcctgtttcctcggctccaccagctcccagaatgctactagcaccatcaaatcctggtgatacttgcctccaatggcattgtactccaggacctccttgagccggtcaacagcatctcctgtctctgagtgccccatctcatcctcactcagcaccctaatgatctgggggaagtgctgaacgaaatcctgcttttcttgggcataaacatctgatttctggtctccattcattctgagggaggagcaaagggctct

SEQ ID NO: 346941 - DNA, 1000 bp, Homo Sapiens
tgtcctgatcttacaagtttcatttcctcctatcattgtcaccaaagcaatctctattgctaggattcttcatcgcgtgaaggtagaaactgcttagtaaaattctccagctcatattcaagttgaacagctttatttcttaagagctttaaattgttttgtattttctcccactgatctatttctttgggtaatctagcaatttcttcttccagttgtctttgagtaatatcagcttgttggcacaggcgagcaaaagtggtagccatttgttgttttacttggtggctgcagtttgcacttgtggagctagcaatcatcttcagttttccagttgcatagtttacaaactgctgtttaaaggctctctccttggcatgggtggtccaggacagtctttcataaagatacaaagctccatacatagttaatgaaacagatatgagtttccagcctatagttttccaaatcattcctccaacattatcgatgcccatagaagttctagatgtaagagaagccaatcctgttactaatgtaatcatgagttctgcctgtgatgcattatctggcattgctggactggtaggagcagtgggagtagaagctaaagatctagggagctgaaagataggctctgataatcctaggagcaccatttgagcatttctagggcccaaaaattgaggtacgagggaagaccagcccagggaaaaatgaaacacaatatcttcttgaaaatctgaacataacttgtggtaatttagattataactaagatcaaatttcttgcaagggatcagtgtatgtagtttatcctatataccagctggaagtaatggcttcaaattttcaacaatttcttgctggaactgaagcactaaggtgtttacttcattggtgcatcaatcagccaaatttcttcccataccatcctctatatgcttatttaattcacttttatatatttttaatacatctggagtaggatgaaactgaa

SEQ ID NO: 346942 - DNA, 1000 bp, Homo Sapiens
  misc_feature (944)..(1000): n is a, c, g, or t
gaagtaaaattatctctatttgcagataggatcttataagtagaaatgcctaaagggcgtgtgtgcacacacacacgttagaactaataaatgaggccaggcatggtggcttgtgcctataatcccagcactttgggagtcagacgtgtgcagatcacttgaggtcaggagttcgagaccagcctcaccaacatggcaaaacctggcaaaaccccatctctacaaaaaaatacaaaaattagccaggcatggtggtgggcacctgtggtcccagctacttgggaggctgaggcacaagaatcacttgaaccctggaggcagaggttgcagtgagccaagattgtgccactgcactccagcctgggcgacagagcaagagagcgagactctgtctcttttttcttttttaaaaaagaattaaaaaaaaaacctaataaatgaaatcagcaatgtagtagcatacaaggtaaatacacaggccaggtgcggtggctcacacctgtaatcccagcactttgggaggccaaggtgaatggatcacttgaggtcaagagttcaagaccagcctggccaacgtggtgaaaccccgtttctgctaaaaatataaaaaaattactggtggtacgtgactgtagtcccagctactcgggaggttgaggcaggagaatcacttgaacctgggaggtggaggttgtagtgaactcagactgctccactgtactccagcctgggcgacagagtgagacaagcaggagcgggcccctccctcacgcggagccgctggcacggacagccccgggaaggtcaggctgagcgtcctttctctgtgccccacggagggtgctcccattggctttctcgatagcaccatctcagggtccagctggccatggcctggattaagtttaaatgctgggccagtccccacttccctatatatgaannnnnnnnnnnnnnnnnnnnnnnnnnnnnnnnnnnnnnnnnnnnnnnnnnnnnnnnn

SEQ ID NO: 346943 - DNA, 1000 bp, Homo Sapiens
tcaggacatgttaggatccgtccccaactccgccgtcttcatccccacaaagccacggaacacctgtaccccggagcccagctgctcctgcagcccctggagaaatctgtacattccccgccgaggaccctgccgctgggcacactgggaggctggcctgagggaccccgcgcccgtgtccctggggccgctgcctgggagagcgcacgatttaccccaggcgaggtgacccacaggaagtttggtgacgtcggatggcccaggccccagagtgctgtgtgtgctgggggtggagggtggtccccgacaggagccgtcggcgttccagggaaggcacccggtcggtcgggggactcgccggggctggggggtgcgctctacttctccgagcgccccccagggagacccagggcgcaggggcagccccgcgtcacccacggtgaccagcgtgtcgaagtcttgaaggcggttggcaggcggctccggcgaccgcgactcggggctggggcagagctcgggcgcccagtccggggtctcctctgccacggccgcctgggccagcccgggcgccttcatggggacgcactcaggtccggggcgccgggccgggccggagcgctcggggagccgggcttccgcggatgcagcctcggagggcggcgcggcggcatcaacggaggctccccatgcgcgccatgcggcttgtggaggccatcctgcccacccggcccggagcccgcaagacgccaatgcgccttccggtgcgcgcgcggccgggcgcggctgacggagcggcggggacaatggctggccgtcgctcacggcacaagcagcaacggccccaggtagcagcagccgccggcctcgtggggcgggcacggagcgccgggaggcggcggggaaggcgggggccgcggcccgggcttgtagagccaggcgggggccctgcgcattcccagtctcgcgcccgcggcctcctgcagctcggtagcagcgtgcg

SEQ ID NO: 346944 - DNA, 852 bp, Homo Sapiens
tcaacagcaacaagatgtacatttattgtgaaattctttaattttctttgaaatttaaaataaagcctatttataagggccaattttactttcctgtgtcacttcacactgattagaaaaaagtaatttagtggaaaaacacttcactattacccctcccaaattcagttgtcatgaattataaatttattgtaactcatttgtttttataattatttaccataagtgcatgaaaaaaagccataccttataatgcttctttaaaagttccaatatttaaagtaaaatctttgacagttaaggcatttcaaaatattttcattcaaggaatgtttgagtttccaaatatgaaaaattgacccttacatgggtcaatgttaaaataaatgcatttcacatagtttgataataacattggttgacccataccttgctgcattcttcaatatttgtaccatgtaaaagaagtttttctatcatggatgtatcttcattatacacagcatagtgtagagcagtccttccaaagaaatccataatatttggatcggcgccatttggcagcagaatagttgcaaaagcctcctgccctagttgtacagccttgattagaggtgtcctgcattcacggtcgcagaggttaagctcacatcttgtggacacaagcagaaataccatttctggttggacagtggcacaggccaaatgtagggcagtccccgagccccggaccatccgccccacagccctcagcctggaagggggtacttctccacatccacgggcctcttcccgcagccccggctcccggcccccattaccttcccttcttgtctctcttattggcatcat

SEQ ID NO: 346945 - DNA, 939 bp, Homo Sapiens
tcagatggacgaagatgacactggagtaagagtcttgcctcgaagatccggagaaattccagaggatcttaacttggtggaggccactggggacacctcagtcactagcactgagggtaattgtaacttagcatatcggaaatttctgttgaggccatcagtggctttcatgtcctctggagtcaactcaaagtcaaaaacctggcctgggcttctattgtatttcttggcaatggatttcaaggttggctcctctaagagatatgggctatctgggtccatccagtttgggtctctgtgagatgccagggccctgtaggcaactagaacaatgtccttggacttgcagaactccaggagtttgctctggttgcaggtgggcttgtacttgagccctggcttgttgaggatgagttccagcagtttgtgattgaaattggacaccccgatggacttggttaaacctgcttctttgcacttctccagggcctcccatgtgtcacgaagatccacagtatcaaaaataatgtttccactggcatccttaggcagcaattcctccccaggcttcatagccaatggattgtggataatgaagagatcgacatagtccagttgaagtttcttcagtgacccttccagggctgggcgaactaattctggtctaaagaaagttgtccaaagctcagtggtgtagaaaatgtcctctctcttcacagggccatcagcaatcttctctcgaatggcctttccgacctcctcctcgttttggtagaagaacgccgcatcaatgtgacggaagcctgcatcaatagccacttcggtggcttcaccagccttgctcttgggggtatgatcaggagcataagtgccaaatcccagcatcggcatgacatgtccatcattcagcctcacggaatggctttgcttcagatccat

SEQ ID NO: 346946 - DNA, 1000 bp, Homo Sapiens
tcaagaaaggagagaagacgttcgcacagaatcatctccaaaaatggctttctgacgcattcgaccagttttcaagtctatttgtttttcctcctttggcatcaacagcccttgattatctatagcctctgacccaagtggtttggaattggaaagcagcgtcactcgacttgaagccatcttggcatcaatggtggagtaggtggagatgagactctggaccagctcatgggtgagccccaccttgtctgatgcctgaaaaccgtggctgccaccaaggtcaacacagacagcgtctttgtcatacagcacaccctcaactccagaaacaggcacataaaccagctgctccttcttatttaaacagcacttcttttgttattcaggaagaacacaagggtctgggaggaaaccgatgtcactcatggcaaaatgttctacccctggcatgtgaatttggcttttatctttgaagtgtgctcctcttaaataaccataaagtgacacctgccggtcacatttgatgtttgtttggatatcctccgggtttgtcaaatcttccatccatccagcagaggaaaaggggcaggcacacaactgtgtctctaggctgaaagtgacattcattccataagacaccagatgggagacgacgtctacctgtctgccaggatataagggtgaaaagtttgccatgagaggcctaaacttcataactgtaataaaatggcccagattgtggatttcttggttttgatattctccatgcaccattccagaaaggtagaacagtttggcaacctggtaaacttctgtccagaacctgtgttttaatcgcttctttgtcttcttcagttgcttgttatgcttgaaggagtcgaggtgggtgagaactcccagaattttaggaaagccatgtgcttgacagatgtttagaaactcaaacatttccatttcaaacccaaagctggcatctataagcatcagtaccagatctgct

SEQ ID NO: 346947 - DNA, 789 bp, Homo Sapiens
ttatctgttgtccatagaatattcttttatgactctcttcattaatcttcctccttcagctatttcatgaactttttgaagtttcttgataaagataactccaacataccggttttcagaacttagctcaatggcttggttcccagggtggagagagaccgcttcttggctgctcactgccatcccctccccagctgctgtggtgcacacaagaatcttttctctctttctgcccatgtgctttgtttgtagatcttcttgtgggtcaacatctttgcccatatgaaaaagttgacttcctgtactccctgaatataaatctcctttgaacagctgacctagtagactgttggctaggtccacataaaccattgcaaatgtgggcctttgcttgattagagctttttcagtgtgcttttctccttcagcttcctgtccttcatcctgaagcttcagggcaaggataaccttaatgtgtgcatcttttggatttagactgacagcccattttagggggtgcagagaaaatgtctcattactgtctgttgtgttaaaaccgtccaggcaataggcagtgatgacatacccagtgctgaattcaggattttcagggcccacctctagagccttttcaaagcaggccttggcctgttcataattctttcctccacacttcgccaaggcccatccttcctcacagttcatctcaggacactccatttttgtgtccacgaactggatctcttccaagaccctgttttctttctctaggtttccaacttggtccat

SEQ ID NO: 346948 - DNA, 1000 bp, Homo Sapiens
tcagctcctccaaatctgcatttgctggaggcacaggctgggagcaaacacctcacaatatctctgggactttggctttttcctcagtaaattcgggagtggaagagtgaagccttctttatctttcaaccagaaagttgtttgctctcctttgcccttgactggaatggtgcctctctttagcaaatcgtaccctcccaatgccaccagggtgcttgcagtgctctgagagacatgaatccggagaggtgaactgctgctctccattctggatgccatgttgacagtgtctccaaatagacagtatctggacatggtaatccccagcacaccagccaccacaggacctgtgtagaggccaatacgaagctggagcttctcctggggcatgtgcccaatttggaagcagatggtggcactgaggaagtgcagggacatggtggcaatctcagccacatgctggcttccattgtggtagggagtccacttataaacatcataagttgtgatgatgtgatcgaataaactgtacacgtcattgaggagcttgacgacttgcaaaggggagctgagagaacacagctttgtgaatccaacaatatcagataaaaagattgtcacagattcgaaatgttctggttccacggaccttccggctagtagttgttctccagtgaagctgggcactttggtggacagaagcttctccaccttcctcttctctgcagtcagctggctggtcctctcttgcaccacttcctccaggtaattggcatacacttccagcttgctcatcacactggccagtatgctcacatgacctctgggactggcctctcgtaaagttttcttgatggaagagaaactgggtcttttctccagagattcatcccaacacaccctcaccatggccacgatcttttcattgcccttctcctcgggcagggaaggttgcagtgggactgctgctgcagggtctttgatttggttgatgatttca

SEQ ID NO: 346949 - DNA, 1000 bp, Homo Sapiens
tcatggaatccggaccaagggcaaaaggcagcgcagcagctgctgggatggagccccctttaacacttggagatttgtcccgtcctgggaggtgtggctgtcatctgcgcaaggcaggagccccagcagggcccgctgcttcccctgcagcagggtgaagggcagatggtgcaggtgtgagcctgcctcccactcacacactgtctccaggatgcttctttctgaacccaccatgctcttgttcacgtagaaccccagaactaggatgatctgatgtataaagaactgggcatagagaaagtcatcaaggagtttaggggaggcttcctcattgtcactatgagcagacaagacgaaagtgaagcagtggtcactgctgcctcgatgggatggagatgggcattgaggcttcatttttccccctccaagatacagcatcagtggggtcactccactctggttctttaaatgcaaggcctgtggcccctgcactcctgggggcagctcctgctcaaaagaacagcatcgatccctcaaaccgggaccttccccaggctccctgcaggtgggatgatccctgcaggtagggtactccctgtgggtggggtgcttctctgctggtggggtgctctctgcaggtggggtgctccctgctggtggggtgctccctgaaggtgggttactccctgcgggtggggtactacctgcgggtggggtgctttctgtgggtggggtgttcctgcaggtggattactctctgcaggtgggctactctctgctggtggggtgctctctgcgggtggggtactccctgtgggtggggcgcttcctgtgggtggggtgcaccctgtgggaggggtgctcctccctgcgggtggggtgctccctgagggtggggtactccctgcaggtgggatacggcgagactgtgattgcgcggctgcagctctgatccttctcgggttcaatttgaagacgccaggaggcctgaacagccatt

SEQ ID NO: 346950 - DNA, 1000 bp, Homo Sapiens
ctatttcaccaacttcccatttttacttgggactgttactgcttcagtgattccagagaaagttgtagcctctgcagtgggtccagtgccagtcactccacttgctccaggagaagttgtagctgctgtgctgaaacttccaggggcaactgttgtgccaggtgccaccccagaggtgcctgtgttagaacttccagatagaatggtcgttctagaagattctcccatgatatctgtgtgggcacttccagctgccagagttttaccctcagtagtacctgtgattgtttcaactcttgtttttccactttctcctaaagaagtcgtggcctctgagttggagctcccaggggcaattgttgtagcagagggcactccagctgtgcctgattttatttctgctccagtggtgccacctccttctagggaagttgtggtttctgcggcaggtgcagccccagtcgttctacttgctccaggggaaattgtggctgtgttagaacttccaggtataatggtcattctagacaattctccagtggtacctgtgattatttcacctcttgtttttccattttctcctacagaagttgtggcttctgagttggggccagccctagttattccacttgctccagaagaagttgtggctgtgctgaagcttccaggggcaactgttgtggcaagagataccccagaggtgcctgtgattacttcggctcttgttattctgctttcttctacagaagttgtggcctttgtagttgttgtaaccccagtcattccacttgctccaggagaagttgtggctgctgtgctgaaacttcctggggcaaccgttgtggcaggagctacctctgaggtgcctgcctgactatccaaggtcatgaaattcaggagcagaataactgaccaggttgacaggacaccatattgcccagaataaaatgcaggccctacttcaaatgccttcactatttgttctctgtagctaccagat

SEQ ID NO: 346951 - DNA, 1000 bp, Homo Sapiens; identical to SEQ ID NO: 161524

SEQ ID NO: 346952 - DNA, 1000 bp, Homo Sapiens
ctaagtatccatccctatgacatccaaatatgctgggtgtacttgagcttggtgttgagtagccgggcttaaccctcctggcatccttatgaggcctatgccatagttgtagtcaaagtcatcaacattggtgaggctcactgagtaggacagcgccatttggtaggtgtctgcctgggctgaagagccccagttcacaacagacaaccaggtaagggaggcgtagagacagccaaagttgagggcacaggaacagaggaggaagttggcgatggtgggggcaatgatactcagctcggcgataaggatgaaacctacagcagtgaggaaggtgagcagatagccccacagaggctcgtggttcttgccatggcctttccccccaaaaaagccagtgattgtgtatggtttatcctggcacagctgctgcaagaggtagaacagaatggctctcaagattccagcagacatcagagggctaaaggcagacaccatgttcatggtctcatagtgattagagagcccacagaggcaggacccttgctctcgacaactgctgaaatcccagccatactggcactttgcgcccaggcggctcccattctgcacacccatgtcagtcctattttcggaagcacgttgaatcatacaggagccagccttgattttgccgttgctggagatggctgtgcctgcctgagcagcgatccaaggcagctgcaggtagagaatgatgccccagatattgagcatacagcaaatcatgactcctatgacccagctgaagtgcactggggccttgccgattttggccccagaattctccagatcatcttgggagtgtggctgggtgtgggtttcctctcgaggtggacgtggcactatttcttggcaagctgtatggagccatcccaggactacggagttggcatagaactcgtagcagggtccagtgtcctcatccttgtaagcagttggtgaacagaggctggctcggggt

SEQ ID NO: 346953 - DNA, 393 bp, Homo Sapiens
ctattctgtggcatacacgataccttggatggtgacaggcaaagctgttgctagcagaagaaaatgctttccaaatgttgatgtctgcaagctggacagtaccccataaaggactatgctaggcctggagctgatgtcaaccaacacctttcctgatatgtcagagagtacatgatgataaatgaatttcatttccatgagagagaagtaatgagaaataaatcccagagaattagaagagtgaacatcaaattttgggttagttcgcatccactgtaacagcgcctggcggtcggcaggagccacagtgcgaagcggccgcagcatcactgcctgcctcgcagtgggaaattttaccttgctggagcaagccgcgcaggcactggctggcat

SEQ ID NO: 346954 - DNA, 564 bp, Homo Sapiens
tcaatatgtagcagtatcctttctgtatttttccttcagctttgcagacttctttttaaggctgcttgtcatctgcagcagtgttattccacatccctcccagtttcttcgccgaatcaccaatggacaggccagaatgttctcttttgacttttgggccacacgcagaacagaacaagaaaaaggctgaaggagacctctggggtgcattgggatccttaaactttttttgtctcccctctgtttggcaatctttgaatcttcttggttaatattgttttggcaaatacaggctgtaatggttagatgatggcagtgtttatgggtaacacatgtgcacacttggcattgataaccctgtttcccaaatactccccagataaacttcatgaagtggtcatagcccaggggcatcttatggatgacggccgccatcagtggcgttagtctagagctcctcattgtacatgggtttggtggtcctccattggtgctggtctggcccacgtgcacctcgttcacactcaccatcaggtacggctccagcagctggtggcccttcat

SEQ ID NO: 346955 - DNA, 570 bp, Homo Sapiens
tcagccatgggggctggggagacttggggccataggggccagccctggtacctgcgtctggcaaggacgctctgcacctgcagccaggagttgtccacgggcccccatgtgcgtgctgatggtggttgtgttgatgtcaccgatgatgctgagcacctccttcagcacgtggtacatgcgcagcatctcatctcgccactgtgcctgctctgccaactcctccatcagcgtgttctggttcccatgcaagtacaggttggacagcaactctgataatatgagctccttggtgttgttgatcatgacgtgcatgacggtcttgggcatgaaaccaactatgaggtcccacacagtcttgttgacaatggccttgtaggagtccacaaggttctgggtggtttccatttgccgcttcagtttcccctccccgattcctgcaggggctctccaaaaatagggaatcttgttaatctcattgaagaacttctccttcagtttggcaaacatgtcctcctggctctccccagcactcccactctcggtggagttgtccacgggtccaatgggcat

SEQ ID NO: 346956 - DNA, 1000 bp, Homo Sapiens
ttagttgtgtactggggccttggctgtgctgatggccagaagccaggggccttctccacagtccctttggacttgtcttggtccctgagtactcccatgaagatccttcttggaggtgcctgtcaggtatcctgtggcctccctgcctggactctgcttgccgtgtaaacacccccaactgcgctgctctgtgctcctctcccaggtttcttgttcgattcctcttaggtctttggctttcaggacctcagattctttatccttgtagccaccagaggacagagccccagaagtggatgttttaggcccagaaggaccagggcatcgagaagacattgggacccttccgttctgctcccggcaggaaccaagccggagacctggacatgcccagctcctcctgatgccaagacctgagaggagtttctcccaaggatggatttcaaggtagatgttttgtgtggggcccaagtaacaacagtgctccgtggagtcagcagccactctgaactccctgtggagcccagtccccagctgccgggcaccctcgggggtatgctccacaggggagggttcagtggcccctgaccacctacaccccctgcggtgggccaccgctgccatctccagttggccgctgcaggtggctgcaatcctgtccccgctaggcccctgttccccaggaggcttctctgtccctttatgtaagatgccagcttcccagctgcccatgcagacgtggcacatgacctgcaaggaaagcagcaccttccagctctcctccgccttctccgcgaagcccctgaccctgctcccagaacagggagcggagaggagaaagtcctcgagccccagctggcactcacctgatgccttggtggcatcgtcaaattccacctggaagaggtagccagtgttccagatgtacaggcaggatgccacgtcataggagaccctgagtggcttcagccaggggtcatagacgctgtccctccactgg

SEQ ID NO: 346957 - DNA, 489 bp, Homo Sapiens
tcaggcacagcagctgcacttatctgatgcccctttgcaaatgcagccttgggcacacttggcacagcccacagggtagcaggagcagcagttcttcttgcaagaggtgcatttgtactctttgcatttgcagaagctggcataagtgcaggacccagctaagccagaggcgaagaagcaggcaagccggtgggagggggaacagagctcaggagccacctctggctttgtagttagggtggggtgccgggcgcagaggccccgccccaagtctggcccccgctcccgcagtgtcagaggcgccctagggttcagggccgggctgtgcgcagcagacgggcccgccgcaggatcctccctagcgctgccagtgcgcaccctgggggctgccctttgactcctgctcgctttggcggtaggcggcgtccctgctataatcccagccctacagaatttcccggggattggagtccactcctgcccctgcat

SEQ ID NO: 346958 - DNA, 1000 bp, Homo Sapiens
ttaggggggaatgttggaaattgtagcggatattgagatgtatcatataagtagtgctagtgtaaatggtaagaaattttttcataagagatacatgagttgatcgtagtggaatcgggggtatgctgttcggattcataaaaatagagaggttaggaatagggttttaatggtgaagcatattgtgtagagttctggtaggtgaatattatatattgtacctaggaagattatggcagttagggcatttattttaatgatatttatgtattcggctataaagaatagggcgaatgggcctgcagcatattcaatgttgaagcctgagactagttctgattctccttcagtaaggtcaaaagcagctcgattggtttctgctagtgtggaaataaatcatattatagctaggggtcatgatgttaggagtagtcagaggtgttcttgtgttctaatgagggtgcagagattgaattggccacttattagtaggatcgataataggatgatagctagggtaacttcgtatgaaattgtttgggcaactttaatagcggctgcaccattgggatgtcctgatccaacatcgaggtcgttaatgctactgtcgatgtggacctttgtggcctttgtcagggtttgctgaagatggcggtatatgggttgagcaagaggtggtgaggtgaattggggtttatcgattatagaacaggctccttcctctcgtttccttattcctggaatgtgctcacatgccgttcggccacgcagggacccgggacgctcagccctttctgcgcccttgccctctccagggcggcatctggcaaggagggcggcccaacactgcaagcctgatcccggggactgaactctggacggtctcagggactgactagggatgcggccgcgggagggggcagcccagcagggagaggactgggggaggggcgcgggctgtgcccttggggcagggcgggacaagggtggcctccggagg

SEQ ID NO: 346959 - DNA, 1000 bp, Homo Sapiens
ctatcctgggtccactgtgatggccaggggcctccgcagggagcagacatggcagacaggccttcccaggaggcgggaacccaggtctatccacactcggcatggctggttctcctgacgtgatgggctcagggtgtctttaccccagacgacggcacccagcatgctcaggagcaggggcagctccaggaccaggagcaggacgtaggggctgctgaacagggagttcagggacagaatgaccagccctagactcagacaggcctggtgctgagtgaagggggctcccctgggaacaccgacacctccacctgcatcctcctctgtgaggctctccagggtcactgtgaagctgaggtttgcaggatggtccctgatggacactcagccattactcactcctgctgactctccagcctttacagtcttgtcacatagtagaaaaagtggttgtctgcaccagtatttgttgaaagtcctgtattcctcctcatactgacactggaagaagggatcgggcaggaaaccagacaggccatcttcctgcagtattgttgcaatcccacatcggtattttcctgcatcgtctgccgtgaggttctccaaggtcacggtgaaggtgaggtctccaggatggtccgtgatgatcacttggtcactcctcaccactccctcagaccctccggtctccaccatttcatgccaaattggcaagcatggttgtctgcaccagtatttgttaaacgtcttgtatttctcttcataccgacactgaacactcagggattcccccacggcgcccatcacggtgctggggccactcacagtcagacagcctggaaaacacaagtccgtttccccgtcttcacctggaagagtctggaccagtggaaccttgagtgtcaggtcctctgcacgcccagtgttgcctgaggccttctgggggcccattaagtagcagccctggggccagcccagacctttgaagcagatgtactct

SEQ ID NO: 346960 - DNA, 651 bp, Homo Sapiens; identical to SEQ ID NO: 161525

SEQ ID NO: 346961 - DNA, 1000 bp, Homo Sapiens
ctacaatgtaaatagcacctcctggatggaatagtacataactgacatgaccagcagagacaggctaaagacactgagctgaaaaccctggactctattgctaaaccaaggctcctgaatctgttccctctgagcaactgttgctgtggtgctgccttcacaagcactctgctgagcactcagattgaggggctgtgctatcttatcaatagaatgcttgttgttaacggcatacactatacagacgacattagcctgagatatttcttgatgaagttgttcattactctgttctgcttctgagtaatctacaatgtgtgttggaactctctctggggtgacatcagctggaatggtgatttcttctgcccggggaggaacctcttctggaaattcttcactgaccagagacataatcaatgatgtcttcccaactctaggttctcccaccaccaggatctgcacgtctttcttcatgtcggtggctctcgggggccggactccacccacacgcatgcagtggactcctttcaccaggagcacccaccccacagtgccacctgccagcctcttcggctgccggggcctgccgcgccgccccctcagttgcttcccagcaagagagcagggacggcaccagctccacttcctccagcccagcaggcagaatgctgtttttgttatcatttcctcattgagttttatacacttttcaagggcagcatttgtttctttagcaattttaatgtccttaagatatttattttctttttccaggttgtcatttttcattgtgcatatttcctgtctgagtatagcaatatctgtcttcaaaatgcaattttcatccatcagatctttcacttcttcatgattatgaaaatcctgatttggagtatttcttgcagtctttggtttcatctctagtgattgaacagttggttcaagttgttttgcttcaacttctttcttatattgtttctctttcctttctaattct

SEQ ID NO: 346962 - DNA, 315 bp, Homo Sapiens
tcattgtgtagtgaagctcaaggcctctgaagaaatgccccttgcctcttttgtctgggctagaatcctagaagggaaagcagcagatgcactggttcccaggttcttggcatcctccagggtccgtatctcctgctgggtgaggtcattggacacagcgcacttggtgcacagcccgcacaggctgccaatgaagatgacaatgagcttctggagctgcccgcactgctgcagcacccggctgggagcgacccctgagccaccctccgcagctcccgcatcacccccaccaccgccctccttcttctctcccat

SEQ ID NO: 346963 - DNA, 1000 bp, Homo Sapiens
tcaccaaaatactcgctgccacaccacaggtattctcacacgggtaaggcgagaggcacatttcatcacacaggggacttgaacaaactgcacgggacatttcaggggtcctcttatgggcggagcagagcagcggggcaaaggctttccagccaggtcccttctccatccatttctccccaggtgcccgcgccggttccgcgtgcgggtctggccaaaaaacctccgaagcgcgcgcgcgagccgcagtcggcgcatgcgcggggcgggcttggcggcgaaaggcgcttcctcagcccgcgcgggagacccagaagtagtactgaggtagcgctcgtcctcccgccggtccaccaccaccgagtgtagcccgggcccggcttgcgtcacgccccttcctccagctgcccatcgcggcggcgcacttcgtgccctagctgaggagcgggctcttcggtgcggcccatcccggagggcgatggttggggaggggagcgctacctcggagctgccgggagctacccgaagagtctggcgaccgccacagcatttctgaattgcgctcgagagctgcacagtttctgcagcaatatcattcctcttcggctccaccctttccctttgagctttacatttcgtccttgctctgtgcagtgcaccaatcaacacaaattcaggcaacccctcatttctccctcctttgatgaccctgaagctcatcatctggccagcccatcgcagcccagagccatgtgttgggcgtgcttctgccgtggcgctgggaagtctgtctgggtgctgtattgttttatatttttctccctccttcccatggcaccctttctgctgttcctttcccacatgaaccacatcgaaaaatccaggatgtttttctctgttggtgattgcaccaatccttcccaggttagcccctccagtcaccatacacaggttaccagtgttgaacctgatgaaatcagtaatcttgccagtctccaag

SEQ ID NO: 346964 - DNA, 369 bp, Homo Sapiens
ttacttcagtgtcaacttttggtgctgaacaaggcactccttggctgaaaccttcccacattctatgcattcataaggcttttgcagggtgaactttctggtgctgagcaaggttagagggacagccaaaggctctctcacattgtccccactcataaaacctttctgtgttgtgaactttctggtgccctgcaaggtggacatttctgctgtaggatttcccacacctgctgtacacataagggcttgctccagagtgaagtctctggtggtgaacaaggctggagctctggctaaaggatttcccacattctttgcactcataaggactttctccaatatgggttctttgatgttgaccaagtccat

SEQ ID NO: 346965 - DNA, 1000 bp, Homo Sapiens
ctatgctaatgcaatgttatgaaactccgctgatccatccagagtagaaagctgagctgtcttcctgaagcaaaatggagcccagacttttgcaaactgattattctcacaggtaccagaggtggatttgtggggagcatctttccaacttagtccaccccaaaagaactgtctctttccacctagcccagtcaacaatgaacccagctttgaagcacttggagcaaaggctgctagatggcgctgtttccccagatttgcagggaatcggcgtttcagcagacggcaaggggaattgagctgctggtgctggaacatctgaaggggcactgcctggttaatgctgggaccaccatggctgctgctggcatcactaacatgctgcatctcagcaggtgagatcggcactggctccaaggaagaggttttccatgcagatgtggaaactgccaaaagaccttggatgtgagctgccacctgctgcccacctcctctacagccagaggaaaggacacagcaggccatgggtttataataagatttggaggggctgagcttggctgatttaccaggaggtaggttgatgcccaagacggtgcccactgggaagctgcaagttgtgagtagggggataacagcttgagaagtaccattaaatgtcttcccatacatttgcccacagtagaatttttcttccacagaaaacactttgacattatgggcaaagacagaaaggatgaggatgtgtttgcttttccaggccttgattttcctaagacagaactccatctccttgccctctagcacatagccatctgcttggccacactgtcccacccttgatgtgatgcatgcaagaagccttccttgctggaactgctcctccaggagactgctgattttggcattctgtttccttttatcgtatttcttgtgaatttttttaggtcgctttttgtttaaaatctcctcctcctcagcagtcagcttggtccccttc

SEQ ID NO: 346966 - DNA, 645 bp, Homo Sapiens
tcactccaatccttctatctttacattggcagacaaaagcctcgactcaggaaccttctgggggactgggaacctttgggaccctgaactggaaccggaactggagctggagctagagacatagccacagccacagcctgggccttggtttgactgagccttggccttggcttctggcaagcagagcctgagacctctggagacgcaggcacaaggatgccttccaaacttggggtgggcgatgtaagcaagtcaatcaagctcatggctgatgccctttgggatcgtgggtttgacctccctgggaagttcagtgtcctcaaatataggacccatacttgtcatgctcaaattcttaatttcttccttttgaagcaccaaacgtgacatttcccaaatgggcttcagtgtgctgttttccttttcttcagaccaaaattgctttattacaagttttgcagatggtatcaaggttcccgtcaacaaggccagatggaatctgaagctagtaaacaacagcagagaagcagggtccctaaaaccgagcccagtgctgtcatcatctgccgtcccagactgcagacagttgaggcctcggcagccatccaatcgcaggacatcctcaatccaaagatgtaagcacat

SEQ ID NO: 346967 - DNA, 1000 bp, Homo Sapiens
ttaaccagaacattcatggcccagcaggtgctgcttcagttcctgacatggtttctcaatgaacagcgtcagggccagcccagtgacgaaggtcagcacacggtgtccagagaaaagatagaacatgttggtgtcagtgtggtgaataagtgtttcctgaaggccattgtaaaggatgatcagaatcggatgcaccaagtagcgagcataactgatgctggacaggaaactccagatgtcccaagaaagcacacggttcaccagacctggagggaacaagcactgatgcatgaagccacagcctgtctctgggccagtgaagatgcccatcatcccatcgatgctcccattgcattctgtgcctaagtctgtgaacttttcagccgccgcccacagggtccggtggagggcttggtagagagctgcagctactagagaggaagcagaggagtcatccaccatgtatgccagagcggccaccgcaaatagggtgaccagggagcagctccaccccagcaggacctgcatcttggttctgagaatgttttcctggtggttttggtgcatgtaaatgctcagaaagaggcccacaagaactggcccaaatcggcagtagggctttgtgtagtactccacgaaatacaatacaatcgcctcttcactggtttctgatggagccacgacaggaagtttatatgccaaggtgatcagagcagtggctgtgaaagatgccaagaacagcatggccccaaggaggatgaggatctgtgtactctttacatggatgaagataatcactggtgtggtgaggtggaactggaagtcattggcaaggtaccaggtccagccattgcacgcattcttgaccgacacaaagttatttagcaacagcagattcgtccaccatgcttgccggcagttatcccagtggaatttgggcatttcccagacaggtccccagggaacaagagagaacagtccaaccaacaagcacattgaa

SEQ ID NO: 346968 - DNA, 1000 bp, Homo Sapiens
tcatgtctgagcgctggcatccaccgccttgcaggggccggagtcaggccccttccagatggccctgaagtgcacaatggggcctccattagacacttcacagatacgatgaatgcgcttctccctcacaaagacacacgtgaggggagtgaagttgtttgcagtctgggtttcacagtcctccggcccaagaatgtcatccttttccttttggccgttcccgagccccaccccccacccccgccactgggctggcagggaggtcttccagagtggagccacgctgccctcaccccggggctcctggccttgcagggagatggtggtgctgacaggcggcccgatgaagtatgtccaaggccaggtgatgcagtggagtttgaaggagcagtgagttcgagccggggcctgtgacttgggggaggcggcagccgctcctgaagccctgatccctgggctgctgccacaaaaagccccagacaactcctcaggcacagtcgcacccactggagcctcatggagcaacagcatcaggaagtggcgcctgtgagtgtggacccgtaagaggtggcggaacccatgagtagtgaaggggcccgtgggtggtggcagagcccgtgagtggcggcaggacccgtgggtggtggcagggcccgtgagtggtggcagggcccgtaagtggtggcaggacccgtgggtggtggtgaggcccatgtgagtggtggcaggacccatgggtggtggcagggcccgtgagtggtggtggggcccatgagtggttgcaggacccatgggtggtggcggggcccgtgagtggtggcggggcccgtgagtggtggcaggacccatgggtggtggtggggccccaagttgtaaagcaagtatcggggaacagcagtctccagagatgtccttgtcccagtcctgggaagaggtgagggggacggcagtctccggagatgtccctgtcccagtcctgggaagctgtgaatggttacag

SEQ ID NO: 346969 - DNA, 1000 bp, Homo Sapiens
tcaggccatgggtagagccacgcccacggccacggccacgcccagggcccagttctgccagagagggggcggatcggcgtgcgtggcggacggtgtcggagacccggccggtccggagccggggccgggctggagtcggggcgtccccgctggagcgtgggtctgggacccccatcctacccggcaagacctcaggactatccccagtgaccccagcggcccggccgctcttggagtctcgtcttgcccactactggccccggcagggtccgagggcctggatgcgaccttggggcagcacccacccttccgggcccactgccaaggccgcaggctcagggcacgcccggggcagtggagctggggagggaggcccgagtcgcgttttaactctgccctgtcccccagggccgcgcctctcacgcgggctgcaaacttcagcgtcgctgaagttacagatgtgcgggactcggcaaggaggtgggagacaagaaaagggggtcggcagcaggaagcccgcggggacagccttccctgacgctcgcccgcgccgacctctgagcggaggggacacccaggcttgagagagggcgcagcccggtcggcggcagttcctgggcgccaggtgtgcctgaagccctccaggaagaggggcgtgacccagactctagggaagatccctgacactgtgaatctaggtttggcttctgatttcccccaagggggttgagagtggggcgagggtgcttcagaggccccggggggctttccttgcgactattaattagaaatttcacaatattgttcactcttgtaggtgttttctccagtaaaaattatcttatttctggttttgtagagtttctccctggtatgaattttcttattcttaataaggcttgcagataggttaaaagctttgtcacattcttcacatttgtaaggttgctccccagtataaattatcttatgtttagtaagtgatgaagattggctaaaa

SEQ ID NO: 346970 - DNA, 423 bp, Homo Sapiens
tcaggccctcttggtgatgaccacttttgctttttccccttcaagcaaaagccaaaatcctctccacacttgcaccatcttcacagaccctggcaggagtcgatgggcaaagctgtagcagtgttggccacttaccattacctggtcctccttgtccagcactcagatgcgcaggtcaaatgattggccaccctcaaagggcatattgtcagatttcacctcacacttccagaccccccactcatggctgttcatggccacacaatgaccaaagtgcactcggaaatggaaagcgatgtctgagtcctcatccatcccggtgtggaaatccacctgcagctgtggctccttgtgctcccagggtttgcggtaagaatctatgctctcgcgcccggttacgcacactgcatttacagcgcgcat

SEQ ID NO: 346971 - DNA, 837 bp, Homo Sapiens
tcagatcactaaccgccaatccctgtcctcgccgaccacatcctgacggccccctccatcggtggctctcccaggcctctctcttgagacctgtcttttgggtgaaagcttgttgaccttcattgcatcatagggtctctctcctgtgtgaattggctgatgagtcatgagatataccttactggagaaggccctatcacagtctgagcattcatatgatttatttcctatatgagttctctgatatacaatgagatttccctttgatgtgaaggctttatcacatacattgcatttgaagggtttctcacctgtatgggttctctgatgtataacaaagttttttttggaggataaaaccttcccacattcactgcattcatgggatttccttactgcatgatgagttttcttatgattgttgagatccaatttgcaaatgaacggtctctctcctgaatgatttctttgacataaaatgagttctgacttccaagggaaaacttctccacatttgctgcatgtacagactttcccttctctatgatgagttttctgatgatacacaagccctgaatttgtaatgaaggctttttgacattgattgcatcagtagggtctcactcctgtttgagtttgctgatgagcaatgagctttaactcactgggaagggctctcctaaaatcatgagattcctgggatttgtttcctgcatgagttctctgaggcatggtcatgagtagtttacaagtattcactgcacattcactgcatccatatgatttcttccaagtctttgccctgttaaacacatttggaaggggtccaaccctcat

SEQ ID NO: 346972 - DNA, 672 bp, Homo Sapiens
tcaccgaggcctccgcgcgcggcgggggtgtccccgcgcagccctggagctgcagcgccccctcggccgagccggaggctcccgggtgtccgagtcgggtagggggtggggtcggggcccgcgggtcccggcagcgaagggaggggcggcggcacctttgtggcggatgctgcgcttccagtccttggccgtctcgcggccgctgacgaactggaactcgttgggcgtgagccactcgccgcggtggcggatggacgggcccttgctgccctggcagagtttgcgcacgtagagcagcgcgcggttggcgccgcactccacctcgatgcacggctcgccgttgtccagcagcggctggaaatccggggccgcggccgcggtggccgagaagcgctcgagggccagcgggtccctgggcaggtggaggtgcggggcggcctcgtgcaggctgaggtaggcgcgcggggggcggagcggcggggccagcagagcctcgtaaccggcggccgaggcgggcagcgaggcggccggggggagggcggccgccgcgggcagtggcgccaggtagcctggcagcggcggcagcggcagcgcggccagggtcgggtggaacgtggccagagccagggccaggtcctcgcggcccgggaactccttcttgaccgccggcat

SEQ ID NO: 346973 - DNA, 1000 bp, Homo Sapiens
tcagccgccctcgcccagctccatggggcgtcccccaatttccccgcagggctggtcctgccattgggtgggggtgctcatcttgccctcggacggggccacatcccagaccacgggagcaggcagggccggcaggccggagctgcggtgagggcagacccgcacggagtggccgagaccggggatgcccggggagccgggggctgcaacccgattagcggggggcggcgcccacgttttggttctcgcgctcctgaggcggctcgcgtcgccccggatgtgccgctgcagcgccaggtacgtgaacttgtacggagcctccgtctgcaccattccccagtgctgccgccaaaccagctggatcgtcttcgggacgtcggtgtcgcagtccagcccctgcctgcggatgacgtccaccaggatgtcaatcacgatgatggtgcccgtgcatccgatgcccccactgaggacaaacaccatgggcccggcccgcggcttgctgctctgggcccggttcacctcgtcccggaagccgaggacgccggcgggatcggcccggacgccgtagtccggccagccgaagtactggaagtgctgcaccgtacgctgtggctcctcctggcccggccgccacacctgcagctcccgcacgcagtagccctgggcctggcccttgccgaggacgcgcatgtgcacacggccgaactcttggctgccgggcagctctggccagtcccggaaacacttgttccgaggggagcgctttgcatcagccttgctggcagcacctcggcaccccgcccctgcgacccggccccgctccatctccctggtggtcatgacgatgacacgcgtgttctcctggtgcaccgtggcccagaaagcagccaccgtggcctgcagacaggcctgcagacagccttcggctggccggactacggcgtccggaccgatcccgccggcgtcctcggcttccgggacgaggtgaaccgggcccaga

SEQ ID NO: 346974 - DNA, 1000 bp, Homo Sapiens
ctagcagcaaagatggagctccagttcctcagacggtgatgagccacaggacgggcagggggcggggccaatgaagatcctcttgggctgcctgacttcccttagtgtacacatcaactaagcccgaagtggggtgaagatctcccaatcgacatgaaccaaggaattcaaactctcctcgggggcaggatacatctccaggcttaacttgctcagcccactggtgtggcacagcaggtccttcagggcttccatagacatgcaatttctgccaaagtagaaggtggtgagctgggagcagcggctcaggccaggcaggatggcactgagttgggagtagtggatctgacagccctccgagatgagggtcttaagagtaattgctgcctctctcgagaccctcgtgttggcagaaactttctccagcagagctccgaggggttcaagactgatacagaactgcagcatgtagctgagattcagatgctttgggtaagcgaggcttgggtactggtagagacacttcaagtcctcttccaataggtagccgcaagttaattccaagttctccaaggggttcatctgatgatggtcctcatgcaagttgctgatcagctgtcccaggtgccctctgtggaaggtgaccatattcattttaagcagctggaggtgtttcagcctgaggaacatagagctgattttggcgactgagcattcctcgcggtaattgacgtgtaaggatggcacctggagaaaaatgagtttgcgaagattcttcatctccttcaggtaacaatgaagctttcggaagaggtatctcaggcattcatcctggggtatttccttgaggcagatgtctatgaacaccttcaagggctggtgctctcccatccttggacagtcctctgctgtctgcctcttactcatggcctctggggaggaggacagggccctggattcagaccatatggcccagaaattctcatcaacatcccgcaaa

SEQ ID NO: 346975 - DNA, 459 bp, Homo Sapiens
ttatcggtaggatttctggtagcgagcatgggcaccagggcctccaaactttttggactcccggcaacgaggatcagctaccagcagggtctggtcatactggatgaggatgtctttgatctccttcttggaagcctcatccacatatttctggtagtaggccaccagggctttggagatggactgatggatagcataaatctgggccacgtgaccaccacccttcatacggacacagatgtccacaccagcaaaccgctccttgccgagaagcagaactggctccagcagcttgtattgtagcatgcgcagctcaatcatctccaggggccacccgttcaccttgatgagaccattgccgcgtttgcagtgcgccacagctgtggctgtcttcttgcgtccgaagacctgcaccgactgcagcgggcccttggtcggcatggagcaacaccagtccat

SEQ ID NO: 346976 - DNA, 1000 bp, Homo Sapiens
ctagaagcctggagggaactgagaacattccaagtagaggtggcagagccaaggccctgaggtgggaacacactgctgcatgtctctagctttctctctcgtggccttgatgggactggcttccccattgaacgggattttccgaggtgtctggggctgtggtgcagcttgcggggtgccaccctgaccccttccagacttgccagtcaatccaggttcatagggatggagccgtggcatggagttccactggaggaacctccaggaaacctgaggttcccccaaacgggccacccatggcggggaagctggccaaatgggccactggaaccgagttgttgggccaggaggggcctgcctgtccccctgccagagggtcttcctgccaggtgaagccagcccaggcctgggtgccaaggacccttgctcaggtttggccactaaacgccctggtcggggatcagggacatagattcccttgtctctctggctcaaggcttgttgtcctggcacccttggaggggtgttcaggagtgaggagcctctgctgctctctgaggctgtcagtgctcgcagggaggggtggggagtcccatagatggatctggttcctccaatgaccctgagggccctggtgctgcaggccacctgggggtggcaggtccccaggcttccttgtttcctcatagaggcccaagggtgtctgagaactgcatcatcatccagggcccaggtatgggaaaactggtcctgaaaacatgcccacggccacacctggatatcttcacgaggtgctgtggacttactcctctgaaccttaaaggcagtgcgtgccattggcgtcaacacctgttccccttctagcaaatacacgtcccaaaggctcagggtgagcccgagagagatcagccccatgagggtctggcagcccctggctcctccggccccacaggatgcagggccactggggaagagctggggggaccataaactcactgcg

SEQ ID NO: 346977 - DNA, 1000 bp, Homo Sapiens
tcacacgcataaggctcgactggtgttatgcccaaacgctgacttattcttcagtagcccccagctcagacctccccagcacctgctcaggagcttcttggctctccgcagccgctgcacctcgcgctgggcgtcctcgtggacctggacctgcagctggtgcttgtgcaaggcggagtggatcagggcgagggcggaggagtctgagcaggccggggaggggcctcggcggggcgaacggcctctgcctggcgagtagcaccgcggtggggacggggtccgctggccccagagtccccgcaggctgcgctccgacgcatccacggtgcacttggagccgctcagctggacgccgctctcagcctcggacaggacggcctgtgccaggtcccttaggctctgctgtagctcctctccgtcctctgtctccagggccgcctgctcctgtagccacagggattccagggcctcaagcttcttggtgaggtccttgttgacctgatccttctccagattctgcttctgaagacgctccactgccaggcccagctctgtcacttctccagttttaccttctgcagggacacctgcctcgtgtggcacccaccaggtacccacctggcactgaggtgagccttgtccaggtcgctttgcatctgctgctgggccaggtcccttctcgtgaagcaccttgtcctgcagctgctcctccagctgggtctgcagcagggcctgcttcttcagggctgcctcgacccttctctctgccagctgcaggcccatgctcagtcccaggccgaccttctggacagctcccctcccagctgcagcaggtcccaatctgctctctgggggatccagggtgcccgtgtgggccctcctagagacaccagcttggcctcctccaagggccagccgcggactcacgcacaagtggcagcatgcctggccaaagcctccccactcctgggctgccagttggcccacggaaggccggaaa

SEQ ID NO: 346978 - DNA, 564 bp, Homo Sapiens
ctactggaggtaagtgtcaagcttcctcttgatgttgtcaaaggaatctgctcccatataatcggtctagccctgttcccaccgctccttccattcttctgaggatacacagactgtgccatagctgggatccccccaagggacagatgtgatatggctccataggatgagaaactctggatgagtcacgttgggatggtgggactcatttttgacactttttgttttgggatcataagtataattccatggtttgacttgtcccaggaaatgcacaactttggcacttgcaccaaacactttaaatgctgggaggtaggaacccaactctggcctcttcattaaggttagatgagcagaatcaccactgtccaagacatctaccacgatgatttcatcaaagactgtctctaaaacttttctcatggagtctgagacctgcggggtggcgagcatgactagtcttctggtggtcctgtgctgtttcagagatgagcccaggaccagggcacctttggtgtaggcatcatttgtggtcagtgtcacaaagacctgatctgtcat

SEQ ID NO: 346979 - DNA, 1000 bp, Homo Sapiens
tcacagtcttgaagacaacttcctcttgactgtaccagtaatttttccatatggattgtctaatggcagcaagacctcttccttgttgatcagacccattttggacatgtctatgttgaagtagtgaatgtttggcaggctgatttccatatcttctatcgcaggaactcggctcagggagagcacctggatatcacagagggtcttctgcacagaggtcaagtattcacctttgtcatagggcccagcagatttctccatgacaaggtcccgaatggtgtcccaggtagccttgaagtccacatccctgcactggtggtagcgccacttgcagtacacttgggtggcaaagcatcagtccttcacctcagggagggtagtgaactggtccttgatgaaaccttcaaatccagactgtgttgttttcaagaccttgaggtctttgattccagaatgaatgacttggggtccacttctcagctgttcaacttcacagaagtgtgttccagtgggagtgtgaataaatgcatggacatgcttaactccattctttccaagatgcttccaagggatttcttccatgtagacttgagctcggattacatggttaaaagaagaaagaaaatgctcacaaatattcacaccaaaggcttctatgcttttgatttgtaaaaagaaacaaaatgctttttccatagccccatctatgtttgctgggtcattttctttaaactttgccaagacatgaactgtgttcttgatggtgtctgtagggatgatgtctgaattatctccatgcaggtaatcttttttggaacttagagtaagttgcactgaagttgccacctctttaatgctgtgatattttccatctcactgaatatggagaacttttaccatttccttcccatagccagttcggacaaactccacctcatcatttggcaatgagtctgtatgaagggaaccaatcatctgatcctggagcaggtggaacaag

SEQ ID NO: 346980 - DNA, 810 bp, Homo Sapiens
ttactccttggaggccgtgtgggccatgaggttcaccactttgttgctataaccaaattcattgtcataccagaaaatgagcttgagaaagtggtcactgagggcaatgacagccccaggatcaaaggtggaagagtgggtgtcaatggttaagctgaagtagacaacctagtgctcagtgtagcacaggatgcccttgaggggatcctctgatgtctgcttcaccaccttcttgatgttatatttggcaggtttttccagatggcaggttaggtccatgaccaacatattggtggtgggtacatggaaggccatgccagtgagcttcccgttcagcccatggatctcattgcccacagccttgacggcgccagtagatgcaaagatgagatctttctcatggttcatacccattataaacatgggggtatcagcagagggggcagaaatgatgactcttttagctcaaccttgcaagtgatctccagccttttccatggtagtgaagacaccagtggactctatgatgtactcagttccagaatcaccctatttgattttggtgggatctagcttttggatgatggtggtgggatttccactgatgacaagcttcttgttctcagccttgatggtgccatggaatttgtcataggtggactcatactggaacatgtagaccatgtagttgagctctatgaaggggtgattgatggtgagaatattcactttatcagagttataagtagccctggtgacccagcacccaataaagccaaatccattgacttaggccttcattttcaccat

SEQ ID NO: 346981 - DNA, 1000 bp, Homo Sapiens
tcattcatccagctcctcttcagacagaaggtccccatggtcagacagctggtctgcattgctggtactggttgcatcatcctcatcctcagagctggcttcacaggcagtgtggaagagctgcatgagttctcgaaaatggtgggaaacctcagcaggggtcttatttcccagctgctgggagatgatgctgaaggtctgtggctgtgccccttgctcctggcacatggtgaggatcacacggtcagcttcccttgtccacaggacaaccttttccccagtggagctgaccttgctgttattggcacacaccgtagcttctgtggcctttggctgctgttccccctctggacccttgccctgtgttccactgtctttagccaaaccccctctaggggctttgggagaagtctctgaggtgtcaattcctgatggagattcatggacagggcacgtcctgtctcttgtcttcaccctagctctgcttgagggcagccatctctcttgagtgtctggtttcccggacacatgtcttctccctgcatctctggtctttgaggaaacaggactcaggaaggaagcagggggttccacggtaccaggcaatttctcagtttctgatgcatcccagaccagcatcaaagcctctgactcactcactgccttttggccctccctctctttctgaagtctgggggatgccttggggcaggagcgaacctcaggcccaacctggtttctcttaacagtgtacagtacagctccagttgtggggggaaattgaggagtctctggtgaatgaggtggtgggccatccaggaggagccgttctgtaagagtcacttctcgaggggatggcaaagtgccccccactgccaatcctgaaataggcatctctctttctggtggtcctgacagtcctgttctgggtggcttcatggggctccttgctcttgtaggatttgctttttcatctcctccaggaagcccatgagcctcg

SEQ ID NO: 346982 - DNA, 540 bp, Homo Sapiens
tcacttttcccgagaccgccggccgcagcagccccctgcgcgtcgcgacgtccgggactcggtcccagcggcccctcgcgatccgggcacgcctttcccgaatgttggaagctgagctgcgtgcagccggggagcgagaccttgctgctgacctggggtctcatctccttgatttctttttatcctcttcatcaccatcctctctaggctgtctttggctaagagggccccagtggaatcatggcctatagccacatacatatcttgcctcactggtctacctggtgctcctgcaccctggctgtcagcatcctccatctccgctccctgcgctggagggctggaacactgtggtccacgcccatagggtctcttcaggtagtagggcaggaaccttctccaggaaccttctctattctggtaattccgctggtaattgtgtggaggacccccaggacgtggattgcttccataatggttacggcctgctccacgtttactgcattgaatcattttccttttcccgaaaatcttcgccat

SEQ ID NO: 346983 - DNA, 1000 bp, Homo Sapiens
ctattggctggggttgtcctgcactgtcagctgcagttagatctgtgcatatatgaatgtatatatgtagcttgggtggatgcatgggtgggggaacaaatagatggacaatggatggatggagagatggatgtgtgcatgaatgcttagatctgtgtatatagggatgtatatatttgtgttggatggatgcatgggtgggtggatgaatagatggacaatggatggatggagagaaggatgatggatggatggatgtgtgcatacgtggttagatctgagcctgcttgagaaggcagcagccttgaacaggtaagcagagcgccccagcagaaggaagaactgcggtcgaagccacacaggaaaaggaaaacttgcaatggccggaccttccgggcccagcatggctcccatcgcgccttcctctgccgtgtgctgcagggccttggccggcatctccacgtgtatgggcggctcgctggggtgcagcccagatgcctcctgggaccgctgtgccttcaccgggctgcgcttgtgcacttgtccagcgttcaccctgcggtccgtggcgatggccgaggtcctggagtactgatgagaggtgccctcccaggtgccaaaaggagcttctgcagacacagttccgcgtgcagggctcccggcaatcgaagtgcagggccggcctgggccagagcacaggtgagtgcagacataggctgccctgcgcttgtgacacggcgccctcaggtcacactggtgattgctgctgctgccccaacccgctagccaggccagagacacctttggcaaggcacggctgaagagaagacaaggagaaaggatgactaggccaaagctagtgaggcctctggattgaaaaggcaagaggaaaacgcaggcatagatataaacagggtggcaggcccagtgcaggtaaggggaaacgcatgcgtggatgtaaacggggcggcaggcccggtgcaggtaaggggaaacgcct

SEQ ID NO: 346984 - DNA, 1000 bp, Homo Sapiens
tcagagccaggtgaagttgaacgtggcccccgtggccgtcttccagatgctcaagtcgatgtgtgccgggcagaggatggcgagcgagccccaggactctgcggccgtgtctctgcacacgacgagcgtgcccgaagtcagagccgggcccattgtccccagggattctgggtgccgggcccggctgtctgtcagtgcagagggtgtggcagtgaagtgagatggtcccactcgttccaatgagaggtggcgagaaaaaccgccaatgatggaggtaggaggaggcttcaggagtgtgctgcggagtgagaggcagagcccgcagatgggataccgagagctctctgagacccgcgtgttgcagcatccaaacacacggagctccagctgccccagtaatggcagaatataggccacaccaaaggtaaatggcagagggcgtcccagcttggtctggcccactccgcagttcctcctttctgcttccctctcatccttgtttccagaagggaccgagtcattaggggctcgtccgttcctattggctgcgctttgtgtctcctcagggagaaacaaagacagcacctccctcgggagagtgccggccctgttggaatgcagcggccgcaaaggatccagccagaggacaccccgccagcccagcgctaccaggctgcccaagtggggtgggcctggaagaaggcagcaggtgcggggcagcacctcttcataatccttctccagagctgccaggtccttgcgagcctcagaggactccccctcctccatgccttcccccatgtaccattgcacaaaggcctgcttggcatacatgagatcaaacttatggtccaggcaggcccaggccttggtgatggctgtgatgttgcttagcatccacatggcccattgcaacttggtcaggtttcccccagggaccaccgtcaggggctggtagttaatgcccacatctttcgggaccacatcccctcggtacaac

SEQ ID NO: 346985 - DNA, 1000 bp, Homo Sapiens
ttactctacaaaatcttccttggtgacatcatccacttctctgtctttgctggttacccggtgctgacagctgctccctgcaaggtgcaggtgtctcctaacaatcactaactccgcctgtcgaacaccgaactcacagccccgacctctacgccctgcatctcctccaccactccctcgctgaatggcatccccacttctcccttggacactttcaaattctgctaaggccctcagattttcaagagtgtaggtgctgggtgagacagccagtgtcaaagagatttctctgaagagcatcttgttcccacactgggcctggcctcctcctgtgtcttctaaatcaacatcaaaatctaaattatcatccctttcttcatttcttctgcagcttcttctatggttagaacttagatttttgaacggaataacaatgtcttctttctttccacattctgtgcaaacttcaagttcataggcgcatggtctacacactgtgtgataagaatccttcactgttatatcaggaagttttgcattaattttcttggtctgaacactcttatcaaacttgtcatttttgaagctaaacgtattctggtgcttgaggccctcctctaacctaggccgctgggaccactctgggcactgcctggtcttgttgccatcccaagtgtcaagacctaacatttgcagctgcctcaagatcaagttgagactcctacaccaggcttcaggcagctcaggcacagtaaccatcaagcatttcccttgatgggctttggccacggaagccgttttggcaccttcctcagaaagaagccgaatactagagttaaaggcaacaaaggccagcaagtcacctccatccatctgatgtcctaaaggcttaaagaactggcttgcataatcaaatagaaataacgctttttcttcttgaaacagatctatctggcctggctttcgattggaaaaataatggacagaggtttgcgttctg

SEQ ID NO: 346986 - DNA, 1000 bp, Homo Sapiens; identical to SEQ ID NO: 161529

SEQ ID NO: 346987 - DNA, 1000 bp, Homo Sapiens
ttagagatgtccatagtcagcaatggtgatcttcttgctggtcttgccattcctggacccaaagcgctatgtggcctccacaatattcatgccttctttcatcttgccaaagaccacttgcttgccatccaaccactcactcttggcagtgcagatgaaaaactgggaaccatttgtgctgggtccagcatttgccatggacaagatgccatgacctgtatgctttaggatgaagttttcatcatcaaatttctccccatagatggacttgccaccagtgctgttatggtgtgtgaagtcaccaccctaatacataaaccctggaataattctgtgaaagcaggaacccttataaccaaatgctttctctccagtgctcagagcacaaaagttttctgctgtctttggaaacttgtctgcaaacagcttgaaggagacgtggcccaagggctcgctgtcaatggcaatgttgaagaacacggtggggttgaccgtggctgatagtacagggctcctggtggcagcggcatctacaaaggctggggagctggtgttactcaggctctgctctggcctctctgacaagccacggcttttataggagcgctcttctccaggcagattgagttctttctctggaaaatagtacttggatttaattttgagtgcaaacatgactggtccctgcagagaaggagtggttctggatgtggccatggaaagaggagtccaagcatctgtagggatggtctgcattttcctcccacttagggtgcagctttccatctcttccgcaggccctgagtgcacaggcagctttgccaacccactaggggctccagaacacacctcctgctttagcacctgcacccttgctgtgaggatctgtgtgcacttcccttcctttaagtcctggcttagacatcccactcctggaaatgctcccctcagcccactaagcagaaaccaccagccactgttgtcatctcccaagggagaa

SEQ ID NO: 346988 - DNA, 1000 bp, Homo Sapiens
tcaacaatgattgaagctcatgttgatgtcaggactaccgatggttacttctttcttctgttttgtgttggttttactaaaaaacacaacaatctgataccgaagacctcttatgcttagcaccaacagtctgagatttctactgagatcagtgtagggattcaatgtctcagaatcatcccatcctccagggcccacaagtccatgacctttgcctctacccccgaccctgctgacctgaaatgtggcccctgctttcatttcccaaagagaggcgagaatttggcttccaaagatctcagatgcccttgcatcgtctccatgaagagggcgggtgaagccttggtgtctgaagataatttggctggacaatccccaaggtttggaacgatgggaaggagctgccatcttcaacctccaaccctcaaaagctagtcctgtctgagtcagaagaccccggtcagtgtcagggacattgttgaagaaggcagggagtttcagccccaaaacatcctctggctcatacaaagaatgagactgggcatcagcctcatgagcactgagccccacgcactttacattagcagaagagagatgaatagcattatctcccaaggactgcaaaaagttcacatccatattgttattcctggcagcctgatgaaccaagaacttctggatgatctcataactgtatttttcaaagcctgagtcaaaggtaagctggccatttgagccaggcaccaagtagcggaatcttgggtcgatctgatcagaaatgccacggctgatgttagaaagtaaagccaactgttgcatcagctctggcagtaacccttgaagcttctgctgaattttctttgaaggagttgagatatcaattcctacagacaaatccaggttgcatccttgtggatcacagaccttagaaagaatttccttctccaggttctgcagggcctcaaaatttacatcatggtacactttgtcctcatcatta

SEQ ID NO: 346989 - DNA, 798 bp, Homo Sapiens
ttagatatgtttcttcatagggagggcaagatggtcagacctagaaaaacacctgttgcagtggttgcatttgaagaggtttgcacctgtgtgtttcccgtagtgcctcgtgagctcatcgggccctggcaccatcacagctgctgaagctgttgtgacccctcccacctttacggagatgagagcagccttcttggccacgagtttcaacgtcaccgtgccatccacggcagagagagtttgtgaggttttgaccagatggtggctgagctcaggggacagtgggggcattaatgaggtcattgtgttgagctggacctggttgacagctgtgtagctgtagatggccgcttccacggggagcagcaggaggtctaagctacggaagctttcctcaatgcaccggggaggagaagggtggagcaaacaggccaagtcctcaccaaaggtctccgagatccttctgggctccgtctgtaggtagcgttccaattcaaggcctgtctcctctggaatattccctcttctctcagtctctattctccaggtctccagggatggcaaagctgagaagtagccggtgtcgtggacaagttgtagctcctggaatatactacaactagccaacacgtccctgctgctgctgccgagcaaaaccggaggcgaaaccctcccccgaacacaattggggctgtttgttagtgtctggttagaaatatcaggtttggatttaggaattagatagcctagtatctcttctgattctttgttgttgttgttgttttcaggggagcgcat

SEQ ID NO: 346990 - DNA, 1000 bp, Homo Sapiens
ctaggagttggcatggtggttaaatttttctaaaacagtcatattaatgtgttcaaaaatccactgctgagtctcagagagagggtcacatctggccatgaaaatcttcttctctgcggggttgcaatccatgcagctgttgctcacaggatggaataatgttctgtccttccggtatccccagagctggttccccttcatgccatgacagtcatagagtgtaacggggctgttgtgtgagatcgcatcaaagcagaatttccgggtatgcagtggctcaccgggtcgaatatcttctctccatccaaaggtaaaaagctgttcatgagaccatgttctttcagaaccatccttgacacagatgtccagcctcagctctgttccggtggctccatgcttgctgtccacacagagatttgctgccacatttcggatctccccccaggcagcaggcgggggctccactggagggtagtatttaggcacgtcccaggccacagcagccatgaaccatttgaagtccttgcacttgagctgcttgcgcagctccttctgggcagagatgtcccccgtggagagatgcctgtactccggccgccgctggtaaatgtactcggcaaattcatccatccaggtctcagctacccgcttcaggtttcttgccaggcttgtcccagatggaactttgtatggaacgtacttcctgtagatatgaccaactctagaacatggaacatcaaacatttctcctccacacatccaaaccttaaaagagatttcatactgttctcctccccagatttctaaacctggatcatagccacccaattcccaaaaccatttccgatccacagcaaagagacctccagccataacaggagactgaagcaacgctttccagggtttgtgcatgttcattaggggtcgatcatgagaggccttacagcagccattaccgaagccactctcaaatatcaaaactggggactgggattccctg

SEQ ID NO: 346991 - DNA, 1000 bp, Homo Sapiens
ctacacccggtactggttgtgcttcagtgttgggttggtttgtcggcagagtttgaccaggttcatccatgtctcccaagcagcacatttgtccactggctcggccactggagaagacatttgttcacactgcagggccctgaaaagacagactggggggctgctggagctttgcagaaggggtgtcacttctggctcaacaaccagacacacatggccactgcagccactttcagcacgaagaccacggcagccaagggtatgatgaccatcagagggtaactgctctctctgggctgtgtgggtgcccaaaagctgactattagtggtggctggtggccaaatgaccttgatggcagaaactctgccatccacactgggctcttcaccactgtgctgtccccagggatctgctttctgccatctggtctgggtcagtttccctaaagtttctgtctgtgccacaagtcttgaggaaatcataggcttttctctgtcggcaattttcaggtttggcataacccgcagtaaaggctgcactctgatgttcagtgtttgtcctgtcaggttgctttctgatgtaaacagtgagaactgtagctggtcctgtgtggcagtgagatttgtcatgtgataaaagagtcttcctgaatccaaatcttcctgtccaaagttggtgaccacctggttttcaatcagcaggtgcccatgttggaggggccatgttatcatgtaagtgatttgggggttcctcccattggtcatggctgacaggtgagcattggtgatggggatggttgtctggccttgtgggagaagtaggtcagtaaggttcacaatgctgatggagatgggaatgacatccaggtggaagagtttatagagggtgtggtgtgcaccatctgtcacactaaagtagaacattccagaagaagggcttccatcctgtatgaaccacacctgagagttatcaatgtcagcttgtgtaaaatggtgaaca

SEQ ID NO: 346992 - DNA, 1000 bp, Homo Sapiens
ctatgatgccatgaattcgtagggaagaggttccagcagctcaggctccttcccacgggctctcataaagtgtgcttctctgggtggagcagactggtgcttcagttgaacccaggcacctttctctttggcttctttctttttctgatcattttccttcacgcgtttcaggaagctagctcggctcttagagtgtttaatgtgctcaatacacacattaattctcttggcaagaatcttgcccttaacaggggtggcctggaccaggtatttccacaaaccagaggggcccatggaaccccagaacacaagacagatgggcttgagttccaggacctgaggactctccattaattcctcactgagggcagttggacttgctgctgaagggcagccgggggccctatcccacaggcctggaagggtgggacagcagctggtacacacagaccccattctgccagctgttagccacacagctgccggctgcattttccaccaaggcattggacacgcactctgactgagcccgcacattccccacaggccaactgcctttgacgtcagtgggagcttggccttctcgaagacagaggcaaagataatatttgcaaagtcagctttgcaaaattcagcttttctccgctttgcccccatccccagacacctgttcctgacacctgtgagatgcgtcttttctgcactcccgtcaaagcctatgctgcctgtgtcatagcacacgtcacaggctgttgaaattacttttgtgcctgcctgcttccctcgcatggccatgtgccgtgggggttttccgtggggatggagggatgtgggcaggttttcggtggggatggcgggacgtgggcagttttccgtggggatggcgggacgtgggcagttttccgtggggatggcgggacgtgggcggttttccatggagatgacgggacgtgggcggttttccttggggatggcgggacgtgggcggttttccgtggag

SEQ ID NO: 346993 - DNA, 948 bp, Homo Sapiens
tcactgcccagcctggcctctccccagactccgcagcagcctcctcgctgcccccttcactttcttattcctgagggtgtagatgagcgggttgagagcaggtgtgaccacggtgtagaagagcgatacgaacttgccccgtgcctggttgtagcgctgcgcgggctgcaggtaggtgtagatggccgagccgtagaacaggcagacggctgtcaggtgggacccacacgtgcccaccgccctcctccggcctccgctgaaccgcatgcaacagacagctcgggccacggcaccgtaggaggccaggatgacggcaaacggcagcagcaggatgaccacgcgggcggcgaacatctggttctcggtagtgtctccgtcgcctccgcaggccagcttgagcaacgccggcagctcacagatgaagtggtccagcaggcggggcgcgcacagcggccgctcagccaggagcgcggtttgcgcaaccgagttggtgaggccgcttagccaggaggcgctggccagcgtgcgacataggcgcggggagacgagccccgcatagcgcagcgggcggcacactgcggccgcgcggtccagagccatcaccgccaggaggacgcattcggcggaacccagagccagcgatgcgcacagctgggccgtgcagtggctgcgcggcagccagagcgctggtccgcgcaggttggccagcagcggcggcaccacgctagtagtgaagcccgcgtctaccaaggccaggtggcagaggaagtagtacatgggcgtgtgcaggcgcgggtcgcgcaccgccagcagcaccagcgccgagttgcccgtcaaggtcaggaggtagcacaggaggacaagggcgaagaggaccggctgcagggaaggccagtcggagaaacccagcaggagaaagcgctcctctgcgctgtagttggccttcat

SEQ ID NO: 346994 - DNA, 819 bp, Homo Sapiens
tcacctggcccggtcccccgaccgctcatccaatgaaactggggcccggaacttagggccaatcacgagcggagagggcggggccacgcttggaagagaaaattccagtgggctggagacctggggagatttagaaggcgggaccaagcccctttcgccggccgccccattaaaccggctctcactggcttgttctgatatagaaacggaataacggcgctgtgggctggggagggccgagctgccttcaggcttctggtctccagctgcagggcactcacacctgcccgttatgaaaatgcagacccgcagggcaggaattccgagtccgggctggagcgtgatctggaatccggctctcttgaaacagcaccgcggaggattcggatccgggtgagtaggaaactgcgcctcagcccctcccacgggccgcccacgtattccaggatccgaaaacgcttcctgctgctccgtcaccccaggaaggcagcgtccgcctctgggcggttctgatggaaaccggctgcgccgcccgcaggaaaacccacaacgctcatgctgggtgagtcgctgcagctgcaggcccccagggtcctcgtgagaggcagtcagcacctgcagctgctggggctccaccaggatgcattttgaggacaccagctctgcaccatccttgacccagacagtgggccccatgggaccacctccaggcagggagcaactcagcccttccggccaatcttggccgcgcgtcctggtgtagcgagcgggcttggaggagctcaccgctgctgtcatggttcgtttgctaaactgcat

SEQ ID NO: 346995 - DNA, 1000 bp, Homo Sapiens
tcaggtctgagaaacacaggttttgccgcattcttcacatttgtaaggtctctcttccatatgaattctcttgtggcttgtaagggttgaggagcggataaaggctttgccacattcttcacaaatgtagggtttctctccagtatgaattctcttgtgtttacttatgtttagtaaggtctgagaaccacctaaaggctttgccacattctttgcacttgtaggtctgtctccagtatgacttctcttgtgtttaataaggcttgaggagcaggtaaaggttttgccacattcttcacatttgtagggcttctctccagtgtgaattctcttatgattagtcaggtctgggaaccacttaaaggttttgccacattcttcacatttgtaaggtctcacttccatatgaattctcttgtgtttaataaggtttgaggagcaggtaaagcttttgccacattcttcacatttgtagggtttctctccagtgtgaattctcttatgattagtcaggtctgagaaccacttaaaggttttgccacattcttcacatttgtaaggtctcaattccatatgaattctcttgtggctaataagggttgaggagtaggtaaaggctttgccacattcttcacaaatgtagggtttctctccagtatgaattctgttatgttgactaagggccgagatccacataaaagcttttccacattcattacatttgtagggtttctctccagtatgaattctcttatgtttagtaaggtctgagcaacacctaaaggctttgtgacattctttacatttgtagggtttctctccagtatgaattctcttatgtttagtaaggtctgagcaacacctaaaggctttgtgacattcttcgcatttgtagggtctgtctccagtatgatttctcttgtgtttagtaagggctgaggaacaggtaaatgttttgccacattcttcacatttgtagggtttctttccagtatgaact

SEQ ID NO: 346996 - DNA, 1000 bp, Homo Sapiens
tcaggcaatggttttggtacaaggtaaggggatccccagcagggatggagcagaggctaagtcaaccaacttctgggccaggagcttcttgcttggctggcgtaggtcttggcacctgggtagatcagttcgcagaaagacacagacagacatgccctctggggtctggctcctatgtggcaagggtgggtcaaactgatggcaggggagggaatcctcactgccggggtgctgggctgtctggctttcagtgccagttgtaaagagagttgtctggggacaccagctgctcagtgcctggagacctggggctgtgggaagtttcagctcctctgcagacgggtaggtgaaggtcggggaggaaacccactggttccatatgagaagtttcagctcctgatcagagccttcagtgggggaggagaccagactggcaggcaggcagcagggatgagatccaggcaaggagacccagggagaaggggtcatggtgcaggggaggcccagtagcatcaggggcagggcaccagttacgcagaaggagctggacgcttcagtatggccctggaggtgcagggcccagatacaggatccctcctccccctgctctccttttctgtgctgcccgttccctctctgcaaactgggagttattctggccgcagccagttccacgtccccactgagggccgcacccctgaatgttccctgttgtaaagctgtgtggaggaagggaggaggcctttctgcgtattctgtcttgtcatcagcccgcggtgttccagaagctgccagcagggggcagtagcaccgcatccctgggaccctcccggcgcttcccggccacggccctgggctccgatgaggccacctctgtgagtgggtgtgtgcctgccggtcgcaggtcgagaatgtcttaatgacttgtgccgcgtgtgcgcgctcgatgagcagagggcctgatgcggcagggccaccgtgggggccaggcctggaaaca

SEQ ID NO: 346997 - DNA, 549 bp, Homo Sapiens
tcagggcaaacacatgaggaatagctttgatttttggtaaaatctgtgagtccacagctttctcatcaatcttgcactgtctgtattctcatatttctctttttctgtgtcgaagatctcaccttcctggtgtctgggcttccgcagctgcttcttcctgaagtaagcatcagtaggatgttttgggatttttacattgctgatatcaattttggttgaggtggcaatgacaagtttccggtgtgttagttttctcacgtgctgattgaagggttttgtgcagtggctcaacagctttccaggcgcatcttcagcagaatattatctgggcattttgtgaagtttaaccacccgggtaccaccgttcttgtcactaccaactggttttgtaacagttgcaagaaccttctccttctttttcttttcaaccttggatttagtggctgagtacttcctcttgtacatggcctttcttgccaccagcatcagccttcttagcttcgggtttcttctctttagtatcggcttctccgctttttcacctgccat

SEQ ID NO: 346998 - DNA, 987 bp, Homo Sapiens
ctacatttttaacactttctggagcttctctctagtatgaattctcttatctctaatgtgatgtgaaaatgagatcaatgcttagccacattcttcacatttgtagggtttactctccagtgtgaattatcttatgattagcaaggtctgagaagcacttaaaggttttcccatattcttcacatttgtaaggtctctcttccacatgaattctcttctggttaataagggttgaggagcgggtaaaactttgccatattctgcacagatgtggggtttctctccagtatgaattctcttatgtttactaagggctgagaaccacataaaagcttttccatattcattacatttgtagggtttctctccagtatgaattatcttatgtttagtaaggtctgagaaccacctataggctttgttacattcttcacatatgtagggtttctctccagtatgaattctcttatgattaataaggtctgaaaaaaacttaaaggctttaccacatacttcccatttgttcagtctgtcttcagtatgatttctcttgtgctgaataagggttgaggagaaggtaaaggttttgaaacattcttcacatttgtagggcttctctccactatgaattttcttatgatctactagtaacgtttgagaactttttaaggctttgccacattcttcacatttgtagcatctctctgcagtatgaattctcctctgtatagtaaaatctgagaacaacctacagtttttgccacattctttacatttgtagcatttctctctgctaaaaattttcttatgttcagtaaaggttgagcataactcaaaagctttgccacatgtattacattgacaggtttagctatgggtagttgacaaacattgatgaaggccattgtaactgcttttctgccccttgcaattagcaacactttggtagtctttctttaaataaactattaaggtcacagcttccat

SEQ ID NO: 346999 - DNA, 1000 bp, Homo Sapiens
ctactggtgtttcccttcagtttcagtctgaagttcatttgctttctttctccctttgaaagaagccatgcaagtgtccactccaaggtactcaccaaaggcaatcaacatttttggagatattatttgtttaagaatcaatccgatatatgcaaatttgggtatcattaaataaacttgttcctctaaaatagcatttaaaatttttttggccacatactcctgctccagaattggtaacagaaacggatacattccagtgttgatgaaatgtgggcacacgatggtgcttttaacttcagttttctttatcatagttaattcaaaaaagagagattcagcaaagccaaaggctgcaaatttacttgcagaataatttgaaatacaaaccaggtgaccatggttagctttaatcacggcaggaaggaaggccttacaagtccagaaatgagtgatggcatttacaagaaaggatttttccaccatgtgatctggaatatcgaggaagggctttcccgtgactaagtcagcattgttaacgaggatggtcacgtcaccaaattctttcctgacctgatcagcaactctgtagacctcttgtctgttgctacagtcacacgtgtagggaaacactttcttaccacccttttctttggccagtcgacacgtttccatattgccttcttgattaacatcccatagaactaaaatggctccaaacctggcaaaatatatagccaattgcctcccaagtccacttccagctcccgttgtaagtacaatctctccagcaacattctttttcttcttgggaattatcttgtaaaccaaagattccaaaaagtaatatggaaattttcccaaaagtactgaggtgtctgcaatcacatccatgtttattgactgcagaaaggaatgttgcaaccccctcgagtcatgttttgtggacgaccgcccgtacttactgctgaggacctctggaggagggggtcctgcgtcc

SEQ ID NO: 347000 - DNA, 396 bp, Homo Sapiens
tcagttttcaatttgcttttctgtcctatcagttttctctgtggaaggcaaatatgttccatgaagaaggctgttagatgttgtatagaactcctctccatatttttctcttagtttttaatatatttctatgtcaggtttgatctgcttggtcaacaaatgatactggtgtaaaacttcttggcgatttaatttccaagcttcagtctctttcaggtgcagctcccagaatttgtgcagtcttggttcatgcttctgagtggccagctcctcagctgctgcaaaagcctccttctccatgctgtccactgacaccttctcagccatagtctcagctgtcctatggcagtgcttttctccatacttcccacaggaatatcgaccagtacttttcat

SEQ ID NO: 347001 - DNA, 1000 bp, Homo Sapiens
tcagtagccggtctcctcctggtagtaaggggcctcccctggccctgggcagttgccggcggagggagccccgtgggccactgggccacccggctagtacttgggttcgtatatttgccggcctaggccaaagacctggccgctgtgattggcaacctgcgtgtagcccatcttcagggacatggaggagttctcacacttgtcgattcccaacttggtgtcatagatgtgccgctgggtcccgggagccttcatgcccacctggctggcgcacttgtttgtacccatctggaggctgatggtcgaattgtccatggggggcaggatgcggttcttggggtcgtagagatgcctcctcgtgccatatgcggtcatgcctgactggctggcacatttgttggtaatctgcagccggatgacacactggctggccttcatggtggtgtcgtggaagttctgcttctctgagtacttgtcacggatgtccaccccgctccgcagccccttagtcttggccttccctgccagggcgagaagagacacccgcacttgcatattgttcccactctcaaacaggtcgttggcctcaaataggtccacgggatcatgccgtagctgaccattgccttgaggaagttggagaggttttctagctagtgccagttctacacggaagccgttgatcttggggactgagcccggctgcagtttgttcacgagtgtgcataaaataatcccgtccttcaggcccttctggaagtcggggaggatggagaggccagtgaatcccttgatccagctgcggagctctgcctccttctgggagtcatatttgggcagaagcctgttctggacgtccgccaagagcctgtaggaggggcccttgttgaactgcgtggagcttatggctggagggcgccgccgcggggcggatccgacaggaccagcggctaagtcttttttgccttcagccagctccccgtgtccccggaggaaggag

SEQ ID NO: 347002 - DNA, 1000 bp, Homo Sapiens
ctacttggggtaggcacaaatatctaacaggcctgaagatggacctcgattataggaccagatcctgagttcagcatctttgttcttagggattttcagaaagtcatgatctcctagccttgtgagtgctgaatacataggaaacttaatctttttaattttcatattcctcattttgtcctcttccttctttttcttgcatttttcagccttgatggctcccttttttgcagcatcaggttttcctttacctccaaatgcagcaatatccttttcatatttttccttcagcttcacagccttcttttcataagggtgcttgtcatcttcagcaatgtaattccacatctctcccagtttttttgcaacatcactaattgataggccaggatgttctttgatttttgggcaatcctcagaagagaacatgaaaaaggccaaaggagggctcttgggtgcattgggatcttcgaacttcattttggtctctgcttttggagggatatagattttcatttctctttcataatgggccatgtccacctttactgagtcactggcaatggccctggcccctgcacactccatggcattagttcccctattccctgaaatcctggcttggactttgtcctgatcttctctcaggacctctttgcacactgacctgtaggaccagaagtcaacgtgaataatcttgtctgcaaaccccaaaatgtacacggttttgggttcagtgtggtcatgagggccccacaggaatttgtagcatataggatccctgttgggcatctgcctcaaattcagatattgttgcgcaaaacattccaggctctcagaggctttgctgagggcctcacggaaatgatccatgtgctgttggatgatgtgcttcagcatttctgccttttgggtgggctccttcttctggttctcgagcaggaggaacacctccaactcagccacattactgctcaagaggtccctgggcctgcatttg

SEQ ID NO: 347003 - DNA, 891 bp, Homo Sapiens
tcaaggccagtcagctctgtgccatgcaggagctgttgcagccaagttagcacacttatttccacccagccgtgctgagtgcagcacagacttccaggaaccggctacaatttctgatcctatcctccactgccttatctctggtggattcttcaggggctggcctttcctatagttcacatgtccagcataactgtgcagatcagagtggcaacctggatggaaaaggtcagcaaaagatgagaggaccatttgtgctactgtgccttgtccaaactcttctctgtggtcagtcacctgcaaggccttaattgagtcaggcatccctccttgttctagctgtatatttttaaagagcatttcccccaatacccagtaaatgaacttaacaatatggtcatggagatcaatgctagcccaagcatcaaagatggaggaatgggtgtcactgttaaagtcacaggagataacttggtctttagcgtaggccagggtgtcctctaaggggccttccaatgcctgactcaacactttattgatgtcgctatacttgtatactttctccagaatgcaggtcaggtccatgacagacatgttggagatacagaaaaccatatcaatgagcttcccattcagcacaggaatgaccttccccatagccttggtggtgtcagtgtttgcagcaatgataatctggacagcaccaactgtggtatgactaacataccacagtttcctattaagaaaccatctggatttttcacgatggaagtgatggtgtgaactgtgataatgagtatctccatgatccaaagttgtcatggatggataaccttgattagggggccagagagtttgcagtacaagaggagaagtggtcatacttctcat

SEQ ID NO: 347004 - DNA, 1000 bp, Homo Sapiens
ttattgtgaaaaaggatactcctgatctaagtggtcatcaaaacatttaaaatttaaagaaccagtgcagttatttcctgaatagcttccatagtcaatatactcctgaccattatgtctattatagtaataatcagaattgaacttcaaatagttataattacatcctctaaatcttgaattctggttatattctgacttccaaggagtccctcttcttccgtgaaaattaccaaaatagaaagacctagcacttcttgatgacattacgggcacctgagagggcccatagttcactttctggtccaatgtactatcactaaacctctttagataactggaactgggttcctggtagtagccttcatcaaacaagtatctgggggctagttgtcccttcatttgtccattgttgttttcatgtctaatgaaatgactttcacccctaggccatgaacatatccatctcggttcatactcagacttcctacctggtgtcctaaacttgtaattagagtatttttcctcaccatcacgcttccactttgaaaaaaaggtctgctgactcgaccttgtattttgtttgcgagtgatcattttgtcagtgtcaagaggttctttttctgagaaactattaaatgtggccacagatttctctttctcctctttgtttatactaagggtttcactgaagcattcagaatcactactaatttcctctaagaaatctgtcaactgtaaacctaagcctattgactcatggggtggggacacttggcttttccttgtggatttggaatcttcaatatgataactatgagtcttttccaacagacagctgtttccatcagttggggacagctgaccaccagctttatgggctgtctcctggcaatgagtttcaaacccattagtacattctttggcataatctacttttcctcgtttacgctcaggatcctgagtacaaatctttgatgagtaattattttcttgaacc

SEQ ID NO: 347005 - DNA, 1000 bp, Homo Sapiens
ttaggatggactggtgctcctgggacaccggaatctgtcatctacaaggccagagcttgctagcaggccctggagcctcgatgttgcagtttccaaggggagagcctctttttttcttagcttttggaagggaattctcttcgcttcaaaattatagggagcttcagtaataacctgttccatcctgcggcgtgtatccttgtttctccttggtctttgcactaaaacaattattttttttctcatgtgcttaacttttctgagatggcagtaggaacctatatctttaagcaccttctcgagttgctgaattaaggcaacttttttaaaccttgctgcttccctgatggtaaattcaacaaattgtctcttgactttcatagatccttgtagtttttgcccaaaccttcaaacttctttcattaattgacattttatatcatgattaattttctttgccatggcaggagatatttgtggtatatttggcacagtttccactgaagacattgctgtgactggtgggtcactagtgaagttgtaggagaaagaatccaatgcgttgggtggcatatgatctcctgtcatatttataagctctggtggagcagaatttaacaggaagccattaggaggcgtttgaccattttccatctcctcctcttggatattgtgaatgacagtagcataaggagttatcaggtgcttgtttttcatcttctcttcatggacattgtgagtggtggtggcatacagatcattggtactcatggctggaataccagcttctggtgtattaataagccccagtggaacagctgacaagatgttatcagctgcttgttggccattttccatcttctcttcatgggcattgtgagtgacagtaacatactgatccctggtactcatgggtggaataccatctactgacacattaataagccctggtgtaacggatgacaagaagttatcaggtgctggttggccattatttatc

SEQ ID NO: 347006 - DNA, 1000 bp, Homo Sapiens
tcatggtgcagcagttgagaagacgttatctagttggcattgccaattttccatctcctcttcgtggacatcgtgagtgatggtagcatacagatccctggtactcatggatggaataccagttgcttccatattaatgagccctggtagaacatttgataagatgttttgaggtgctggttggccgttttccatcttctcttcatggacattgtgagtgaaggtagcatgcctatccctggtactcatgggtggaataccacctcctgccaaattaacaagccctgatgtaacagttgacaagacattatcaggtgctggttagccattatttatattttcttcatggactttgtgagtgactgcagtatactgatccctggtactcatggatgaaacaccagctgctgccatattagtaagtgctggtggaacagttgcgatgacattatcgggtgctggttggccattttttgtcttctcttcatggacattgtgagtgacagtagcatactgatccctggtactcatggctggaataccagctgttgccaaataactaagccgtagtggaagagttgacctgacattattaggttgtggtcggttattttccatcctctcttcacagacattgtgagtgacagtagcatacagatcattggtgctcatggctggaatatcagctcctgtcatattaagacctgttggagcagttgaaaaaacgttatcagattggggttggccatcttccatcttctcttcagggacgtagtaagtgatggtagcatacggatccctggtactcatggatgaaatatcagtggctgtcatattaataagctctggtggaagagtcaacaacacgttatcaggtgctggttggccattttctatcttctgttcatagacattgtgagtgacggtagcataaagatctctggtactcatggccggaatatcagccgctgccatattaataagtgctgtcagaccagtt

SEQ ID NO: 347007 - DNA, 645 bp, Homo Sapiens
ctaataagcagacatacacagatccctggtactcgtggatgaaattccagctgctgccatatcacgaagccatggtggagcagttgacaagacattatcaggtgctggctggtcgttatttatcttctcctcacagacgatgtgagtgactgcagcatcttcctgtttgtttaaccaccgcgacatactcttccttctcttagatgaagagtgtctcttggattctctggaacgtttctgtttgctttgatgccctgttgcaacctgatttacttcatcactccttgtttgctgcccatcatttgtaaacacgtagccaactgtatgaagttcttcaggtggagttggttgactcgtttgaagtggagaagcctgtatctgcagatagtcctcataattaactatgtgtgttactagaacactttgatttataagtcggctgtacagtccgctgtacaggccgcctttagagggcgccagagtcagcgaaggggagggctgcgcttcctggttctctaggctggcacccactgagcgagagccttctcctagggactctggcgccctgcacaggtccccgtgttctgttggagcagggcacgcggtgtcctgaggcttcccttccttccattgcccttggaccat

SEQ ID NO: 347008 - DNA, 798 bp, Homo Sapiens
ttaggtataggatacatcatggaaatttgccctctgagtacctaggcgcaagattgcctccaacaccttgctgtgtttgctatgcaaaatttgagatactgaagagctgttagctgcccaatctatggtgatgagctttctgagctccccatagatgaaatgctcctttccagcatacatgcccagcatattctggaaatcctagatgtcttccccagaggcaccattaccctctatgaatatcacacccaggacaatgatcaggaggccatttttcagcattctctggctgtcagccagcatctcatcataggtgaggtcccgcgagttaacaaggacataggagtggctgatgcggtccacttccttcatgtcaatgccagagaccacctccaagcacttggaggctcccttgaagggcagggagaaatcagttcttgtatcttttgacaaccttgaacatttccacttttgtgatgggctccttaaatagataaaggtgcttgaagtctgctcctcttcttggatgctggagtcttcatcaggtgtgctccacgaagtagaggaggaggagcaggagcttggaggactctagagaggaatctggggagggctctggggaggacttggcatcccagaagtagccacatcctcctctttagattcatccttcagtgaacatgctgcttctgccagtgaaggtgtaccatagttgccatgaatatagaattgttgggcacagggttgcaggaagggagggaattcccagatttcaaagaagaagaaacatttgtgcat

SEQ ID NO: 347009 - DNA, 795 bp, Homo Sapiens
tcaaggattgagagggtcccctggagcctcacaagatggaagatggcagcccaacatgggaaaggcccaggctgggccaggccaggccctcctgctaggcctgcaagctccaggtcctgcagcaggatacagttcttgtgggctctgagcattcggtgctggatgtgggccaccttcttcttgtgcaggttctgctgccagcaggtcttggcactgatgcatcttctctaccacgcctgagttgcgcttctcccactcgctgtgctgctgggcgctgtgattctccttgggcttcagggcctcctgcagcaggcaatcatcgtggtggatcatcacatcctctgtccacagctcctctcgcttcttcttttgccagtcccgttccctctttctccaccgcctttactccagggcagcaggggacagctccttggcactgccctggccccaggcctcctggatcttctcatgaagttgcagtcgcagaacatccaggccaaagagagactcaaggtctgtggccaggacatctgtagggatccctgtgcagctggatgctgaatctgcctcctttttgtctgcctcaggcttcctggcccaagatggctgctggagaagtttctgagccttgagttttgccagcccacatacccacctctgactctgggctggctgggaggagatcttcctggccaggctctgcaggctggcatctttagcaagcagaaatgccatggcatcagtccaggctgcccctgactcacactgtccagcagtgggtgtgaccctcaccat

SEQ ID NO: 347010 - DNA, 855 bp, Homo Sapiens
ttagtaattctttttaatctcatcattccgaagattcaagataaacatgcatatgcataattcaaaagcttcaactctctgctttagctttgccttttttcctcttaacaaatctatatcttttagtaaaacaaggctttgagcatagattttcttttgacacatttctgccagaagttgcttttctatttctctcttatcttcatttagctttatttctaaagactcaaactttatatgcttaggataagcatctgccagttgatcaccaataagctgaaggttgtcagcaatttctggaaagaaaacagaaagtgaagactcatagccacatctttgttagtgatcggccactgaagagttagaggctgctagtaagagggagttcccttgcacccgatccttcaacgtttggtgtagcttttctcgcagctcatcttgactcaacacgtcagacatgaggagcaagttggactgtccccgacgaggggcagttgtgtattcctgagtcagtaggcgccagcttcctcccatcatcagcttcctcccaggccgcctccttcgccccgccatggccagagttgagtgcacaggacaggatgcaggtccaagatgagggggaatctccgtcctcaaaaacctgccttcccttcctggggcaatggggccattttctcccagggtttccaattcttccacttcacctgtcaggttttctttgccaaaattgaatgaaaaattacagccttcttgcatcttcagctgtgtagttggtaacagcaccctcatgcagtttttctttgcgttctcttctgtccgtgctcctgctgagttagcaccatgctgctctaacat

SEQ ID NO: 347011 - DNA, 751 bp, Homo Sapiens
tggcgttgggaagagggtctggcgccgccgtgtggactgttcgggctcacggggctgaaggctccgaagaccgagacctgtgaaccgtggggaggctccatgcggatgggggccacagcccccgccggagcccccacactagccctggacttctccaccggcttacgacatgatagctcaataagctccttatttaacgcactgttgtatcaggtccctgtcgcagccactggccctatagcctaataaaggagcgggtgcacgcattggattggtgagctaccgccacagcaacaagtcctaatcaaccatcccaaacggtggctggaacaaggttctcgcaggcctgtgcttgggcttgaacgctgggccggccgctgcgctctgtggctccctgcagacctgcggatcggccagggggctccgatccttttgggccgtggctgaagaagcagcggctgcaccagagaagtccttctgggtgaaggtggaagcgcacagggaccgcggaaccgcccaaggcgtcttccggcgtaggctcagaactggcaggctttcgtttctgcttcattccatggccagagcaagccacgtgggcaagcccgaaaccagggggcgggaaagtaccctccacccacaaggaaaccatggcaagcggtggttgcaggtagggctgaggaattggggccgatagttctatctatcccggtgagtgaggagacctgctttgggggttgcacagtctgggtct

SEQ ID NO: 347012 - DNA, 1000 bp, Homo Sapiens
gacacttcataaatgtttataaaatgaacaaatacagtctttggtttgtggagcacaaatttcacaaggagatacagataggtagataaataattgccctttggtatggcaagtgctagagtgaaagcacgcacaaaatggagtgagaggaaagagaaccaggtggcctgcttcactgggagaaacaaggaggcttcacagaggagatggcatgtgaattacaccaagcacttgaagtcagagaggccacagtcagtgatactccaacccaaataaacacattctaatctggggatacctaaaagtgtgcataaaacacaacgctcacttgatttgttttgtttacgcttagggctgccaatagaagctgcaaattcactatgacttccaggtccaattccatttcggtctctccagttatcagattcgcttccacctcccaagtgctcacgactgttggaccgtgaaagggacatggatgagccctcataagtggttgtcattgtgggcttataggacacatgattggcccttctcaactccttgatagtttcagctggcatggatttagaaaaacccaggccactccaggtatttgtgggcgttctgacctccgtcaccactggtttctttaacatagctttggtggctaatagcttcttctgttcatagtcaaatgcctgcatgttgacatatgatgaccgtggagcaaggtgggccctttcggagttttgctgggcagctgctgccctctctgcagcgcgctcactccctggagccttcttgtcagccaaagggctttcggtagcactcagttcagggtctgagagcaacctgtcagtgctgtgtaagtgtgagtttttcgtgccttgcaatagttccactgtctgccttttggcacaggaaaccttggagggacacatcatctgtttcaagtcaccagcattcccagaatgggaaggacttcgaggcatgcctacttcaacaaaagcatcattac

SEQ ID NO: 347013 - DNA, 1000 bp, Homo Sapiens
gccagaaaaaatttccaagatttattatggactcaaagttaaatttgtcagcaatataattcttttaagaaacgagggatgaaaatgggatatgtacactgaagcagaggctctaaaaacagcaagttttcttcccacagctgttagcagtggtcagatattatgagaatattatgtctgccctggggatttgaaattggtatcggcaatttggaaagggtacagaatgtgataaaggtcttaggaaataggtgcaccgagcaagggttaaaggtagctcagaagctacactgacccctgcaaatgtgccaagaacagcctcacatctagaaaagacacaggctctattggcttatattctaaaagtttcaactagtttgactggaaattgctttgaatatacattcttcttttatgctgtacaatttcctggaaaattaaatacagcatgcattttaatgaagtgccgtaagtattaaaattaaagatggaagggcttgggcatcaagaaaattataatttttctccaatatcattatctcaacccaattgaacacatctaggattttatatcactattaaaatactttgaaacaaattaacatttactaaagaagctttatgacctttcatttagaaaattctgactttgcaattttcatgttacactaacaatcaagtatgtttactcacagaagtttaactcattaaaaccattctatacatacatatgcatatgcatacatatacacttttacatcatagatatacggacttcattaacaaacattggctaatgttttcaatatacttttataaagtgtttattgtatgttaggacaccttcaaggtgtttgggatatatcagtgaaaaaactaggcaaaatttactgccttcctggagttgacattctactaagataaggtagacactgaaaaatacatacagtaaataaataaatgatctagcatgttacaactgatgattgctgtagtaaaa

SEQ ID NO: 347014 - DNA, 1000 bp, Homo Sapiens
acatgaatgttcatagcaactttatttgtaatagcccaaaagtagaaagaacacaaatgttgttcaacaggtgaatagttaaactatggcacatctctaccatggaatactacacagaaattaaacatattgcattactgatatacacaacagtttggatgcatctcaagggaattgtgctgagtgacaaaagccaatctctatgtgttatatactgtatgatgacatttatataacaattctgaaataataaaattataaggatgaagaacagattagtgtttactagcttttatgggtgaaaaaggatgacagggagatgtttataaaggaatagcacaagggatcttagtggtgacggaacagttccatatcttgatcattgtagtggttacccaaatatacacatgtggtaaaattgcatagacctacacacataaacgtgcacgcacacacacacacacatacaaattagtgtatgtaaaactagagaagtctgagtaatgtctgtggattatacagatgccaatttcttggtttatatatgatactgcagttatgtaagttgataccactagaggaactagataaagggcatatagcacttccctatactctttgcatcttcctttgaatctataaatatttcaaaataaaagttttaaaagatcagttggaatatacacatgcttattcctatagtagtgttactatattcagttattaatatattctcatagctttcttcatatgaagataaggtatagggaagagtcatatctagtatttgggaaactgaaagaaaccccagtggacccacttgagtgtacatcatggcaggaaaaaaaaattgtttcagatgtattattttctggtaccatagataaagaataaggataatgcaatgggaacagttgaaatattggcttgtttacttgcatttgtatgtttgtttttaaatttttaccctgtgcattagttcattctcatgcttccataa

SEQ ID NO: 347015 - DNA, 1000 bp, Homo Sapiens
gtaaatctcactcattttattttggtgaaaacaaactactaggaagatttaacaggtaacatcaattttgcaatgaatttattccagataccttttatatttcatatataaggtgaattatccatgaaaataaccactttatatgaatgcagatggccaggatgttgaaaaaaatgaaattggcttcagagagaaacagtaaatataaagggagacacactttccctccctaaacatttgcaagagtgtcaggtaggttttatttgagcaaataaccttattgtaatatttcttttcaaaaaagcaaaaactggtagtccattcataaaacttttttttattgttgtcgtattttctcattcaatttgttatttaatatctgatctttttcaaattttacactttacaaatcatttggcatacatgtgattatcatcaaaactgttgaactttataaaatactgaaaaaaagtatgtgttgtgtttatatttctaaacatttgaatttcttggggagatagtggataatccccagtggttttatttgaaaatctcacctgacaattgtctttcagaggaggtgtggctctggagttgtttctgcctggctctgtctttgtgctgctgaccagagctctaggctctcagtagaagctcacagaattccttttgattgatggcgaggggtgatggcctacgcaaaggtctctacttccaacttccctgtcttctatggcggctccagattagctcagtgggtgtggggtggaattttcagtcaagatgcatgatgcctcacggtttactttctactatagcatcactcttatggttaagaacttctggaatgctgttgagcagtttccccattatcgattttggagatcttggcctatgttatttagagatgggttttaaacagtgataaagttaaggtacagatttacactgagagttagtaagatcttcctttggaaaaagatctaccacatttcagagg

SEQ ID NO: 347016 - DNA, 1000 bp, Homo Sapiens
ttttaagtttgacattattggttgatttattcagttaaatgtattaattctgaaacttatttaaaaatcagaaaaacgatgataacatttataaataaccgatgagtcataaagacagagtggtatcaagggaatatccctccctgcaaaaaaaagcaagcaaacaaataaaactacatttatcaggttttctataaagaggtttgtatttaaatcaaattttaaattatgataaaatgcattttgaagtgttaaacagaaatccaaatataggtgatattttcaatgctcctcaactacaaaatttaattttagagatggctaaccatctatgaagtgttattggatgagcatggtaacaatattatgaaatagagtttttctcacttaaaatcccaaaaggagccctgaacaagtcattttagaaaagaaaaaaaaatactgaataatattttcacaagcgttaaattagatattaagtataaatgaaacttcaaacatgtaacatattaaagtaacttttgttatttaagcattaccaataaaatttcaaaattattcttactttagattttagaagaattaagtaaaagagatcagccaggagttctgtgtaactttgagtaagttaaatttcatctgtagtttccatgtccaaaatagaaatttgaaagatccaacagaccttaagacacacatcttcaaatggaaaaattgttgctatttgtttaacatttggtaagatttcaaagtattgttttttattacttctaagtaggaaagattccatccaaactttgaaatgtcctttgcccttatatatgaaaatgtgcactcatgtgcattcatgaaggggagagaaatgatcaatgctctaattagagctggcaccaaacctggcgtaggcagctgctgtgagctttgtcattacaattttgacgtgacatatgatttgcgaaatactgggagcattagaaggctgccccatctaggctccatc

SEQ ID NO: 347017 - DNA, 1000 bp, Homo Sapiens
ggctgaagaaaacaaaaatgtattctctcacggatctggaggctagacgtctaaagccagtatcactgggccaaaatcaaggtgttgatggggccatgctccttccagaggctctaagggagaatctggtccttgtcttttccagcttctgtggctgccagcattccttggcttgtagccacttcactccaatctctgcctctatggtcacgtggtcttttcttttctttttccatctgtttcaagtctcctctgcctccctcttatgtgattgcatttagaaacccttaacttgatcacatctgccaagatcatttttccaaatcaggtaacttttacaggttccagggattaggacctgatatctttgggggatattattcagcctgctatattttcttaagggcctccctggtcttcctttttgtgagactagaaacttccagagcgcacaggcagtagatgatgtctctgaatgttctctgcattatcccctatgtcacttggagcctccaacaatcttcaggaaaggttggctgactgagtgactggcatcttgccccctctcccatcggtcaaccatcaacttctagatgtacttggtgtttccttcaggctcctggggccacatggcagcatagaggaggctgatttctgacctccaggcatctgtcaaggtctccggatgaatttgcagacaaatgccttgtggcacatgtgcggacgtggctgttcactgatcaaatatggagcctgggtccaactgtgggcaggaggagcacatctcattggctttcagagtctgttttcaaaaacattcccattcctgacagactagaaggaggggctgaagcttacaaagtaaatacgacagggagaaatgttaggtcttgctcttggatccagtcctcaaatgtaggctggcaagggggaaccaggtgagagggcaaggagcagaggtgaggaggtgactgtcatatgcatggtctgaccaaataca

SEQ ID NO: 347018 - DNA, 1000 bp, Homo Sapiens
actgtgtttcatttaatgctgaaatcagacaatgattagaacatgaaactttgtttgaaaaagtatattcaataaattttgtctttaaaacagagctcttgacctataaagtataaaaagtaattacaatgaaatattcttcagtaaatctgacactttgggattccaggcaaaaggatcgcttgggtgccaagagttcaagaccagcctggtcaacatagtgagattctatctctgactctgcagttcactctgctgcttcagatgaaaattttcaggtctgtctgccactgtagtgaaggactgctttgggtagtgtctgtggagaaactttttaaaggacatagttaaaatattgtgctacaaaccaattcttgaacaccaatcgttttgtcctacctctctgtgacagtgaaagatggctgtgctcttggcaaaggtcatctctctgtcatgattctggatctccttttcttctcctgattatctgtcactcagttatccccactgtcttccacaactttaacctcagcttctctattctaggagactcttctcgcaggctcaaggctctcctaccctccatcattcctccctctaccccacacagccagcatgtgtccagctagtctatccttcagccaaacttccttagaaagaggccttacctcactgtccctacccatctcctctctgactcacttcttaactccatgactgggttctggtttctttcccttgcctgttgtgacttcctatggacacagccaaaaaccatcacatagtcctgttgtatggcatcccctccatcttgaaatgtcctctccctcagttcctatatgttatcacacatgcctgccttggcttctccctctagttgttccttctctgtcttctgtgggcttcttattgtctgctcactccttcttcagtgtcctcacatgggcttccttcccttctcagctgatgccatcacctggggaatcacagttactcagca

SEQ ID NO: 347019 - DNA, 1000 bp, Homo Sapiens
agagtctctagaaatacatatttatttgccaacctcattcagtatctgtattgcagggacaaaatatccttttaaaaagtcgtgggtctggggattccagccaagtcttgtttatagacacaagcctcaaacattttcttgctctgtgcctgtcttatagtaatcataggctttcacaaaagcaggtttcagctttcttatggggttgtcttgcagaagagtgaaagaaaaggtcagtgttcaatccgtaacccaagaaaggaaggagtaataatgcggaaccagggaggcctcatctctttttccttagcatcagtcttcatcctttgaaagataattttttagtgggctaataggattcattctctaattcattgtgctccctaatggctcacatagggagcagttggagggtgatgtggattttagagtaggaacctcaggaacttgagcagaggctcccaaaagtagattagaagtttattagtcttttaaacgattaaaataatacatattcctccataatatccaacacatggctctgcctatagtgagagatagattctttatactggcaagctgactctatctatattaatattaatatttccaaatattcaggaaacaggcgtacatcaggggctgttcttttgctgcaaatgaagttgatggaattacactgtgatacgactgactgtgagtaatagatctagactgatagcatatctgtttatcatctgtatctaatctgtcatctaccttatttatctattatctatctagctatctctctatgtataatttatctaacttctctcatacatgtatgctaaggtaaggttgatttaatcactgacaacccttggaaacacttcctatccttgattaccaactttcaacatggcttctggatgatgaagcttatttatggaaaagaatgtttatctgaagtatacagaaatattcatatgctcattttaatataaacaaacatatatgt

SEQ ID NO: 347020 - DNA, 1000 bp, Homo Sapiens
gacctgaagcctgggggtctcggcgacaggagtgggcctagttttttgatgtagaattgagccttgcatgcaccggtgggatcatattgaaaagaaaccctccaagactagaggaagatgcatcctctgacaatgtagtctctgtaggcgtcccaagtagctgggctggggattagatgggctccaaggcatttcctcaggtggcaatgggtggatccctgggaaggcaaagctgtgcaggaagaaaatggcaagatgctaccttccctcagggaaaacccctttcccgggagcagggaaggcgaggcagtttaggctgggtcagtttgtccctgccctcagagtctgttggtcccggaaaaagagggccttattttatttatttatttttctttgagacagtgtcttgctctgtcgcccaggctggagtgcagtggctcgatctcagctcactacaacttctgcctcccaggctcaagcgatcgtcccgcctcagcctccagagtagctgggaccacagggaccacaggcgccccgccacgacgctggctttatttttatttatttatgtatttatttattttttgagagacgtagcctccctatgttgcccagattggtcttgaactcctgggctcaagcaatcctcctacctcggcctcccaaagggctgggattacaggcgtgatccaccgcttctggccaaaagagggctatagggcacccccagaacgtgagatctccctcgtctgtcatctttacagaggaggaagtggtctcccaatccagccatagtccattcgccccgggcacggtgactccggggcggccagaaccaaatgtgtctcctggcttttgcacggcatcaagtaacccgcgccaggccgcacagctgccctggccttcagcaaggactccgcgagcgaggtgcaagctgctggggagtgccacagcaggagctgaggcagcggattccgagggcggggtggggctgaatcgg

SEQ ID NO: 347021 - DNA, 804 bp, Homo Sapiens
tttatttatttatttatttatttatttatttatttatttatttatttattttttgagagatgtagcctccctatgttgcccagattggtcttgaactcctgggctcaagcaatcctcctgcctcggcctcccaaaaggctgggattacaggcgtgatccaccgcttctggccaaaagagggctatagggcacccccagaacgcgagatctccctcgtctgtcatctttacagaggaggaagtggactcccaatccagccatagtccattcgccccgggcacggtgactccggggcggccagaaccaaatgtgtctcctggcttttgcacggcatcaagtaacccgcgccaggccgcacagctgccctggccttcagcaaggactccgcgagcgaggtgcaagctgctggggagtgccacagcaggagctgaggcagcggattccgagggcggggtggggctgaatcgggagggacgcggacccggtggaacgcactgcgcagacggcgccggcgccagcactcggccgttgacgagtctttcttccagctgtcccctgaaagtcatccaggcggcggtccctttttttctgcctttttgtttccctccggcgagtcggcgcgagggtgaatttccgtttccggcggtgtccaagcggacctaaggagtcgcagttgtgaacaggtttggtgccgcgggctggggtaggcggcggttgggtccgtggctctggggcactgggaagatcgcgagtcgtgcgcatgggaaggtcctcccccggtcctccgggtcatctttgctcccg

SEQ ID NO: 347022 - DNA, 1000 bp, Homo Sapiens
agtgagatgctcatctttattataatttaaaaaaattgttaaatcaacatacaaaattcagtagcaccaataataacagctggaaaagaaatcaaaaaggcaatcccattaacaataactacaaaagaaatacctagaaataaatttatccaaggaggtgaaagatctcaacaaggaaaactataaaacactgatgaaagaaattgaagaggacacaaacaaatggaaagacatcccatttacacaaactggttgagttaatattgctaaagtgattgtactacccaaagccatctgcagattcgatgcaattactaaaaaaaataccaatgccatttttcacacaccaactccacacagacagtgacctcagccgggaatggatttttttctgatcagcatcgtcatttctcactcagtgttcagatgacgttgaatgaaatgacgttattcaaggacctgctgtgtgacattttgcactgtagagagatgcacttgcaggtgtttccatagatcactctgacagcaggatatggggcggaacctgactcagacatgagcctcccctcaggtcagttcatagcccggctctaccactcaacaaccctgccacgttgagcctatcactaaacatcagagcctcggtgtccacagctgcgaaatgtagacagtagtgactaccttgcaggacagagaggtggccatgcacacagtaaggacctggagccaggctgttggatgctggtcctattgcttcctggctgtgtgaccctgggtaggttacctaactttctagggcctctagcttcctccccacaatagagttatggcatatattagtttgtggaatgtagttgcaacagtgtctggcccaccttaagatctatatgaatggcagctatgagccttcctgggtgttgtgagaatgaaatgagatccagtttctaaagggcctcctgctgtggtgcgcacacgaattaaactcactggaaaggctgtt

SEQ ID NO: 347023 - DNA, 588 bp, Homo Sapiens
ttactaaatatttcagctgcttctgggtcaggggaaggtgccacataaacacaaaaaaggactcaggcatttccagggctcataacctctgcagtgctatgagacttgacagtctcctcagcatggcattcctgctgagcagaatgcatcttcagttcactcaggtcattcagccctcctggaactctcagtgttttccatgggatgagacccatgtagacttcccatgaagcctcctcaactgatagggaaattgaatgtttattttcaacttcgaatttcttccaactcagacatcctaaatgtatagaaattttctgtgagctgttatgtggcttggggtagtgggtggcagattctaaaatcgtcatttatcagtcacagcttctctcatttctgcaggctccatcagttcctctgcttctctctcaagttctagtaacttcagggtagttttattgtctttgaatagttactgcttatacctttgtgggggaagcaatgttaagtgtcttctaatctgttatcttgctggacagattttgtaagttgtgaatataatgtacagctatccattagagaactaga

SEQ ID NO: 347024 - DNA, 1000 bp, Homo Sapiens
aacaatgtaaatgatttaatggtcacctgagtggtgtatttgaggagtacaggtttccttgtaggattttttttttaaggcatccattgagaaaaaagaaatgaacactatcagagaagaatcctgatggagatactgttttgggctagaggtattgaagaccccttaagataaaaaatgcatgacttggctcttccctcagagagctcatactaggtgttcaattcacattggtttctgaatggcttgaaaacaatgatatccattctcagagggctgagactggatctagaattggcacttcaatgcttggcagtacttttgatcttctaatatgccctcttgttttccagaacaatattgacaacgataattcattgaaaatttacatcagaccctgtgctaagcctgcattattttactgaattttaaaacaacactaagaggaaagtacctttatgattctattgagagatgacagaagaaactaagtctcagagtgagtcttacccaacttagtaagagctgggattataactggacctccctgcctgcaaagcccatcctatattgtctgcctctccaaatcacagtaacaggggtcagaggagtaaaacattgtattcaaggacacagagcctctggcttcaggccctgctgtctcctgcaccacagtgagcagctcttggttttttgtgtgtattatcccaggagaggtctccccacacccaagggcctgtctctctctctaccttcaactagtctgaggccaggaagaatatcttctcactctaaggtatgtcaaatcatggttgaacacaactaagatcttaataacagtaaattcattgacccaaatggattctgagcctaatttgaagattctccatggatttgatttctctgtgcttggatgctgtaggttgattgcccttgaagaatagttaggctgggatgagttacttgttgggttcttctccggtttgacctggtaaagctt

SEQ ID NO: 347025 - DNA, 1000 bp, Homo Sapiens
tattttaatacaagaaagacattgctctagaacatggctcgcctttgcttcagggcctagcagtttattttagccataagggtaagggagcaggtcagaaatgacttttagtgtaatcctatctgtaattaaaaatacaaatgctgtcataagatcaaatgttatcaaaaatcagtatttaaaattaaatttacccccaaatttctttcaaaaaaaatttgtaatgttctttttcagtgaagcctttgcactgctagagctgaagaatgtgatcaatcggcttgttgaataatcccgcacagtaggtattccgctgaagccaactctagctgggggctcgagagcgaaagacacagatggggccctgccgcccctcgaagagtcggatgggggcgcccgtccccggtgcatcaagaggctggccccgccaggggcgagcggctggcaccgaaccccgcgcacctcgccgcgggcggggctgggccgtagtcggctcgatttaaggctggtatccaaggctgcggccggtcaggcgaggcgaggcgaggcgacgtgagcgagggtgcttagggagaacagccgctggcagctcaatgctgggtggctaacgctcgacggtgcccggcagcaacccggccgacaccccgacccggatcccgagctgcgtcgcggacaatgccgcgggcccgtcccggactacgactcccgacgggctctgcgaccgctccggggcggcccagcgtgcactgcgccggccagtttgacagccgggcgccctactcggctagctctgctcccagccagggacgctggccttctcgcggctttcccccgatgtctctctttattccagctgcctgaaactcggtcccacgaatggcaggcagcgtccaaaattcaaccccgtaaagccagcaccagccaataaagcgcacggatggaggccacgtgacagcagtgggccggccctccggctgagccctgatctctatggtttccg

SEQ ID NO: 347026 - DNA, 768 bp, Homo Sapiens
tcattgatgagactcagcagatctcctccagacaccatccacaaagtaggaaccatgaaggctcggatcaccccaacatagtgaaacatttgctgtgatcgatattgaggaatctctttgctttgtcatgaagcacactagccaggaggagaagtttgtgaatacctgctcatggcagcaggaaagaaaaaaaaaggaccagccgcgctccctgcccttgaggcggaggctggaggtcgcgagtcggtggagccccgctcggtgctgcggagactgcagtggcggctgggacccggagccgtgggcgaggccggcgcgaagaactaagggaggactcaggcgacaactccagcagcctctccacttggtcccccgaagcgccggtccagaagctcctcggcctccacgagcgtcgccacccaggtcaccacgcctgggggccgagaggttcagctgctcgcacccgggccccgcatcttggtcccgagcgtcttccccgggccttctcccctctcttgccggtctccgccttcccttccgccttcctgcgctgcaaaataaacaaagactagtaggactggcatatgacacggccccaggggacatatttctatgttttgctccagggaaggccaaccttttgtctttatgaccttccaaggcagaatcacgtgccctcctttcttcccgtgaatgccaatacttgccaaagagcacagggccctcgagtgccttcggtgcccgctcaggcactgctttttcctccat

SEQ ID NO: 347027 - DNA, 1000 bp, Homo Sapiens; identical to SEQ ID NO: 161533

SEQ ID NO: 347028 - DNA, 548 bp, Homo Sapiens
tttaaaataacaatacacatttaatatatctcacagtcttggggggtcagaaattcaggaacattctggcttggagtctttcaagaggttgcagttgagacatcagccagagccacagccatttgcaagcttgactggggctggagggtcttcttcccggatggttggcaagttggtgccagctgttggcgggaccttagatgctccccgtatgggcctctctgcaggcagcttgagtgccctcgtgacaggcagcccctggagaactgccggaattctgctccactggtagtctcatctcctaaggcacattttcttggcagaaaccgttccttgggttggaagtttgaggagccagtgttactgttggaaccagagctcctgcctggagggcagctgggagtcagagccagtccgtgttgtgtgcagatgaaaaaactcctgcctggtgtgatgcatgggccttgggagaggtcagcttggaatcccccaccctcgcgcacatgcacgctctctgctttcccgctccctgagctctgctccctcat

SEQ ID NO: 347029 - DNA, 1000 bp, Homo Sapiens
ccttcacaaattctgtccaatcgctgtctcttgactttgtgcttatccacaagggccattctttatggaactttgcaactctcagatcaaaaggcaaagcagtcctctaagaacttaggggaacttgcaggagtctgcgtgcatgacgccactatgaaccctcgtcccggacggtcggcgtccacggcgaaaggcgcccaccctggaggcggcggcggcggcgtctcccgcccctcccaccccacccggcggcggtggcggtggcggcggctgtgcggccccccctcagcgcggcatggctcccggttcggtccctcgctcctcgggccgccgccggctcctccgggccgctcccgagccacccccgagaggatgctaattccaacttggatcgggggagggaacgtcctggatgccgagcgcctcccggctatttgctcttctttatttgttttctcctccggggaaggagaaggaaaacggagagaaaaggaaaggaaagaagcggcgctggccgcagctcccggtacccgctggctgcgcaggagcggccgcttctgccttctcaggcccgcggggtcaggcgcgggccggccacagggggcacttgcgctccccaaatccagatccgggagaccgtgccggagaggcggcgaccgctgtgggtgcgcagggaagggccctctgtgctgcaagttgcagcagtgctgtgcccggggcatttgagaagccctgtgttgggtcggagccccgggtctcgaggagggaggcgcgctgcggcgtgggggcccgcgactcggggtcctgggcttgcgcggcggcccggagcccacgccgtcctgacgtctcaaggttggagtctgcacagcgagcctgggaatccaggcccagcggccgctcgcggcccaacgagcacctgggctaaattccccgcccgtgacccgcgacgtccgagcgccgtctccggaagggagctggtggccgtggagtgtggggtctt

SEQ ID NO: 347030 - DNA, 1000 bp, Homo Sapiens
catatgaaatggagtttattaaggagaactgaggcacaggatcacagggtgaagtcccacaataggctgtctgcaaactgaggggcaaggaagccagtagtagctcagtctgagtccccaaacctctaaaggagggaagccgacagtgcagccttcagtctgtggccgaaggcccgagagcccctggcaaaacaccagtgtaggtccaagagtccaaaagctaaagaacttggagtctgatgttcaagggcaggaagcatccagcatgggagagagatgaaggccagaagactcagccagtcagcttcagccaccttcttctgcctgctttttccagccatgctggcagccgactggatggtgcctgcccacactgtggtgggtcttctcccagtccactgactcaaatgttaatctcttctggcaacacccagaaacaatactttacattcttcaatctaatcaagttgacatttaatatgaaccatcacacacagcaatcctatacccacataaaagctgcattcccaatacaagataaaaaggtatttcacagaaagtgttaaggcttttgtgcctgctcacaaatttccttatttttttactatggtccttacgctggattcatttatcttgaattggtaggcaaccgcagctgtaaacctcaatctacggaacatatcaagaaattcaactttttcttgaaatgtcatgacttttctctgcttctcaggagctctttggcatgactggtggcactctatgggtcccaaagtgttcttcaaggtttacagtattgcgctcaacatgaaaaatacacaagaacatcccgatgtcccctttttttcaagttggggtctcactctgttgcccaggcttgagtgcagtggtgcaatcacagctcactgcagcctcgacctcctgggctcaagggatcctcctgcctcagcctcctgagtagctgggactgcaggcgtgtgccaccatgtccagttaaaac

SEQ ID NO: 347031 - DNA, 1000 bp, Homo Sapiens
tcagggccctgcaagcagctcagggctgtgctcgggatgtgcacgtgtgacctgggcctgggcatgtgtgtgcaatgcgcgtgtgcctgtggctggtgggggtgggtggtgctgtatgtctgtgcgtgtctgccaagggctggaggtgcaaggcccaatgtggatgccctcgaggaaggtgtgggcagccgcagggctcttgatcttcgcacgctctagttttacgtcaacacaattctctttgcagccacagtcgataaactttctctcaatttccaacaggccatcatccatctctttcagtagcaacgagcactctgtgggttcagtgaccgctgagtgctgcgcaactctgacccgcaggctcaggcacctggcttctagatctgtgatcatgaattccagtaaaggcaatcggtttggtctttctttcttgaggatcttgaaggcattgatgagcttctgaaatatgtgacacaccgtagcttcccttcctgagtgttccatggacaagagcgcctctgccagggtcagagtggaattgtaccagaactcctcacttccgcccaggtgctgggcctgtgcgatcattttcttggcttgtccatagtttttctccttgttggccaactgtgcgaggaggagcaggcactgggcctctgcacaaggctcatccagctcctggaaagccaggtaagcctccgacaggagcagccgtgcaggctggtacaggttcatctccagcagaacttctgccttcagcatccacaggtggggaaaggacgtcccatccaggtccctcccggtctccccattcatcttcaaaatcttgtccttggcgtccagtggtttgatctccccaggctggacaggaagtgtctgctcattcagtgctggcaggctttcttctaataaaggctccttatttttctcttttttcaacgcgatctcttttctgcagctggcctgctccagctcgctgacgcacacctgcccgacc

SEQ ID NO: 347032 - DNA, 1000 bp, Homo Sapiens
gtttttttgagatggagtctcactctgtcacccagcctgcagtgcagtggcacaatcttggctcactgcaacctctgcctcccgggttcaagtgatcttcctcagcctcctgagtagctgggactacaggcgtgcgccaccacgcccggctaatttttgtacttttagtagagacagggtttcaccatattgggcaggctggtctcgaactcctgacctcgtgatccatccacctcggcctcccaaagtgctgggattacaggtgtgagccactgcgcccagccaagcactctaccgtttttctaagcctcgattctaatacttctttcaaaataattcttaaggcaaacaaatctgccataaaaatgtttattttcctcctattttcaaaagtgattactgttaagtaatttttaatggtttgtaacatatactaccaattaattacaagtaagtttaaaattaatcaaaaaaactaagaggtccctgttgtccccaaattaactctgcagataataatatgggatctttgttttactgttgcttataatcagataatttagaaaaataaaaagttaaatatttacaacttctcctacttagttcagaaagcctttccagatagttgaggtataagttgtatcgctaagcatttgaagatggagtgttggctatggttgaaaaggaagacactagcaggataaaggaacagagggaagaaaagcaggaattgagccagagagggaggagcggttgcacaggtaatgagcaacaggggaacaggcaaagtggagaggataatgctgagggattataggagcctgggtattagaccaggagctcccccttgagaccaagcaaattatcttcttcactttgtaccccagcaccttctgcagttcctggcataaaatagatgcacaataactgtttgctgaactgaattgaactcgtttgtgtttattcctaactctcatgggtgggtagacatggtgcccag

SEQ ID NO: 347033 - DNA, 1000 bp, Homo Sapiens
actattgagcacaattattattttaacagtatcttcatgacatttaatattgagcacatcccagcactttcggagtccaaggtgggaggatcacttgaagccaggagttcgagaccagcctgcactgtggtgttttatttcagggaacccagtaacatcagcagtggcaccagcagctctagaaacatattctgtccccataaattgttgttatcatggtgaacaccagcaagtgatgcacttaggtggctttacaggcagcagtaggctttacagtgggctgaaaaatcccactaaacagggctgagtaggagggagcatccttggcctgaggcttcattgtctccagtcaggcgactatctcatagtcacactccactcacggcagccacattctgtattccagaacagcacttcctgacagcactataacattttcaacacatttgatccagggagtctccagtttgtcctttgtccagtagaagacccactacaaagccttgataattcatcaaagtgacagcaccttcactgggcagtctggtgagaggacatctagccctgccaccctggttcccgggcgtagtgccccaattcgccacctcttggagtcctaggcggaggatactactggggcagttgtttcgccaattccacatctcccggagcctggcctggcccagcccagccccgtcgctgtgacccacttcctagctgcaggctggaccaaggggaggcacatggggagctccacagggaggccacgcccacgagggcagctcacagaattagaaagccgacggggtgctgtggtcaggaggcgcgtgggcggcaggttagtacttaaggtgcagagaccacccccaaccctttgactggcggtgggcatcccggaaaggcatggctcggccaattccagccccgtttccacgctcagcacccgccctgcctgtgcgcgaacggctccggcccgcacgggtcgccagaggcgactgtg

SEQ ID NO: 347034 - DNA, 1000 bp, Homo Sapiens
agaagtctcgctgtgatgcccaggcttgagtgcagtggtgtgatctcagctcactgcagcctctgcctcccaggttcaagggattctcctgcctcagcctcccaagtagctgggacgacaggcgtgtgcagcacagccggctaattttcgtatttttagtagaggtttcaccatgttggccaggctggtctcaaacacctgacctcaatgatatgccctcctcagcctccctaagtgctgggattacaggcctgagccactgcacctgacctcacctttcaatttcagataaggaactagaaggtgacacgtgaaatctgtaccggacttctaggatgctgttcattacaccacccacctcctctcgggtcctgattacatttttatgtcaaacatttaatttctcagtgccccatcacccagctagtggccatgtgccacccctacatacagaggagggccctgaccctttctagtcctgtgctcagcttccattgagtcttctgaggctgccgagtctttggccctgggtagtggatacatctgtggtggacactaaattccaagcagggctacactcagcctccttttcctgttcccaccacacacaggcagtccatggtctcttaggattgtgcacccacaggaatgcaggcctttgtgtttatatccccctcaacagttcacaagggccagctgaggtccagcaggacttcaggagtgggtagacgaaagctctgtctagcaaaccccattctgttcagtccccaagacccgcagcccactgccccctcctcctcctcatcggaagtcctcgtttcctgtcccatttcaccctgcctctcccccctccgacaacactttctgcttggaccagcagcccatgggggtttcagggagcagtctccctgccccactttctgcattttccctctgctctcaggttcccttttcttcctgatgcatgggaccaggacgatcctgagcagctcccctggga

SEQ ID NO: 347035 - DNA, 1000 bp, Homo Sapiens
tttgcagtatttagatgcttttttgttgttgcaggttttcagctccggcatgggcttccctattctgctgtgaaattaatatgacatctagtggcttggtaaagaagatctggactgattttaatggacacatctggatttggggcttcttaggtgtggaggtggagacaggggccagtggttaccattacgtttcaatggttggtttttaagaaatatttgttggaaaacaaaaactgacacacataaagaccttgaattcaatctactccttaatagttaggaaagaaagaagaagggagggaaagaaaatggaaaagaaaataggaaagaagggtaagaaaagagaaaaggggctggatgttgtggctcatgcctgtaatcccagcactttggaaggctgaggtgagaggatcacttgagcccaggagtttgagacaagcctgggcaacacaggaagatgaccccatccctaaaaacagttttaaaaattagctggcatggtggtgtgcatctgtagtcccagctactcgggaggctcaggtgggaggatcacctgagcccgggagttcaaggctgtagtgagccgtgatcacgccactggactccagcctgggtgacaagaaatgagaggaagagaagacagaaggcaggaggagaaggagagctgggatgatgtgggcaaagggcgttcagggaagaggaagcaaagctaagggcctagaaatatgaaataacctgacagatccagaaacaggaattggtgggaaatatggcttataaagtggtctgggcctgcgcgagagctctcatggcgtggggtggaatccacattctgtacaatgggcacggggcagcccttcgagggcatcaccatcaagggagtgccctggatcctccgtgctcatgtccactccttgcctctcccctcctctgcagtgcaaggaaactcagccctgttgccggtcttctccaggtgctgaatcagctgcctttcgct

SEQ ID NO: 347036 - DNA, 1000 bp, Homo Sapiens
aataactaaaacagtgtaattggattgtttgtaacacaaaggatacatgcttgaggggacaaataccctattctccatgatgtgattattacattgtatgcttgtatcaaaacatctcatgaaccccataaatgtatacacctagtatgaacttacacaaattaaaaattaaaaaacaaagcagaaccaaaaacacaaaagcgcatccaacagtctagacgtagagaaccttcgcatacatagaaatactccttagagagctgcagttcctggtgtggtactacaaaggtcctggaagtcctcctgccttacttcgagtccgccacaggccggagctacttctagaacagttctgactgccttcccaggggagggggcgactgcaggtcaccctgcctcagtgcacgctgcgcatctgagttgcaggccgggcggcagtcacccgagtcagcggtcccgattcttcgtgggtgttacctggagtttccattgcacgggtgctggaggccaacccgccctagtcccaccagctgggtcctgccacaagaaaaggacccagagggcctagacagatatcccctgaacttttttctgacccgcagaaacagtgagcatcacctgcaggggttccgccagcctctggctttgcttcctgcccggcagcctccagcaagttttcccgaatgctctccaggagtgcagtgggcgccggcggacttatttagggtcgctgctgccaagcgtcagagagcgaaccggaggcccggggctgggggctgtggtgagaggcgcccctttctttcttgccatcgcccctacccccagctccttcctagcctattctgccaaagctgggatcttctcctggaacccgggagcaagaagagctggcagtgccgactcccagaacccggctttccttcagaaaagatggataggccgagtttgtgtgcgtggacgtgcatgtgtcggtgtgcatgtttaggggacagtatgtacc

SEQ ID NO: 347037 - DNA, 1000 bp, Homo Sapiens
gagttttaatttttttattattagactcgtaagccattaaatattaagactttgtcaacgtggccctgtgcactgataaatgaacaatgcccaccaaggtgtgttcttttactacagggaagctggaagagttctggagactggacccagacaagcgagctggttggatggagcccttagtcttcatttataggcaagaggctacactagtttgcacaaccctaaattgaggcatgctttgggaaatcttcatatctgctgatgggtgtttaaggcacaagtgctgtagatggtacctgaccataggctgaggtgctctctgagttcacagtgggcgggggtggttttgggatgaaactgttccgcctcagatcatcaggcattagttagattctcataaggagcatgcaacctagatacctcacatggccagttcacaatggggtttacgctcctacgagaaactaatgccatcactgatctgacaggaggcggagctctggcagcaatgcttgctggctggcctgctgctcacctcctgctgtgcggcccagttcctaagaggaactggtactgatccctaacctggggattgaggaccactgcaacagaggactcaggacaaatgggaggtctgcaggctggactcctcacccagccagtctttttatcagagacatggtccaaagtcatggaggagaatttttgtgtgtgtcgagcagagactttccttacagcaaccacttccctcacaccaaaagaccattttggggatcatggaggccattttttaaagttaaaaatgaacatgagtgaaggaagcattgtcctgggacactctccggcctccgtctcttcccagcagcttcctggtaacaccagagagcacctgagctataaatgtgcaagcacgatgctggcccctcgtgtgcaccaggataagatcctggatctgctccagatgtagcttctgacttgtccctgacctgggccaggcctg

SEQ ID NO: 347038 - DNA, 1000 bp, Homo Sapiens
gacgtatatatttcattttattgaaacattcagaaaatactgggagtgaagcctgacttgcaatacagttctctttgctggcaatgagcatctgaaataatgacacttttttctttagtgcatatgaactgtttgtctccagaacagaaaaccaaaagtttaaaaacaagatactcccgttgacatcaagtcttcagaattattcatctgatgcttcctagtttccaaagtttcgcttttttcgatttgcacaggcagctgttgaacgctgatgctacacaaacggttacaattgtttacttaagcaaaaaatgccaccagactgactccatcctcaaaatgcagtcatctggacggggggaggcatcacacttggggagccttgccaggggccagatcataaccctgaggtgacacagggtaggacgcgcaaaaccaccggcgccagggcgtttccgcagggtttcccaaaactcaaacgcagcggctcacggtttgccacgtcccccaggagaatggtagacacagagaggaaatgtggagagggcacaaaccgcaaggtgaagaaaacgaacaaacaccgagttgatacggatagtccccgttcccctgagggccgaccccgtgactcccgatgagcgtccagttgcgccgggcatcctggcctcccagcgtctttcccggtcccgggcgccctcgcgcggcggctaacgctggtcctcggccgggcgcgcgtatctccttgtcggcgccgctgattcccggctctgcggaggcctctaggcagccgcgcagcttccgtgtttgctgcgcccgcactgcggtgagtgctgctccttccgggctcgggcggcgtggggcgggtggggacgcgagggcccgcgggggcccacttccctgatgtggcggcgaacgaggaaggacggggcctgaggcccttcggccaagggtcgagggtcgccgggggctctctgctttctactctcgccaaggttttatt

SEQ ID NO: 347039 - DNA, 1000 bp, Homo Sapiens
atttctggagcccaaactgctcagctgtatccccctgccctcatttcctacttcttctcccctcgcacactctgctcaggcctctttatttttccttgaccaaggcaggcctcaaggcctttgcccttgctgtatctctgcctgccatgctcttccccgaagagcctcggggctcgctgcctggcttcttccaggtctttgcttaaactgttcttagtgagacctttcctgcccaccccctcattcccaccactctctgcccctttcctgtcttcatttttctctatagctcttactgccatttaagagattacatattttactttttttatgtttgctgactgtctccccaactaagatgctggctcctagatggcaggagattttctgttttgttccctgctcaccccccagcatcacaacagtgtctggcatttaaaaggcacttagtaggccaggtacagtgactcacgcccataatcccaacactttggaaggccaaggcaggcggatcacgatgtcaagcaatcaagaccatcctgaccaacatggtgaaaccccgtctcctgtaaaaatacaaaaattagctgggtgtggtggggtgtgtctgtagtcccagctgctcaggaggctgaggcaggagaatcacttgaacctggggggtggaggttgcagcgagccaagatcgcgccactgcattccagcctggcaacagggtgagactcagtctcaaaaaaaaaggtacttagtaaatttgtgctgactgcctgaatgtactcattgtttgcctattgtctcccaggcccaccacactctctgcacactgctcagtcacacttggctcctttgccagctgacttcttcacaagctctctcaataagagatgctgggagagtagtgttgatcttctattcctctcactctttctctcgttccttcttctccaggtgatgtctctcaagcagctgtgctatttccatcatctcagctctagctgca

SEQ ID NO: 347040 - DNA, 1000 bp, Homo Sapiens
acctttctatagcgctttaatttttgaaccacacaaatgtattgcttatttgaaaaataatacaaaaacactgtatacaccagctactgggaagaaaacacatctacaggctacgaacagcctgcaggcttctgggttgcaccttcacattaagggctccaaaactggagaggcagaaaagttggcagcattggatccaagctttactaggtgtggagacaagtaggttgttcagtatctggtgtctggaactctctctggattgcctggcaatgagctagttgggcccagcagcctccgccacctccagggggaaagtgatgcactcccagcctctctggaagagactgctccaaaactcaacttcccgggaaactgaggagctccagggtcaccaggtgctgggcagacagaatttcctgccattcctcgatagttaaggctgcctggaaccccagtggtgtgttccccccatcaaggctctgtcccacttgtcccatacaaaggagagcgataggtgagtgcagttcctcctctggagcacagcatccaatgtgtccagctgggccccagctcagcacacctctctagtgaatgctgagaacagaggacatgctcccctgctgacactgctgccagtcactttcaggcagcaccatggaacaccattcatattcaccccggccctttgtatgtccctagtcttgtcactgtgaatgagctcacttagtgtggcagcttgaactgtgatctccacattgaagtcctaacccctagtacctcagaatgtgaccttctttggaaacggggttgctgaagatgtaatgagttaagatgaggtcatactggagtagggcggttcctaatatggctggtgtccttataaaaatgggaaaatttggaaacacacacacacagggagaatgccatgtgatgataaaggcagggattggagtgacgcagctgcaagccaaggaagaccacagtcggccggcaaatc

SEQ ID NO: 347041 - DNA, 1000 bp, Homo Sapiens
tttattacatccattaacagaattttcatgacagaaaggtacaaattcaaatcattcttttaaatggatgcttatttcgataatcctaacacgtacatccacctaaaaagtgatagcccacgtatgtacacaacatatgtgtctgtggaattcctcaatgctggctcagtaaaaatacaaatgcagcaatctgtgggcatctttccgcgtgcttaggttcggtggggacgtgctctgctcccgtgcctctgggaaaatcaggacggatgggctctgcaacggtgtctcctcccattcagatatccaggcttttgcttcacttactgtcaaggattttctctcttttctttctctccttacaaaacttacccccagaactcttgctagagtagcaaggagtgaggaattggacatgggctttgcattgcaatggctcaccctttgctgtctgtgtgaacttgagcaactcatgtcacctcagcttcttaacttacaaaaagatcctttcagaattaaataatatatatgaaatacttaatatgatgcctggccatcaacagatgctaactgttttactcttctctttcctctcctgttattgatcttcatttgcccttctatacccttacagtgctcaaatccagcaaattttatacaattgctagttaatagatgtttgagtgatttaatggattggctgccagttctgtgttttcatagcttttggatgcttggttatcgtaaatgtttgagctgaagttccaggtacccgtgcaggtcaatgagccatataattggtcctaggatcttggtagatgatcacaccgcatacaacatgacatcctctgtcagaagatgacaggcagtcaggtgtggctctttctctggagtcattggttcatagttccaatgaggtatctattatgcaggactttaactcatccatttgtatttgcctggtccctaccagacagcaagagattttgctggaccaggttat

SEQ ID NO: 347042 - DNA, 1000 bp, Homo Sapiens; identical to SEQ ID NO: 161534

SEQ ID NO: 347043 - DNA, 1000 bp, Homo Sapiens
ctagggcgggcagggtcgaggggcctggcctccagggggcgcgcccttgctgactccctcctgcagggccttatcagtgcccgcagggctgggcggtgcaatagcgaccacggctttcatcatcgccccagggagggagcccagccctgcccgaccctgactatctgcgatcatgctgacccgacccgccacggccccaggcccccgatttgggttctggccccagccctcagctttgcctttgctacagccggtgcccgtatagcccagcctcgctccggccgcccgtcctgtcccccaattcttctcgcctgccagatttctcggaggcccaaactggtttccttcctcgcttagtcgcttcttgcccacatccccgccagagtccagttttttgttttggcgctcgctgagaccccaagacttctcactttttgtgtttattttcccttggaaaggcaaagggattccaacaaataaccttcccatcaccgtgcccagatttgagagtgccgctgccacgaacacagcgaggtcgtcgtcgccactgggaggccggccagccacggctcttcccactcggcaggtcactgggaccaccagcccgtgaaagcagccaggaggaagcctgtaccctgcaaagccacaggagtggagctgcccaagatcatgggaacccatctcttgcatcagcgtgacctttggaatcgcaatgagcttcccgggctccaatccgcttttctgggctagggaactggggagtcgcgagccaggagcggaccctttaagagtgatttcgagggcgggctcacgggggcgtgccggttcggggcggactgtccggttgctcccgcctccttccgtcggatccgcgctctcccgcggctgcgccggcccggccgcccaggagacaaagcgctgccgccgccgtcgccgccaccgggccagtcccgaaccatggccgggccaccccgcaacctcgcgcctcccgtcccgtcgc

SEQ ID NO: 347044 - DNA, 890 bp, Homo Sapiens
gcccccaccttatgagatgggcggtgaagcgccggcctctcccagcaggggtgcctgggtgctcagagcccacctctcacagccgcggtcccggtccagttgctgtgtttctgtgcgacttccctgtggcggccaagggagggcctggaggctgagcccccgcccgggacttaccaggggcaggcactgggccaggatcccggtccggggaatgcagcggaaggggctgtactccctcagctggatgcagcactggctgtgacactcctgatggctgctgcagaagtcgccgttgggcttgcgccagggcacacactgcaggaagacgctttggggcgtgcacaactcctgcgggctgttgttgcggacgcagcagctgctctggcactctgagtcgtgcgagcatctgtacccattgggctcaccttcctccagggcaggcactgcaggaagatggtcttaggggtgcagagcgtgtgtggggccaggctgttgatggtacagcagttgctctggcactcctcgtgtctcctgcatggctccccgatgcccttatgggacaggttcaacttcttctgtggcccataccctgccatggaccccagcagcagcagcagcagcagcagtagcagcagcgtccaccccgggccggccatcgggtgtgtggacctttttccgtcaggcgccagcagcccctctgtgtagaggtgagacaggccaagctgcagcttctagacgagacgcccgaaagcagagaagtacccagagcagggacccggcagcccggcagtacgctgggcacagtcgcagccccgcctcttccttctccgtcttgttccctccttcggtcccaggagaaagacgctcatctccccacatgagaggctcag

SEQ ID NO: 347045 - DNA, 1000 bp, Homo Sapiens
ttttttttttttttttttttttttttttaatgggaatccaggaaaaatttaatggaaaaagcgccacctaagcttagctttaaaacacagagtatcttcaggtagaaaaggctataggagaatgtgcccaaatggagtttggctggagacaaagaataaagactagaaagaacaattaccctaggccagacatggtgttggacggggcaagatgcttactacttaaagccatagaacactgtttgctggacacaatgagtggaatatagaacaatgcaactattttaacactttacccctcttagtggtttattagttaattttttcctgaaaaaaaaaatgcgtatactactttttctgcacttttctatatcagatcttgatttaaaactttaccactcttggtgatttattattagtttttttaatccgaagaaaacatgtgtatactcctttttctgcatttttctatatcagatcttgattggctcaccaccattacacacacacacatctcttttctcccatcctcccagcgttatagaatcatttgttgtaaaatcagtattcagtatttacataattatgactgactttacatgactactattattcacagttgaggtataccgtgtatacagtgtagtttttaaatttttatttttctcagcgttcaaaattatatgttctgttttcttaattttgaaaaatatgcattcactaatttatccccacactctttggaaaatgaaagctctctaggctgtattcaaatacaccaggtactctatcaattttcattttttaaactattctacctgagctctccatctttagccatttcctgttgacttcatactgttctcccctaccactctccctctttaatatattaccgttttagaaactttatggctaccctgtaagtaataaaaatgtctttccccactcaacaacagacagtacctttcaagtttccactttataaggacataacccc

SEQ ID NO: 347046 - DNA, 678 bp, Homo Sapiens
ttttggacacaaagttatgtttattctgtaagcaaataattcagagtgacagcaagtgagagagaagaattgacttgttttaatttctgataacagtaaatggtaggccaagtttggtggttcatgcctggaatcgttttcatcattacattctgatgtttgttgctagtgtctagaaatacaacagattaccatgtgttgacattttgtgctgtaactttgctgaatttattcactagttttaataattgaataaggaggagcagcgaggacggcgtgggctgtggagccgagcacaatgacagcgccttcctggagcctgggtacgacgtctgcctggaagatcttggcgatctccacagagctgcctggaggggcatagtccccagagtggagctcattctcatgctcagggaccctggcttggacaagagagacaagaagaagaggtaatgggccgggcgggggctgggagggtggggaactgggagaagccctttccctgggggatggggtgggttgcgccctcctgtcaccggcccagctttctcgcccccgcaggtcccgcagcacctgggatgtggaatccctggaggagtcacagggcccaggccgcttcatgagcccccaaaacgaaaaccacacgcagccgtgatttccctatttctcctgatttcc

SEQ ID NO: 347047 - DNA, 1000 bp, Homo Sapiens; identical to SEQ ID NO: 161535

SEQ ID NO: 347048 - DNA, 1000 bp, Homo Sapiens
catttaggatcaccagattttaatacctgccaaaatccacaaatattgccacaacaaaatgtgttattaaatagaataaagttaagtgtttattgggcttaaagatggggctcttcgaccgtttggctacataaatgtgctagagcaacagagcgagcggctcgcaggccaatctgccagtgttggttcgctgggaaagggggcgaaaccgaggacacttttaagctgaccagattggggttggctgccctacctgcggggtggctgtggggagttaccctcagctctgaagatgcctccccttaactgaaaacgtctttggccggtaaagccgcccacgcgggccgcgcctcttccaagtctgcgcaggccgcctttgtccctgcagtgactgccgcgagggcaaggagcgagcgcggagaatgtcaccagagtttattgaagtgtttataagccgagaactctggtttttgcggggaggcggagtgcttatccaacttcactggagcaaaaattctgtgggcctagaatcccaggaggcctctgcgcaccctcgctgggcgagccggagtcccggcctctcccgaggatacgaagccgggggtcaaagcttgcccccgcgccatactcctttgcctcgtcgaactttcagcacggtcccattcagtctggaatttcagctcaagacccgggccaaaagttccctgcggagttggtatattaacatccgcgttcgcttttccaagggggttgaggggctccggacaacttctagcagctcccgggcgccctccagggaccgcccccacccagtttctgcgcagctcgggcccccaccgtcgcctcgcgacctcagatcttggcctcccacggccgcgctcagggaagctattgcaactgatgcgccccgggtgctttcgttttgctttcgctccctcctctccgcagctgggaagactgcgcaagaacaaagtaggggcgaaaagcgcgtgtcctgaca

SEQ ID NO: 347049 - DNA, 611 bp, Homo Sapiens; identical to SEQ ID NO: 161536

SEQ ID NO: 347050 - DNA, 1000 bp, Homo Sapiens
tcaggtaggaggacttgggacagacaggcaaagtgcaggccttgtacatgggatggaaggtgccagaagagagcagccaaattctcccacccacacacatgcatcaccagccatgatcaggtgggacctccaagatcatcctcaaatactgccttctcctagctctgtgttcccctttacttagggcatcttggagtgagatgggcagggaggggtcgagtgagtcccttcatgaacaaaccttatctttgtttcagggacaggactgggtacataatttgcaggacccggtgctaactgaaaatgtggagtctgttcaaaaattgttaagaatttgaaggcagtgacaacatagcactaaaccaagttcaggtcccctctgacagtggggcttttgccactgcacaggtggcacctctatgaagccagccttgtgcaggggtttggtttaatgaacatttacttagcgcccactgctcagctcttctggctctgtaatatggtgtggctctgtgtctgcacccaaatgtcattttgaactgtaatccccacgtgttgggggaggggccttgtgagagggcattacatcatgggagtggttcccacatgctgttctcgtgatactgagtgagttcccacgagatctgatggttttataaggggactttcccctcttctgcacttctctctcctgctgccacgtgaaggatgtgtttgcttccccttccaccatgattgtaagtttcctgaggcctccccagccatgtggaactgtgaattaaacttctttcctggagtgtgaaaatgaactaataaactctgtgacctcagagactccctctcagtgaccctgttctcaaatgtatgaagatgggtgctcaaagatctctctctaaacatggaacagggcctgtctgaagacataagtgattaacttctaatctataactaaggtctgagtcctgaagaccttcctctggaggctgagtagttaatctag

SEQ ID NO: 347051 - DNA, 1000 bp, Homo Sapiens
taattacgtatgatttttaatatattttctcagaaaatcaaattttgggaaatatttaaattcaaagcattctttttgcgattttgcattcttttaacccatttttcattccattctttctcatttaatgtcttgttacataaattttaaacataattaaatgcgtgagtcaaaatgtttaagagtattctctggtatctgaactactttgcaggatcagatataatactgtggagagtaatatcagcacttttataattatgaaaatgcttttatgtcagaagatacttaagctgaagattcatgggttacaaaaaataaacatttcaaactttaaacttattttctggaatgatacttgctctgaaataatattcaaaacacttttccgaaatgcatctagccacacaggagaatgagcatgcaaggaggtagagggtcggtggtgaaaaaattatagatttcaaagttattgtttgaaataacccaaacaagcaaaacattagtatttttatcttgaaattcttggtgaattttatgttctagcccataatatattagtttattttaacacaaaagtttcttccaaaatggacatgtccaaaagatacaccatgctggcgacgggggtggcggcggcggcagcgagttcggttgcgcgtggcgcaccgggtgggagcggagaccaggccgggagcaggcgccaccgccagcgaccatggggaacatgttggccgccagctcgccgcccgcagggccgccacctccgccctcgccgccaggcttcacgctgccgccgctgagaggcggcctgggcgccggcaccactaggagtcgaggttcggaacggacccccggggctgcaaccgccagcgcctcaggggccgctgaggatggggcctgcggctgcctgcccaacccgggcacattccaggagtgccaccggaggtgtaaggagctgtttcccattcagatggagggtgtcaagctcacagtcaac

SEQ ID NO: 347052 - DNA, 1000 bp, Homo Sapiens
tttttttaaagcatttaattcttaccacagtcctttgacatcttattatctccattttacagataaagaaacaggcacagagggtttaagtaacttgcacaaggtcacacaatcacaactagtaaagccagaattaaagtccagtcggtctgcattcaaagcctgtgctcctgccccaaagtgacaattagtgacttaaaggcaagaaaaacagaccctcctctacccaccatcctcatacacagccttccagcccaggatctgaaccatttattcattttctctcatattcattcattcattcaattcttcatcacacatttagtgaagctctgccgtggaatgttcacacagaaggtacaaaaatgaggcaggtgtattttctcccatctaacaggggatgaccacatgaaaagaactggtggcctgtgtgtcccatggtcttacagggcagtggtggagggtggcccggtcatccactttcatcttgaagcatttctgtggaaactgctatcagccaggtggcccatgacctaagttgacccaagccgactgaagggaggatgtattctatgcaccgtatggaattccacagggtgctggtttccccagctgctgctggtggtcatcatgtagtgaagatatttcttttttcagcataggcctcaaagggttccaaatatccacttgcagattctacaaaaagacggtttccaaactgctcaatcaaaagaaagtttcaactcatatgatttcatgtatttggaaataaaaactcatggatagtgactggaagtggatcagtggttacccataaattcattgccaagtgcaatgtccagacgaatatttcctaggttttcttccaggatttttatagtcagaggatgtaatcttatgccaacgggtcttaataatcaaatgactccacagtgagaatcattactctgaaaaattgattttgttataatgatggaaatttaaatatttgaaagtaaaa

SEQ ID NO: 347053 - DNA, 671 bp, Homo Sapiens
ttccccattgcttgtttttgtcaggtttgtcaaaaatctgatggttgtaggtgtgcggtgttatttctgcagcctctgttccattccattggtctagatatctgtttggtactagtaccatgctgtcttggttactgtagccttgcagtatagtttgaagtcaggtagcgtgatgcctccagctgtgttctttttgctttggattgtcttggctgtcaagctccagctccagcggaggatgctccagggacagcgatgtcaggactgagatgcaggggctgccttagagtctggatgcatggggtagcggggtgtgaggcaccgggccggggtgcagggccggaaggaacgtgctggatctgggatgctaccagacggggcgtcccaaagaccgaggcagtcccgtaccttacaactctcagatgagctccacggtgggcttggccaccgtgacccctactgccgaggctgctgcagaggagccgccgccacccacaccgctgtggagcagccgcacatgctagactccgcttcagtaaagcccgggcggtgagtgccgccgcagaggcgagcccgctccagacagtggcggttgcgtgagcgcccctccccccaccgggctttggagcgcgggctcccacgccggcccggagagctgcccgactgagcat

SEQ ID NO: 347054 - DNA, 1000 bp, Homo Sapiens
tctgtatttaccaaggtggtcttttctggggaaggaagtagagtggaaggtgcatcccttggcccctggtttacattattagggtgcttattgtaggaatgcactctaaaaagtgggcgtagaatgaaagcagccgtccagtggtcctcccttttctgtagtttcacttttcttgcttcaagttacagcagtcacctgaaatccagaatttaaggggtagcagtttggggctgttggccaggctattcaccaggcggcccctcctccgtctgctctaccatgccaggtgtaaggtctcccggccatgattgttgcttccaggtaccaaggcggccgctacactccaggcctgagtctgacttccaggtagaaaaagggggtagggacaaagactttcttcaaaaagtggcttggcctttttattctcctggagatgccctttccggggacgtgtgtctaactggccagaactgtgttgtgtgatgaggaagttgagctgttttagctgggtgtgttgatcctcataatagttgtgccctgtggggaagacttctgttgggctggcgagaagagaaggggccgaaacttgctttttgctgaaaggaaggtgagcccaaacccgagccctgcccggcccagacgctagatcccttggggactgggcggtggggccgcaaactctctttcgctcgctcgctcgctcgctcgctctctctccccctcttttcttccttctctctctctctatcttccctctgtcactgtctctctctctctctctctctctctgtcttctctctcccctctctcctgtctctctctctctcttctctctgtcactgtctttctgtctctctcttctctctgtcactgtctctctctctctctctggcactctctcgtcctgccgtcggtaggtccccggtccgggagcgggagagaccggagcgccggggacgaccccggcaagggcgtggcgtatgcagatgagcacggcgcg

SEQ ID NO: 347055 - DNA, 1000 bp, Homo Sapiens
cagacagggtctcactctgtcacccaggctagagtcccgtggtgtaatcataattcactgtggcctcaacctcctaggcccaagccatcctcccacctcagcctcctgagtagctggggctacaggcatgggccaccatgcccggaaaatttatttattttttatttttagtagaaacaaggtctggctatgatgcccaggctgtcttgaactcccggcctcaaacgatcctgtcacctcggcctcccaaagtgctggagtaccgctaatttaaaaggcagtcattgaaacatatttcttgttctcttttgcatcatggagttatgactttaaatcataagtacagtatccttagaaactgcccagttttatcagaaataagttctgaatgtattgtcaattgtgaaaagacaaaagatcacagttcctaatattcagttctaatggcatggttccccaaaatgtaaaagctgtgactgagacaattatttcaagagagcttcagctgtaaataaacacaaaactgaattcctttgccatgcaaacaagaggcacactttcaaccagtaacagctggcttcatatattcatctttggatgaaaagagcagggcagttttttttttttttttttttttgagacggagtctcgctctgtcgcccaggctggagtgcagtggcgggatctcggctcactgcaagctccgcctcccgggttcacgccattctcctgcctcagcctcccaagtagctgggactacaggcgcccgccactacgcccggctaattttttgtatttttagtagagacggggtttcaccgttttagccgggatggtctcgatctcctgacctcgtgatccgcccgcctcggcctcccaaagtgctgggattacaggcgtgagccaccgcggagcagggcagttttaaagttgacttctgagagcatcagattttggatagtgtcctttctcaggtcctgtttccttgtctcctcatccc

SEQ ID NO: 347056 - DNA, 641 bp, Homo Sapiens
tgctacttttatgtaactttatttgtagcttttaaaataatccacttcttcccattaaacaaaaagtgccttgagattggatccaagttttgtttttttcttctaacttccaacatttcatattgagcacaggacttcaggacttcattttcattggtgcttcagaaacatcacttactgttaaagaatccaggctgtttgacctgtatcattttccacagtttggcctttgctgagtgtatactcatggtgcagttcaacagatgcttctctcctctatttcctgcaaattggcagctccaacagtttctgtgggtcaggaatccaagagtggcttacatggacggttctgaagtcatctgaaggcttgactggactggaagattcacttccaaggtggtacactccaaacctggaccgttggtgctggctcttggcaaggccctcagtggctcaccatgtggacctctcctcagggctgcttgaatgccctgctttccggggagcgagtaaaccgcgaaagggctgggaaggcgtgagggtgccgcaaaaagaacttttcctccttcgccccatctgttaccagcttctctcctgaccttaaaggaaatttccgaggctcttaaatcgctccacggcat

SEQ ID NO: 347057 - DNA, 1000 bp, Homo Sapiens
ggagactcggggtagaaatgaggacaggaagaagtacaatccgtctgggattggtttatttttattgctttttaaaatcatgtgactaattggtgttcattgaaaaagagaaaacaaaaataagccaagagaagacagcaaaaataatctgttaacatcttggcaaatatcctttttctctgcatagaaacggagaatacttttgtttcacttataaaatgtttcttaatgtacacagctttataacctgctttttgcttaatgggacaatatactaggacatgttttcaggccaacagataaatatacttcacttgcattgatgctattggctccatggtgttctggtggttggtaatttaccctgtcattctgtctccctttactcagtggcaaaaatgacctgggcacctgcacctgggcctgggctggacatcagtccttggcagatggggaaggttggcgaccagcaaggcacagaataaggacacacggtcccagcagacccttgggatgaccttgaccacttggaccttggagagagagtggagaggagaagaacagagggcaaagccacatggaagggagggtgcaggtggctggtggctggaactcctagaggctgagcagtgggggttgcaggagagaactggctccttctagacaggggaatatcgtggttagggttctggagtcagattcaatctgggctctgtcacctactagctggggaacaaataattgcgccttggatcatcacctataaaactaataatagctactaatcagattgatgtaagtgccaggattaaatgagagagtctacaagctataaaaagtgctatgtggcagctgcctttaaacattcctaacattggctttgttattattgttgctgcatttccaggtaacgcagaagggcttctctcttccctagcccatccctctgcctcatttctctcacattcctgcttctcctctttctcttccttttcaaccc

SEQ ID NO: 347058 - DNA, 1000 bp, Homo Sapiens
agaattgcattgaatttattatgtccccataattctctggggagaattatgtgtttataacattacgttttcctgtccgttctgttaggcttgctaagtaagctgacatgtgatctgcaaatgatggcagatgactgtgtgaggtggccttgggaatgtcatggctcctctccacagcactctccttcacattccagaaaattctctccaccaggcatgcctttggccagccctgggacatgtactgccccttgaggtttccagtactctgccctacctttataaagagcccctttgttaaacactgctgcaagtaacctgctctaaatgtgggtctctttcctgctgggaccctgatagatctaagggtttctcccaggaattcaaggaaggtttaatatcagaatctgatccgtgcaaataccatctgaatagatgacagggcaaaaagtgtcccaatgtctcaagtgatgccatcggtgactttttaaaaatttctgggcaaattagaaattgaaacaaatgaaatatttctaatttgataaaattgttcaccaaaaacccaccagaaaaatacatttatggaaacagttgttgccaggagttcgggaaagaggaaatggttggatcggtggagcacaggggggtttttagggctgtgaaactaacgtgaacgacattgtaatggcagagacacgacactgtgcatctgtcaaaacccacagaacttcacagcaagagtgagccttaatgtatgcaaattttaaagctcagtcaagaggctgggggtctaggacggaaggcgggccgtgtgtggcgagagcctctggctgtatcacagacccagggagcagctgtattacagacgtagggaggggctgggggatggggctgacctgggtaccctcacaaacgacgaagtctgtgaagccaaaagcaaatggacccgcacatgagccctgtaccctggcagacacacgcttctgccgcggggtacagg

SEQ ID NO: 347059 - DNA, 1000 bp, Homo Sapiens
gacaaggtctcactatgttgcccaggctggtcaactcctggactcaaatgattctccaaacttggcctctcaaaatgttgggattacaggtatgagccaccatgcctggcctaaaaatagtattatatttttgtatcatataattttcaattaggtaatatgaatattctgtacaggaaatacgcccttaattacataggaataaacatttgttacactgagaaaaatctaatagagctaaaaataaaaattaatttggaaaggtcattagatactcatacattcttacgtttatacattctttcatatattcatatattcttttaacagtatcaatggtttggagttatgtgtacaaaaccatgacctatatgtaatacaactaataacaagcacttacaattcaaggcatattatatacaaagctttaacttcctatcaaaatattttggtttttttctttctgttttggcagatactatgaacacaacattcaactcacagacactatggagcccttactaagcataaagtactgtgaaaggccagggctaggagagaactgagacagggccagggataggacagaactggggcagggtcatggccagagaaaaaccaggggcagggtcatagccagggacatgagaggaccaaggccagggccagaagcagggcagaaccagggccagggcagggacatggcagggccagggccatggcaggatcagggtcagcagaaggccagggcagggctagggtagcacagggccaaggcaggacagggtcagtgtagagcaagaatgggccagagtatggcagggcagggacagggaggtccagggccagagtcaggtccaggacatggacagggcagggccagaaacatggcaggacaagaaaggggacagggcaagggcaaggccagagaaggaccatggaaaaaacacggccagggagggtccagggtaagggcaaggccagggcagaaccagagcca

SEQ ID NO: 347060 - DNA, 1000 bp, Homo Sapiens
gaaagacaggctgtattccttctaaggcttcctttattaatgtatactgatttttttattcgcctcctccccgccgcccaggtcacagtagccccttctattttttctatatgcactcacggtattttttgtttttccttggattccttctgcctattcacaattacgcactctctcatagacttctgagggagaattcttctttcttattaaggcaagtgaataacatcttagttgcagtgctttctgtagcaggacctgcagccgtagttgtttctctgggagaaattacttgagtatttaatttgcataataggtcttttcccagcaagggaattgggcattcttacatatagaaatagcagtgccttaggtccaaactttctagtttgcattctaaactttgtaggaaagccttttgttgcattattcttgcaactcctatcacaggtatgatcattttggtgctttttgctcataaagtgttaaaactgaatagtttgcccagtatcaaccaggaaatcaattaactttttcctcactgtcagttgtacccagggttcctgtggggaaattttaattgtctctgagtgattaaggactctccttggtccttactctctgtggcatcactctctgtggtcagagcagtgaccctgctccatgatttgactgtgagctttttcctagtcatattcctcctttttctggccccttggtcctttcttttgggacagtcatcctttcagtggcctttctccttacactaggcacactggctgtgttccagaggcttgcctcgatttttctgatgcagaggcttccttgttcatcccacgtttatggttgaaacttctgtttctttgtctctggagcggggaaggggtcattcctagtgaggcttcctgttttggtacccctttcctgagtccaaacaggaagaatgtttgtgaatattccagatgggccatgtgcccttatcaattggagccccaattag

SEQ ID NO: 347061 - DNA, 695 bp, Homo Sapiens
gatgaagccctcattggattctttgactctttctactatgtgagatattcttgatgtctgagggatgaacggcaaacaaagtgtggcctacccatacaatggggacagtagttagccctaagaaggaaggaagttctgacgcacgctacaacacaggtgggccttgagaacgtcacgctaagtcaaagaagccagttggaaaaagacaaatgattgtatgatttcactcacatgtggcacctggagtcgtcaaattcagagacagaaagtagaatggtggctgccaggggctgggggaggcggaaaggggagttagtggacacagagtttcagattgcaagatgaagaaagttctggagatggatggtggtgatggttgcacaacactctgagtgtatttaatgccacagaatcatacacgtagaagtatttcagatggtaaatttcatcttttgtgtatttaccataatttttaaaaactaagaaaattaagatatccttgatgtcagacgccaggagagcggtgtcaggcatctcaccagccgattctcccagaagttttcctccatcgggtaaccacgagccaatgcccgccgcccgacccatggagccctgcttggggactgggggcctcgatgttctccttcaccatctgcggccagatctccctccagcagccttgccaggcagtgcct

SEQ ID NO: 347062 - DNA, 772 bp, Homo Sapiens
aggggtccctctgggccggagccgacggcagtggtggcagcggtaccgctccccagctcactgcgccccttttccagcccggacgtcgccgcgaaagcgaggcagcggcggctgcccagaacaggtggcccagcctggtaaccgctagaagcccttcacaaactgcggcctggcaggcaaccaaccaaaaaacaaacaaagaatcctgaccgagcagcgggcatcaagttcccttcgccggcatctgggccctggacgccgggaaaggcctccgtgttccgcttcctgccgccttccacggtaggcttggcccagcctccatcttcgtctctcaggacggctagcagcagaattcattgtcggaaggaaatataaactgctttggaagatctggtgtagctccttcggagacatctgtctggcgatcagcatcaccaacggtgaagaagtggtagtgaagccagaatctcagggccaggcatccccagttgctgtacaagagcaggctttacaagatgcttcaaggtggggttggcatcccccacatacggtggtgtggtcaggaagaagactataatgtactagtcatggatttttctgggacctagcctcgaagaccaatttctgttcaagaaggttcacaatgaaaactgtacttatattagctgaccagatgatcagtagaattgaacatgtgcatacaaagaattttatacacagagccattaaaccaggtaacctgatccatcaatatgactacacatttgattgg

SEQ ID NO: 347063 - DNA, 800 bp, Homo Sapiens
tttattctacataattctcaaggcaatggaatagatgatcagcttggagagtgatgcttcatgacatcccttttccttcacactggcttctaagaactagcagaaagctggagaaaacattttgcctacgaaggtttgaccaggggcactatttagccagggctgtgatcacagttctgaaaatttatatttactgggcatagggagccgagtctaaaatattaacagttgggcagctttgaaaagaagtagaatagaggcagctttctcatttttttttcctttgtggctggaagaggtgcaggcagccgaagctcattactgtagtggcttcttttcttgctcttttggttgattcctggcctctcatattacttgcgcttttgatccattgatatctccaccaactgcaccaaagcaatggtgggtaagactgctggtgcctgagcggaaatcaaggcagtggcacaaaccatactagcagtcattgtcgtcttcactgccacatgcttgcagtaaaatatcagatggcttttacttaaagatgacctctgctcaactgctgcacggggtgggatcgcggcaccgcactctggtaaacgctttctccgctccatggtactgttaacccagggttgcaggtgccaaagcaggaatgaaagctcccattgtacaacacccatgcaagggatccatgtagaggtttctctttcctggaaataagtgtgattgttggaaaagaggaagaacagactgagccccatcagcagaacaacagagctctcactccttgcttagtt

SEQ ID NO: 347064 - DNA, 1000 bp, Homo Sapiens
tttttagtagagacggggtttcaccatattggccaggctggtcttggactcctgacctcgtgatccacccacctcggcctcccaaagtgctgcgattacaggcgtgagccactgcgcctggcctatatttatatatttaaccattcacggcatgtgtatcttattagtcttggaatgctcatattcttactgtcttcttttgggggtaaatcagcaactcagcagaacattatcacactgagaggctcagtaaatattttgagatcaattagaagccatttggctgatcattgtattctgaaaataatcactcaggcagtaatattacattataaaggctttccgtttatgtttcatcagacagaattggaagactggtctcatccaagttttgttttaattggcaatgctgggtagtcattcaataattactcagattttcccacaaacataaattctggccattttgcagtgattctcacagtgtagtcccactggatcctgctggtggtctgcaaggatgaacttttattacaaaatgtgaatctataattactgcccttgtcttaccaacaattctcatcctcactccagtctccaaggctcagctcagacccactgcttggttaagcctttcctgacctcttcagcttaaaagatgtccccattctactcccaccagtatctgtactccttcggcagatcagggaccgtgtcttcctcctttacatgtttgcccagatttataactgtactatggaggacagtcaagacacactgttgttcctaaatgtacttttatttttttgtatgatcaattatcctatttcactttacaaagtaccattttctctattaatcctaaagtggattacatgtgaccatgtgtttgtggttttcttttttttcccttttcttcttttttgagacagagtcttgctttgttgcccaggctggaggtgcagtggtgctatcacagctcactacagcctctctctcc

SEQ ID NO: 347065 - DNA, 1000 bp, Homo Sapiens
ttgtaactatgtaagtgtgtttattaaaagaacacaaactaaaaaagttaacagaaattaaagttgtgggatgaaaaagttacaggataaaaaaatactgtggaaaagtggcaaaaaaaagttgtggaaaaaaagtaaaaaaaaagttttatgaaaagttattttaaaaagttatgaaaaattagttacaggatttaaaaaaagtcatgggataaaaataaaaataaataaaagcaggcccctgtcagcataagcctggagaagtgggtctggagtcttcacccccaccatgtccctacaacccctccccagtcagccctttaccattagggtagcaagacaagacccttgtctaatggagggagacaaacagaccctttaccaccttgaccaaggctgagtccttacatttctggatgatgatgtttgttatttaagagccagaggttggtggagttggtttgtttggaggaggtctgacggccttcttactctcaccaaagcaacttttccctcaggggggctcccatcttcttactcagagaggcagctgaggcgggacagtggagttaactgtagaccaggccagggcacaggctgctgggggtggccccccttcccccgtgtacatactgtagctgtgtaacattctgtatcgtacctagcggaggttgcagctggcatatgaggaagaggttcttataattattcgcggctgggaaacttatttattgctagcataggagcgaggaaggaggcggggatggggtcatggctccctggtgatgggactcctgtttttggtttgttgttgttttgcttttgattttggaataaatggatttagccatactgctcggcctgttatgttcccgtttccctcactgggtcctgcagtttgtcccactcaacgaggagccccagagtgtttcagcatgtccagctgggctgtggggaatcttccaggcctgttacctgtatgctgcctggtgacacctgg

SEQ ID NO: 347066 - DNA, 852 bp, Homo Sapiens; identical to SEQ ID NO: 161539

SEQ ID NO: 347067 - DNA, 1000 bp, Homo Sapiens
aagtagaaattctctctttattgaaaatattctaatcagccaaaactttaagacttgtgtataaacatttgtgtagctcataacaaatagcaaagaaatttaggaaaggaatcataattcctaaaacctcaccgccgttccctctgggtggcagtttctttaaactaccctctaactctatgagggaaagtattgcctacctggcttgggttggccgctaccagatggatagattttctgtgcctgcctcttcacaatgagatttgtgaactacttgggggcagggactgttctcagacccacttctcatctctgtacctggcccataatgagtactcaatagatgttggtggaatgaaactgctttgtaaatcctacaagttttaggtttgaagctctgatttcttgcttcagagcatagacattttaaattatgacgttctggtgtgaagaacagcatctggccctggccatcaggcacgccactgacaaacctccacgttggaagaaacgcccatggaaggaggccaggccgagctcccacagggaagcaatctcagagtctgggtgttggactagaggggaacccagagatcatccagcactgccccttcaaatcctctaatttaccttgaaagaaaagaatttctgtgattttcagatatactttttttccccgaagatactctggaaaaaataaaaccttgaatataacctggagctttttgtaccctacgactgaaaaatgactcagagaaagaccccggctggagagttccttctttctcacactctttgtggtacacgtatggcttcattgcctcccttacttcagggaatgaaaagagagatgggatctctgtgcatgtgtcatcaggtccttaggggaccagtagattccttcctttagcttctctgcagataaaaccaatccttagagacccgaagcagagctctttggagaaagcagcaggggctccttcctggaagtgccccatgg

SEQ ID NO: 347068 - DNA, 1000 bp, Homo Sapiens
gagggaaatctattcctcagaagagaaaatggttgtctgaggacctacaaagatttttgcccaaggaaattaatgccagtaaactatgaccaagatttaaatatgctttcagccaagttttatgcttaaatcacctaattacatctttctttctttatttgcctggtggagaattatattcattacatgttatggtaaacagaataattagttaatatttacggattaattaaatacaatcattttatctaattcagtaataacggtgctgaattttatttttcacatttctgaacatgatgccaaacacccagatgaaaccaagatgttaattactgcttcaattctacattccaattgcccccgttcatccataacccagtttgtttcacctctcaaacccttcctaggtttgtgttgtctaaacaaatccatccttctcttctttaatatggatccaatttgagtttagtgaagccttcatataaacaagtgcttcagcatagaaggtcttgcaatagaagcctgaagaatgaggttatagataaaagtatcaggaaaaatgaaaacatttccaaaaacatgtggaaaggtccaggagtaggaaacagcttggaagttaaagaaataataaacaggccagcatgcttggaccactaggaccaaagaaaggttagcagctgaaccgcaaaccccacctgacagcccttggattggagcaagcttcatcatgaagatctcaaagctgtatctggtggagatgccgggcattgtggcaccagggcccactgtcccatgacactgtgctggacaactggctccttgtagttttccggctgagggactcacagaagggaaccgtggtttcctggttctctgccagatgtccagtggtcccacgaaggccagagattcaactgcctgccactcttgtgaagatgttgcatacaggacgattcccagaggaactgggaccatcgggcggggcggtggagctggc

SEQ ID NO: 347069 - DNA, 466 bp, Homo Sapiens
tcagaaatgccaggaatctgctgagctctctgtactctgggcgaaatttcagtcctgttgttaacgtggtaccttgtctccctcctctgtctgagccaattcctcaaagagttttctctcactctcttggctccctagacacagccagaagaaaggtctccaatttctccagtggagtggcccagcactttctcctcatctcctcgctggatgacaaacccacacagttctggaagccagaagtccaaaatcaatgtgcgatggcagggttggttccttctgagagctacgagacagaatctgttccatgcatcttgcctggtttctggtggtttgctggccacctttggcattccttggcttaatgaagcatctctgccttcaccttcacatagagttctccccgcatgcatctctgggactaggcatgttcaaaatgacagcttcatgctcccttctctttgcc

SEQ ID NO: 347070 - DNA, 858 bp, Homo Sapiens
tcacgctgccagctcgatgctccgcccgtaaaaggcactcacaagatggctgccggcccgcgtggacgcacgggcggtgggcgcagggggcggggcaagagagggcgtggtaagaaggcggggccagtgggagccgtcaggtgcagccccgccctccgccctccgcccgctccccccgctcgccccgctcgattccggattggtccggttccagcgccgcagcccggcggccgcgctgtggggccgcccggcgctcgccacttccggcgcgttggggctgttggtcgggggcggccgcgcggtactagcgggcggctccagggcgggcgcgcgcaaggatgctctagggggcggcggcagtggccgtgtgggttgaggctgcgaggacagcgcgggcccccgggcctctcccctgagccggccgcctgggccgcgcggtcgaggcctgtcagcctccgcccgttcagcctcggggccggggccgccgccacctctgcccgcggaggccggggagcccctgcctgggcccgcagcctcccccgcgggggtcgggcccgggcgggggtcccgagcagctgccctcctcgccggcatccgagcctcatttcctgctttttcagtttccttggggaggggcgggtgggtctggatgaattgtctcggggtcccccgatgaggcgacccgggcggccctgccctttttagagggtcccctcggggcccggtggggaaggggttgtctttgcatgggtgggggacttcccgagtctgccgggaccatgacctgaactgtgcgagcgggacgtgtccgaagcccaagaaccagctcatctgagccgccccctccccggccagcat

SEQ ID NO: 347071 - DNA, 1000 bp, Homo Sapiens
tgacatgactgcaacattcaagcgacattttatttttctagtaattcaactgttatgtattttacaaaagtatcaggccatggggaattggatattagcaacaaaaacaactaccaagttgcccttcatgctaggttatttgagaagcaaggttctctatcatcaatgaagacgttcaagtttacctgaggaaacaagggttccctttggaagttagatcattttggctcaattcaagctttgtttacagatccttaactcagcggatggtgtgatcaagaaaaggtaggaaaagttaaaactaatatgtatttaaataacaatcacaaagaaacaaagataacccagtcttgaaatgcagatatgtgggaaaaaaatcatattttacaaagattctgctttgaaataagttttggccaacaaatctgtcatgttcctttcctggactagtattttgaccacatttccatatagagggtgactcttttaaaatgctggaatcaggtggtcctactaacttgcctatgaaaagctggatgcagttattttttggaggaggttattgttagtcttttggcatctacaaatctctatggagtcagaccctcgttataacagggctctctatgtgtaagcctccacacacatttcaaagagagacgtttgttccctctggcatgaggaacaattacccaattatctatgcagaatgataggtgtttatgacaaatcgtaggctggagacattttagaaataataataactttgaatttttagtacactttccagtttttataaagcacatgtacctctgttaattctcaggatgctcagagccggccagccaaggggacagggctgggctttgtgcctccattttaaggcaggcatctgttatctagaattcagcacgtcccctgtcgctgcgtgtccatccaaatgctgcacaaggcccaaggagatttccagggaacagagagagaacctccccttgcagcc

SEQ ID NO: 347072 - DNA, 1000 bp, Homo Sapiens
atcgtggaatgtgatgatatttataaggaaaaatcacataaactttaaaaatgaaagttgttttgcttaaacgactgaaaaaaagaattcagaataatatttgggttatcctagttttgtacgcttgtgttcaccaaagcgttcagggtccaggaggattaaagagctccatcacaaggagtgtttttgtgtgtgtgcatgcgtgtgcgtgtctgtgtgcgcgtgtgtgcgtgtctgggtgcatgtgtgtgcgtgtatgtgcgcgcgcgtgtgtctgggtgcgtgtgtgtgcgcacgtgtgtgtctgtgtgtgcgtgtgtgtgcgcgtgtgtgtgagtgtgtgtgtctctacccagctctcctacaccttagccccaaggatgatggggagaaaaatgtgggagctgactaggtggaaccaaatctttactccagaaatttatagctaatataaaactcttaaaaatgaaaaaaaaacagttttcttacctttttaaaaagtcttctctttggggggttatgtcaggggatagaggaatgggcttgagccagttttcaaaattgctataggccaggcgtggtggctcctgcctgtaatcccagcactttgagaggccgaggcgggaggatcgcttgagctcaggagtttgagaccagcctgggaaacatagcaatgccctgtctctacaaaaaatttaaaaattagccgggcgtggtggtgtgcgcctgtgttcccagctgctcgggaggctgaggcaggagggtcgcttgagcccagaaggtccagactgcattgagtggagatcgcactactgcactccagcctgaatgacagagtgagaccgtctcaaaacaaaaacaaaaacaaaaaccaaccaaaaaaccaaaaccaactccctccccgcccccgaaacaacaacaacaacaacaaaacccccaaaaaccaaattgctatagaccaatatttccaggtccctgtgattttgattagagagttttg

SEQ ID NO: 347073 - DNA, 1000 bp, Homo Sapiens
cgcaagaatatattcttattttaatcgccagacacgggaagtggacccacatacagaattttaccgcgttttggtgttttcttctagcactggatatctgcgagctgcgtgttaaatgaccagatccagtttttatttgacgtttcctgagcttactcagaaccactcactactccaagttatttttctgtcccctaagaacttccagctaaaagtgaaccctacaactgcctcctcttatcaattatttactgtagtgcgagttccagcatcgccatcaggccctggagtacattcctgggcagaacaggcaactccaaacagggcaattacctgttccacatcaacaactgtgtgacccgggccctccccggtcagggtgcaagctcgctacccttcaaagcccacactcgctccacttgctcacagttcttcagggatgatgtatttctccaatagcaagacaacccctaccatctcatcagtgaaaaacatcagtcctctatcaaggcaatctctccaatttgctcacacagtgtggatggaatgtcatctactttctgcatcctaggggggaaaaagaaaacggccaccttccttaaggactagatcacagaaatcgcacaaacgtgctggggagggggcaccccgaggtcctcgttcatcggggcccctcgggggacgggctggggtcgtcgccgaggtctgcggtccccgagagcgccccttgcgtgtgcaagtcctgggctatggggctccggtccacagccacggaggaggcacaaaaacgatgcctgtcgctcccgcctggctggcaggagcgacccccttgggagacttcgggccccagaggagcccgggcgcggttctaggcctttccagtctccccgccgtggctccgggtccttcccgcggggcgaggcccgggacagaggtcgggagcgcgaggcccccgggccgggctgcggcagccgcggctcaacggacgccgggcgcggtg

SEQ ID NO: 347074 - DNA, 1000 bp, Homo Sapiens
atgtgatagagaatggaagtaagtggcttcttttgataaaatggtcagggaaggccttgctgattagttaacatgtaatctgagatatgtgtgaatgaacagtgatctggaacaggtgcattctaggcagaagaacagcaaatacaaagggtggatgggaaccagctttgaatgttcaaggaacagaaagaaggccagtgtggctggagtgagagagaagcaattatatagacatggaagcagaacggaagagaggagttaaaagcaagcaggggccagtccacagaaggtcttctaagccacagtaaggaatttgagattattctaaggtcaacaggaaaacattgaagggtttccaacaggggaacgacatgatgccatttacatttaaaaaatatccttttggcttctgtgtgtagaatgtgggacagtggttctcaactaagtgtgattttgtcccccagaggatatatggcaacctctagagacattttagtttggttgaaaagttgttgggagggggtgggtggcacattaggtgctactggcacctagcgggtagagtccggggatgccacctgacatcctacagtgcacaggtcaacaccctcccctctgccaacgatgaagaatcactggtcccaaaatgtcaatagtgccaaggctgagaaacactgacagttctagcagcttggaaagctagagcatggtctactgggacagcgcaccactttaaggaacagtcatggaagagggttacctgtctccagggcgacggcagcggccataacaggcaaagacagcgaatcgccacctgcctaacagaggaaaagcccggaggggcgggaggagttccggaaaccacggctccctcttgcggtcccggggcaccgaggaatatggggacggtggctccgctcatccccggccaggcccgcttagcccgcgctggctccggaatggcgagggggcggtgccgggctgtgggagcgcctgaggg

SEQ ID NO: 347075 - DNA, 532 bp, Homo Sapiens
taactcacagctcggtgtaattagaagaatgccaggaggactggcctgcacgctggaaggggctctagacaaggctgaccatcaggatccactggttggtccagagatctcggaacagactggttctccccgccgcttctgcctcccactcacctccacccgttcatgcaactgtagttttcttagcccctgaaaccgggttggggctgccgcaggggccatcaggctgtgagggaggctgacgcggacacagtaggtaagaggccaagatgtacagtcccaggccgaggtgtccgaggcccaggctgaaatccggttgctgctgcagagaccaagtttccaaggccttgtcaagtgggctgtgccagacgatccccaggcctgtcattggctgctcttcggctcggacacaccaaacctcaccaagcacttccatttcagctgggagactccgggaacctccaaccctgctgagcctccacttcgacatccgtgaaacagccatgaataagcaggtctcaaaggtcgactc

SEQ ID NO: 347076 - DNA, 1000 bp, Homo Sapiens; identical to SEQ ID NO: 161541

SEQ ID NO: 347077 - DNA, 1000 bp, Homo Sapiens
gcatcatttttattacaccaaattaaagttgggagttccaagatcccattccagttaatatttaaccaaggtctaaaatttgattttttttaaatctttgaatcctcccttctgcccctcatggatccttggttttaatgatatggaaacatctaattcttagaattattccgtagcttttgctgattactctgagatttcagttaagacttgtttcaaaagacagatagctgactggttcataatacattggaatagttggatccaaactaataagaataagctgtacaggaactagtgctcaatatacattgtataaatttgtggaaatctcttggatgtgaattgttacttcaagtggcttttattaagattttctcagacttacttggaggttaaagcaaacccaaatgtgtattattttgttacagagctctgctttataattttgtaataaagtttcaatacagacacctgtcctgtctggtgcgaggatgttagaggttgataggactgacaaaagagcctgacagtggttcatgctataatttccacactttaggaggccaaggtgggaagactgcttgagtttgggaggctgaggcgggcagatcacgaggtcaggagatcgagaccaccctggctaacacggtgaaaccccgtctctactaaaaatacaaaaaattagccaggcgtggtggcgggtgcctgtagtcccagctactcgggaggctgaggcaggagaatggtgtgaacccgggaggcggagcttgcagtgagccaagattgcgccactgcagtccggcctgggcgaaagagcgagactctgtctcaaaaaacaaaacaaaaaaaaacacaaacaaaaaacccaaaaaaaccaaaaaattagccgtgcatggtggtgcatgtgggtagtcccaactacttggaaggctgaggtgggaggatcacttgagccaggagattgaagctgcagtgagctctgatcgccaccgcactc

SEQ ID NO: 347078 - DNA, 1000 bp, Homo Sapiens
ttttaatgtagcaattatatatttcgtcaattagaggtttgctctctaaaagcagatacttttcattttaaagtacataggataattctcaagaagtatttgctgcagtactggtggttatggctaaaaatagagcaatagtgaaaataaaaataagtgcctactctaaaaccaggaagatgcacagtgaaaactttgaaaaattattttgccatgaaataattttctaagcgttttccttgggatattgattttattgtatcgattgtattatattgtatggtattagattagattagattggattggatttatagcacccaggctacctccttgagaaacagcaacttacctagcaaatccacctttttcgcctttaagaatacgttttcattgaattcctatttgtccaaagatactaagtatgcccggtggacctaagagacaaacccaaattagggaaagtaagctcagatggaaagagacctttgggatttcattttattatgttttatatatgttttaataccttttcacagatttaaatccccagggtgaatactcccttctttgttagtacctggcgtgtgttcagtagtcaaagtaattaaaattagcacctatataatgagcttgtcatttttaatgttctttaccaaccagaatcctaatgaagtctaaaaggtttaggctgggcacgttggctcacgcctgtaatcccagcccaagaagttcctttggccaagacgcacacacacacaccactgtccggttttctatttccttccagtgtaacgacaaccacaagctatcagcacttcactatttgctgtcccctcagcgggatcgggatgcagctacgcagcgggcccctggcgagccgcggtgtcagggcccttttctcctcttcccaccgtgggaagcgaattcagtggcgtcaagggccaagagccagacctgagtttgtctctcaccccccgatgctcgtctcccttttctc

SEQ ID NO: 347079 - DNA, 855 bp, Homo Sapiens; identical to SEQ ID NO: 161542

SEQ ID NO: 347080 - DNA, 1000 bp, Homo Sapiens
gagacggagtctcgctctgtcgcccaggctggagtgcagtggcacgatcggctgtctgcaagctccgcctcccgggttcaggccattcttctgcctcagcctcccgagcagctgggaccacaggcacacgccaccacacccagctaattttttgtatttttagtagagacagggtttcgccgtgctagccaggatggtctcgatctcctgacctcgtgatccgcccacctctgcctcccaaagtgctgggattacaggcttgagccaccatgcctggcccatctgagaagtttttaaatctccttgcccaggctgcaacctagaccaatcaaaccagaagctctgcgagtaagacaccgccaggcatcactatagtttaaaactccctggatgattccagtgtgaagcctaagtggagaaccactgggctacgtagctgaaaagaacaggggagagtccttttgttccttactactcaagagggcgtccagggaccagcaccatcagcatcgcctgggagcttgtgagacgtgccgaatgtcaggccccccaccctagacctgctgaatgtgaatctgccttttgacagaatccccagggactggggtgcatatctagtttgaggaatatagctgttccacaggcacccgaacttggctcatgagcagaataacatgcaaagttttaaaaattactagacttcaggccaggcacagtggctcacatctgtaatcctggcattctgggaggccaaggcaggcggatcacttgagcccaggagttcaagaccatcctgagcaatatggcgaaatctggtctgggcatgatggcatacaactgtgatcacagctactcggaaggcagagacaggaggatttcttgagcccaggaagtcgaggctgcagtgagctgagatcatgccactgtactccaacctctttcttgtcctttcctggttcaaagcacccaccgagtcagccagaaacctctgattccacca

SEQ ID NO: 347081 - DNA, 1000 bp, Homo Sapiens
atttatttttgagatggagtcttgctctgtcacccaggctggagtgcagtggcacaatctcggctcactgcaacctccgcctcctgggttcaagcaattctcctgcctcagcctcctgactagctgggattacgggcatgtgccaccacggccagctaatttttttcaccatattggccaggctggtcttgaactcctgaccttgtgatctgcccgccttggcctcccaaagtactggattaccggcatgagccactgcgccagtaagtggctgatgggagcattttaccgcctggatgttgtaccttgactgaaaagggaaccccaaccaagccctgaagctggggcgggtgcaatttgagtttggggagggtgggagcaggtgctggtggggctgggggagttgggggggctgggggagtcgggggatctgggagagtcggtggggctgggggattccgggggcgctgggggagtcaggcactcactccacatctctaagcatcagtttctccatctgtcaaatgggcgagtgagccccgcctcagataccgcagagagtgccaagccaggcaacttctggggggcttaacgagcgttcgtcttagtccatctgccccgtgggcagagcccactccacagggagggagccaggctggcctcgtggcaggaggctggaagcagcacttgcaggtgtgtgcatgagcaggccagtgtgtgctgacgcacgtgtgtgttcacatgagcacatgcataaatatctcaggtgaaattaacatcgggaagagtccaccagaaatgaaataatgcacatggactggctcagtatttttttttttttcagatggagttttgttcttgttgcccaggctggagtgcaatggtgtggtctcggctcaccgcagcctctgcctccctggttcaagtgattctcctgcctcggccacccaagtagctgggattacaggtgcccgcaataacatccagctaattttttgta

SEQ ID NO: 347082 - DNA, 1000 bp, Homo Sapiens
ttgctcccagccgggcacagtggctcacactctgtctctcctggagagagggagattccctttccgggtctgctaagtaacgggtgccttcccaggcactggggccaccgctagaccaaggcctgctaagtaaccagggccttcccaggcactggcattaccgctaggccaaggagccctccagcggcccttctctgggcgtgaatgagggctcacactctcgtcttctggtcacctctcactgtggcccttcagctcctaactctgtgtggcctggtttcccccaaggtaatcataatagaacagagatcattatggtaatagaacaaagagtgatgctacaaactaatgattaataatagtcagatataatcctatccgtttcctatctctagtaaaacttttcttattctaattattttcttcgctgtactggaacagcttgtgccttcaggctcttgcctgggcacctgggtggcttgcggcccacaagataagatacattgcgttgaactataatttatgttgattgctgaatgatttagggcgggggggtgggcaccccctgaaattctgccctggaggagtggcctcaccctaaccctggccgtggctaataataaggcccacctcttagggccgtggagtgaaataagttttccaggtaatgcgcagtagagccctcagccctccgctgaagttgcgttaggaaggaggaagggagaggtaaatgctgagcccgcaggcggcagtctgtgcctcggagagaaactttatcccaaccttgctgggggccttgacgcccaccttgccccaagagcaccccggcagccacccctgccctctggggtcctgccaccccgagcccgaccttcccccttttcccccgcgccgggccaatagcctcctaactgcgtcgtgctcatcacctttgcgtcgtttcttcgctccacaaacgtttactgagcgccttccacacgccaggcgccagactcgcgcg

SEQ ID NO: 347083 - DNA, 1000 bp, Homo Sapiens
gacataaatgttacgtcttttattttataaatgaagaaaatgagactcagaaaggtttaagtgagttacttaagaacacacagacagcaagaggtagaactggaaaccgaacacaggtgtccacatgggacaacaaaaaagttcacgttccatcttcttttgagtctctcatttcaataattaccattgtgtggatatgagctgaagtacaggaaacctggggctgaactctcctcccatcaggcctaggagccccagaccagaaccccagcccaaggtctcccagtcaggcccgctggcgtgagctggcatctacactagcatggtctcccaaagctgcagggatgccagtctcgccgctgatgaagaaaatgaagggcatttgcttctcatgcaggctgtcgggatttaacacagattccttttcttgctctcttctcccatagcacaaaactgggtggtccatccccctcccagtgtcccaaggctttgttgcgtgttctctttaatttctcccactcttgcggtgtaccctaccctcatctccctggcaacctttctgctgtatcctctcgacacctggatcacaagaacacttgtgagaccccttaacaagttacatcccaaattatcattcccctttgtcctcagccagtgctcaggtccaacttgctctcctggggtgactttctttcctgcccaatatggtttcatcatctgtaaattggggataattaaagtcttgatcctgatatttgactctcaaagcagaagtagcaagctcagccaagtcacttcaacaagaggagaagttccttgtgaaccaaaagggcactggtcacaagggccgctccttcttctgtcaggcctctccagcacgcccttggctcagccaaagaagagactcaggctgtgcttctgcactgttgggataacataggcctcttccatgtggttccacaccaggaacatggggacaatcagacctctcccagtgtgg

SEQ ID NO: 347084 - DNA, 1000 bp, Homo Sapiens
ccggacccagcggctaaccccgcagccggcgtgcccggcgcggcgagcgcgatgcagccgccccgctcggcagcggcgagcaagctgaaccgagtcctcgcgccgcaggcgccgccggcgcccggcttggccgcgccgccctcctcgccaccgccccactccgcgtcctgcggcggcagccggccgtccagcgagatgttggtgaggaaggagagggcagcctggcggcgccgcgggtccatgcgcggcttccgggggggttcgggcggcggctgggccggcgcggcggccgcgggctgaggctggggctgcggcgggatttccgcgatgcccggagaagcgagcggcgcccgagcgctaagcggcgggcgcgagcggcggcgacccgggctgggtagggcgcggggatcgggcggcgtgcgcggcggtccagcccccccgcgggcgggccatgctcgcccctcggtgctggggatgggggcgccgccgccccggcccacgcgcacgcctcgctacctagctcggctagttcggctcgctggctggccgcccgccggtcgcctggccgctggctcgcgggctccggggccgggtgtccgtatttataggtgcgcgcgccccgcgctcgcgctccaaagccctctttgcaataacacggaatcacgtgtggggaatgcgacctgggaggaaaacaaagccgcaggcggcggccgcagaggcagacggcgggaggcaaggggccacgggaggaggaagaggaggacgcgagagccgagcgggtggtggggcgggggatcggcccggctgtccgggttgtcggagctgcctgctgggagagttggcgactcccggggccgcggaagccaggtgcgggaggcgagcacgtttcccccgcgcgctcgcactgggaattgggtgagcgagcagaacccggtgggttaggtcctggggctgtgctcctgggagagttgtgggtcctgtcgtttatctcataagcacg

SEQ ID NO: 347085 - DNA, 1000 bp, Homo Sapiens
ctacatccattgggccttctgcagcaggcccggtgcaaacggaatgtgctctctctggggactgacttcatgcaatgaggccgatcccttgagaaaatggacaaaccctgtgttgggcagaagtggcatgcctttggcttggttttcatcttccattgcagccttttgtggccgcatcaagagaacaagctggcgaaacaccctctttactggccattttcctttaaccacattcctggacatttttaccctagaagtctgcccacctctttgctgctggctcaccttggtttggggattttcttgcagcctttcccataagctcagcgggccactctctatgaccagcagcgatgttttttcagtgattccgcaagagtcaaaaacccaacaaagcgcatcgccggcgctgtaaagggagcatgctgccggtgtctgtgaccactgtatgcaaagcttggcattagtcacagccgggccggctgtgacaggccttttctccccattcgggccacaagatgatccagacacacattttcctcctgagcttgtctccttcctgttctttgattcattttcatctcttttctctgagttataagaaagcatcttccagttcatggatctgtgaagtgggtgccagatgtacagtgggagcccccattcaagagaggatggcttctcaccacagaaggttgtcagctctcttcccaggaaaggtgtctctggtccttgtgatgtgaacgatgacagcctcttgccttctgttccatcattattgcctccacgctctagcaacaactctctggcttgcacaacgctaagaagagacttaaagctgatggttaaatcttcttgtgtctgctcatcaccaaaaggacacctcttgtgtccagtgtcttcctgggctggttccctctgaattactccttggcttctgagtggttttccatcaggacgaaccttttcctctcccttatgcaccagcaaacatatatca

SEQ ID NO: 347086 - DNA, 670 bp, Homo Sapiens
ggtctgcaggtggcctccaggtgcaaagtgggaagtgtgagtcctcagtcttgggctattcggccacgtgcctgccggacatgggacgctggagggtcagcagcgtggagtcctggccttttgcgtccacgggtgggaaattggccattgccacggcgggaactgggactcaggctgccccccggccgtttctcatccgtccaccggactcgtgggcgctcgcactggcgctgatgtagtttcctgacctctgacccgtattgtctccagattaaaggtacgacatttggaggccccagcgagaaacgtcaccgggagaaacgtcaccgggcgagagccgggcccgctgtgtgctcccccggaaggacagccagcttgtaggggggagtgccacctgaaaaaaaaatttccaggtccccaaagggtgaccgtcttccggaggacagcggatcgactaccatgtgggtgcccacaaaaattccacctctgagtcctcaactgctgaccccggggtagttccagagagaaggactccctcctgcttggaagagacctcacaccgtcatcacgatgccaacggctctgaaggtggatggcattcctgcgtggattcatcactcccgcatcaaaaaggccaacggagcccaactagaaacatgggtccccaggg

SEQ ID NO: 347087 - DNA, 1000 bp, Homo Sapiens
gactttaaaatcatacatttatccctcacagttctggaggcttggaagtccaagttcaaggtggcagctggacgggttcccggtgagggctctcttcctggtttgcagacagccaccttctcttcgcatcctcactctggtaaggggaccacacgctgcagccagcgagacagtggcatgttcttgttacaactcgatctaactcccccagaagaggaggcagggaaggcggacaaaactgggagagggagagagtgttaggaagagagtagggtggccagaggcagcaaataaaatataaaatgcttaattctgaatctcagataaacaaccaataatgttttttagcataagtatgtcccaaactaagcttgggacatatttatgctacgaaattattcgttgtttatctaaaattcaaactagctgggcatcctgtcttttaatctggcaaccctaaaaggcaagggccaaaaatgccggaggcaagccaacggattccaggagggacaactgctggactttggactgatgatgctctttttatatatttaactttttaaaaaagcctcttttctttctttttaccagcttttcactagctttttaaaaattgtggtaaaacatacataacctaaaattcaccgtctaaaccatttttcagcatacagttcagtgggattaagtagattcacactgttgtgccgccatcactaccactcatttccagcacccttccatcaccccagcctgaaactctacccattgaacacgagctgcccaactccgccttgcttccccattcctggcgaccactgcttctgtctctgtgaattttgactattctaggcacttcacaaaactggactcatacgatatctgtagttttgcgtctggcttctctattgaattcttaaaggggggtgggaactaagcagatcacaagggagctgcccacagaggtaaagacaaggtcaggtaggctgagagacgcaggaaa

SEQ ID NO: 347088 - DNA, 747 bp, Homo Sapiens
tcagcatgacacagcggtgctggtgatggtgatggtggaggtttcaaagttgaacctgatgaaaacgctccacttcttcggagccatctgctgctgtggtgacggagttttgctgtggcgcacaggtttccacttgtcataggaaactgtgcttggtgcatcccctgtgcagccggctgtgaactgtgggctccaaccctgcttggtttgcttcaactttctgagtgacgtgcagaccttcacagaggagccgtggggtggctccatccaacgcctccctcgctgcccctggggtggagctggggcaggtcccacatttctcagaaggactccaggatgcagctgcgtctggggcctgagcggagggaagatatcaggctggggccggctgctgggcctgtcctctctgagttgcctcaaatcccctgttcctcgccgcttcaatttcctccaggtccacaggcccagcccggcgcgcgccgctcgttctgcgacctccagggcgagcgcgcttccggggcggccgtgcaagaggcgtgggaagcgcgcggggggttctgagcgtgcagtcgccgcggtgtacgcccacggtccgggccgggcgttctgcgggtgcccccgctgcgccgcaggcctcagtggcgcgcccggggactggaaggctgagccgccctcctcccatgtgcgcgggagtccctccgccactgtgcccagatcgccggcgaagcgcagggggagggttcgcat

SEQ ID NO: 347089 - DNA, 1000 bp, Homo Sapiens
cccagttaatttttgtatttttcgtagagatggggtttcaccatgttactcaggatggtctcaaactcctgatctcagatgatccgcacgcctccacctcccaaagtgctgggattacaggcgtgagccaccatgcctggcctaggtgacttttcatggtgagataacacacaggcatggtgagcagcatggcagaggacctgtgtgcagggccctgtctcccgccggggaatccttcatctgggaaatctccgctgcgggacagggatgctgtgtcgtcaggacgcagcgtctctccagggcacccgggcctcctctgagcctctttgcgctctttggctgcgtgctttcttccccaaacagtgcagacatggaggagacagaaaagtgaaaatggtttctgagcccctccagccgccctctgggcacaccagcctggagttcttcagacacaagcactccctgcagccagcaggaagaagaggcgccagtgtcctgggggcagagggaccaccctgaatcacaaagcgtggcgcctcggggcctggctcccttcacgtggcctgatgtctgcatattcatccgccgtgcagtgtgtgtccacggttcattttgtgttgccacgtagcatctcattgtgtggccctagcccagtgtgttaatccgttcacctgctggtgggtgttgcagtggtttccagctcttggttatcaccgagaaagtgactgtgaactttcgcacacacgttttgctgaggacaactccttccatttcacttggttactaggagtggagttgctgggtcctagggaaggtgtgtgtttctctctaaaagaatttgccaaaccgatgtccaaagctgtaccatttcaggctcctgccagcaatcatgttgtgattgtcatttcagggtccacgcctgacaattccactgtggctgcccttctgggcctgttgctactgacccacattcccatggttactcttccctgcatctgga

SEQ ID NO: 347090 - DNA, 1000 bp, Homo Sapiens
tagtgaaagaagagatttattgcaaagcaaaaagtacacactcaagaaaggggagcttgggcatacccaagagagaataatgggttctggggtttcatcttgatgggtttctttaaccaagaattggaatattcacgaaaattcctgggtaaaggtggagatttcttggaactgtggtgccatttttacatcaaacactggtctcagaactgtcatggcactggcgggtgtgtgatttagtatgttaatgagcatataatgagggcctaggtaaaacctccatccaatccagcaccacgttgggtccactcagccttagccagcttggtccacaccctggtttttcagcgtcttaacagcccacagcctcaagtcatgtaaatctgctgcctagaatttgttatcctgtgaccaccctgtagtattcctgtctgaaatctacttgtaaatattcaaatggtctttcacttgggcattccaactttgcttacttcacagtgtttcctgcgtaatatataagaaaagatgatccagacatttgttaaacatctcaaataagatgtagcccaggtatttgtgtcaaatttggattattttggtttcgtctttgcagaatataaaaaactaacatgaggtaagcactaaggtgtggagatggctgtgcaagagatgacaaagtccagcaccacgcttgagagtgtccaatcatctcttctgggacagcatatttttctacaatacggatttttgaaaaaaaaaacaacatcaaaaaaaaaaaaacctacaagattcatgaaactggacaactgtctttataacattaccagtgataaaaccagtaaggacggctggtttgcagtcatctaagcagcctctttactttcataaatatggtttctctctgatattaaacggcttccaattgcaagcggaatgctgcatcacaaggataaggatgtgaagagaaccggtttcttttgtaatccgaaacattctagtc

SEQ ID NO: 347091 - DNA, 1000 bp, Homo Sapiens
ccacaggggcgtgtctcgatggttagataaggtgtaaaaaggaccagtactttgcttgctgactacaaatgggggctccaaatggggttactgccattctatcatttttatctgtcctgggtaagggctttgttgatccctccttccttcccaagcctggcctttgtcccctctcttcacttaatgtgttaaatgtggggttcatgatatcagcctgacaaccccagattctttccttcaggaattctctggacgtgtatcaaatatatctcttggagacacccccatttccaggagtccccagttgataatgcaaatttggcctctatagttacttccacacacgtggaaactgtgagtaaagcctgggaagtggccagcatttcttggagctgctgctgaggctgagtggggagaaggtggaatgcgccatggagggggtgctccgaccccagagggagaaggctgagcaaagacagatccactgagccaaaatgagagggcgtggttttagagcagtcacagggatctgagaggatgggggagggcttgggatactctagtctcagaatcaccccagtcacttccctgtgaactgggctgctctccatcagacaatcagagacctctccacccacccctgccaacagcccctctcccatcctcgttctcattcctcttcctagaaacccaggcgagtcaatgactggggtggttccctctccccagctccaggctgtagatgaagatccacctgtggcctgcagcctaacctccctcattctgtgggtgaggaggccaagaatggcttagggtgaaaatgacttaacagaaagccaacaccagtcctgggctcccaggggtgctgtactcccttgcacactgcagagagcacccagtggcctgggagacacagtagcaaatggaagaagctacttccctcatttctgtttgccagcataatttcacaagcctctgactctgtgaccatgtgcggctc

SEQ ID NO: 347092 - DNA, 672 bp, Homo Sapiens
ggctctgcaataccccaagctctggagggctgggggcctactaggtcaggtcggctgtaggattctgctccagggttggcggctgcttctttctggcctggctgccactgagtagccgaggggccgccgtgaccctctgactgattgactggctggctgcctacgtcggcgctcctcagggccccaagctcctcaggccgaacttcgggcaagtggcgggtcggcagagacagagcagccccggcagggtttgacagagcaagggggacggaatgatagaggagcagggcaggggtgcaggctttggggggggcgcgctatcccgcggccagtctgggcagcgagtggggggaaccctgtcgttcctcgctcccccgcgggccggccactcccgcccagttcgcgtgttggcgcctcgactgggtgcgcagcgcggggctgcgacttcaggtgcaagtagtggcgcttggcagctggccacacggtaactgtgcatcttggtatctgcccacggccacagggttggattgctcaagagttgtgctgagacccagaaggctagaggctagtttcgaagctgtagctcaggctgagtctcaaggcgggcggcgactggacggccagaccggcgagctcttgacgggtttgtggcctgattgtttggatttggtg

SEQ ID NO: 347093 - DNA, 1000 bp, Homo Sapiens
gctcttgttgcccaggctggagggcagcggtgcgatctcagctcgtgcaacctcagcatccctggttcaagtgattctcctgcctcagcctcccgagtagctggaattacaggtgcgcaccacaacacccagctaattttttgtatttttagtagagacggggtttcatgttggtcagggtggtctcaaactcctgacctcaggtgatccacccaccttggcctcccaaagtggtgggaatacaggcatgagccactgcgctcaggccccaagcccccattctttctgtaacctcaagatggcatataagcttctgcaccccattgcagagtggggagtaatcaatcactctgtggttctccctgtgtgcgcattaataaatttgcatgccatttctgctattcatctgccttttgtcagttgacttttcagtgaaccttcagagggcaaaggggaagttttcccttggcttccataccttccacacccttcttccacccagccagacagaagtcttttctctttcctgtgtctctcccagctcttccctgtatcacagcacccgtcactctgccctgttattatttaatgacgtctgtgccagataatttgtacaacctgccttgtttaagccccccaagaatccctggaggtagatgatgatgaggatgaggatgatgatgatgatgatgatagcaacaaagactctgcaggaaaaaagcctgctctaagaattctacatgtgctgccagaccccttcatcctcaccacagccctgtgaggggtagctttcattattatcaagtccatcttagagacaaggacactgatgcccagagaggtgaactcattcaccctaggtcacactggaaaggggtggagccaggatctaacccaggcagtgctccagttacccactgagcttcagcccttttatacatgaagaccctgaggcccagggaaatcatttgtcctaactcaccattcccataagtggcag

SEQ ID NO: 347094 - DNA, 1000 bp, Homo Sapiens
ttttgactttgtcaccgatagaaatcatggatatttttgtaacacattacagttgttttagacatctcaaaatagcatatatattcaccactacttcaaaataacaatagctattagatatgaagttatattatgctatataatagcaaccaaacttattatatcacaaaatttgaaaaatatttttgataaggatttcaaaggacatgacttcccttattatcccatgtgttttactttctgcattagaaactttattctgagaagggctcaccaagttgctgagggatccattacactaaaaaggcaaagaacctctgctctaagaatcacagcagggccggaatagtgtttggagaatttcagacatgtggggtgagcattacttaatctggaaagccccagaagtcacatgtccccgcagataggcagccttcagagcagacctgactggcagctagaggtctgcttcaatggcttcttcattctcccttcattaaaaagtaggtttgataaggcccatgctaaggaataaaaccaagattccaagtagggaagattgctcttgtcagcccagcaagaaaatcagcgacccaactgaaagaatatcaaagattattccttttatcagcccctgtagcccctgtcaatttccccgcagtaatccacagaaaaacacttaaaaggaaaatcacctgtgtgcctgtctttaggggcagaaaggaaggagccagtagggacaccagctgcctttgcagccggaggggtgaggagagtcctggggaatgagagtgggtggtgatagctttaaaaagaagatcctggctgggagcggtggctcatgcctgtaatcccagcattctgggaggctgaggcgggtggatcacctgaggtcaggagatcgagactagcctggccaacatggtgaaaccccatctctactaaaagtaaaaaaattagccaaatgtggtggcacacctgtaatcccagctcctgggag

SEQ ID NO: 347095 - DNA, 1000 bp, Homo Sapiens
gcattcactcatgcatttattcacccagtagatacttactgggcccttactatgtgcagaggctctgccagagatggggacacatcagcagataagacaaactggcagttaacattttagcaggagaagcagacagcacaccattacatacactattgtaatcaaacagtgtgataagggtgcagcaggggagatttgggtgtgtcagaggctgagtaacaggggaaggcccagccgagggcagccagggcagtctttgctgagggaggagtgggtgccgtctggggagaaagcgtgtaccagagccgggagctgggatgggctggatgagttctaggagcccaaggcagtgctccggaagtgggtgggtacagtgtgtgtttcccagccatgtgtgagacacggccccacgaggaacagaggggatttgcgtttgggtggcagtttcaatccaaagtgtagattttgttgaagaccccctttcctactaaaggcagaaagccctgggtggcggctgacagggagtaggagcctagggagacagctgggcacactcaagggtggctggggcacagcctggcagtcccaggacctgtggggtgggttacttcctctggggttggggtgggggctgcagcgctcaggagaaaggatgctgccgctgacttcagagaaagcccagcggaggaggagccagagggggctggagacctcatctgaagcgtggggtaggggtggggcggaggagggtgggctggatctcagtggtgtctgccccagggtggggctgggcaccgcttttctgagcctcgctgaaacagcgcgctgcgccttggtttcaggaatgaccaggggagcatgctcacgctgagggccattgatctgtcgtactacacaggctccctgcactggatacccatgactgcaagaatactggcagttcactgtggacaggtgggtgagcggccacactgtgtgggcctcagccagaggctgatcc

SEQ ID NO: 347096 - DNA, 1000 bp, Homo Sapiens
ctaccccattatatcacagtgcacacaacacgagatgaagtctattttttttacattaattagttctacacaaatagattccctagcaaatttgtttcagaccaattgacaactatctgtgaacataactaaacttaaacatttgtcttattttatacctgtactttaagtaaggttttaagttgaaatgtcattatttccttatctgaaggattaaaggaaacagggacccagtggcttggtggtttgggaagaacacttggtgatggcggctcactaaatttggcaccagcatagttctgtttagcttgagatttaaaaagtaagctgggacctgataagctagaattccaactttgattatttggaaaatttttgttcttccccccatttttcatggcctgccaggcacctgctgatgagttataaccatgtcctctttcttttttcttatgaacaatcttcatctgggaattctgttccttggtcttctgtctgttaagctgttgttggttcttactaacatttctagattgaggggctggaatgttatacctctctctaccacccatcttcagcttctttgtcacctttcagtctgcttttcagattgcaggatctccactacctgtcctcttccttgctgccaagcccaagataacaagtgttgctttctgacagatcccttcctttgtctcaatacagaagttttcatgggccgatctgctgagttcagcctaggagctgaggccaacatctgagtctcctcagcactcaagtttgagagaagtcctagtgacttcaagctcggaactaacgcggcagcggctccctctcgacgttgaagcctccctccctttccagggagagacgaggcacggaccgacaaagcccacgaacaccgatgagcgagctgccggccaccccagcttctacaatccgaccttctccttctgcctagctgcctcactttcctgaagcagagagtctctaaagcagc

SEQ ID NO: 347097 - DNA, 685 bp, Homo Sapiens
taacattgcttttcatagagcagttttgaaacattcttttcgtagagcctccaagtggacatttggagtgctttcaggcctgtggtggaaaaggaaatatcttcacataaaaactagagagaagcattgtcagaaacttcttggtgatgattgcattcaactcacggagctgaggattccttttgatgcagcagtttggaaacactctttcggtggaatctgcaagcggatatgcggacctctttgaacatttcgatggaaatggaataatcttcccgtaaaagctaaacggaaccatgctcaggaacttccttgtgacgtttgtattcaactcacagagctgtactttccttttgatagagctactttgaaaccccctctttctagcatctgcaaggggacatttggagggcttcgaggcctggggaggaaaaggaaatatcttctcatcaaacctacatggaagcattctcagaagctgctttgtgatgattgcattcaagtcaccgagttgaacattccctttgatggagccgtttggaaacacacttttggtagaatagagctgaacattcctttggatggagcagtttccaaacacactttgtgtagaatctgcaagtggagatttggaccgctctgaggatttcgttggatacgggagagaagtcacagagctgagcat

SEQ ID NO: 347098 - DNA, 864 bp, Homo Sapiens
aacattgcttttcatggagcagttttgaaacattcttttcgtagagcctccaagtggacatttggagcgctttcaggcctgtggtggataaggaaatatcttcacataaaaactagagagaagcattgtcagaaacttcttggtgatgattgcattcaactcacggagctgaggattccttttgatgcagcagtttggaaacactctttcgttggaatctgcaagcggatatgaggacctctttgaacattccgatggaaaagggataatcttcccgtaaaagctaaacggaagcatgctcaggaacttctttgtgatgtttgcattcaactcgcagagttgtactttccttttgatagagcagctttgaaaccctctctttctagcatctgcaaggggacatttggagggcttcgaggcctggggtggaaaaggaaatatcttctcatcaaagctacatggaagcattctcagaagctgctttgtgatgattgctttcaagtcaccgagctgaacattccctttgatggagccgtttggaaacacacttttggtagaatggagctgaacattcctttggatggagcagtttccaaacacactttgtgtagaatctgcaagtggagattcggaccgctctgaggatttcgttggatacgggagagaactcacattactgaagaggaacattctcagaacttctttgtgatgttgacattcaactgacagaggtgaaccttcccttgtgagttcaggttgaaacgctcttttcgtagcatctgcaagtggagatttggaacgctttgaggcaaagttgaacattccttttgatagagcagttttgaaactctctttttctagcat

SEQ ID NO: 347099 - DNA, 830 bp, Homo Sapiens
taagtggcggagcgagggctactgcacagctagcagagtcgtggcgaggaggacagcacctgcatcgagctctccgcctccccaacccgccagcccaggcggccccagcagcagcgaccagaggagcccctgcagcaacgcaaaggccaggtggacacctccatctacagcctcgtggcggacgggacctgttaggacacggccattgtgggcaacaaggacccaccttccatctgtgccaccgtcccagggaaaaccttcctcaacatcacgccagctgaggttggtgtcctggttggcaaagactggtcaagctttgtcatgaatgggctgacactggggggccagaaatatactgtggtcctggactcactgctgcaggatggggaattgaccacggatctttgtatgaagagcatcggtggagcccccaccttcaacgtcattgtcaccatgactgccaagacgctaggcctgctgatgggcaaagaaggtatccatggcaatttcatcaacaagtaatgttatgaaatggcctcccaccttcagcgttcccagtactgacctcctttgttccttccactccaccgctccccacagctttgcccgcctttccttcacatacacacaccattttaatttcaggagtcattaccccacacaccttattgctgccaaaaccacatgggctgggggccagggatagatggacagacaccttcccccacccatacccctcctgtgtgtggctggaaaacttttttgttttgatggattttttatgaataaaaaagattctactaaaaaaaatcaaaaaaaaaaaaaaaaaa

SEQ ID NO: 347100 - DNA, 394 bp, Homo Sapiens
atttgacctgcttcttggagaagatgcatattaaacctattaaatccatgtcagcctttaacacctttgctcagattagtttctcgagctgttttcccacctggtgagcagataagagcaggacaggaaagttctgatgaaaggaagaagtgccagagagagaaggccttgcaagcaaagaagcctgacaggcaggagcccctgagtatcctaaggagaagtaccagcgatttagggaagaaaattgctgccagaagtgcaggaaatacttgggggtccttttataatcacatttcattaaccaggcaagattaatcagtgaccagataggacagtcactgactcttaagactttacaatttgaaacagtgtgtacaaatgtatagagagacat

SEQ ID NO: 347101 - DNA, 1000 bp, Homo Sapiens
gtggctagaatttttatttttcctggggttttttgctcagatgcttccccatcccaattgaggagccatatctgagtaagactgaggccagtgtcagtctttggcaatagagtgcagcaaaccaggcttggatgtggctcagccacttttgctcttccgatgataccttcccaccaccccggcctttacgctgggcctgggtgacctgaggcagcaactggatcatagtgccaggcactgagtaggtatggttcctaatttttaaaaactattttcctcccaattctacaagaaaagctcatctcagaaaaagattagctcactcactgtcaggtataaataaatgacaacagtttaacgcgttatttgcactaggagcatttccactttaaaagcagagacagtggaatggagttagaccatggaggaggcgcactgtatctatgtctaaagccagttgtggttgtgagatggaataatgaggggtgtgtgtatgtgtgcatgcgcacagagaagtgcctggtatgagcacctcctccctgtgccacacaaacagcacctcatcaacatggtcagcattccagagatgcacttcttcgatttgggtgtcattgtgaaattctcctgttttcctctgcagggatctacgtgcaggagatggctgacatgagcatggccaagctgtactcagggctgctgggggtgggcgatgagatcctcgaggtgaacggggccaaggtggcagggctgggcttggctcacattaaggagctcctggcccactcagagagcttgtcaatccgtgtcctgaggcagagacctgtcccacggtgacccagaagtgccgctgccctcactgtcacggcctcggaagccctgaagcactcagggtggttggcaggaacgtgctgcacagagctgctctgtggcggaaacagatcctggcagcatctaaccccttgggctgtggcagggcttctgtggtgggctgcctttggga

SEQ ID NO: 347102 - DNA, 1000 bp, Homo Sapiens
gctttcattgttattattgacgatttttaaaaattttaagttccgggatacatgtgcaggatatgcaggtttgttacataggtaaacatgtgccatgctggtttgctgcacctatcaacccttccttcacctaggtattaagcccggcatgcattagctatttttcctgatgctctctccaccccgcactcccccaactggccccaatatgtgttgttcccctccctgtgtccatgtgttctcactgttcagctcccatttataagtgagaacatgcggtgtttggttttctgttcctttgccagtttgctgaggataatgcctccagctccatccctgtccctgcaaaggatatgatcctgttcctttttatggctgcatggtattccatggtgtatatataccacattttctttatccagtctatcattgatgggcatttgggttgattccaagtctgctattgtgaatagtgcggcattgaacatatgcatgcatgtatctttataatagaattatttatattcctttgggtatattcccagtaatgggattgtggatcaaatggtatttctggttctaaatctttgaggaatcgctatactgtcttccacaatggttgaactaatttacattcccaccaacagcgtaaaaacgttgctatttcttcgcaacctcgccagcatctgttgtttcttgactttttgataatcgccattctgactggcatgagatggtatctcattgtggttttaatttgcatttctctaatgatcagtaatgttgagctcttttttcatgtatttgttggctgcatgtatgtcttcttttgagaagtgtctattcacattctttgcccactttttaatggggttgtttgtggggggtttcgtaaatttgcttaagttccttgtagattctggatattagacctttgtcagatggatagattgaaaacattttctcccattctataggttgtctgttcactctgatgata

SEQ ID NO: 347103 - DNA, 1000 bp, Homo Sapiens
tagaaagcaattttgaatctttaattaatatgtatagtaagcaattatacacattatacaaacatatgtgagagcatcatagtaacagttttgcatgtgcaagaattccaaaggttttgttttcatatactttagccaaacaagttaattgaaggtgaattataacaaataaggaagaaaattgcaaacaaaaaatatagaagagaaactctaatccatgagttcaaggaaaataagtaacaggaaaagatatgcattgcagcaggcatatagaaaacattcattctgaaatgaataaaaagcaacaattagagtgctttgacaaacagggaggttctatgcactagatgataagcatatggtaaaagtggattaaccttaggtcgaggagaaaactattagaactcatgaagggaaaaataataaactatgaaataaaatataccccaaatataaagcaaaatataatgtggcattagattgaccaattttttttttgagacaggttatcactctgttgttcaaggtgaagtacagtagagcaatcatgactcattatagcttcaacttcctgggctcagttgatttttccacctcaatctcctgagtagctggaactacaagcatgcaccaccatgccgagctaggctaatttttgtaatttttgtagaaacggggtttagtcatgttgcccagactggtcttgaattcctgggctcaagtaatctacctgcctcagcctcccaaagtgctgggattacaggtgtgagccaccaggcccaggtagattggacaattaattatataccagtcaagttatttctgccagtattgatattaacatcactgtcttttaagatacatggaggttttacatggtatacatagagaaggaattataatataaacacacaatctggatatttgtgaagtcagaatactgttgtctgttgcttataatatttttagttacactgttgttggaaaatactgatggttg

SEQ ID NO: 347104 - DNA, 1000 bp, Homo Sapiens
gagacagggtctcactctgttgcccatgctggagtacagtagcacaatctccactcattgcaacatccacttcccgggctcaagcaattctcgtgcttcagcctccctagtaactgggattacaggtgtgcaccaccacactcagctaatttttgtatttttagtagagatggggcttcaccatgttggccagtctgttctcaaactcctgacctcaagtgatccacctgccttggcctcccaaagtgctgggattacaggcatgagtcaccgtgcctggcctcataaatatctttatgagttgtttattgctcacaattctagaggctgggaagtccaagatcaaggtgctggcagattcggtgtctggtgagagcccattctttatgggtggtgctctctatgtgtcctcacgtggcagaagggcaaacagctttcctctagcctcttttataaaggcacttgtcccattcatgagggctctgctttcatgatctcatcatctcccagagtccccacctcttaatactatcacctcgggaattaagtttcaacatatgaattttggggagacaccagtgttcagaccatagcacaagccatgcagcacaatagacagaatgcatgtggaggctaacaccagagaaggtcatttttggggtttactccatctggaccaccctctggcatccccagggtcagtctgtaagttgtaattttcttatctcttttctattcagcctcggtgtctggatgcccagcctaaccaagtcagcttcccatctttggctgagacaaggagaaccctgctgggctaggggacccaggtaatgttgctcaggcattgtccttttttttttttttttttttttttttgagatggagtctcactttgtcgtccagactggaatgcagtggtgcgatctcggctcactgcaacctctgcctctagggttcaagtgattcttgtgcctcaacctcccgagtagctgggattaca

SEQ ID NO: 347105 - DNA, 1000 bp, Homo Sapiens
ctaccctccccagccatccgaccttgggactagggaaacgtggacttggtgggctattctgcgctgaagaggcagcaacgagggctcggtggtattggtgttggtccctctaggaccctccacaagtctgtttggaagctgagctgtctggaagctttctgtaccctccgaccccatactcttggaccttttataaatacttctttgggtaggcatgactgaaacatggacaaccatgtagaaatgtgattggaccaaagaggatgatttaatattaatagactgagcagggaaacctagcgaggcctgtctgttaagattcttcttgatctctctgagcaacattccttcctccagggtttgggaccccttctgaaatggaggtctcataatccacagtcagacaaggtagatcagagaattccttcatggccagctcgaagacagaaaggttggggagatccctccctcatttagccccagatattccctctcatctgagaagactaaaccattattttgattcagaatgtagacttattataaacatgatgctgtgtgtttctataatgtgttaaatcttcaaagtgcctcatagtcacagtgaggacaggaagtgagcatggagacattgggaattcaacagtcttttgtggcagggtctgggaatagcaacgtggtgcatttctgtgcctgtgaatcactcagctgccttactatccaggcagaggtcagacaaaagcagatccaaacttagaaagtttcaactcgcgcattgcaggttttcttaacagcaataacggtgctcgcttagccactttgatttccagagctcagactcctcaatccattctcgcagggatctgggaagttgatagatgtcatgcttctcagtaaaatgggcagacatcatcattggagcccctgccgtcctccttgctccatgagctgagcccactccatagatctcacactcctgccgtatgcatgtctgaggcaa

SEQ ID NO: 347106 - DNA, 709 bp, Homo Sapiens
ctaggggttgaagatgagggctctcctgggaagctcttggctgaggatccgcctggtcccggagccgtgaaaacaacagctgggcctggtgggggtggggaggctgagcggagaggccagctcccttggctgctgggcagggtcttctgtccacagctgcctcaggcggctgtttccaaaggtgtttccagcttcccaggcccaccctgaggccccgcaccgccagggaggtggaaggcacggagcagcgaagcccggccccggccccggccgcccgaccagctcacagaggaacacctgtgggggggcctgtgggcggttcacagaggggtgtaggaacgtgcctgtgggaggccgtagccccggagagcagaggcctggacgtgcctccgcagggtctgcagccagcttccggtcagaccccaggtcctccagcggctgcgccttcagcgtcatctccacggcagcccctgtgtactgggggctgggggctggcgacccgaacagtggtacagcttgcactctggggacccaaagtcccccaccggcccaggcggaatccaggcatttctggtcccagccgaggtctgaggtctgtggagcgcagcagcacctccactgccaagatccccggcaggcggctgtgggggcgccggcggggacacagctctcccttgttcctgccgccagctcctcagcctcagcctgc

SEQ ID NO: 347107 - DNA, 1000 bp, Homo Sapiens
ccaccctggtcagatgatgtttcatagtaaagatacagaatagagaattgagagttggtaaatctgcttctagtttcagatctgccaccatctagccgtgtgaccttggacaagcctcttcagttctctgtattctcctcagctgtaaaatgaaggactaaactattcaaatcagttccataagcattcatcaggcaccttctcggagtaagacatcatgctcagccacctataaaattctatgatcctgaatagtatcaatgggaaaatatcagagcaaagcaaaatagtctgtttgtggcaaggttgaagagagaacccaaatagccgactgcattacctcatctcaatgagcaatgtttgtaaatatccaaagtgtttaattttgagacactcttgagaaatcctttgccaataagaaattggcagatatggttctattaacacctatcagccttgaaccttccaaaaattaaacatttaaagtcactttgcaccttagtcaaatggcgtgcttctggagagaaatctgggaagatcaaagttattaacactcccgatggcaacagtttaagaataggatgtgttaaaaaaaaaaaaaaaaaaaaaagacatatctggttaaaactgcaggggggattccaagagcaaatgcaatgcatctggacaggacatggaggccagtggcctattgtttacaaaaacaggcctggattatgaacagtgacaagaggccaagacctcaataataactcacaaccacacctctctcaatcccagttcaactgaagctatcaatcagtcaactcccccatctctgtaataaacctaccaatatttgcagccaagtggatagaaggccccttagggcacctccagcactgaccaaactaatgacataaaaaagatcctgtaggtacaatgaggacttcagactaccttccaaccttccaagagataagggagctgcccatttcaaactctacgcctacccccaccc

SEQ ID NO: 347108 - DNA, 1000 bp, Homo Sapiens
tccagcctgggtgaccgagtgatactctgtctcaaagaaaaaaaattataattttagcacagtaaccagccatgatgggagataccctgggtaaggcatgtagaaagggttgagggaccttcccagtcccctagccccgcctcccatcctcccatctttttcttttttcttttttttagagaatcacccagcctggagcgaagtggtgcaatcataactcactgtatccttaaactcccgggcttaagcgatcctcctgcctcagccttctgagtaactaggacttcaggtactgcaacctccgcctcccgggttcaagcaattctcctgcctcagcctcccgagtagctgggattacagaggcctgccaccacacccgactaattttcgtatttttagtagagacggggtttctccatgttggccaggctgttcttgaactcctgacctcaagtgctccacctgcgttggcttcccaaagtgctgggatacaggagtgagccactgcgcctggctgatcccagcacttttcaaatgatgccgctcaaagccgtgacttggcctactttgaacagcaaacttgttgctgctgttgtcaacctgaaggcctctcaaatgccagcttcaagcagggtgtgaattggccagtgtcagatctcaggagtcctgtgttgagagtgtggctttcagctgcggggagctgcacttggtggggaaagccaggcaggtcaccctcacagccagataatgtggaggtcagaacccaaggaagggagtgagacctccactcccagtgggggacctggccacccatccttggggacctgagaaagcgtacttcaccttggggtgaaggctgggtggggccagagggaccagtgccctcctcagtgcttaggggcagagccacctgcagcaatggtatctgcatattagcccctctccaccttctttctcccgctgaatcatttccctcaaagcccaagagctgtcactgctt

SEQ ID NO: 347109 - DNA, 1000 bp, Homo Sapiens
ttaatgtcctgtgttggacattaactagcatcatttctccatctcccctggaaacccactactgtctccctactcatggatatatttgggattgtagcaagatggaaaccaagccagcgtgctgcctccctgccgcggacactgccagtcctctttctctggggaaaactccttgctgctgcttcttccttttctcccccacccaccaggaaagacacttccagttcacctgttacatggcttagctgagatgctcagttgacagtcatgatgtggaactgccattctttcctcctcggtcaaacctgttagcctgtaattgggcaaatcatctggcaacacagtgcgctgtagagtgctggttgtttgctttgtaattacatggctgactgggagctgtggtttgctgccactgcccagcatcaggagtgagtatcctaccccatattgctagcctaaaattctgcaatgggccacagcgaggaagggaaatggttccattctgacagctgcagtacctcttcagatcagttacgaaggctgagaattccaaggttgagggggcccatctggtgaaaggcttcttgctgggggagactctgcagcatccagagacagcgcaggacatcacatgccaagggttgtgatgctagctcaggcctctcttcctcttcttataaagccaccagttccactcccattagagcaattagtggataactcactaatccattaactcattaatccattaatccataaatgagttaatccattatggaggcaaagcactcatgatctaatcacctcttaaaggccccacctctcagtattgccacattggaaattaagtttcaacatgagttgtggggggaacattcaaatcatagcaatatttaacttaaccaacctaagcagttttacttgataaacaacactcatgctgttgccttcttatctatgaatctcttagtacttgtgtaagatgtccacacaaaattat

SEQ ID NO: 347110 - DNA, 832 bp, Homo Sapiens
ccactacccacattggagctccggggccaggcttcacttcttcaggcagcaccagatactctgagaccttctcacagtacctggtgaatgaattggagccatctttcgaggcttgctttgcttctctggtgagtcaggactatgtcaatggcactgatcaggaaaacattcaaactgctgttgatcagtatatctaggagtttctggatattgcaacacaggcagaatgttttcctgtagtcccagctatttgggaggttgaggtagcagaatcacttgaaccctggaggtggaggttctcagtgaggtgagatcatgccactgcactccagcctgtaatctcagctacccttgaggctgaggcaggagaatcactggagcctgggaggtggaagttgcagtgaaccaagatggtgccaacacactccagcttgggcaacagagccagacttcatccttgaggccgttcagttgtaataaacttgcacaggggaggtagttgggaagggccaggagaacttcccctaatataggagacgacaggctcaacgctgggcatcagcatccgcacaacaatggtgccattaggcaggctaggaccgcgggcgctcaaggcagacatcaggcccgccgacgtctccgcgccgcccgcccggccacccggagagcctgctgcccagcgcctggcagcgcggacaacctctctcggggaggtgatgacggtccctcgcgccggagggcccagggaggaaagagataagcagaaagacaccagggaagaacaccacgcttcggaccaacgccagccacagccactgagaagtcgccgcat

SEQ ID NO: 347111 - DNA, 1000 bp, Homo Sapiens
ctcattgtgttttattccttttatttttagttgacacataattgtacatgttcatgggttacaaaatgatatttcaatacatgtatacaacgtgtaataatcaaatctgggtaattaggatatccattacctcaagcgtttatcatttctttgtgtcgggaacattcaaaatcctctcttctcattgcgttttgtttgttttttagatggagtctcactcagttgcccaggctggggtgcagtggcgtgatcttggcttgctgcaacctccacctcccaggttcaagtgattctcctgcctcagcctcccaagtagctgggactatacgcacgtaccatcacgcccagctaatttttgtatttttagtagagacggggtttcaccgtgtcggccaggctggtctccaactcttgacctcaggtgatccaccaaagtgttgcgcctcattgcagttttggtttgtatttccttaatggttagtgatgttgagtatcttatcatgtgattattagccattcacagttttctctggagaaatgtttattcaagtcctttgcccatttttaattgagttgtttttattgctgttgagttgtaacagttctttatgtattctggatatgaaccccttatcagatatatgatttgcaaatattttctcccattccatgtttccatgttccatttttttttttttggaggcagagtcttgctttgtcacccaggttggagtgcagaggcacaatttcggctcactgcaacctccgcctcccgggttcaagtgattctcatgtctcagcctcctgaatagctgggattacagatgcacgccaccatgcctggccatttttttttttttaatttttagtagagatggggtttcaccatgttggccaggctggtctcagactcctgacctcaagtaatccacccacctcggcctcccaaagtgctaggattgcaggcatgagccgctgtgcctggccagcccccactatt

SEQ ID NO: 347112 - DNA, 1000 bp, Homo Sapiens
acaggtactcattttcatttttatttattattagtattgttatttttagagatggggcctcaatctatcacccaggctgatgtgcaggggcataatcatagctcactgcagcctcaaactcctgggctcaagcaatcctcccgcctcagcctctagaatagctgggactacaggcacacaccaccacacccggctaatttttttagaattttgtagagacaggggtctcactatgttgcccagggctgatctcaaactcctggtctcaagcaattctctcgcctcggcttcccaaagcgctggggttacaggcatgagtcaccacacatggccagagacaggtactcttattgtccccatttcccagatgaagaaactgagacccagagagatgaagtgacttgcccaaggtcacattgctggaaaggggcagagccaggattcaaatggggccaaacagggatataatccaaggtgagatgggccgatacgataccagggcaggggcttgaaggggagacaatcaagcagggaacagggcttatgccagagccctcagcagccaacaggttaagggcccgggaatctgggtctctggccccagatagggtgacagccacacccaggctcagcctctggcccgcgccgcctgctgggaacacacagtcctcaggactaagaggctcaaaatagaaagtgcaggacctgggtcgaagcctggaatgccccaggcaggcagaccatgactcctggaagggcccaaggctgcagggctggggctggcggggcgagagtcactggtatccacttgttagagcctgcgtctcatctttgttattctcctgatgcagtttccaagacgccaactccaggatgtgaccaacccgggctcctctcctggcctaatctcagaccagctgtgtggccttgggctggtcacctaccccagaggacctcagtgtccttatctgccatcggctcatagagttgttcattcagg

SEQ ID NO: 347113 - DNA, 1000 bp, Homo Sapiens
tgctctgtggggcagaccaggcagtgtgggaggagcctctggctccgggctcaggcaatggtggtggagccccacagccaaacccctggagcattccgagagcatggacgtcttgtggaccgtgtgtccctctgccccagccacactgaccactgggacgactgagtctgctcagcttacgctcctgaaaagcacgaaggtgctggggcaacttacggcagaaggcaggcagctgaaacctggggcaccgggcccttcgctgcttctagcagtagcgtccccccgccaggggaggggggtccatcagagcctcctgctgcttggagaacctgggtgctccacccatcacatgtgccgcccgacaggtgtcacgagtgtcccccagccccctctccacagggcagtttttggaaatgagccatttgcttggccaatcctcaggaacacgcggtccaaacttctgataaccaggcatgaggactcatccttagcagatttgtagcccttttcaaaatggccagagcggctgagatggtgaaaaattgctcagtgtaaaacaaaggtcacctgctgcccatcttcagagaatcttcattcaaatcttagaggttaacatttattttcacagatgtgtacacagccctctgaaaaatctgaggatgactgtgttaatgcagtttggcactgacagttgttaaatattataaaataagtgcgttctgctggcatcttttctcagctgccatgtccttgctgcctgctgggatgaatggcactggaggaggagctgggtgaaggcacggggaggggtgagggcctgcaaggtgtgggcgacaggaaagcccggctgcacaccatcgccctctgcagagccaccgtcgtgctcctaaacatctggccacggcagcctggctcccaaagctcaccaagcgaaggaccgactgtgaagtgaacttcgtacccagagctggcaaatgtggctttcgcctcacagaaattt

SEQ ID NO: 347114 - DNA, 638 bp, Homo Sapiens; identical to SEQ ID NO: 161544

SEQ ID NO: 347115 - DNA, 734 bp, Homo Sapiens
tcctcttgaggaaatgaacactttgtgccctgactcactaattccagggtaacaggaaaaggctcattaaacgtcccgttacacacagctctaataaaaacagcaataataacatcaaaacactcacatagtgcttgccaggcaccagtctctttctctacttatgttaactcatttcctcttcacaacaacccaccccattaagcaggatcagtaacccctttgcacagctgaggaaactgagacatagaggaggtaaactgcccaaggtcacagggacagagagccagagagctgcaatccaatcgagggagtttggctggagtccacgctgcgctgctttccacataggagaggcagagaaaagctgcacctgcaagagcgatggtttcggctgcgtatttggaataacgaagtcagcggtcaggagcaaggagaaggcacacatctcgggcctcatttctgtccccgagcgctcccccacactgcgagatcatggcggtggaggggagtcccgcatcctgacccccggccgccgcgcactggggggccctcaacctctgggttacttgggggcacgcagtagccacccacggggcagaaaagacgggggcggtcaactttctccactccagccgcctggggtcccgccatccctcagccaggacgcttggcagccgcctctaggctaggtggccacgagttgcgtgcgagagcgagggctgcgcatgtgc

SEQ ID NO: 347116 - DNA, 1000 bp, Homo Sapiens
ccagcgtgaattgatttttaatagcaaaatggcattttacacagaagcagctacattcatggatgaaaacaaaaatccaagtgacgctcctttgttgaatccatgtaaaaatctgatttttaatctacagagaaatttctacccacacattcggtatcccctgggggtaatgacatggaaaacaaacatcttttctggtctgttaaagtaaaacaatgggtccctggatagactctcaagagggcctttgatggaatggaaccagtccccccaccccgaaagcatccccccagctcaacatgtcaccatttacaccagcacagccctcacattgggtccacagcacaacctattaagaaaggattataacacctgttcggattgggaggccaattcctcagctctaagatcctgctcatagcaagcttgatgttcagtagactccaaagcagactgaatgagggaggggtcgaagagaatgtgcctgcttgggctcagcctcctctaatattgtcaagatgcacacacactcttagaatctcacaaccatcgccaatctctatgttggcctagtcccaatccttctgcctctgggaacaaaaggttcattacccaccaaggcatatttttccctctctgggaccaggatcagctcttgcaagcttactccacacttgtatctgccccttgcagccatgcatgacaaatgggctccctccccaatggaattatcttatagacttgcagcctatgactgtgtttcccctgatcctgacctaggaccatctgccaggttttgtttttggtaacaactgtgctgtcttcatcaactggcagacctgagtcaggagagtcagggagctctctcagcatatcttcagagcttgctgtcagcacccgggagtgggggcacgagtccagaactggagatgagctcagacacttacactgagaaaaatgcatctaaagtcacagtgttaactcttcacttaactctaag

SEQ ID NO: 347117 - DNA, 886 bp, Homo Sapiens
tttgtagtattagtagagacagggtttctgcatgttggtcagattgttcttgaactcctgacctcaggtgatccacccgcctcggcctccctaagtgctgggattacaggcgttagccaccgcgcccggctgactatggtttttaaaagtaaaatccttcagaccttcctgggggcaaataataaatgccaagatgtggtgacccagaagacaggcctgtccctcggtcaccgcaggatcccttctctggacattgaggctccttggaggagagcaggtgtctggtccgcaggcagatgtctgatgcgagggacccacggtaactccaccctgcagaccgggccacagaggcagcttctccggggccgcttggctctgaggtgagtttatccagccagaagatgaggctgctgtgtcggtggccaaggccttccagtgccggggctggagcgcctgcaggtggtgtaagcagagggggcgtcgtcctcggggagctcacagcctggggagaggcagaggggtcgtggggtagacccagggcccagcaacgctcctggctctccaggtgccctccaggtggcctgcagacctcggccaggccttcagtcacatcctggtggaagactgtggccgaagcctggagccaggccaggcgggtgcctggactgcctccctgggcaccacctgatgggggctggacccgcccagttgcttcctcgtcagaacctgcctttcctgctggggtgaagccaaggctgtcctccctgcccccacggctgccacatgctccttccggctgggcgcgccccaccttggctgatggaagatgacccagtcctggccaaggcccgggcacttcctcacaggccctgcacccgggtcccat

SEQ ID NO: 347118 - DNA, 1000 bp, Homo Sapiens
tttcaatttagaaagtttattttgccaaggttaaggacatgccagtgacacagcctcaggatgatgtcctgaggatatgtgcccaaggtggtcgaggcacagcttgctttgatacatattagggagacacaggacatcaattaatacgtgtaagatgtacactggttctgtctggaaaggcgcaacaactgggggtggtgggcagctcgcaggtcataggtagataagagataaactgttgcattcctttgggtctttgatcagcctttcactgaatacacaatctccatgtgagaggcaggtagaggaacagtcactgatgccttagtctggctcagtgaatctgcattttcacataaacaatagggcagaggaagcaatcagacatgcatttgtctcaggtgagcagaggactgatggtgagttgtccattgtctggcatctgtgaagataagctatcaatttacattgccagggtgaaattcaacagaactattttagggtaaagatctcgaggtccacgaggaatttccaagaagaaaagcaggaactaccaacaggagagccctggggactggtgccaggaggagctgcaagacaggagggaggtcacagggcctggggagtcactgctcatggagcggggcttctctggcttcatgactcacacatccaagcagctctgcctgtggggagcttccgtctgcaggcgcagcaactcagccgtgagaagcgcgccacctttccaccatggcagtttccaccgagacgtctttccacggcatcgcctgtccaccctacccctccctgctctcgacggcagaggactcgctgttccgagtggcagctttagaatcacgcagtaaccgcaggaagtagagagcacagcacagtcatcattttccctcatctttgtggacagaggcagatcctggtatgacccagggagcactggagtggggtccgaaatacagagtccggccgctggctcgctgctgtc

SEQ ID NO: 347119 - DNA, 1000 bp, Homo Sapiens
ttaattttaataatatgttttatttaatctactagatccaaaattactatcattttaacaggtactcaaaattattaatgagatcttttacattcttttagaagtgtttcataacgtctctgcagcagccacattccccatgctcagcagcggctcacagcctggatggcagtgcggtgtagacacttgagctgtgggcaggactcttcccagtcctcatggctgagcacacagtgccgggccaggtggtgcacgctgggggaccatgggccgggctggtcctggctctgcactgtccctgtgaccctcgggatgttcctcagcgtcttttggcgatggttcctttcctgtaggatgcgaggctgacagcatctgctgctaggagttgtgaggacacgtgagttcatttcagttgggtgcagcgccggcctagtaatctcactgacccttggtcgctcagccagtgactgtgcccacctgccaccatcagaagatggcggacttgggggtcaggagagcccttccaggactgcagaagctggtccttgggggtctcgcagcagatcctgggggcgttcccagtatgggtgcaatgtacatggggggctcaggacgggaggcccatgccagcccctgggcctccagagctggcagaaggcacagccctgcatggccaagggcgctgggctgcgtggagaatgtgcgggttctgttgttctgccagcttaagcagtttaccaaaccaaacaaaaaaaaggatatgcaacagggacagcatgtggcccacgaggcctcaaatattgcctctggcccttcacagaacacgtgttctagaaaggaaatcctatgctcgcgggctaggggcttgctgggtggggagaggggttcaaaacgtggtttgtcacttcctatgagggtgatccgacaggacttcgtggagacggtggcgtttaagtggcctaagaagaactggaaggattcagaggagcggagggacgtg

SEQ ID NO: 347120 - DNA, 1000 bp, Homo Sapiens
gatttttaaattatttaatcagtaaaaatgtacacattttgagggaggtgtgaagatcctaggagaaactgtgctcttgtccctgaagacagactcagtagatctttttttttttcttttgagacaaggtctcactctgtcatccaggctggagtgcagtggtgtgatgatggcacactgcagccttgatctccctgggctcaggtgatcttcctgcctcagcctcccaagtagctgggaccacaggcacgcacccaccacgcccagctaatttttatattttttgtagagacagggtttcaccatgttgcccaggccggtctcaaaatcctgggctcaagccatctgccctcctcagactcttgaagtgccaggattacaggcgtgagccaccatgcctggccaacccagcagatctttaattcacaatctggaaaaaccatctagaggctgttgctctcctagccagtcatgatttgggcccttctcaacatgtgtatgtgtgtgttgtttctttgtgtgtgtgtgtcttagtaaagaggagatttgtaaactaaaatattctcctctctcaaaaatcaccttaattataaaccaaatgctgtgtataactctatcctagcagttggtgattagattgaggcatccatttcagatgtgggtctccttccctggtccacagtgagctccttgcggctgtaccttaacttacctctgttccaaacccacccaggggctcagacacagtaatagatgggtacttgtctcagttcattttgtgttgctataacctaatagcacagactgggtaatttataaagaaaagaaatgtatttctcatgtttctggaggctgagaagtccaatatcaaggtgccagcaattgctgagggccttcatggcgtaccatccctatatacaggtacactgctgtgccgtaaggattccctctggagcaaaactgacccaggtcacaggttagtgagggagactgagcctgt

SEQ ID NO: 347121 - DNA, 903 bp, Homo Sapiens
tcagagccagcctcctttataagcaggcgagatgctctttgaaagaatcccccgtcccttggaatggattcccacgtccccctccaaggcagcccattccagccagtgtggcagcttcagcctggcctctcggagtcccatttgcaacacttttctgactttggtggcctcgagtgggaagaactgcaactttctggccacagaaacacaggctgagctgcttagagaaggcagggaggggctttcggtcatactgcgcgagtcttcgagctctgagcggctcgaagtcctccccgaggcacgggtgcgacggggatgtcgtaggcgtccgcacccgctctcgctcatcgcgcccactcccggcccttcctcccacccactaggccgggcgcctgcggcctccacgccagccccgggccgggggcctcccgcgcaggcgcgtcgtgcgcggggaccgcccggcctggcggggaggtcgccggccgcgacaggcacctctctgccctcccaaggccagcaggcccgcggccgtcctgctacacactcgggcccggcccgacgaccccggagccgtccgactgcggctggaagggagcccgcccgcgtctgcggaacgcgcgaatgttggcgcccaccgtctcccggacgcagcgccgcgcgagcactccgccccctgcgccgcgggttccacagcgagtccgcgcgggcggtgccggggcggcggaggacggccgcaaccgcgtccgttgacggtcgggtccttggtcgccgggtccttgcgggcaccacagagcggggtggcgtccgctccctcgagtcctcggtgccagggaattcaccgctcaccaccccctgccccgccttgggtccgggaagggaatgtgtgggtttatggccacgcat

SEQ ID NO: 347122 - DNA, 832 bp, Homo Sapiens
acacacacccttgctccagaatcaccagacacctccatggctccagctatgggaacagctgcattggggctgcctttctgtttggcttaggaacttctgtgcttcttgtggctccactcgcgaggcagctcggaggtgtggactccgattgggctgcaggcagctctgggacggcacagggcgggcgctctgatcagctcgtgtaaaacacaccgtcttcttggcctcctggccagtctttctgcgaatagtcctctccctggccagttgaatgggggaagctgctggcacaggaaggagaggcgatcccggctgaggcttaggaaattgctggagccggctccaagcagataattcactggggaggttttcagagtcaaacatcattctgcctgtgttgggggccaggtgtgtcacacaagcatctcaaagtcaaaagccatctggggctgctgcttctgtttctcaggctctggggaaaggaatctccctctcctctcacttgattccaagtgtggttgaattgtctggagcactgggactttttttctcttttccttgatggaccaacagtgcaaatgcaatctcgccatttaactttcaggtcgatttcctttcctgatcagacatctttgtgccccctttaggaaggaaaagaatacacctacgatgtgccaggcactgtgttaggcgcttttatatagatcctcgttaggatgagactaagggatgaggacatctctttatcttcaagatccaaggtaagattgccttcagtctgatgtttgttctcaaggacttatcccctacaatattctcccactccatactt

SEQ ID NO: 347123 - DNA, 1000 bp, Homo Sapiens
tcacttctttttaaagagcttgcggaaggagctgcgaaagccccccttctggtcttgcctgggattttgatcgctgaaagatgtttgttcactttctctttcttctttgggacagaatctggtagtatcttctaaatgcatctccatatgaggcaagctctttgggtcctggtactggagaacaggcgctgccactcgccttccagggcccagcagcctacagctcgcagggcgcgggggctgcccctgctctccctccgcctccacccgccgacggctcgcgcagccgccccctagcctggcccggccccgctcctctccacgcttgatgggcgcgcggccgccgctgctgctgcgcgtgctgtagaggcgtggggccacgccgtcggctggcggcgcacgcgggaactctttgagagagcggctcagcggcttggccttgccgtgcgcctgcgccgccgcctccagtttgtaggcgctgctgctgcccgccggcgacgtagcgctcttgggcagcggctgcagcgggtgctccggccgctcggcctccatggcgaagctgacgggccgcaggaagcagatgtccaggctggactcggaggaggcaggcgagcagttctcgaagagggccggagcctggaacggctcctcgtcgtagggcgcgggcagcgcgaagatctcgccgccgtactcgaactcttcgtaggccgcgggcacgaagccgcgggcatcgggcaggagctcggccggggcgcgcagggagcgctccacgttgcccagcggctccgccggagaggactcgaagtccatctccgggatggcctgcaggggcccggccagcgccttcacgtcctgctcggccgcgcagaactgcgtcggtgccagaaggctctcgggccgctcgtgcttcctgccctccagctcccagtcactgggcttcccgggctgcatgctctccatcaggctttgctgctgttggcttttcttcactgggggcatc

SEQ ID NO: 347124 - DNA, 796 bp, Homo Sapiens
cagatgagctcaacatagcaactgtccgttttctgaacattggagtccagtggtgcctgagccaggaggcttgccaattcagtagaccagacgtggtatttgctcttgaatcgggacctgcggggaccgccgtgcggcttcccgctgggtgagcgccgcagccctgagtggcggggcagtcattccccttttccagatgggaaagccaaatcttgagcccagcgccagcaccgtgttctcaggtgctgggacttccaacccgcgatctcctcactgtagtatttctgggaaccttccctgggattcccctcggggcgtagagggaaggaacgtctggggacaagcgtccaggaagggtctggattctttgtcctccgccgggagcaggccccaccgcaggcgccagtgtgtggggcgccccggagacggtggcggggaccgagcccctgccccgcggagaagcagagggcgcgggacgccgttccccagcgctgccgccgccgcgctcgccagggcctggagtggcgcggagggcggcgggctcagaccaaagtccaccagggggcaaagtccgcgggccccaagcccccaccacggggtcgcgggggtttgctccgcctcgtgagcttgggattctggttaaaaaggcggctgggcggagctgcgggcctccgacggcgggaggacagcgctgcgaggaggcgcccgggacagtcatggagcgccgcctgggagtgagggcctgggtgaaggagaaccggggctccttccagcccccggtctgcaacaagctcat

SEQ ID NO: 347125 - DNA, 1000 bp, Homo Sapiens
ctacttattactggttttcagtgatttaattacaaagtgcctcgcttgatatggtttgctttgtttttctcctactttggatttgttgagcttcttggcgctatacgtttacaattttcatgaaatttgggacttgtttttggccttcaaatcatcaccgttaatccttttcgaggactccagtttttaatatcatcttaaggtgactgaggctctgtgtttctgtgtttcttttgtttcctttctctctgctttaattgggacagtttctattgctatgtcttcagtgtcacagatatttcattccacaatgtctaacctactgttaagttcagccactgaattattcattacaggtgttgtattttttagctccagaagttccatttggttattttctatatcttccagttttttcttcactatgttcatgttttcctttaaatccttgttttattttaattttttaagtccttgtctgctaacgttattatctctgtcattttggggtttgtttctattaaatgatttttctcctgattttgggttctatttgcctacttatttgcatatctagtatttttaacattctgaatttaatgttgttaaatgtctgtattttgttgttttaaaaatggtaaaatttgttttggctggcagttacggtagtagcggatgaacttcctctttttgaggctgctttctaaaccttgttggaggaagtctagagttacctcacttttcggcttagttagcccttctcctaatgccttacccttttgggatttctactgaattccctggacagtcagcaaggtttcttcacattggcgagttgaaactcaaacattgcccagtgagccctgggaaccaatcagctcacagctccgcagtagttctttgcatcgcactgtgaagtttcaccttatgcatgtgcagcttagtattcagcaacagattcacagggattccaggagcctgttttgctgttatattctct

SEQ ID NO: 347126 - DNA, 1000 bp, Homo Sapiens
ttctgtgtcctcacgtggaagagagagagagagatcgagagagtgcactctggtatctcttcctttttggggggagttggggtggtgtggggagggacagggtcttgctctgttacccaggctggagtgcagtgctatcacagctcactgcaaccttgacctcccaggctcaagccatccacccatctcagcctcctgagtagctggtaccacaagcacatgccatcacacctggttaatttttaatttttttctgtagagatagggtcttgttatgttgcccaagctggtcttgaactcctgggcccaagcgtacctcctgcctcagcttcccaaagtgctgggattataggcttgagccactgcactcagcctcttcctcttcttgtaaggacaccagttctatcgaacaagggccccactcttatgatctcatttaactttacctccataaagggactgttttcaaatatagtcatgttgaaggttggggcttcaacatatgaatttgagggggacagagttcagtccatagcaggccccttaactctcccactggacaaagaaaataataatgacaatataaccaaaaaagctgaaggtaaatctgtgcacactgagaatgattgttgggtatttcccttggctggtcatgggaaaccaccaaagaggagaaatctaccagcgtgcttctgtgagctttggtggtggtgtgatttggacacagtggggccttgaaagtgcccacaataggctgtcaggtgagaggaaacacagaagggaggtagcttactacagaatgatcatggcctaataacatctgggtgattatatgggttgcacctcagctgtctataaactttagcgtcagcagatctgtccatggctgtctctgcttttccagttggttgggcatatctccggcctgagatggtcacccgtcagaatcctttgagtatcttgccagaattcagcagtttttctgtgcaccaggaggatg

SEQ ID NO: 347127 - DNA, 830 bp, Homo Sapiens
ggacctccgggccctgcctcctgaaacagctctgatgtgggaggaggggccgacgtgactctcagctgcggagaaggctcccaagattccatctgctcctgggagcctcgacccatccacgaccttcctaaagggatccggtccacgcccccagggtcctggggaaatgcactcgggcagtgagatgtcggaaaggggagagcaggagcaatggcagaggagtccggagaggctcctgaggagtgtacttcgccttggaagttctccaggccctccgaggtggacgcgtgcagcacgggcactgaaccctgagcccaggagtccgtcgtgcatgccgaaggctcctcgtcctcaccccatgtggggtcctcagctactgcagattctccctcgtcccgggccaggaagcgccactcggtgatctgcagcatggcctcccgggcctggctgatggtgaatggaatgcactgcggaggcgagagaggatctcaggtcggcagggaggggcgggagagggagacgagtctgaaggacccggatcccggcccacctgctgagtcaggtagactttgaaagcagagtccatgactcgagccagcaagtcggccaagatgtcccctacgacgtcctcgccctcctcgagggctgtaagcgccatccactcggcctcactgagccgcccaggcacaatatccacctgcggcactggcacagtgggcggccgcactttttccgccttggaccgggtcaccccgcggtctcggacctgcctctcctgcctcgagccttcgtgcgccatcgccaacgcggtcgcagcaacgctggtgttt

SEQ ID NO: 347128 - DNA, 1000 bp, Homo Sapiens
tttttaagggaaacaagaaataaatgtatttaattttaaaacagccataataaaagtagacttgataaataaaacccaaaaccacttctttgaaaagaccgttaaaaaaacctctgagaagtcaagcaaaagagaaagaaaaggcacaaattttaaaatgttagatttagaaaaatggcataataaccaacgtgcagaagctgcttcaaatcaaggagacgggaggccagcttcattccatgggaggccagcttcattccagtaggttctgtttcaccctttcacagctggggagtggagcctgggcctgcgcctctccgcgccagagccggcgccagcgcctctccgcgcctgcgccgccgctgcgcgcctcgccgccgctgcgcgcctcgccgccgctgtctgcctctccgccgctgtccgtctctccgccgcgccgccgctgtccgcctctccgccgctgtccgcctctccgccgctggccgcctctccgccgcgctgccgctgtctgcctctccgccgctgtccgtctctccgccgcgccgccgctgtccgtctctccgccgcgccgccgctgtccgcctctccgccgcgccgccggtggccgcctctccgccgctggccgcctctcagtctcaccgagccgcttcgtggtcccaaaccaggacccaaagtgctgcttgggctcaaggttggaattatttgcagtcaactggagcagtggacctccttgcttactttgaattcctgggtccagagggaaaaactgggtggtgacagggaatggacagggatgccacaggggccctgtgggggtgttagatggggtggtggccagtctttgctcataggggaccccctcctcctctccagtcctgtcccctcctgttctcagagctggctcaaacagcagctcctccaggaatgtgttcttggtttcaacctggtactcccacctgcaggtcttcctggagtgtctcctctttctctctgtctcccc

SEQ ID NO: 347129 - DNA, 1000 bp, Homo Sapiens
aatttttaaaaaagtcttttttaaaaagaaaagaaaaatccttattaaagacttttcaaaatagaactcttaaatagtaattgatagcactttacctctgttttcctgataaaaaaaattctaaaagaataaaaacaatttcatcctgcctccatattataaccagaataattgaaataatatgcttcaattgatagtaaagtagcatttatgtttttggatcaatgaagctaagccagcactaagaattttcttactattcctccactacattacagttacttcttcatccctatacataccgcaataatgagtcagctacatccatttagattatcaacccaacccaggaaaagctggtgccacgttgctctgcacaatgcagggccttaggatggcaatggttaggttcctgctctcctgctgcaccaccatttctcccaaggccttgctataggtctaagtattgggacaatctccaatccgcttgggagtgatctcgtcaataatggcgttgtctttaacatcctcctttcattcatttgagcctgataagaaagttgtctcttgggagagaagcaagcatacaccttggggccagacagcccacggtcaaagttgaactccaccactgttcagctgtgtgactttgggcaaatgacttttcctctctgatcctcatgatcctttttggtaaaaacagcagaatgacaggtcattcaatgtcttcaggattaggactcttgcatcacaggctggcagcactcccgatgtctgggtgttttgtgaggttgtacaggatctagtagaggccactggctctgctgtcatatcctaagaggcagccaggcagacttgggtctcttggctgcttcagcaccagaggatgaacagcgcccatacactgaggctttcgggagaatgggaggagggaaaggaagggcagaatggagtgatgtagggtccatccatcatatccctggatggagagacccctgtt

SEQ ID NO: 347130 - DNA, 1000 bp, Homo Sapiens
ggggacaggagtcccggaagggccgtccggcgttcacacccacccctgttccgctcctcccgccccaaacaaagtcccccgactctaggtccaggatacgttacctgcccggcgctcccggcccctcggtcaccgcatcccccgctgggcgcgcctggtacgggtcccgctccccggggctcacaaagtggtcgcccctggctgggcggctgggtagatgcccctctctggacatgttggggcggtttttggggtggagggaacgcgggaagtgaaagcggaggctgggacaaggggaacttactgataaaatggaaaaaaaaaaagcccacagggcccaggtcctggccgggggcgaaagaggcctgttacctttcggggggtcgcggccgaccaagaagggagccggggagtcgcccgcccccctcccccggcccccggcccccggcccccggcggctgcggcagctgcacacagaagcccattgtcgccggcgtccggcgcgcagccccgcggactcggccccgcggccaagcgcgtcagcggccccgtcagccgggccgggctccgtgacgcgcgcgcagcccgcgctataaataacctgccgccgggcggctcgggcggctttccagtgacgctggggcggaggcgcggtaggaggagggcgaaaggaaacaataaaaccgcccggcagcctcccaagtctccctcctcccttcccaggccgcccgcggcccttcgcgtcgagctcctttttccccgccccggcccgccctgcggggagcgcggttcgcgggtgggaaggagcccggcgtgctggcgtccccgagtgctgccggggccccggggcgggagggggtttttcccgcaccctgggatggcgaggagggaacttggcgacaagtttagtgaggggatcgctgtgttcctttctgtcgtcttcaacgtaagcattatctaggtttttgtggggccaggcttgcattagtgttttcattcg

SEQ ID NO: 347131 - DNA, 427 bp, Homo Sapiens
ttttgctgagtgtctgtaattcatttggttgcgggaagcttttctatggtagctcagaccaaagaccacatatctgcaaacagtttgcaggcacttgttttctccaatacatcattgaattctcaggtttctagagcagaaacacaggagcagaaaccataatgagaacccatgccagggtagggaaacctgaactgtaatggatgaatggctggaggcttcgtgtggacacatctgagggttaaacactccaggggactcagtcataagggcccccaacactgtttggggttttacctccaggagcttgaccaggttctcacagagaagatgagagaaaaattcccttatgcttcctgtaggttgggggaggaaagttgccattttaaactatgctagaacattctattttccctaaccaggcctg

SEQ ID NO: 347132 - DNA, 1000 bp, Homo Sapiens
ttaaagaaagattagcaagtgttataatattccagcattaaactgagactttgcctcaatgtagaaactggggaaagagagttgatcagaagggaataactttctcatgatgtaattcaatacagtcctttccgtgcaccttgtaaaatcatcatacattcatctaagattatctggcataaaagcagaggaacttctctcctgtttgtcccattctctggtaaacttcatcttgcagatgaaaaactgaagcccaggggtcaggtaagaagctcatccaactccatacagccagtagctgagatctgtctcagcttgggaggctcctaattcttgagggctccttaaagacagactgtagtgttcccctttgcacccaatgtctgattcagtaggtatagagaagagcctgagaatcttcatttctcacaagttccaggtgatgttgatgctgctggcccagggaccacaccttcagaatcactttcacagaaggcatatggtcagcaattccacttcttccaacagaatgaaaaatgggctcttgaagagatatttgcatagccgtgatcatagcagtattactcacaatagctctctccgtggtgttgaaggccagtagctgaaatgtaaagccaaatattgagtacttgcagcttaaacccttgatcctgttcatgcacagtacaactaactttatgcagtgatcaagatggatgattaacatgtctgtctgggttccgatgtccacctcaactctgcggcgtggagaagccagctgggtttgacttttccacaggacctgctgcacacgcttagccacagggaagcacaaagcctcagaagtgctctgcctggcagtgctgaccacacacaggccctcattcctgcgcccgagtgggccactcccacccgtgggaacaggcttcgccgacaagggaggccctctcagcagaatgtagctgactggagcctgctcattcaggcctgctcctgatgg

SEQ ID NO: 347133 - DNA, 1000 bp, Homo Sapiens
gcattcactgatttattcacacatgcctgcattccctcatttggaaggcatcatgatggggtgggaagaaccctctgagtcgtccaagctccatggcttcaatcctggctcctgcacatccttggttcctcctgcctcagtatccgcatctgtgatctgggctgcttgcctcccacacgattggaagagctgggattcgaatccagatctgcctgactccagaacaatgcctttttccctccctgcttccagacgtggctctggtcccctccagtcactgagtctccagcttggcagccatactccacctggctgtccaccataagccctgcaggtcctgtgcccaaggctcccagaccctggccatgctcctgtgttggcgtcaactttctggatttcacacggcctgccagctcgagcctcagtctttccatctgccacctggggcaccactgagtgtagccctgggggccatagcccctggagaggggtgaggagaggcaagtgagaccttcagggaagttgaggccacagtgaggcacatcggctatatcagggtccactaggggcaccagaatatagcatgaggaaaaccaagaatcagggaggccaagcagcagctggcaagagccagagccgagtgtgccattggggtgggcaatttgcaggatgagcttcacatgcagcacgcactgggggtctggctggcaggggagcggggctggcagccatgtgaggggctgtaggagccaggtctgcaggggttggtcggggggtgaaacaagcagcgtgtgctgcggcaggaccaggatgaagatcatggctctcttcaggcctccacagccaggggcagagcgaggcctggagtccagggtcctggccacacatcccagggttctcccgctgtcctctgggatggccagcagacagatgccgctcagggacagccacccgctcccaccagtcccacccctgccggcagggacagaacctctggcac

SEQ ID NO: 347134 - DNA, 1000 bp, Homo Sapiens
aacaggttacacattttaataaaatataaaacatatcattttatgaatctttgtattaactgacttttcaattaattgttaatagttaccctactaacaattcaataatatcagataaaagggtgtctattataatacagtttccagattcctccccacaaacgataagatcccaagaatcttgctggtggggagagagccctactcaaaatttgctttgctataacttaaagtaatatataatgtaaaatgttgtcactatttattattgttgccattatttggtattggaaactctagcatacaaaggcctctattctgatatgggcaggaggttgagggaagcagttaaatttctctgcaagttaaagtaccagcaaattttaagctttgcctgtgcggttttgttgtacaataaacaagaagaagaggaggggccagcaacaagccagcaggagggggctctggagaaagaaggctgtttacttatgatggaaatagccaggggcaatgctgcctaacactgaactttaaggtgatccccattttgtgttagtaatgttttgggaaataagaaaggaggagggatgattcatctttggggctaagaaatcaaccagaataataatttaaagtagtgttacattaggtagtcaggcagacatgagcagggtaggagagatgcccccctactaacattaggcaaccatcaggtgatagtcaggtagttaactgtctctccaaaatactaatgggtcgcagccggcaccagagaaaggcagtctcccaatagatggaaaaaactgaaactggtgatcagcagctttccgataagatctcaggaattgggtgagtggtctcaagcatgtgcgttaagagccaaaatggcagagtttaactggtatatgaccttcctctaggaacactcaactggtaagggaagaatgcctcacctgagcatgcatacaactccagtaaactcactgtgcctgtggtccct

SEQ ID NO: 347135 - DNA, 1000 bp, Homo Sapiens
gacatgacgctcctgaaacgggtgcgagttcgggcggcaagtgaagatggccaaggctgacggcatcgaggatagactgggggtgtctctcctaccagggacaaagaggagttcctccggatccggactgcccttcacaagcctatgcccctatcccacccaaaattttaaattaacacaaactgcacattgtctaagcataaccagtgaacatcaactcttcacttgggtgggaagacaagccagcgcaagccccatcacctcctttaaaacgctgcaacgccgtgatcacaaaaagtccccaactggcagctttcagtccatcttcttctctgggaagaaaaggctcaaacatcgggcagcttcggccaagaaaactcctggaacacagtttggggactggaggtatccaagcagatgagtcacacgccaattcttgtgtttggtttgagatcgcggccgcttttcccccttggtggcggaaacgttgcagcactgcagcatgaatgaagggtcggttcggcgcggccaggaaagtccttttgggccgaaggaaggtgtggctgggcacctctgggcagccaccgccagtcctcgcccggagtgaaggggcgagaggtgacggagacggaggggctctagacggccggcgggacagtctgcatcgcccctgctgagcggaggccgccccgggaagggggacgcggtccccggcctggcacgatccgagacggcggtggctgaggttctccgcgcgaggcgtggaggccggcggggcgcgggcagtggccaagtcgggactcctgggcacctggcgagcgtccccgcgaccagggcggggacccggctccgcaggccggtgcggaccgagcgaggcgcgacaccgggaggctcgagttcccaggcggcaggaagttggtccccggacgcctaggcttctgggccgccgctcagcacatgggccgcctcccctcagggtcgcccccgcgagggtcgcatc

SEQ ID NO: 347136 - DNA, 487 bp, Homo Sapiens
caagagctgtttgaagactaaatgagcgaattggtgcagaagcggcagtgcatgcgagctgtgctcaggaacattttccatttagcagcccctttaagggtggcattacggtcacagcctggggagctggacttgtgcagggcagcctctggaagcttgtggttgtgtcctctatcctgggcgagggcactggccactgctgattggggtggaggacggcgtgcccacactctgttggtgtctatgaactggctggtgtctgaggcccatggaaggtgcttttcttgaacccactgctgccgcaggacctgtggccttgctgtgtaatgcaagggcttaaaacgtggctcccatccagacatctgggttgaactcacctctctggcatcaatgcatgcccagtgggtcaaatgttgaagtttctggaatgttccaaacagtgttagagggattgatcctgacagaggggccagtgtccccaggcggc

SEQ ID NO: 347137 - DNA, 529 bp, Homo Sapiens
tttaaaaatattgctttattcactcaaaaataacaataaactcctatgttaacataaatagcacatttttaagagaaataatgatattttccaaaataaagcatttagtacaaagagtagcactgttttacatttaacatctggattaacagaagacagcttgatgatcatatctgttctgccttcagtctgttgtgatacgtggttttgattgaagtagatgaaaaagatccaacattttatccccaacatctggcacattgcccagcacaaagcaggtttcaataaatacctgagccggagagttggtgaagagcaaatggcacttgaatttattgctgcatattctcccgcagcttcttgcttgcctgggactcttctttctctgattctctcccttccatctcctacagatgtggggaatacctgcgtctctgatggtacaccctgtttcataaaggaacttggagactgagccctcagcgtttgaagggaaaggagcaggtccaggtgttagctccgaggacat

SEQ ID NO: 347138 - DNA, 1000 bp, Homo Sapiens
tcagacatctgcgagggcacgccaagtgcttattttaaaaataaaatagtcaagggttttggcacaagaaagttttagcattcgagcctgtcttaaaataaaaggacttcctatcagctcgcatgcttccctgggctgctgcgacatatcagcttgtcctcggattggaacaacgaggaagaactttccttcgctaatgactgggccggaacagcgcatcagccgagcctcattggcagcggccgccccagcccccggagaggcggcgggcgggggctgctggggagagagggagccgaaagccccggctgacagcgagaggaggcaggcaggacggaaggacgcgagaaaggcggcccggggcacagctgtaagtgtggagcaaagcgaggacgcacggcgagcggcggtggcgggggcgacctgcagacccgggccgggggatgcggcaggcgctggctgcccagagagcccgggagtcgggctgcgtagctcacgtgctgagctggagcttggacagagaggaagaggaagaagaggaaggcagccgccgccggggaaggcacagcgcagagtggacttgcaggactggcgcagagccgggtccccaggtcccgcgcggtgcgcagccgagacaataaagtagccgtctacagccccggagcgccgcagggaggaggtggcgacaggctttgatgagaaatccagaagaaagagtgtatgaaagaaaaagatgacatctatgcatagcaaacaaaataccattttcttcttgcccgcacttctctgcagctcccggcataggagatgcagggttgtattgtcttcattctgctgctttgtgaaacgctgcacatcttttggacgtgtggtgaatgcgtcacattcccttgagattaatgaggcaatcaagtcaaactctaaagtttcggtcccctctgctctcactaactttagggttatcaaaagaatagcaatcagtaaaataaaatcagacttc

SEQ ID NO: 347139 - DNA, 1000 bp, Homo Sapiens; identical to SEQ ID NO: 246658

SEQ ID NO: 347140 - DNA, 402 bp, Homo Sapiens
ggtcatcatatcatttatcacatgcttaattgcacatgtttgactaagaaaaacacaaagtatttaaactcatctgtagttcaaagtgcctatccatgtatttatccattcatccggatttatttattgagcaactcttttgtgccaggcactgtgctgggtggtggtaatgcaatgatgaagatggcagacacagctctgccctccaggagtttaactgctgctgatctccttccagggcttccgctgggactaggatcaggatgtggacacccccaacctggaccgtctggccggggagggcgtcaaggccaagtacctcatgccgccccttgtcacaatgacctccccttcccacttcactgccatcccaggtaagcgtcactctgcccatttcacctg

SEQ ID NO: 347141 - DNA, 1000 bp, Homo Sapiens
agaaatgccaaggttgtttttctttatttacttctttcttcacattagtgacatgtaaacgacgtgacctaaggcaactactgaaaaattaagtttattttttccagtgggaaggaagtgcagttagtggacaaggtaattgtcgaagcatcctcaagaggcacgtatatttgagaagctgtgactcttagaaaccttaacttaaaatagtaataataacaatttcacagcattcaaatggaaaccgcccagtaaactttgttgaagaccttagtgattagaaactgcttagggaaagggacaattctcttcccccgctgcccctttccccttttagagaccagcagaaagcttattcttaaaagatggctttggtgtcaacagggccaagaggatccagaagagtgggcctgcactcttttcgctcccgcctcactggggagccccgcgacattcctgactaccctggagcgtacggcgtataaacgtatacaccccagcggcagaggccgaactagcgcagcagttccaaatcagcccaacttctcagcgcgcgcctcaggccacgcgcgcgcacgctgtcgcgggcagagtccgctagtaaggtggcggggcggggtaggggaggaacgcgacttaccaggtctgggatctagatttcgggcagagttggtagctgagaggccagcagacagattcagtcataccggagacgggcaatttggggaggtctacggcgcgagtggagggaaaggaaggcaccaatgcggtttgggtgtcccccttcccttggtccatgcccgcactcccgccgccgcctccacatactaagctcggcctggccgggagaggactcagagccctcctcgccgccatccagccagagcctccggcgctcccgggctctggcgccgaccccagggacgcctaggggcggggaagggatgtccccactctccagcccaggagagggtaacagcgttgccggcacggacgctag

SEQ ID NO: 347142 - DNA, 1000 bp, Homo Sapiens
aatgttttttatttatctttttataaaatgaaactcctatgatcgattaaggaaggcagttatggctgggtggttcatggggttttttggagtttctttggttagttttgctttcttttttgtctttttaaccgtaagctgtttaagttgaagcgctctcagatgtttggggggaaacatcctcttaaaatgggcccttgtgcttgccttctggggaggcggtcctgagcaggggaatcataaggcatttgtgcatatgttatacgcagactgcacccaccccttccccccagcctttgcctcttgggttgttgtgctgctttccccttactttgctacatttctatagttaagttggttttacttgaatgattcatgtttagggggaaaatgaaaatctcccttaaaattggtttcaactcctcctgcaaataaaataaatgaagtggcagatgtaacaaaaaaaaaaaaaagacagcccaggcaagcagcaccttcagctgactccttccgtactctgtatttgtcatctgtgtacctgtgatgaaaggtgatttgctgggctgatgacagcagtcatcagtcatatttgtattatagaatggaaaagtttgccatatactagcaagaataagcatatgattcctcttggtatgtatgaaatgtgccctacattaaacaatgaacactgtacaaacaatatgcaagtgttatgaatgttgtctgtctcagaatggcaggctggctcaatgcagagattctgggttttggagaaaaattctacaaatcttgcttttaaatcccagttcagtctttactaatttggtaaccttaggtaagttactcaacctctctaagccttattattattattattattattattattttcagattcaacatggttgtaataatattatggcaaaattgtttgggaagattaaatgagaccacgtatgtgaagcatgtagcaaatagtaagcactaagaaataacaact

SEQ ID NO: 347143 - DNA, 784 bp, Homo Sapiens
ttttttttttttttttttttttttttttttccaagccaaactgtatccagctttattagagatactttccataaacaatcatggtatttcaggcggacatgggcagacaatcgttaacagtatacagcaattttcaaactctcttcttcaatggactaccaaaaatcagaaagccaccataaaacccaatgaagtcttcatctgatgctctgaacagggaaagtttaacgtgagggttgacatttcacatttagcatgttgtttaacaacttttcacaagctgaccctgactttcaggaagtgaaatgaaaatggcagaatgtatctgaagatccacaatctagaaatggaaccactgctcttttgacaggtgccatctaagtggcatcactggaaagtccagattgcctgacacactggtaaccaataactgggagtcaggtcccaacagatgtctgggcttaaggaaattaagtctatgatgaaagatggaaagggagaaggggacataaatatgaatttgtttttccataccacaaggcttttgtgccaagaggccatgtgtgtcaaagtcagggaatctctcctcctgggagccaagaggaagtctctcaaaactagaagggaaaggtgttttccccacatcaatccagcttcggaggcattctgtattccttcctctcatttgtattttcttcttccacttcttctcatgtttctcttttccatatttctgcatcctttggttgtacttttcttctgacactaatctcagcttctgcat

SEQ ID NO: 347144 - DNA, 796 bp, Homo Sapiens
ttttttttttttttttgcaggctgggtgtttttactcatcacatacatcctcaatgctctgcagcggtgcacagtagtaggtacctggttaactatttgtgaaaaacatgaaaaatgggaacaatggggcagagccaagttaggaagttcagtcatccaagaatcaaggagttgctgcactgaggtattgcacgatgatgggggcacttaaatttttaggaaaacgaattaaaacattgaattaaacaataatttcaagcaattcccaaaccaattaatgcatagattaggttgtaactgtccagatatgtttggcgacacaattctattagcatcaagactcatctaagtacctgaagtagtggcaccaccatcaggctcagcagtacaaaaaggcacatcattcttgtcctccctaatctcctgcagtatggattttgccaaaccatttcgattagagctttcaaaggccagtttattcgggagaaagggtccatccacttgtaagtttcaatagacaaccaacacgccggtgttggggtaggggcttttgagaaagagatgaggatgctctgagacaagattccaaccgagtgaactaattttttcagacaaggaccacagtagattctgtagctgagttgagatttggttttgagtttctggtgcctacaaagcaggtggttagggctttctaataagcagtttaacattggtttacagcaggcctcacacccagagtctttgggctaactataagagcaaactacagagcaacttatatgtaagaactgtt

SEQ ID NO: 347145 - DNA, 1000 bp, Homo Sapiens
tcaatttgaaaacaaaacatttattcatttacttccgctgcagatttcttgactgctgaatttcatgagaagggattgttcagggagggacgtggggctgaagacctggagaggaggtggtgctaccgctgttcaaatctgagggtggtggagatggagcccgggttggggggagctgatgttccaggttgagggccatgctgctggagatccagcggggagctgatgttgcagtttgaggcggtgcagctggacatgcaggggggaagtgatgttgcaatttgagggctgtgcagctggagaccctgtggggagctgatgttcctgtttgagggtttcggagctgatgttccagtttaaggccatgcagctggagacccggtggggagccgatgttccagtttgagggccatgcatctggagacccggtggggagctgatgttgcaggttgagggccgttcatctggagacccagtggggagctgatgttgcaggttgagggctgtgcacctggagccccggggtggagctgatattccagtttgagggccgtgcagctggcaatctggtggggagctgatgttccagtttgagggccatgcagctggagacccggcagggagctcatgttccagtttgcaggcagtgcagctggagacccggcggggagctgatgttccagtttgaggtccgtgcagctggagatctggtggggagctgatgttccagtttgagggccctgcagctggagacccatggggatctgatgttccagtttgagggtggtgctgctggcgacccaggcgggagctgatgttctagttttagggccctgcagctggagacccggggaggagctgacgttcccattcgagggctgtgcaggtggagacctggggaggagctgatgttgttctaatttgagtgtggtgcagctggagatccagggatgagatggccctgcagttcaaatatgagggtcccggagctggactctac

SEQ ID NO: 347146 - DNA, 1000 bp, Homo Sapiens; identical to SEQ ID NO: 161545

SEQ ID NO: 347147 - DNA, 1000 bp, Homo Sapiens
atcagaaaaataagacaatttattttgttgatgacatgattgtaaacctagttatgcctctgctccctcatttaaaaattaaaaatcaggccaggtgcggtggctcacgcctgtaatcccagcactttgggaggccaaggtgggcagatcacctgagatcaggagttcgagaccagcctgaccaacatagtgaaatcctgtctctactaaaaacacaaaattagccgggcgtggtggtgcatgcctgtaatcccagctactcgggggtctgaggcacgagaatcgcttgaacccatgggtggaggttgcagcgagccgaaatcacaccactgcactccagcctaggccagaagagtgaaactccatctcaaaaaatattaaaattaaaattaaaaatcagtaaaaacattttaatacaagataaatatacaaaaattagtaacttcccactcctctagcaataatcacctggaaattttaaaaaaagggagtcaaaatattccctttgccatggcaactgagtagttgggggtgaaggttaggatgctgtatggagcagctccggccatggggagctcgacagaggcgtcatttctctcccacatggtggctgagaatagctgggtgtgctgctctgtcgccacacatggggtccccccatcacgcctcttctctagccttccaggcatctttcctggctgtggggttctactgggtgcagaaatgcccacgtccagctggcaggaggggccggggccagggcaggagaggagaggccatgttttccaagaccggagctggcaggaacagtgtctccaggtgacaaaagcctccgacaatttggcgagaaaggtgggggtgggcatgagaggatgcagggcccccaccactcaagcaaggagagcggggggcagagccacggagaagacccagtctggagcctctccccccagcctgaagcccagcctccaggttccatgaaatcacctccagttattcc

SEQ ID NO: 347148 - DNA, 650 bp, Homo Sapiens
tacaaactcccttataaatcaagacagtgattcccagacaaattatcaaaagagtataaaagaagtcttctttgagtgtgaaatatctcatggaatatagcacatggcgtcttcatgaagaaactactgggagagaagacaaactattctctctcacatgatgacaaactcgttgaaatgtcatttagttttgtggctccagccccagggattctgactctgattctaaagggcctgcatgcagagtgagcaagctgcctggatgattctcttacaggtgttttaagggcagcagtttgagacaccctgatgcaaaagaacgaacgctcaaggaagttggctgtacatgtattttccttcctgccatctaatcttgtcttcctagcagtcctgagagagaagcagagtggtttccaatcccactttccagaagaagagactgaggcagaggcagcatcactggcagggaccactgacccagcctccaactcatctccttcctgtcccttgagttctgtgtcacattcctgcccctctctgtcgtagctaacaggaatgtgctccgtgtcttcttcctgttcaaaggaccgtccaccaacctgcgcaggcagcactttcggctgggcggggatgcgagaacttcccaccat

SEQ ID NO: 347149 - DNA, 1000 bp, Homo Sapiens
ttaatgaatagtaaatatattttctcttctttatgattttgttagtaacattttcatctccctagcttattttattgtaccaatagagtatataatacatataacataaaaacatgtgttaattgactgcttatgttattggtaaggtttctggtcaagagtaggtcattaatagtcaagtttttggaaagtcaaaagttattcacaaattttcaactgtgtaggggtcagtgccattaacccctacattgttcaaggatcaactatattatatcctggagaacagtgccccaaccctataaaatgttattcccatgcagactcttcaactgagtcttcagtaagctcctccactgttctgtcaggctggctgtttctggtaatggggtagatagtaggaccaggaaatcctatggtcatgggcccactcttgtacctccttaagatgagaggtttgagaagacataatgcagagtgccatgttgagattaggcatcctataaactcccagttgctggagctggcagaggcaatgaaggcagggaaggtgatatgaagtaggtatagattctgataaagatgagcttctgtccccttaaggtggagatgtccagtgatgaatggtgtcatatcaagggctgtgtgttgttctcttcattgagggattgagcactcagcagtggcagttgctggcttagacttggtggaagggaatctatgttgttgatcctgtgtagacctgccatccctgctgccatagctgcttggttcaagggtctcttgaggcttggctgacttccataaaatatgtgattccattcatctgatgtttgagttcctcttcatgtggctctatttgaaatgttttgcagttattgactcagtcctgataatgaccgtgcaatagggttgcaggtgaagaaattagcccctgctcattgataatgaggtaaagaccaaggtagacacagccaaatttctttgcagactttctcagctg

SEQ ID NO: 347150 - DNA, 773 bp, Homo Sapiens
ttgcttgtgcttttggtgtcatagccaataaatcattgccaaattcagctttgtaaagattcttccctattattttaggagttttaaagtttcagatctttaatcccattttgacttcattttaaaatatggtataatgtaagagtccaacttcattcttttgtacatagatattcagttttctcaataccatttgttgaagaaaatattctttccccactttatagtctcagtgcccttgttgaagatcacttgaccagtgggtatagagtcagttttgcaagatgaaaagttcaagaaacctgcagctctgtgaaaagaaggagccacaacttcactctcttctgcttcccattgggcaaacccaatcaggagccagaggcaaagtccgttgatcaagatccacacagacaatgatagatgacggtggaggatggatctggtagaacagcagaaaggatccagcatagccttgcttcttgacatccactctcatcctttgcctaggtgacaactttgtgttcccaaccagttaccatatcttcaaggccagaacacttgcaacctaaaaatgttagccatcagcagtgctctgaagctcggcgtccgtgatggtctagggggctttcgaggcgatcgggcggtgtcagtcttcagccgctaagccgagaggatctgggaaggagtcagagagccttgggccagagttccaggggctctgggagtggctgccaggtgagttgaacagtccgattttcagtggggtcccacac

SEQ ID NO: 347151 - DNA, 1000 bp, Homo Sapiens
tcagcctggctcgccggctcgccgctctgcacgcctccgccggccagctctgtcaaagcaaagagctgcgccccttgagttcgcccggccgaggggaggggacgccccgagcttggccgcgtgcgaggctccgggcgcgtcctggttcctcggcccgagagcgcgcagcccgggtccctcctccgcgccctgccccgcaggtgagcggctgcgcctccccactgcttctcctcctcccgcgcctcgccggcgctgaaaagctacccacttgcgtcgcttctcctccctctcccctcccccgcctctagctctccttggctgcccgctggaggggaggcggggggtgagggggagtcggcgagaaggaggtggtgattgagggcttttttttctttttcttttcccagatcctgtaggacgagtcttggttttggggtgtgtgagtgtggtgtgtgcgcgcgcgcctccttgacgcctcccactctccctccctggctctggcagagggaggaagatgaaagagaaagccgctgccgctgtgatggacaccacattgatagatgctctgacagtggggagaggcgggaatctgggaccggagacgaaagctgtgggcatcttcagtttaacggacctccggggtatcagggaactcgtgggaccgtgaaaaagtcgttcccaaatccggccgcctgcggacgtcggacttccgcggggccggcgcccgttggcgtctgtagctcggcgcagccacgcggggctccagcgagcggggtccgccacccctcgcgccctcctgcggctttcccagcgctgggccagtgcaggccgagccctgcgtccctgcctcgctgggtgggggtccggggcgcggctgtccacagggccgcctcctcctgcggcccgcggggaaggggcgcatcccaccccgctctgcaggccgcccttctgccagctgggaggcgagggcacacgtcctaaggctgcccaagggggagag

SEQ ID NO: 347152 - DNA, 364 bp, Homo Sapiens
ggatctattttaattaagactcacattttctgatacatgtgaaacaaacatacttctctgttaaatggactgcttaatacttttacacaaagatcttcataaagtgtgagagaccatttaagtataataataatctgggttgctgccatttttcttcctctttttatcacaaaaggcaatctgtgcaatcctgtttgcacctgtataatgaaggttagatcttttcttcttttcttcaaatatttttttctgttctttgaccttcccttaagcaattgctcagtgctcagtgaactgagtttaaaaatgctcatcaccttctttttccaatcttgaaggatctggaagagacagcatcttcaag

SEQ ID NO: 347153 - DNA, 1000 bp, Homo Sapiens
ttttacatttattctttagcagctttattgagatacatacaattcaggggccctacaattcacccatgaaagtacagaccatctccatccatcccaggcgggacgccgccagcacacaaggcgcacagcttgaccctcagccccactgactggcagatcagggctgtgtgtcctcctcccactgggctcagacagtgtcctgggagtcctctgaggtagaggaatgggatcccccagggctcctctgagtgggagctggagagtgagagcagccgattcacccattccttcccagagggtccggagttcccacccagcaggacacgcctgaccctcacctcgcgtgtcctcagggcattcccccgggtggatccgcagtgggggttaggggcactgcagagctgaatctgtaccccactgtcagctcaaagggcaaccctaagtggcccctacgcctccaatgcccactggactctttcccctatgaccatctctcctgggtagggcagagccggcctggggttgttctagagctggagtcaccagctccaggccctgcaaacctgacccccatgccagttcacaatccctttgcataacatgtaacactattatcctcacacactcactaggaccctgagaccacagaagatgacatcattactttccaaattgggagttaaagtccacatggggtagtgcaagggagagccccttgagatgtctgcatcacagagcggcctggtcccctcagccattccaggaggaaggggttctctttgctccccttgacgttcccttctggcgtgtgcatgcctttgccctctgcggggccagtgggcacccaccatgctttcccggtgctgcctcagtggtggctgccgcgagatgcccatctacttttcgtggaggcctcgggaccagtgtggtttgctggacgctctcctcacgtgatgccagcccggcgtgtcctctcctgggcccgtctgtggggcagccc

SEQ ID NO: 347154 - DNA, 766 bp, Homo Sapiens
attatcctttcaatatccatgggatctctagtgatgtctctcctcttccatttctgatattagtacagccagccttccatctttccggcataagctgcgtttccatttatccaaagacttgaggtcatgtgcttcacagaattccagagtttttgaggaccaggaacccaggaacagtttagctgagttgttcaagctgagagtctctcatgagtttgctgtcaagctgtcagccagggctgcagtcttctaaaggcttgactggagctgcaggtttcacttccagtgtcactcgcatggctactgtcacatgggcctctccataggactgctcattacatgccagagggctgcccccagaatgagtgatccttcccctgcacttgacagacatggagaacaaggctcagaagtgaagtcagtgggccaagcttacatcctgctaggcatgcaaagccaatcttcaaacccaggtccaactccacagcctgtggtcttccctctccaccaggttgccaccaattactaaggacatagaaatggtcattggatttgatgaaatttgggacccacagatctaaagcgaggtgttctgatggctgaaggtaccactggggaggaggtccactgcagggaaatccctcctgggggaaaattgccacgaaagaagagttccacatggctgggaaggcctcacaatcatggcgaaagtcaaggaggagaaagtcccatctcacatggttgccagcaagcaaatttgtgcagg

SEQ ID NO: 347155 - DNA, 1000 bp, Homo Sapiens
ttttcagcacggtacatgataaagattagaattttattctggttgcttattactcctaacaaaacagtgacttaaaacaaacattttattataccatacaaatttttgagtcagcagtttggaaagaattcagttaggcagttcttctgctctatgtggcattgactgggatcagttagtattattcatctcgtggctggtctggtatggaggttccaagatggctttactcacatgccaagttcctgggcagggtcactaggaagactgggatcagccgggccactccccctctccctgtagtctcagctctctccagatggtgtaataaggtagatggactttgtacacagtgactcaggacttccacagaccaaggtgaaagctcctcttaaaagccagaccctgaacaagcctgcctaaattcaagatgaagggaaatagccctcaaatctctccatagaagagtattgaagaatttgtggccattttaaatccactacaaggtataaaaatgtagaactgaaagtagagagaggcaactgacttcttataatgcccagtttctgaagtatttatgtatgagtacttccagaatattctcttaacatcttcctcatagcactgtaacatggctatgatttttgtatgattgttggtttatgtattagacttttgagctcctcaatgaggacaacacgtgtgtcttccttagattaatatctcagtgcctggaacatagttgatgctcaaaacttattgaataaataaattgaatacattagaatggtgggatcccgtcttcacaacaccagagcagcgttctgcttgatataatttccttctccagattcgtatcttcttatgaacgtaagagaagcttgatttaaatgtgtagaaatagtatccattataaatatttatgtgaatagcttttaacttttccctgttgtattagttctccactacataacaaattatcacatacttggcagcttaa

SEQ ID NO: 347156 - DNA, 1000 bp, Homo Sapiens
ttgacttttgcatccctttatttgtgtattgaaagaacaagcacctctatgggaactctatgccctgacagtttaattacttatcaagtttactctgggccggtattgatcattctttcgtgaaacgaattagatacttaaattaaaaacaaacaacaaaaccccccttttcacatagcatggcggcatgtcccttggtaacaaggttgagtggatccaccaaggcccagtagcttgcctccttttcgtaaggatgtaactattgtccaaccagaagagagaggcatggagtgggatgtgcaccaggatgaactcgccggaatcgtcaagagtcgttgtgtgaccctcaccttgacttcgggcgttttgtggggacccaactgctttcttgccgctgctctttggtctgagtttccctcagccaaacacttcacccacccatgaccctccaactgtcccgctacagcaggggatgggggttgtcttccgatcgacctcggggggcaaaggcaaaagtccctagctgcttcggaaccgctcctcgagtcctgaagccgctccacgcctcctcgcccaccacttggtccccgcaggacgtggcagtctcgggctccagcctggaaaggagcccgcccgggtgccgtcacccgccccgcgcggctcacgcccggctggcggctcgggtcgcctgtgggcgggacgcaaaggccgcgacttccgccttcctgcttccggtctggcggtgagtggggagtgggatccgatcccgtggggccaggatctcccaggaccctccgctctgcgcgacaaggggcccgcgcttgccaaggccgacgggcaggagtgaacgtggcctccgtgggtctgcagccccgatagggtaaggagggaagagtgagcaagggagaaacgtaaggaataagggaaagacaaaggaggaagtgcggacggccgtcaagtgctacccgttgcagccgcaggggccacgcgggtctggttg

SEQ ID NO: 347157 - DNA, 785 bp, Homo Sapiens
tctaatttggtacattttatttatttatttcatgcatcctgggaaacatatctttggctaaaagagtgaagaaaaacttgaggcttgatttacaaaaattaaagccacaactaggccttggatcaaggttgtgtcctgggcctggaaagcctcatccttcattggctcaaacctttcctgccccgaagaaaaagagttaagagtcttaagctaaagcagctcttctgccatgtgggactctgacttggttgaccctctcccagattgttgtaatcctgagtctggaacggatattggtctggttggggtgaaggctgcctcctgcttctgagtggcttgggttcttctgagcaggcctgggtgggggcgggagctgacactgatccagactctgaggcttcagccctgtcgggtagacaaaggaagtttctgctctcctggggctgagggacctcactgggtgagccatctggggcctgaatttctctttcctgatgacagatgcgcctgaaacctgttcggtctccaaagttggttggaagtgggtggaatttcagctctgagcaaacacagggagattccccatcaccaggccgcagcaacttcttcagggaagagctgccgccagttctcttcaggtgcagggaaggcactttgcagccagcttcattatctagatagaacgagatctgagagcaaagttctgcatgctctcccagctccagctgctccaggacctggaatggcccatcatctagagattgtggctcttccgctgtagtcat

SEQ ID NO: 347158 - DNA, 1000 bp, Homo Sapiens
gagatggagtcttgctctgtcacccaggctggagtgcagtggcgtgactcggctcactgcaacctccacctcctgggtttaagcgattctactgcttcagactcccaagtagcttgggttacaggtgaccgccaccatactcagctaacttttttgtatttttagtagacagcgggtttcaccatgttggccaggctggcgttgaactcctgacctaaagtgatctgcctgacttggtcccccaaagtgctaggattacaggcatgagccaccacaccccaccaggcataactcttaatattggctgaatactcaaggtaggatttttactacttattaatattttttgaagaaaactaattagcatgatcttttggttgggctaagagcatgttataaattaatattttattaattacattgaacagtagtgtgtacaataaatatcttggatatttacgaagctttaatgactgattccaaaatgatgatttcagagtaagcatgggaatctcatcaggccttcatctggagctcttttccaaagtaaatagttaggtaggtagtctgctctcatggaggtgaagcatagctccctgctaagcttgtcctatagtagcttctttccaaagggcgctatttttgtttgctggactcagaattggaacagaggaggaggagcgagatggccaaatggaaacctctactgattgtcctccccatagaacgctaaattgaataattgcccacacaaaaaagcaccttcataatatccaaaaatcaggtgagtgaccacggtacctggttttaacctcagatcactgaaagaggcacttaagaagatagaaaagacagccttgaattgctgacaccaccctaccctcaactcccagcagctgccatgtggtgctgagagaagatctgtgctcttggtggggagagtgcagtgattgtgggacttagcattggaactcattgctgccctgtcagaaaagcaaca

SEQ ID NO: 347159 - DNA, 1000 bp, Homo Sapiens
cagtatgcaataagtgatttaatagtggtagtttgctctaagtgtttttatgagagaaagggtatcttctccttgaatgattcagatagcctttaaaaagttaaaatctgaatcaggccttgaagaagagttaggatttgaaagggtgaaggtgtaagtaaactgcacgagcagaagtagataacagaaaacacaaggcatcttcaaagaatggtgaataatccagtttgggttaaataatgtaggcagagtatttatataaatacgatttgaactgtattcaaatagtagtatttgctgaactgttttctgaatagttttcattacgtggcctgtagctggcttccttagtgccaaaagtttactcagcatattataatccttggaaaatgaagcagaaactgcatgaaaagagatttttattttcacactccttcaacacctaaggctttctcactttgtgttacaactaaattggttgactaatgtcatgtaatctgagaaatacactgtacttcgttctagtagatatttaaggtccctttaggactgaaacttacagaaatcagattccaggaattatccaatctcattttgatttcggataaacattaatttgccttattccttaaatatggtgaattcattatgaagtctttggcatacttttaaagatggaagtacaatattgcaatattatacatatactttgtgtgccatgggtcatctatgcacagtaagatgaagcatgatattaatgacatctatttagtcacaaagaaaatttaaaatatcacctgaatgttcagtttttcccccaagtttaatcagacttgagagtttaaattaaaaataaattgtgttgtaggttctagtcacccaataacttatcggatccaggcttaattattgtttaatgttgcaaatttagcgcagaataattctttgagtaaagatcaagaaataattaaatatgatttgaaaaagtacaaagtccagg

SEQ ID NO: 347160 - DNA, 1000 bp, Homo Sapiens
tcacccgggcaggcatggggcggtcgggcttagcgccgcaccccgccggccagagccaccgtctctccagacgcggccccagcgcccactggggatggcaaagacgacatccggtgcgccgaggctgctcacaaaagtaagtcttgctggctgcaggcgcccgcatcggccagtgcaaaggtggcccagagtgccaagcggcggagccgagctttgagaagcacctttctgcttgcgctgggcagcgggctgcgtgtgactggccacctggcctcggctgggagcgcactggtggcgggcggcgggcaggtctctgacaggagcaggcgcccgcgagcagcggggctggtgcccagaacctagcgcagtgggagttcccagcgtggttgtcccaagcaccaaagccggtgtcctcaccccaggacccccctgacaggtccatggcttcccctttttagaggtgaatgtgatgctgggcatcatttcttcgggggaaaactggattctctggggctccatgctggctctcctagtcccacaccccgtgctttcatgccgcctgcgtgcttcccctgcctgctcctctcgcgcacggcgctcgccccgccccgcagagccgccggtcagaaccaccgtcctttctgcgcgaccccggtgcgcaggggcgaaggagacatccggtgctgctgccgctgctcggcaaaagtgaaagtcccgccggctgagggtgccctcacgggccagcgcgaaggtggccccgtgcgcacagcgccctgataattgctttttttcttgtgatgggcatcgggctgagcgtcgcaggccacccggcctcagcttggagagcattggcatggcaggtctgcaggagcaggcgccggcctggcagcgggcttggtgcccagaacccagccacagccggaggtcccaatgtggctgcccctcccgccaaagccgcctcccgaagtaaacaggacagccctttcggtgcgggttttgg

SEQ ID NO: 347161 - DNA, 1000 bp, Homo Sapiens
taagatttcatggaaagctgtgcgtagctttcagccacagcaatagtccgaggttctagttctctggtgccaataataaaatcatttcaaatgcaaataaaaagtcagtgttgaaaatgaccagtttagaaaaattgtgctatagttaccagctctcatacaaacagtgcctgagaaagtcagatcgcagtctataaacaggctatatttagatgacttccaatcccagtgtgttcccagacctggtcagagctaggcagcttcccacttggtcatttttgtccaacagggtcttgtccccttgtaatctgtgaatcctcccttttcccaggctcccagggagaccgtcgtgtggttgcccatcctgcagagccccacccaagcaggacggctgccagcccctgggcagtgctggacctcgggctgtgagttcagctgagctgcgtgatccagatgagctgcagattgtccacaggctgccacccagacgctgggtcacaggggctccccctgtgctttattgagactggtcagccctccgccactcctaagaaagaagatccttgacaggtcctcgacttcttctccatcactgggccatggtgtgtccagattttggaaagagagaaaagagaaaaaaaaaagtccatccaccatctcaaacgtgtctgcacctcgcttgcaggtggacaaaaagctcctgtgaggtttccgtttttggcatgtcatctctctagagacatggtccctctaaatgaggaggtgatctggacccctgctggaccgaggcagctccccactttgccgaggcccaagctgcccctgaggctgtggagtcctgctgccgcaagcaagttcctctgggaagaaagcagctcacggccacacaggcaggctggccctcgaggtcacagcggggagaatctctgggatactcattcacatactgtctaggcaggcccgaggcagggatcccacggcgcctccccagggctttgct

SEQ ID NO: 347162 - DNA, 701 bp, Homo Sapiens
cctctccccagggtccagaggattcactggcctgcagcagctgcctcttggggaaaataatactcttcgtcaattttagaatggcattgagagtagtagcttctaccaggttttcctttaggtgtggaggggacggtgcatgttttggcagagagcaaggaacataccaggatcatgggccaagcagacagtaaattcaggaaacacaatagagttcctaattcaaaagaagaaaagcaacaaatgtccatgtccattttgtcagcaccttgagagtgtcactgggttggaggctttagtgtccaggtgatgtatctctaatagcgatgtcttgggctagggtgatgttgtctaaggtgatgtcatctccagctgcgagcttctgaggaatgtcatctgggatgtgggtctgaggtaccctgtgcaactgcagaaagttggatgtgattaagatcttgtctgcaaagatagtgtgcaatggcaaagctgttgaggtccccatgggtagcctggctgtgcccggccaccccatgtagaggtccctcctcaaggcagcatgtttagggcaccgcctccacacagattcccttcccatcctgtggcccgcttctcatcctccacacctgtcttgctcagtgacgctatgctccatgcaggcttatgcttctggagcctgagaaccagcctccactcttctctct

SEQ ID NO: 347163 - DNA, 1000 bp, Homo Sapiens; identical to SEQ ID NO: 246659

SEQ ID NO: 347164 - DNA, 673 bp, Homo Sapiens
ttgaaatgaacaaatatttatttatcttttataacaagtaaggcaatgttgcttaaaggaagacaaacaaacataaaagattccgttgacaatgcattttttcatctgttcggcacaatgcttttgtcataatggagatgtgacagcaaactttccaggacattcagtcttcggcggcagcacttagggcagatgactggccgctcagattctctatcttgtttcaggacagtggaaaagctgcttatagatgaggccaaagcaccaggtaggtggaaggttcttgtatcggttcgaaccccgacagcgcgccaacagacaacacgaggcagtggggagcaacatgctgttttaatgagcgcctgggtgcaggcgtgctgaggctgaaaatggcatcagcaccaaatgaggatggggcaggggttttatagtctcctgtaaacaggaagtgtctcagtctgatgtaactgctacgtggtacctggacggcctctctctcggtcttcacagggtacatatcttccggccagctctcttcctgcttctgctatcttgctgacgcatgctgctagcacaagtggccttgcaccttgggactgggccttgggctcccaaagtgctgagattacaggcatgagccactgtgcccagcctgtccttgtgcctttgattc

SEQ ID NO: 347165 - DNA, 637 bp, Homo Sapiens
gggtggtaggtgagtgggtattgcgggctagtatccgagcaaaagatggtggcgcaggccgagttaagagctttaatcctgtgaagacatcttagtgaagagtttagagtgctgagagttgaaagcttgcacgtgggaaacgtgcggccggactgccacatgtactgaggttgagtcgtgacggccacaggctccgagttttggcgtgaggaaccgctgatcggccacgggcgccgaacttgctggcctccggcatgtgcctgagcggcggcggaaaaaccaccttaattggggcggagggttagttttaacagcaaagggcctttactaaaatggcgaaggccttccgtcggcgttgttttaaaatgggaagcctcgaccctgtattgaaactgagctgttcgaaggcggcgttgtgtgcaattcggattaatgaaggggaagggttttgtgtggaaaaacgccttggagtgtgacatttctgcgagaatgcttaaataccgatttcccgcaggaacaatggcgctgtcttcagtggcacagtggagcagctctgaagatgcaaaagatacacgaaaaaacttccagaacatctgggagaatatttaatggaaaatcgcttggttaaaacctgaca

SEQ ID NO: 347166 - DNA, 1000 bp, Homo Sapiens; identical to SEQ ID NO: 161548

SEQ ID NO: 347167 - DNA, 1000 bp, Homo Sapiens
ttttttcagatagggtctcgctctgtcacctaggctggaatgcagtggcacgatcacggctcactgtagtctctgcctcttgggtttataagatcctcccgcctcagctttccaagcagctgggactacaggtacgtgccaccatgcttggctaatttttgtattttttgtagagacaagttcccactatgatgcccaggctggtctcaaactcctaagctcaagtgacctgcccaactcagcctcctaaagtgctgggattacacgtgcgagccactgtgctcagccaagtcagtaattttggaagctgcattacacattttaggtgaaaagcaataattactgataattattcagtagctgttctttccatttctagaactatcataacagttcacatccttggacacccatgggcctcatagactcacagactctcagggctggaagggttctggtgctttgctccttcaactcccttcatgagtcttcctccgcggctgcccaggcacgtgtgatacctccagcaggggtctcattaccacccattccccttttcctctgtctaaatcagctttaaaagtctcatttaccctcttttgcatctctgcaagcagaggcacattttaggctactgcgccctaaatctcctctcatatccatccctggtcattcacgcctcttttgctagattttttgcacatcctttaaaaatcttattcactggcaaggctccagattttctgcaataataacttaaacattttttttttgccactgagtgctagactgacgaggtccttttttgatcagtggaatctgatgttgtgatatcattattgactcaggcaaatcatgaactgctagtaccagtgagtgcagctggtaagaataaagtaatgatggggccgagtgttgtggctcaggcctgtaatcccagtactttgggaggccgaggccggtggatcacctgaggtcaggagttcaagacgagactggc

SEQ ID NO: 347168 - DNA, 1000 bp, Homo Sapiens
gacttttaaattttattacttttaaattttgtttccatagtttacttttatttcaatggtttttggttacatggataagttctttagtgatgatttttcagattttggtgtacttgtcaccctgctttaaatgaatatgacttgggttcttctggcatttttattcctgtaaaataaacagtgtctgcacatcgctaattagaaaagtgttcgacacagagtgtggattccattgtcctcagaaaacccgtcagaaggaggagcaggtagggaaatgatgttcctggaagtgcagtcacttttttaagcttacacaactcctagcctgcaggactggatttgtaacctgaggctgcctgactctaaacccttttggctgctcacaggagcctcccaaagtccttgtttttgtctctgccttaagacctccgtggagaatcccgcacaaccaagctccagcaatggaagcgttctttgcagctgatcactttgatttctccagttaccacccaccccaagttcttgggcagcagaagaggtcataggacactcagctctcaacaatcccacatctgtgtgatgggggcaatgggtaaaccttacaccgtgacaatgactaagcctttaaattggagcgtccccaaaactgagcacataagccttgcttgttttattattccagaattttttactaggtgtccgctttgcattcagaataaagattctattctttcagcaatatgttgtagtgtctttagtacatttccaggctatagcacgtagactcaaatctgtattaaactggatctttgcagacagggttggcccaaataaacgtggaaaaaggaggactgtgttaaaacacatgcagtggaaactaatcaagggcgcgtacagacgcgggcagctacttgccaacaaccaggccgagcataaagtagtatcaaggaaaatcaaccaagactgtttcatattagaaggtggaaccgcctggaaacaa

SEQ ID NO: 347169 - DNA, 1000 bp, Homo Sapiens; identical to SEQ ID NO: 161549

SEQ ID NO: 347170 - DNA, 1000 bp, Homo Sapiens
gaggaggaggttgtagtgagccaagatcacgccattgcactcctgcctgggcaacgagagtgaaactctgtctcaaaaaaaagtagaaaaatgagccagacatggtggcacatgcctgtagttgcacctacttgggcggctgaggcaggagaattgcttgaacccaggaggcagaggttgcagtgagccaagattgtgccactgactccagcctggggaacagagctcaaaaaaaataagataaaacatagatacagaaaaccacaaaggaaaaacatagcatattgaatcatcacaaggcagccaccccttcatagccacacccggcccctggccaccactgacctgtgctctatcaccagaattccgttgtctcaggaatgttcaatgaatggaatcctgtgtggcctgagatgagtgtctttcatgccacatgacacccttgaggcccgtgcaagctgttggcatgtcaacagttagttgcttctcattgctgagtggcgattggtcctgtcatggtttattcagccatgtggtggatggctacttgtcttctaagccacttgccttctgatcgctggactgactctctcgccctctcttggtgcagccctcgggaggctcagtcacactctctgagagcacagccatcatctcccacggcatcacaggcctggtcacatgagatgctgccctctaccttgcagaatgggccattgagaacccggcagccttctctcataggtgacctcggggtgcatggcagggcaccgaggcaggcttacctcccattacagtcatcaccacatggctctgtcccagagccatgcctgtgtctttcagagaccacaggaggaaaacaaccacttctgggatgaggacagggcccttgagagaaggtggtgtttggctgggccaccgaaaacccctcgcccctgccagcacactcagtctcctctcgggtcgaacagagctctgcctgtggtcctgggtcccagcc

SEQ ID NO: 347171 - DNA, 1000 bp, Homo Sapiens
tttaattcatgatactttatttcaccccatatacccaaaatattatcatttcaatatgcaatcaatgtttttaaatgatgaatgagccagttcacattcttttttccatacagtcttctttacaatggggtgtgtatttcccacttggagaacatcctggtctggcctggccacactgcaagccctcggcagcctcttgtggtcagtggctgccccagtgagcagcacagctacagaggttcaggaaaaccaaccccaggagcgtggatgttcactgccttccttcaaccactccaggcaggtgcgtccacctttcctcctcattgcctcaccagggctgcaactgccgaacagccttttctcggcagcctgacagaatagctgtgtgttgggtttctcgcggcgtgagggatccctggcagtcggacgcggcagggtggctggtttctggggctgagtctggcccgacacaaaagaggagggaaaggagaaggagacggaaacaaaggcgcgggggaggacgaggaggcgcgcgcggtcgcggggcaaagcggcgatgcggtgcgggcgcgcgcagcctggggctcccgggaccagcgggcgggagcaggcggagcgggcagggcgatttgaatatcaggctctgccacactcggggcgccgctgacaacttcattacctccgcatataaaaatgactgccggggaatgcaaatagctcgcctgtctcagccgcctgccctcgttccgccgccggctgcaggcggaggccccgggagccgcggcggccggaggcgcagacgcgcccgcgaactctgacggaaaagcgggacccccggcctccgtcccgtgcgccctggtggttaaattggacgccagcatcccggcgccccgctctcgtctcgcctgcaagcgggcggcgggtgtgctgcgccctgctccccaggcctgcggccaccgggacaaggctgcgtcgctgtgcaggacccgcctcccgaacc

SEQ ID NO: 347172 - DNA, 1000 bp, Homo Sapiens
cttaattgggaaaagaacattcctgaatggattgaggtatttatttctttaaattctatacaacagtattgtgggccaggtaaatcatgctgttttctgctatcacactgatgttgatgtagaaatgataaataggaattttcattactcattattggggagtcaaaaccagtaacgtagataagtcttccatatttctagatgcaggtggcaaaactgaactatagtaattctggcaagacttatgtatgtctaactagaaattctctgcatccaatactacaaaacagggtatcttactgaaacagacattctcactgagaagttttcttttggacctttggatttttcagaaattttcttctggaatattcaattatgtctaaaaaattgctttgcgtttattttaatgataactgctcgataattaaatttcacatcacctagactggcagaaagacttgattgccttttttattttaaatcacacgtgcacaaattgtgatttaaaatataatctcaaataaaaaacttgcaaagctaaaattaaccctgtgagagaaattatttactcagatgaggagtactagtccttgttgtttttctcctgagcattccatacctcattttaacttattagattttattgtccattgtagcaactcagatgaactgagtgatacagagtctgagaggtaaggagatttttcttagcatgctacatatttgcagtgtttgacaagggggacccagtgatttgtgaacttgtgctgaaatgctggttctccccactgaccccatgaagtgcactgggtgaccctgtcatttgcccaacttttggggaatgtgaacaccaggtattttcaacggccagtctgtgcagggtttagctggacagtgtgttctgagagctgccacctggggcctggcctgagtgtcagccgtgctgagggccatctgctgctcggcagggtctcccatttttgcacaatggtggaag

SEQ ID NO: 347173 - DNA, 1000 bp, Homo Sapiens
actatgagcatatataaaaaagtaatgtttctaaatcaatctattattgcatatccgatttttaaatatgtatgcataattaaatttatacattagctattacaaatagatatttgactgtttaatctatcctcaaaatttatatattgaagctaccccaaaaaacatctttctgtatcttcgcattctgaaacagaagactaacttatagtcaagattgccttacaatgggatatgttaatactcaaattccaaaatttatactcaaatttgtaagtacacagccttctcagaaaactactttaaaacgtaaaatactcattgaggtgagccagttctaatttttttttaaatcaacaacagtattttacaataattcttaaaagtgaatcataatattattaaatgtttatgaatgtttacaaatgacagcatttttggaagaaacatgccttcacagctttgaacttcattaagaggttctattctggtgacattccagcaggtcttagtttctagtccaaataaattcattattcccatggatgtgcgacaccaggaggctatgattaccagcctggcgtggccccggcagccccgcgcagctgtttcctggggggcgtggcgtcgggggcccgcgcggcgcagtcctccttcagcatcccgaacagcagcagcggtccgcaggactcgcaggactcggtgcacagcagccctgaggatggcggcggcggcggccagcaccggccggtgggcgggagccccggcgggccgcgcctggtgatcggctccttaccagctcacctctcaccgcgcatgtttggaggtacggacccctctccacgcgcccgcgctcggttctcccgcggctgcacgtgggccgtggccgccggctatttttaccgttctccttttctccttccgccggggcgccgggggctgcttcccggcccagcccgccaggggctgcttcccggcccagcccgcgccggtctccatc

SEQ ID NO: 347174 - DNA, 740 bp, Homo Sapiens
tgatattcagttaacaatacctagccagtaggggtgttaaagattaaataaatgtgagaatgtgcctgttgcttaatcttcctcaaagggttatggactctcagagccagaagaaggtcctctctcctttgctcctcgtatgctgggatccgccacatcaacggcaacaggtgggcctccagaatttgctccagggtgtttggaagtcctgacaccctcctgatcttctctgtaacatgcacactttggcctgtgtcagtttgctggaaccacatcaagccggccctcttcctgggacaaaattctttctttttctctttttctctttttctttctttctttctttctttctttctttctttctttctttccttccttctttccttctttccttccttccttccttccttccttccttccttccttccttccttcaaaattacactatttctgttttctgctttcctagtttcctgttgcaccgtttttgatctctgcatggtttcactgtcatctagctttttgaaaaactcattttgtttgctctccttccaggtcctggcttcctgtcctggccatccaatcatatccaccgcaaacaggccttgtttctctttgtcactgcaggccagctctgaaccgtctattttcttccactctcctctctcgttccagaactctccatttggcctcatcacctcactgtcactctctatgtgtccactgccttccttaatcat

SEQ ID NO: 347175 - DNA, 757 bp, Homo Sapiens; identical to SEQ ID NO: 161551

SEQ ID NO: 347176 - DNA, 1000 bp, Homo Sapiens
aggaaggattggttcattgtcaggaaaacgtcagagaaactttctcaaagggaattacgttttgagaataaaggaagggggttccaagtataacagattgtatgggagcgagattctaccacgtgggaatgccatgtacaaaggtaaacaggtggcacaaagcacaggacatggtgtgttgatgtcagggatggttgaatcttaggatctaaggaaggagtggtgagagataaggctagaagttgagaagtttcttgtaatagcagacccaggattcattcttccaacaagcaattttctcagcctctattctgtcttctgtcccaagggcacgcaaactcaacactgcagtagaagcgtgggctttacggttatcacgacgtgccaataaatcctgcgttcttcatgttcaatgctggaaccttggacataattcctcaagtcttggtatgtttaactggacctcctggtgacaccaagaaggagtctaatttcaccaccaccaggttttttgttcacttgttcagcaaatatttagtgagcatacaatgattaaagagtaaacatggttcctgctgtcttggagatgactttgctccagtttatgggtgaggaaactgaggcccagagaaggtcaatgacttggccttgttcatccagatagcgattgaaggggaaggaattgagactttgctgggcttggctccaaaacaaagactgcttccaggccattatgctgtagatctctgggacaggatgatctatagggcagacctttccttgtgggctgggatcttgctcatggcagcagttgcttgtagtgctctctgaaaaggtaggacggttaggtaagcccatgaaggcataaatacctggcatgttgttcttgccaagggctgaaaactcaggcaaaagcagacacgcagggtttctcaaaatcaggcaacgttgacctatgctgtgctcaagagccaagcccacaattactgtttccatggga

SEQ ID NO: 347177 - DNA, 541 bp, Homo Sapiens
acctcggcctcccaaagtgctgggattacaggtgtgagccactgcgcccggctaacacccctttcttggcagccttcctgtccatatctggcctctctactcccctacctgggtttctgggatgacttgcacttaagtccttggagggaactttaagcagaaggatagaggagaaaactcagaaatggtgtgggaccagcagcttccccattgtctggtctggagtggaggtggtccagggatccggggagcctggctcaagcaggatagaagtgacatccaggctggccatcagggggtgcagttcagcagcagagtctccaggcctgctcacacttggactggtgcaggattctcttctggatagcctgtttagattgcagtaggacctgaagacttgaaattggtgttcagccctgggagaggggtctggccaggcttgcacagctgggtccaggctcaggactgaggtagaagcatagtgttcatcacagatctcatgagcaattccagcagtgtccactgcagatgtttttggcat

SEQ ID NO: 347178 - DNA, 698 bp, Homo Sapiens
cacaaggtgggtcatacccctagcatcctcatacctacctctcagacctcaaggcttccctgccccactggagatggcttttcttccccagagtcctcacaacccctcctgggtgtcatgtgatctacttgaatgctgtcaggcactagctattgagcttgtgccaggaccagaggccccagatgtgatgaactgaaatgatcacaccctgtttctgatgtaggtcacccgcacgccttatactccactcaagggtggacatccaaggggcaatgggggtttggggattcgttagaacatgggcagggattctttttgctgaggtacaggtgcattctgaatggggaagacgctggcagggagtgagggtccgcacatttccgtggggagcggagttgcccctgtgggacagcctcctcctgcagcatgtaagccacccctccagctgaccaccagtctgacttccccaagcagtggatactgtgtctatactggaagtgtctgaaggagggtcctcagagcagcccatgatagggttgaggaatctttaatctgaaaggctacaatccagaagtcactccaggcagagatgaggtctcccctgaaagcagggccaccacctctttggctcagagattcctggatgactcccccatgcatgacacttgccagatttgtcctttaccctgcctctgccc

SEQ ID NO: 347179 - DNA, 1000 bp, Homo Sapiens
aaaaatatattgtgaatcgtttatttttcagcctaaaaaaggtagcaaattctgacacatactacaacatagacgaaccttcaaaaacattatgctaagtgaaataagtcagacataaaaggaccagtacagtacagttccacttatatgaggtagccagagtagtgaaattcatagagtcagaaagtagcatggtggttgcccatggctggagggaaggggaaatgagaaattgttgtttaatggctatggagtttccgtttgggatgccaaaaaagtcctggagatggatggtgatgttggttgcacaacaatgtatttaatgccattgaattgtacacttaaaaacggttaaaatggtaaatatatatacatagagtgaaatacatagttttttgtgttatatttacatatgggtgtatacatatatatgtgtgtgtgtatacttcaagtatataacctgtgtcaccaccactcagggctagaatgccttcttagccatgtggtggtgtgtatctttaatcccagctactagggaggttgaggtaggaggatcacttcagccgcacctttggaggctgcagtgagctatgatcgtaccactgtgctccagcctgggtgacagagggagacccagtctcttaaaaaagaaaaaacagtgtatatatacacacacatttatacatatgaatgccttctttcctgtagcccaagctatgctctttgtatttatagtgaccttggtggagagggttgggtggtagacagaggtaagatctctctccccttgacttccaaaaccatcaggatatttaaatatttgtaacatttgttttctacctgtagatgttctccaagtgctcagtgggtctgagtcaggtgactttttttttaaacagtaaccaccccaggtgcggtggctcacccctataatcccagcactttggaaggccgaggcaagtggatcacctgaggtcaggagttccagaccagcctggcc

SEQ ID NO: 347180 - DNA, 1000 bp, Homo Sapiens
aacacaattattgtttatttatttagttttgagacagagtcactctgtcacccaggctgagtgcagtggtgtgataatagttcactgcagcctcaaactcttgggcttaagcaatcctcctgccttagtctcccgaggacctgggaccttaggcacatgccaccaagcctggctaagttttagggttttagtagagacggggtcttgctgtgttgcccaggctgatcttgaactcctggattgaagcgatcctcctgccttggcctccctcccaaagtgctgggatgacgggtgtgggccaccgtgcccggccccttcttcctttctgccacgacaccttgtgttcctgcctgaggccctccaacggcttccactgccccgcactgcacagtttggactggccacgtctctcgtgtccagcggccacacgtggccatcgctcctgggctggatggctctggtctagctagactctcggctttcgtttcttgaagcctccaaacatcctttcatacatgtcttcattcacaaaatgttcacacagtgatagtgggctcctgtgctattttcaacttcatttcgaggttgcagaggtacccctggggtgctgagccccgctccaagtcttcgcttagagttgatgcgtgagtgtccatgaaattatacaaggaaagagcttggcacctggcgccatcgacgtcgctgtaaatgtcagccgttactactactactaaataacaacgacggcgatcgctgcgtgcctgctggtgccaagccccggaggggccccggacacgcagcctgggtggggatgggtatgagggggcagcgctggactcggcgaaagtttcttcccctctccagtcccctacccagaggaatggccaaggcctttcccgccctccctgggtgccagggtcttggggaggggcgggaggcaaccagtcccgggcagacgtccggccacccgcccctgctgcgcgacggcccccctcgctcg

SEQ ID NO: 347181 - DNA, 823 bp, Homo Sapiens
ttaaccacagggccagcaggctggatcttgatatgtgtttctcagttggaaagattttggaccatagagaaatgtcttctcaattcttttaatttcattaaggtggtcatttttcttcttgtggcctctggaatgtgacacagaactcaagggacaggaaggagatgagttgcaggctgggacaggggtccctgccagggatgctggtgactcacgtgacggtgttgatgtgtggagtccggtgcctggtttggggaatgttcgtgggatatgttccaaaggactgacggacctatcaggtactggaggtgaatggtcaagtctgatctcagggctgacagtgtcaggcaaggacaggaagttggcattggtctcattggctgaggttgctggggacccagggggcaatgtgtgccaggacagatgggtctggggctaggaaggcaggtttgggctggcgacccgggcttgggaggcatcccaggtagacagtggttgaggctgtggaaatgacggcgattgcctgggatgagagtggagacagacaagatgggggttttgctttaagcctggggagcccacctcccaggttcaagcgattctcctgccttggcctcccaaagtgacctgcaatcccagctacttgggaggctgaggcaggagaatcgtttgcacctgggagacagaggttgcagtcagccgagatggaaccactgtacttcagccagcctgggtgacagagcgagactctgtttcaaaaataaataaataaataaaatagaattctgaattttatttttaacaattatttttgtaaagagaa

SEQ ID NO: 347182 - DNA, 1000 bp, Homo Sapiens
gctgggcatagcatttatttatttatatgtcttttaaagatggagtcttactctgttgcccaggctggagtgcagtggcatgatctccgctcactgcaacctccacctcctgggctcaagtgattctcctgcctcagcctcccgagtaagtgggattacaggtgcccaccaccacacctggctaatttttgtatttttagtagagatggggtttcaccatgttggccaggctggtctcaaactcctgacctaaggtgatccacctgcctcggcctcgcaaggtgctgagatcacaggtgtgagccaccacgctgggctgggcatagcattgtaacacagacaaagcacaaaatacttgggcaatatctttttacatttagcttgtctagactccatcctccattccctcatgcactggtgtggtgcagaccagaatatcacccacctagactgcagagtgtatttgggtggcatcttggctttctgcacaagacttgcctgttccccaccacatccccctgtttctcagggtccaggattccaggaggcagggatgtgggcaggcagggtaggtggcccacccagttccatcccacgctggggacctgcagagctggctgtccgagacagggtgtttggaccaacatctgggtttctggatttccatttgagcacagctggactacacaggctgaagctctctctgccgagatatagatatttccctggtgacgatctttcaagctgacatgaagacatggccacccactggaatgtcgtgtgtctgctgtggcgcccttgtaatttgtgaggcaggctcctgaggaatgcagtgcataagtgggaaatggtgggaagttctcccatcccccccggacgaaagtgctgcctgcgcaggttggtggacggtcctttgagcaggaagaagacatgaagcacattcctgttagctatgacagagaggggcagggtacacactggacatttcgcacccttccaa

SEQ ID NO: 347183 - DNA, 663 bp, Homo Sapiens
aacgttcatactaaatttattctgttacttaagagtgtttatggatttacattccatttgtggactaattttctcactggatcttctttcctgcagtaagaggtgatttgggtcctgtggaaggtcattgtctcaatttgtctggtgtttgcagaagagatgtctgcaaagtagtagaagatcaaattggtgccttttggaaatttttaaagtctccacaggtttccagaggtgactgtagctgcactgaaagtcactgcctggataactggcctggggtagttgcaggagtaggcctaaatccaggtgtgaagatccttgaactgggggtgtttctgtacctgttctgggactctgctccacttgccaacatttgagtggattcatttgtgttgtagtcaagattcccgttgtggcacaaggacacatgcactcgtgtccaactccaaatagtagcttcacatagtatgtcagcactctcccaccatcatctcttctagaaggtcttccgctggattggaaatggcctgctcaatccaggccaatatccctgatgaacattaatgcaaaaattcttaataaaatactagcaaacggaatccagcagcacatcaaaaagcttatccaccacaatcaagtcggctgcatctttgggatgaaagg

SEQ ID NO: 347184 - DNA, 1000 bp, Homo Sapiens
aattgtggttctttctggacaatttttattttcttctttatgcttatctacatttacacaataaaatgaggaaaatctataatagatgttatttttaggctggaaatacatgaaattttaagatattagagtatttttcatgcagtgaaagattaaagaaattaaagcaatagagacagaattccattaaaaaaaatcttacccaaaacattgattccatgggctgtgactatttcaacattctgaaagataaaactagaataaggttttgctgcattgtttgcaatagatttaattaaataaaaagttttatatgaaagtcagcaggccctgactatagaagaatcaatatttatgacacagtcccgatcttcttgtttattctttgtggtgtcattatgcagatgctatatcagattaaacatctgattaaactcaggcggttgggctgacattttttggtattttggaaaacagcaataatcatttttccccacaaaggaactagcaggctagaggttaaaatctgattttcaaagggacagaatcaacaagcagaaataaccttgcacccaagcaaggagtaggcatcacgaaaatgaaggactctttaatatgtatatcagctctttctcaggatgttctaataacattcttactgtaacaatcttacaatatgttgattagatttgggttaaaattttgagactactcatcattgaacaaatgactttggcaaatgatttaacttccccaaatctcagttccccatttgtaaaaaagacacaaaattgtttctgcctcattcggttattgtgaggattaaatgaaataattcatgcaagacattcataatcttagcaattatcattattaccatcattaacacatccagaaaagccaacttgctgggcaaaagttactatgataattgtcacagagaaggaatgcttctcagatgcagatgcccatggcagtgacagtagttcccaagggaagc

SEQ ID NO: 347185 - DNA, 1000 bp, Homo Sapiens
ttaacaagagaataaaacagtttatttgcatacaagagcttacaaaagaagtagtttcctaaaagttaaattagaagtttatatatctaacttaataggagaagcaagccgggagaaaagacttctataaggaaaacaaatggatttctttaggaaagacaaatagttttttgggagaacaaacaagagataagaaagtttgtgataacatttgtttatgcaggtgtgagaactcttttcatcttctttatggccatcaaactcccctggagaggggatttatggtagatttacccttggtcttgtttctgggagtaaagccactctcaagagaggatttatgccagccttatttcccagaagtggctgcttttaatcagaagaaggaagctctgagaagattcttttctgcatctgtggaatctcaaatgtcctcaactaaaaataaccataccaactcaaggattctttgtgggttttggtatttcttccattttgaaacatcttgagaagttttacaaacgagaagctgtgttggttgctgtagaaataagatttgggttagaagctgtgaggcaagagatctagaaagggtccagtaccatttctgtttccaatgaaaagggaaatttgtccattcaataacatcacaatgatggcagaaggggaagcaaacatgtccttcttcacatggcagcagcaaggggaaactagacccagaaacaggtggtctgttttgatctaggctgtattctaggtgtgaccttgggcatcctacagcatttgtaccaccttcagttggtcccatttcagagcatttctctttattttcaggaaagttttccactcttctcagtttttccattgtttcaagatgcatttttacagcaacagctgcaaagtcccattcctcagcctttttttcttttattggataaaagttattgcagtctaatacaatttttggcaaaccattctcagaattttccatctgcttacc

SEQ ID NO: 347186 - DNA, 989 bp, Homo Sapiens; identical to SEQ ID NO: 161553

SEQ ID NO: 347187 - DNA, 1000 bp, Homo Sapiens
caccaggggccatcttacagaatgactcccacaatgtttaattaatgctatttttattattccatttgtatatcttattccccaaattattctccattaatgctgctactaatttccacttctgtgttttgctgctgttccttctgccaggaatgccttcctctaaatatctatggttcccaatcctacacatcctttaaggccacactcaaatgccacttccatgaagctttgcaaattgcccccttacaggaagtactttccttctctgatgtccaaaagggaagagtttgataagggaataagggaaagtgacaaatccaggctattggatttaggccccctgagtccatgaagacaccgactctgtgagattccagaaacttctgtcatggctctgcttgttctgggctggctgagcacctacccatttgctaatccttagaactaggcttctctaataaactgatatgaatccaaaaattagagctcttctgaaggctggactccaaaagctccaataacatatgcagacaaagagctatttgccccacgtggagataaagcacttgagagggaaacctaactgtgggtggtgtgctcgtcttatgaattctcttgtgggtttgagaacttcatcttccaaaaaggctccatggggactgaaaagggccttattccaccccagaatacccttttctaataaatccagttgtcccaaaaggataaactacctaagggtgtccatgggtgtggtgggcaactagggaagagacaaagccaggagtcctggatccgaattgagccagttcagccatgatcttcagcggggggcatcaagtcaacttaggaggagaagaggaggaaactcctgggtattatccacccatactgggcactgaacatgatgtcattaaatcctcagaaaagcctggtaaggaaggtgatatttttcacattttacaggtgaggaaactaaggctcagtgaggtgaaatggc

SEQ ID NO: 347188 - DNA, 722 bp, Homo Sapiens
ttaaggggatttctcatgagctggcggatgccgaggacagtagctgggactctctggcctggaatcgctctgtgggacttttatattcttttcttcacatacatgaaagcactgtactgagggaaagggattagactcatctggggccagaactaggcctactgtgaacacggaatgggctgctttggaaggcttcatatagtccctggccggagattgtgaagctgaggccacaggtgagagatggggctgtaagcttatatttgtttcctgtggccgctgaaacaaatgaccacaaaatggtggttgaatgcaacagatatttatcctctcacggctccggaggctagaagtctgaggccgaaatgccgtgcttcctccagggattctaggggcgacttcatcctttgcctcttttagcttctggtagctgcagcattcttgggcatgaggttgcatcactagagctgcgctgcacgtcacattgcttcctgctcttctctgtgtgtctctcctctgcgcatcataatgtcctcaaggttcacccatgttgtagcatgtgtcagaatttcctttctctttaaggttgaataatgtctcactgtatgtatatacctcgttttgtttatccactcatctgttggtgaacgtttgggttccttccacctattggctaatgtgaataatgctgccgtgaacatgtgtgtaaactctctgagtcc

SEQ ID NO: 347189 - DNA, 452 bp, Homo Sapiens
gtgtgtgtgtgtgtgtaggtgtctggatctgacgctatctgcaggtaccggaatggtgttggaggacactcggctggtgtccgctgcagaactgatggcttgctcggtggcggggagacgtccacctgccacatttggccccagcagtcttgggagtctcctgtgttgatgtcttccgtgggcttcccaccccgaacacaacgaggactgtccaggtgtcagtgacggtcaccccgacctggtcccctgtccggcctcgccaggtcagcacccgccgcgcgcacagcagggccgggtggaaggaggccgggcctggccgtggctcaggcgccacctcactggggaaactgggaggtggtctcagcccccttctgggcctcagcttccccatctatcccaaggagccggggtaggcctgggcggcgcggggacccccaccgcgggctcgccga

SEQ ID NO: 347190 - DNA, 1000 bp, Homo Sapiens
gggattacagaggaaggagtcagtaaacttacaaagagatcaatagaaattatctaatctgaaaaacaggagaaaagattttttaaaaaaatgaacaaagcttcagagagctgtgaaacaatatcaaaacatctatcacttttgtatttgaagttccagaaggggaatggaaagatattagtacataaaacatttattttgaagaaataatggcagaaaagttctctaatttagtgaaagatataaacttatgaaaatcaaaaagtttggccaactccagatgggataaactcaaatcaaatattttatgtatttatatgtgtaaaattcctcaccagcagactttatttactttttttgagaggacacagcttggagtgggcgctcatgagttcccacccacgagccaaggtggacactcactctgttgctcaggctggagtgcaatggtgtgatcttggctcactgcaacctccacttcttgggttcgagtgattctcccacctcatcctcccgtgattataagcaacatcacgcccagctaatttttgtatttttagtagagacagggtcttaccatgttggccatactggtcttgaactcctgacctcaagtgatctgcccgagctcaggagtttgagaccagcctgggaaacatgatgaaacaccactgagtagagactaaaacacaaaaaagccgggcatggtggtgcgcacctgtagtcccagctgcttggcaagctgaggcacgaaaatcgcttgaacctgggagggaggcggaggttgcaatgagccaagattgcaccactgcactccagcctgggtggcagagcaaggctctatctccaaaaagaaaaaaaaaatctatactgttgaaaacaaaattgccacattacctggtaggattttcaatgcatgtaaatctgataacatgacaaagatagaatggggggtgggggatgtggaggaagagaccacacctcacatgaagtggcagag

SEQ ID NO: 347191 - DNA, 1000 bp, Homo Sapiens
gagggacttctttttaatttggtaggattttgactggttttgcaacaacaggtctattattagagtcacctatgacaaaaaaaagggttacctagataatgccaaagtcagcatttgtcctgggttcccttgtgtgatctgtttgaaccaagttttcttttcttctcccacttgctcagcagtttgggcttccattctagttcttttaccaagatttttgtgtgaccaagttgacttcattcggattgccttctttcaatttccttgtgaaaacactcttaactttctctttacccttagctgaaatgtttacgtagcttctggtgatatcttttcatgattttatgtctcttaaaatggtgatggatgtgacacttcataaaagtgagctttaaactgtagataactcttgaagaaaatgtcattttagacaattatatgcagtattatcatgtgtagattcatgtgaccaccatcacaagagacagaacagttctatcacatggatcccttgtgctgcgcttttacagccacagccacatccctttcttatcccctcaccccaacctgtggctaccactgttctgtcttccatctttgtaattttgtcatttcaagaatgtcatatgaatggaatcatatagaatgtaatcttatgaggttgactttttttcattcagcataattcccttgaaatccatccaagttgttgcaagtatcttcttcctttttttcttttaaaaatgttttatatatttagggggtataagtgcagatttcttacatgcatatattgcatcgtggtgaagtctgggcagttccttttgattgttgagtcgtatcccatggtatggatgtaccacagtttgcttaaccattcacctactaatgagagtaggttcccataggtccccatcatcacatccttgtagaggcccctctgagcagggatcagacagtcccactcctcctgggagaggggtacagccacatcctcaaa

SEQ ID NO: 347192 - DNA, 1000 bp, Homo Sapiens
ttaaatataactcccatccatttgtgttagcttaccagatttgtgcttcttgtgttttgctttttttttgatgatcaataacttattctggatctcaggtttgtaagacttgaatgcaagagaatgaagaccttcacgctttctctgtaagttttcattcaaaacatctttcaatttcttttttttctttttcttcttttttgccctcattttagttagtttgagtttcttgtggctctgtagtgactgctctaatagaatatcccttacaactttgtggcagttaatttctggatgatcactgtgacttccatttacatgtatttggcaagattttagagtattttcttttaatggactgggttcaatctttattctggaagcttcaccgtatttttcctgattttctataaaccttatttcacctggactaagaggctctccaaagccagtaacttcccctggactccttggtttctctaaattttctttacaacaatcagtttttttaatttcacaaggcctgcgaattctaatttcatagttggattttactcccatttcaacagagatgtcatgattatccaagatcattttagcaggacagcaagctggatcaaaattattttcctgctctttcttgaaggaagagggcaggctatctctgctacatctatgttctccattacttgtactaacatagtcacacttcaatttctccaatttaatccgaggtactctttgtattttaatgggtggaattggaaattctggggcctgaaagggtctctgtttataaatccgtacatctgcaccacagaactgtggaaaatgtacataagcattctccaaataatcataaccaagaataacttccctgcattcatggataggctgtccaagtacagcatcttgaacttccttttgtgtttcatacacaaagtcacaaagacccttaagtagccacactttttggtaaaaaggtagttcgtgaaaaggt

SEQ ID NO: 347193 - DNA, 968 bp, Homo Sapiens
cctgggtacctctggttcaggaattcatcttctaaagaccatggctcttctcctttctccaacttggagatcaccttgggtttagtaatgcaatatcccactgagacgaggtggctgtagttctccagcatcacatctctgtacagcgtcctctcgacagggcccaggtgctgccactcctcccgggtgaattctacagtcacgtcctggaatgacactgatgcctgagacatgttcattttctgctgctcctggaagagtgtagaggactgtggaggttcagcttcattaaagctaatgtcaaagaactattcagccgggtgtggtggatcatgcctgtaatcccagcagtttgggaggccgaggggggtgaactgctggaggccaagagttcaagaccagcctggtcaacatggcgaaatcctgtctctactcctcctgttcgccgtcaacctcatccacgcacattcctcttcccggcccgcaaccccgcggggcccggcagcccctacacctgcggacaggactcggcctgggcccgcgcactgggccggggaggagaggggagggccatcctggggactcctgagactgcctgctgctgtcctccgcacacaagcccgcccgtccccaggttcctgggccgcgcggagccctgtcaccgacgctctcaccccaggtgcgcagcctgggctcccgcgcagacctaaagactcggacaccgtgtccctttcaggcccgggagggcagacggcaggaggtggggagttcccgtaagcccgtgcgtccgaaggaagtactataattttttctgctgctttgaccggctgggagggaccttcggagcccagggatttcccaaattcccggaggttgtcagcatgaccacaaactgcgaagcgtggttcttgatgcgatcctcctgaactttctgccttcatccccttttcattctcataatctgtcat

SEQ ID NO: 347194 - DNA, 683 bp, Homo Sapiens
cttttctctctttaaattttattttttaaacttctcatatggtgctgcatgcccaagattttaatgtccagacactgaagaacatctactagcatcaacaccatccaggaaaacatgacctcaccaagtgaactaaataaggcactggggacaaatcctcctcctgaagatccgccactgcagcaccgccaggcagcagcatcccacctcttccgactcgcggcagccccacccaacccgggcgggacgggaccgaccccgagggtgcaggcgcgggttccctgaggtcccgggtctcccagccaagacctccgctccagaacccgagggctgctttccccagaggaaggacattttcttcgccagccacgaggaaatccgtccctgtgcaccctgtttcccaatgccaccgacttcgtgtaaactccagtccggaggacaggagagagacccaggcctcgccccgtggacaggctcggcgccacggctcccgtgtgtatccgtgggtgtgtcagggtgggtttgctcgtggtagtggtggggtgtgtctgggtgtccgtcagcccctctttcccgggatgaggctgccggggctctagtgccagggcggggcaaagcagagccttcttgcccctttggccatggcgggtcctcctcagaacaagcgacgatggtgtgagcat

SEQ ID NO: 347195 - DNA, 1000 bp, Homo Sapiens
agatggagtcttgttctttcgcccaggctggaggagtgcagtggtgcaatctctgctcactgcaacctctgcctcccaggttcaagcaattctcctgcctcagcctcctgaggagtgggattacaagcacctgccatcatgcccagataatttttatacttttattagaggaagggtttcagcatgttagccaggctggtctcaaactcctgacctcaagttattcgccctcctcggcctgtgaccagggagcagagattggagtggtgcaacccccagaagctggggtaaaggaatgctggcatgagtaaaggaatgctggcagcccccagaagctggaagatccacagaatggattctctctagggacctcagagtgagtgtggcctcactgtatttaggacttctagcctctagaactgttttagaatacattgctgttgttgaagtcatttagtttgtgtcaatttgttgtgatagcctagggaactaatataatgaagcatggagagagagagagagagagaggataaaaggtgaaaatcatgtgccaaaactaaagaaaagagatgctgacatttgtgattaaatagaataattgcactatttaagattaatcacttgagcctcagaggtgaaggctgtagtgagtcttcatggtgccactgcattccagcctgcatgacagagagagactctgtcttagggaagaaaaaaaaagattaaggtggtccagaatgcacccaaggataaaatgcaaagatgatcttgccccatgtatattttagcatactacttaggtactatttattttttaattatctcctttttacattttgacaattttaccccagtggtcaagccttgtattagaaaagacagaaagaaggaaaagaaagaaggcaggaaggaaggcaaggggaaagaaggggaaggaaaggaagtggaagggaaggggaagagaaggggaagagaaggggaggagaaggggaggagaacg

SEQ ID NO: 347196 - DNA, 1000 bp, Homo Sapiens
agttgtggacaaggtctccattgtctaagccactgtgagaattcaggtaaatcatggcccatcctgggacagttcctccacattcttgctactcaaagtgtgcttcatggactagtggcttcagcctcacccaggaacgtgttagaaacacagaatcgtgtcaccgccccagacctcctgatgcagaatcttcattttagtaagcgacccactgcccccgcgccccctgatgatttgggtgctcattaaagtttgagaagcactgttggagcttgccctgaagttgtagtgcgctcttacggatttcaaaccaaaaagcattacctctgtgaagccagtctggagcctggctagaccttctccaccacctcgggggcttcttatgttccagagtctaacactctggccagataccagggacctttcaccctcagaacctgtgctcacatgtggcagtgagcagtgcctgcacctcaaggcaccgcatcttcccagctacagtgggcctggctgctccagctgcgcccaacatgtgttagtaggggaattaaatacccctctcactcccagttttgtgtatttaaaaaatcctcggaagagagtggtatatgaggtttgaggcttatcagcagctgcagcagcacaggccacgtcgtagctgtgagtcatagacaagcatgcacactgtggctgcctgaggcctctgagctgccttcctcagtccttccctctgcagggcttgggcgtggcgaggcggcttcttcagcaagtgctgcggtcagcgtagcgggattcagagtgcagcttgtctgagtgtcctctgcttcaagttcacctcggctgtcatcccccagcagaccacacatgcccaggggaatgaccctttcttaccactgcgtcttcagactggggttgctttctctccatctcaccttctcctgtaccacctgaggtactaaatcttccaggaaaccttccttgaatgtcttctgacatccca

SEQ ID NO: 347197 - DNA, 1000 bp, Homo Sapiens
taagaacaactcagcaaaataaaattcctgtttattgttggacaacattgtttcatgcatatatcaaacaggccaaaaaaaaccccagcaactttataaacaaaaaaaggaaaaaaaagaagccttttatctctggcctttttaaccaaatcatataaaccaactacttatagtacagctaagtacatacacaaaaaagttactgcaatggtgggaataagattgtttttcaggggcctggccctttttttacaagtttttttttttttcctcctttgagattataatgaacatggtcacaccacaagtaaagtcagaagtaggacggagaacggtccgaaggctggtttggtcatccgagatcattaaaggtggctgaccctaacaatatgtacaaaaatataaaatgtaaattaaaaatacaagcaaatttctttttttaaagtacttttaagaaaaaaagcagggccttggaagttttggttgttttttcctcccctgttgcaaattcttacggtttaggttgggtggtggagagtgtgtgtcatctgtgggtggcactgcccatggtgggggggtaccgagctatactggaaggtgactacgtttagattctgagacaggaaatggagggtgaataggtcatggcggccttttttttttagtttaacttttccttttttgctgtctagtcatccttgtcggtcttctgcttcttggtatcgacatcatcatcctcatcatcttcagctgcccgcttgcctgtagcagactcagcttcctcttcatctccatcctcttcctcaccatcaccttctttttcctcctcctcttcctccccactttcttccccttcttcatctacctccttgtcagcctcctgctccccattttcctcattagcattcccgttagcaggggcgtctcttccattttccgcctctttcacaacttccttcttctcctttaagtccttggcaatgatttcagagctggtgtc

SEQ ID NO: 347198 - DNA, 671 bp, Homo Sapiens
attctttgaagtgctttattgttcccatttgacaggtgaggcgatctcaggcacaggaaggctgaatgacatttccaaagtcacctccttgtaagaggcagtgtcagaagctgacaatggacttgaccactatgctgtggtcccagctgctcaggaggctgaggtgggaggatcgtttgagctgaggtattcgaggctgcagtgagccacaattgcaccacttcactccagcctgagaaatagacctgatttttcccttgttgctgtgacaataggtgcagggtgatgctcaggacagccagtgggtgagtgcgtggaggaaggcatccaggtctcagatatgggtttgtgtcctgtgacctcacctttttgcagcactgcaatgagcatttcaccagcaggagggccctcaggtctggcgcgcacgcattccagaggccacccagaccatgctccgccgcctgggcgcccaagctgcagtcgccctctgtgtgcaggcagcagctgcctggcaacctccgagcccgctcgcgctcccagcatcgcagaaccagggccaggtgtcccagtggctgcagccaagccaggcattctgcccagcggcggctgcacaggagcagaaccgagaacccgccgctcaaccccacacggggtgactgccgagtgcccat

SEQ ID NO: 347199 - DNA, 869 bp, Homo Sapiens
tcataacagtatttgtccttttgtgactggtttattgcacttggcacaacatcctcaaggttcatctatgttgtagcctgtgataagatttccttcctttttaaggctgaataatattccattatatgtatatatcacattttcattcatctcttcatctgttgatgaacatttgggctgcttcaacctcttggctattgtgaatagtgctgcaatgaacatgaatgtgcaaatatctcttcgatatcctgctttcaattcttttggatatttacccagaagtgggattgctggatcatatggtagctctagttttagttttttgaggaacttccccactgttttgcatagtggtggtaccatctacattcctatcagcattgcataagagttccaatttctccacaagatcccatctttagaatatgcagcaattaactagggggttttcatttttggtcttttttgtttgtacaaacattattgtgtcaacatttacacagattttaaatttcagcctagacctggaagagtgttgatagaggaaggtgttaagaacatcaaccggaatcagctctagagatggagaggggttggcagaagctacctcacggatggtgtaggttctgtctgctccttgcgtttcagtggaggtgcacagagctccggggggcatcggggaccgcgggcccaggacgtgtagtagggagcagtgctgtacacttcctcggaccatagcggggacggcgggttccacacctgtcggggcagtagggactgagctcgtgcgcgcggaggatggattgctccaacctctcggtccagcgcgccggccgccgcgtgcgaacgtgtgtgcggcaggaggctcg

SEQ ID NO: 347200 - DNA, 1000 bp, Homo Sapiens
gagttggagtcttgctctgtcacccaggctggagtgcagtggcgcgatctcggctcaccgcaacctccatctcgtgggttcaagccattctcctgtctcagcctcctgagtagctgggaccacagatgcccaccaccatgcccggctaattttttgtatttttagtagagatggggtttcaccatgttagccaggctggtctcgaactcctggcctcaagtgatccacctgcctccgtctcccaaagtgctggaattacaggtgtgagccactgcacctggcccccattggactttttctctaactgatttgtacttgtatcaagttctggtgagtccgtgagataatatggccattctatccctgtggacactgaagctcagagaggttgtgtcccttgctcagcatcactcagttgtaagtgctaggactgggatccagagccctcacttttttgtttttggttttttgcttttttgagtcagggtttcactctgtcacccaggctggagtgcagtggcacaatcataacttactgtagcctcgacttcccaggctcaagtgatcctcccacctcagcctccccagtagctagaactactggtgcatgtcatcacgcctggctaattttttaattttgtgtagagacagggtctcactctgtttcccaggctgttctcaaactactgggtttaagctatcctcctgccttgggctcccaaagtgctgggattacaggcatgaaccaccatgcccagccaagagcccttgttcttttgggtgaggcagaacaggcaaagtcagagaggaggggagggggtgtcattaggagtctcatggaggggattgggtagcaaggctggctctgtaggtgttggcttgaggccctctcctgagatgcatccccatccctggtaccagccttgtttggaaccctccctgtctcccttgctttgtatgcaaagacacagaggtagagggctaggtatgaggtaggtat

SEQ ID NO: 347201 - DNA, 902 bp, Homo Sapiens
tgaaaatattccaaggtttattgaaaaaagaaaattaatctacagattcagaaagttcagtgagccccagccaagatgaatgcaaagaaagtcctatttaggcacatcatgggcagactgctgaaaatcaaagagagagaatgtggaaagcagctggggtgagtggggtgggaggagacaattatacataggaaaacaacgctgcaaaagactgcagacttctcatagaatcaatgaaagtcagcaaacaatggaacggcatctgctgggctttgtttttctgtgtgtgccagacacatttaacagaaaatccttcatccaacaaaaatgtccacctgtgcaggcactgtccgaggggttgggggcatagcccacaaccgaacaaagtcttgccctcacagagctcgggtgccacgatggatctgccagtgtcagtcccagagcggaccccagaagtgttcaggcgtggactcgcactgtctgacatttccatcgatggcctgcatgaggaatgggcggtgagcatcctccttccatctccagctgggggtggagggtgtgagcctgcccgccgagaggaagccagttacagaatcaaaatgactcaggctgggctctgtggtgcgtgtctgcagtcccagctgctctggaggctgaggcaggagaactgctctagtccaggagttcgaggctgcagtatgctatgatcatgcctgtaagtagccactgcactccagccagggtaacacagcgagaccttgcttctgagccagcaaaccttcgctgttgctcctacttgcttccaaaggcagttcagtgtctggccccactgtctttccagggtgtcctcctcctcccggaacacaactggctgcccaccggctgggcgcggtggctcacgc

SEQ ID NO: 347202 - DNA, 892 bp, Homo Sapiens
gcctcaggtgatcccgacctcaggtgatccactcgcctcagcctcccaaagtgctgggattacaggcgtgagccgccgcgcccggccggattttctcatttttactagaaggttctatctcctgggggtggggtgaggtggtgagaccaattcacctccaaggctctaagaagtgaagcaggcggcgagaatgtgcagtcgttgaggccagaggaccgggcctcagcttctccttaagcccctgagtcctcctctggggaccacccccttgtacctggaggtgaaaatgcccgcccaggagggaagggctggccccgggagagcccgctgcgaagtgagtttgcgcactgcggagcgggcgcgggtgactccagagcggccctgccagtccgcggggctggcggggagcaggttcgtgcaccgcgggctctgtgcatgcagaggcgggaagagcccccagcccggcagccggccccgcgggaaggcgcagcccgggcttccgaaccctgtgaacgcgcaggttcctggtcttccagatgggcaggaatcgtcctgcccgcccggggtgggaggccacatgggggcactgcgcccgggcgcggccccaggtgctttccaaatgcccactgccgctctcatccgtaccagcgatgatcaagaaggggcctggtcgcccggggaggtgccccggcccgaatcgactccggagacaacgccgggcgacgccacctgcgcaggtcccggagggccgctggtgtcccaacccgaggcagccaggctgcagctcgctaggtggggtcctggggtgcgggtcctcggtcctgaacggtaggcccaccgtgcctcctcgcgcggggccgcagacctgtcctggccggtctgcgagagccat

SEQ ID NO: 347203 - DNA, 1000 bp, Homo Sapiens
aagacttgagaaggcgcactttattgacaaagtaaccttgggagttgaaagagctgggttacttattactttcctcaagataagggagcggggacctcgccatgcccttggaagaaccaggaaccaggatcccgccgaggcaaaggctgatcccgggcacttctgcgggtgctgcgttacacggggcgagacgctgcccgcagtgcttcctgggccattaggtcagaaaagttaatttcctgatggccacatagtctcgtgggacattgtattcttcagctaatctataaaatgatgtttatttttaactgagctgtgtttgccacactcatcactgcacaaactgtgagcgcatggcttgggaattttgccagcaagtgcatgtgacaacatggccaggatgttgacgccaccgagggaggcacagcctttcgcccacccaacccctaccccccagatcgctagtccttcttcctccatggctccgttttaagcgggcacatttcacagattaaagactacatttcccagcctcccttgcagtgaggtgggtcgtatgactacgttctagccaatgggatgtgagcagctgtggcaacacaacttttgggaggcatccttgaagaagagggccctgcctcctttctgctggctggagtgcagatgtgatggctggatctggggtgccattttgagccatgtgaacgaaaagcctatccatgaagtctggggctccctgggccacccatcccagcttcattgggctgagaagtacactgtgttttgacaccactactatttcagttttgtcatttctctttggaaagtttatgggatattttgggcttcattcctgtgtgggttcttgtctgtggggccagcagatggcagtggggaccttgtttgcaggctcacagacctgaggagcgttttatccatttaaacacatagcgggtgtgaaccaggtctccaggctccattctccgagcacgcgagcgtc

SEQ ID NO: 347204 - DNA, 717 bp, Homo Sapiens
tttaaacaataggtatttatttcccagagttctggaggctggaagtctgagatcaaggcattgcagggctgcttcctcctgcagcctctctccttggcttgtagatgccatcttctccctgagaactcacagggtcttccatctgtgtgtgtctgtgtcctcctctcctcatttcagccagttctgtaggctgtacaagaagcttagcaccagcatcttcttctcaagaaggatcttgaggacctcaaggagcttccactcatgacggaaggcagaggggagccagtgtgtagagatcacacagagacacaggaagaaagagagacgggttggaggtgccagactcttctgacaagcatttagttccacatggctggggaagactcacaatcatggcggaaggcaaaggaggagaaaaagcacatcttccatggcggcaggcaagagggcatgtgcagcggaacctggctacattcccatgtcccctctcgccacctgaaaggaggttacagaagtattttgcccccattgggagattgagtatacactctgtgattctcttcatgctcacagtttaaaaaaaaaaaaaattgtatgtcttttctctgattaatcttcctcatgatgagttgatttgcagtaagccccacaagggcaaaggacaagatttcccttgggaagccaaaatagctgctaggcgacaaactgtcagggaag

SEQ ID NO: 347205 - DNA, 676 bp, Homo Sapiens
agcgggtctggttcccggacactcacagccttagtcggttcttgggatgggaccgggccggaggaggtcgagacttttctaaacgctagccccaaagtccggttggaaagcaagccaaccagagctccgcgcggcggggaggcgcgggggcggggacgggggctggagcgacgaaggtcccgcctcggccaggcctgctgggctcccgacgctcgcgggagcagcgggaaaccaggttccgggagtggggcgaggacgcccctgccaagccccttttacgtcccggcggtcgcgaggaggtcccccgggcgcgaagaagacgccagcccaccccagccgccggggagatcgcccaggccgcgctcagccccgcccctggctctgcccccgccgcggagcggaaccctccaagtcgcggcctgaggaggaaggaaaagggggcggcccgggagagccgctgcgaaatcagcaacgggcgggaaccaggttgcctccctgagtcccttctctccccggccggctgccaaccacagccaaggccagagaaacaggcccttctgccgcggccacctgggcgccttggacccgccctccggactcgcccccgcccctgccgcggagtggaacgtttggaacccagggtgaggccagcttcccgtatttggggatcccacat

SEQ ID NO: 347206 - DNA, 1000 bp, Homo Sapiens
ggtactattatgacatccaagaacactaacagtgattcttggcactctattagaagtgtatgcatgccaaatatgcttccactgattccattcttctttcatttattcattcaacaaacatttgcccagaccagggatgcaggggcagaatgacaagctgggataatcaaagttcaactgctatggttcaaatgtttgtctcctctgaaactcatattgaaattgccattgtaacagtattaggaggtggggcctttaaaaagtgaataggtcatggaggctccattctcataaactgattaatgctgtcactgagggaatgggttagtcacctcaagagtgggttgttataaagtgagcccagtcccttgtgctttctctttgttcatacacttgcttgccctcttgtcctctgccatggaataatgcagcaataaggccctcaccagatgctggcaccaagttggacttcccaatctccagaactatgagccaaataagcttattttctttataaattacccaatctgtgatattctgttacagtagcagaaaatggacaaagataccaactctctaaaaaaattaaaatgaaaatcggactataaaaatctgccttgctattcatcaggatggaagaacagacacatataaagccaaatgcaaaattcacaggaaacattatttcttctaaggacaggctgcagttgtaatgccataaagaacccctactttaagtgcctattgctttcttggtcaatgagaaactttgttctctacaatcatagactatcagaaactttgctgtttgaaatgatatcagtaagagggaaacatctgattctcatgggagattctaagtcacttccagacagagaagcaagattcaattttcaacccaggtgcaaagctttaggcaagagttatctggggacacaaaattctacatctaaattgtttccaaggaaacagcactctgggttcacttcacagtccagac

SEQ ID NO: 347207 - DNA, 1000 bp, Homo Sapiens
gcaatggaaatgtacggggtattcttagggatactgtccatttttaagaaaagtccattaccaagatataacaaattacataaagttaactatcatatgatatttataaagcatactacacatatatacaagtttagaaaaccaatcgactgtgaatgaactattgtgaagtgaggaaaacacgtattgagtactgaggtcaagaaagagtacattgcagttctagaggtcttatatgtatttcattgtgctaaagacaccaaatatgaaactctacataatgtatgattccatttgtagaacattcttaaaactggaaaactacacatacagaaaactaatcagtcatttccaggtctgtggattgtgagaagtgtttaactacaaatgtgtgttatttgttattagcaattttgcccctctttattttgaaatgtaacatacatagagagaacctcacaatatgtgtgtgttgtttaataagtgattatcaagggcacctctacagaaacacccccatgtcacagaggagaacaccgccagcattccccaaagctcctggggtgtctctgcctgatctcagcctcattcctccttcaagaggaaaccaacacatttacatttgtgatccttctttcctcttttttctctacgtttttctgtcctatgtcctatattacattcttttaatactacagtatgcctgcagacgacatgttcctaaatctagaaaaccacacagtctcagccccaaagctccttaagctgataatcaacttcagcaaagtctcaggataccaaatcaatgtgaaaaatcgctaacattcgtatacaccaacaacagtcaagcagagagccaaatcgggaacacagtcccattcataattgctacacacaccaagatacccaggaatacaccacaccagggaggtgaaagatctctacaagaagaactacaaaatactgctcaaggaaatcagagacgtgacaaacaaatgga

SEQ ID NO: 347208 - DNA, 1000 bp, Homo Sapiens
cccactgaaaacacgtttccatttgtgaaaaaaaaaattctcccaaaaaccaatcaaggactacattgtgaagagaaaaaaaaaaattccacaacatcttcacagtcaagtttttaagcaacccgaatagcttgcatgattcccatgagccttgggaactcaccaggctattatttttaaaggacctttatttgcatctcccctccccttagggaacaaggtgctgggaggatgcatgccccaagttaacactcctcagagtactgtcatcaacagattatcttcattttccttaatacgctacaggtgtctccattctgcaagagcagcaagtcccttttttttttttttttttttgagacggagttttgttcttgttgcccaagctggagtgcaatggcgcgatctcgactcaccacaacctccgcctcccaggttcaagcgattctcctgcctaggcctcctgagtagctgggattacaggcattcgccaccaagcccggctaattttgtattttcaatagagacagggtttctccatgttggtcaggctggtctcgaactcccgacttcaggtgatccacccgcctcggcctcccaaagtgttggattacaggcgtgagccaccgcgcccggccgcaagtcccttttttcaaaagaaaatatcaatcagaggactggtcaggcaggggaaacctgcgagtcgctgtcactccttcggcctcagcacatccccacccacctaggcggcatacgcgccaccagcagcatcccctggaaggctgcagaagcagcgctgggcccctagcagttccagaaaaaaagtgggaggtgatagggcaccggcagtgtctggtcttgggaagacgcctctcacctagctgaggctgcgcgccagcgggaaaggtccgactacctctgatctgcgttctggggacggctggaccccaatgcgccccctgcggcaacgcgactcccgcgttgccacagggtaggctgc

SEQ ID NO: 347209 - DNA, 1000 bp, Homo Sapiens
tcaccccgagtggttgcagcaggtggcaggggcaggtgagtcagcccgagtggttgctgcaggtggcaggggcaagtcagtgaccctgagttgctgctgcaaggtgacgatgctgctgcaggtgtagatgatggtcttcagtgattgccacttgtggtgccagaccatcaggtaaggccagacacagccgggcagcctggcagcaaggacaacgaaacctggagctggtttatcggtgacgagtggaatctgtttcctgaagagcctgagaaggcaaagagcctcctctccctttttctccccgatgcatttcagtgcaggtctgctgtgctgcaccagctgcgtggctgtgtttagggactttcgagtttttccacctctgccacattctgcaaaccccgagaagtgcagcccttttgggtcatgatggtgtctggttcccctgaccctgctccctgcacggggcagctcagggaccttgacatctgggaagagaggctgcaggggaggggctggcgggcggctgggggtccccgtagtccggctcttttccctcctcacacactgctgtctgctccccgcttgcctggccctgaggcgaagggcccaggggtcgctggtgaggacgggctgcagctgggctgtcggtcatgattgtcatcatgatgatgatgatggtgatgatgatgatgatggtgatggtggtgatgatgataatgatgatggtgatggtggtgatgatgatgatggtgatggtggtgatgatgataatgatgatggtgatgattattgtgattatgatgataatgatggtggtggtgatgatgattataatgattatgatggtgatgatggtgatgacgccttctccaagcaggagagagcccagctctgctccccggggacacccagggccttcaccccaaatagcggatcctgtgggacccatagcactggggccctggggcactgggcactgggcctgcgtggatttcccagc

SEQ ID NO: 347210 - DNA, 330 bp, Homo Sapiens
tcagattttggaaacgagctgaggatagcggtgcaaccagagggtgctctggtattcattgtctagcaccaagatgctcagatcaaattgtttgccgtccttgaagaacacattgtggcatctcccctcacacttccaggccccacacacatggattctgctctcattaatgctcacaaatgagtcattggtaactcccagtccccaagatccccaccagttctgccacccgggatccacactgacacacatgggaagatgcacagctgcttcatcagaggccctgctgtgtaaggaggaaacttcacatggacagaaggccacgtgcat

SEQ ID NO: 347211 - DNA, 1000 bp, Homo Sapiens
tcatggagggccgtgcacgccgccgatgggctttgcagacgctgacacacgtgagctcatggagggccgtgcacgccgccgatgggctttgcagacgctgacacgcgtgagctcatagagggccgtgcacgccgccgatgggtgctcacacagtgccacaggaacaccttggtgcctgcctggcatttcgtgggctttctgggcctgcagcctaccctggcttctggaagcttccctcaggaaaaggcggcctgtgggggaggatgactggctggggtctgttggcaggaccaccgttgtggggcttcctggaatgttcctgggctcaagcaggtgcctgcccaggggcattgcaggggccactgggcctggagccccgtggacgttgggtgggaaaagccactggtcccttctgacacaggcgtcttctgcagatgctgagctcacgccccttatggtcatggtgcagcaagccaaggggaaaatctccagaaatacttgggcttttggatcacacagctccttctgcaggaacaatccgttccaggtcacaagtgcatctccatagtctccatattctctggggacagcctcgctgaaatgaggtggcttctctggatgtccgttcccgcacggtgtgggtcgggacccggcggaggggcccatgggccgcagctgcccagtgcatgggaaggagcagccgccgggcccctgggtccccttcatgaccccacctcggtggatgctggtggcaatgggggcggctgcaggggcggtgagggccggagctggggggcggctgcaggggcggtgagggctggagctgggggcggctgcaggggcggtgagggccggtgctggggggcggctgcaggggcggtgagggccggtgctgggggcggctgcaggggcggtgagggccggagtgggggcggctgcaggggcggtgagggccggtgctgggggcggctgcaggggcggtgagggccggtgctggggg

SEQ ID NO: 347212 - DNA, 1000 bp, Homo Sapiens
ttaggggtcaccttgtacctgcagatggccctgaaagtgccctggagacaacacctgattccaggatgacgtcagcagaatgatggtgtcactcagcccgaggcttatgtccattgcaccacagccctgaagtttgacaaagaaactctcagagcccccattatatcgggcacgaaacacgttaagtgtactgcccttgcacacgatgtgtgccacccacactcgacagtaagtgtactgcccttgcacagccacccacactcgacagtaagtgtactgcccttgcacagccacccacactcgacagtaagtgtactgcccttgcacagccacccacactcgacagtaagtgactgcccttgcacagccacccacactcgacagtaagtgactgcccttgcacagccacccacactcgacagtaagtgtactgcccttgcacagccacccacactcgacagtaagtgtactgcccttgcacagccacccacactcgacagtaagtgtactgcccttgcacagccacccacactcgacagtaagtgtactgcccttgcacagccacccacactcgacagtaagtgtactgcccttacacacaacatgcaccacattcgacggtaagtgtactgcccttgcacaggacgtgcaccacacacactcaacggtaagtgtactgcccttgcacacccacacacactcgacagtaactgtactgccctggcacacccacacagactcaatggtaagtgtgctgcccttgcacacccacacacactcgacggtaattgtactgccctggcacacccagtcgacggtaagcatactgcccttgcacactgacacgcttgatggtgtgctgccctcacacacccacacacactcgacagtgtgcttcctgccctctcgcccagcctccaacttcttccccgtcaaccccacaaggaaacacgacccctgtcgtgcactggattgagatgggtgggacgataatgatttt

SEQ ID NO: 347213 - DNA, 945 bp, Homo Sapiens
tcactgcaacggaggagggttaggtggatcaggaggagggtcaggtggatcaggaggagggtcagttggatcaggaggagggtcaggtggatcaggaggagggtcagttgggtcaggaggaggtggatcaggaggagggtcaggtggatcaggaggaggtggatgaggaggagggtcaggtggatcaggaggagggttaggtagatcaggaccaggagtgactgcagggtagacccacgacaaccgcagaactgtcaggggagatagagtgaagctgaggagcttcatctggcaaaggcgagctccagcagtcagcgtttcggccgagttctcctggtggtgcaggacaggggaggacatgagcgccgccgtcggcagcagaatcgagaggggacacccagaggccagtgttggggctttggaaacaggtgagatgtctgagcatgtgctctttgagggcaggaacccttgtttctcatcctggcttccaaaaagcacgacagacacactggtagagacagtcttaaatatctgtgggcctttcctcgcccacgtgaagatgagttttccaggggagcagagggacggtgtcacctctgtcacctctcggaggggggtgacaccgatggctccagaagagagttgcaacgtaaactcagaaagtgcagaatccacagccatcgtgctcccggttgtgtggcctaagccccgcatgcagcaggcggcagacagtgaactgtgcacagaaatcagtgcaggaagacaaacaccagcccagagcagggcagctgcaatgggaagctcgcctgagaggagcgggcattgccgcaggtcaccaggaagccctccttgggcgctcgcctcagagcccgccaggaagctgtgcgtctctaggaggatcccactcagctgcagcaaagccctgcgccgggaagggagctccat

SEQ ID NO: 347214 - DNA, 1000 bp, Homo Sapiens
tcacgcctcatctggtttgatgtagtcttttgtagtgagttcacaaatatattctgaggtttccagtgcgatggggcggccgttgagtggcgtctgggatcccaggtagagtggaattcgaggtaaacagcagaacagttgcatgctcaggtacatttgagttggagataaacagcagaacagatgcgtgcccaggtacacttgaattcgaggtgaacagcagtatggatgcatgcccaggtacacttgaattcgagataaacagcagtatggatgcatgcccaggtacacttgaattcgaggtgaacaggagtatggatgcatgcccaggtacacttgaattcgaggtgaacaggagtatggatgcgtgcccaggtacacttgaattcgagataaacagcagaacagatgcgtgcccaggtacacttgaattcgaggtgaacagcagtatgcatgcgtgcccaggtacacttgaattcgaggtgaacaggagtatggatgcatgcccaggtacacttgaattcgaggtgaacaggagtatggatgcgtgcccaggtacacttgaattcgagataaacagcagaacagatgcgtgcccaggtacacttgaattcgaggtgaacagcagtatggatgcatgctcaggtacacttgaattcgaggtgaacagcagtatgcatgcgtgcccaggtacacttgaattcgaggtgaacaggagtatggatgcatgcccaggtacacttgaattcgaggtgaacaggagtatggatgcatgcccaggtacacttgaattcgagataaacagcagaacagatgcgtgcccaggtacacttgaattcgagataaacagcagtatggatgcatgcccaggtacacttgaattcgaggtgaacagcagtatgcatgcgtgcccaggtatacttgaattcgaggtgaacaggagtatggatgcatgcccaggtacacctgaattcgagataaacagcagtatggatgcatg

SEQ ID NO: 347215 - DNA, 882 bp, Homo Sapiens
tcagctcaggtcaaccctcttcttccatttcctcacttcctcttctctgtcctgtgcccgctgctggtcggcgctggggctgctgccgcttcctcttctctgtcctgtgcccgctgctggtcggcgctggggctgctgcggcttcctcttctctgtcctgtgcccgctgctggtcggcactggggctgctgccgcttcctcttctctgtcctgtgccccctgctggttggcactggagctgcagccgcttcctcttctctgtcctgtgccccctgctggtcggcactggggctgctgcggcttcctcttctctgtcctgtgcccgctgctggtcggcgctggggctgctgcggcttcctcttctctgtcctgtgccccctgctggtcggcgctggggctgctgccgcttcctcttctctgtcctgtgccccctgctggtcggcgctggggctgctgccgcttcctcttctctgtcctgtgccccctgctggtcggcactggggctgctgcggcttcctcttctctgtcctgtgaccgctgctggtcggcgctggggctgctgcggcttcctcttctctgtcctgtgcccgctgctggtcggcgctggggctgctgcggcttcctcttctctgtcctgtgccccctgctggtcggcgctggggctgctgccgcttcctcttctctgtcctgtgccccctgctggtcggcgctggggctgctgccgcttcctcttctctgtcctgtgccccctgctggttggcactggggctgctgctggggcctcagtggctttgttttctcattttccagccactggtctccctcgctgctctctcggagcttcctcagtctcgtgtcctgttctttctgtcgaggcttcat

SEQ ID NO: 347216 - DNA, 1000 bp, Homo Sapiens; identical to SEQ ID NO: 161555

SEQ ID NO: 347217 - DNA, 1000 bp, Homo Sapiens
ttgtttcattcattctttcaccatttattaaaacctagtatacgtcaggtgatgtacaaaactgggaatggaaaagagtaaaaacacttcctgtcttctcagcttcctggaggtggctctggaggtctcagagcccaaaagaaggaggaggactttgctggggggatcagggagagaacggcattcaaaatcaagggcaactctgcatttgagaaaactctgctcctttccagaactcccgtacaatgctcagggtgactggtgcacgggagggcagggcacggtggtggctgatggtagattttattgtgcaggcgaagggtgcactgcagggttgcagcacagacgagcagttataactactgacttcgcatgcaccgcgtgcccggcactggtccggcccattgtgcctattcagctgtgtcaccctcaccgcagacaacactgtatgtacagagaaggaaatggcagagccaggcggggtgactttccaaggcgcgctactggcaagcaggaatccacgtgactccagagcacacactgttaactcctcagccggccagcagccttggccttacctgggagcccctcagaaatgcagaatttcaggccccaccccagatccagggattcaaaatctgccttttaacttgatctaccagagattcctacacaccagaagtgccagtcgagtaggtcactctgaccgccaggaggatggcctgaggcggggcagtggctgggaattagcaagacaaggtggaggactgctgcgctgccggagaaggggtcgggcccaggggccacgcgctgccgtgtgctgaagcccccttctccctcccttggccttcctgtctgcatctcgactgcacgcttgttaggaatggcccggtgctccccgggcgaccgcacagatctagcatggcggtgtccatccgccagcggccagtgtggatgggctcagtgttttgctcatggatcattaactccagcagtggag

SEQ ID NO: 347218 - DNA, 546 bp, Homo Sapiens
tgaagaaaagaggtttaattgactcacagttctgcaggctgtacagaaagcgtggctggggaggcctcaggaaactgacaatcacggcagaaggcgaaggggaagcaggcacgtccggaagcgctcctccagcagggacagctcactgatgaggtcggtgatggcgttggtaaaggcttcctgggggctgtagtccggcgtggtctgcactcggatgatgatcttgtgctccaaggggtgggggactttgtagccagcaaatagcacttgcgggtcctttaggtcacactgtgatttaatgatgtttcccagtgtgtggtcttctttgttgatggtgaataaacaggcattgggtaccttggtgtccttgttaatggtgatcttcttctcgccctcgaagagcaagaacgactcgaaggctggaggggcgttcacgctcccgcctccgttgcgtccagaccccaagtgtctgccgccgccgccaccagagcccgcccccacccgcaccccggcttggctttcccccgtgggcgcttttcggcgcat

SEQ ID NO: 347219 - DNA, 1000 bp, Homo Sapiens
agaggccgctggaagggaaaaatggggcctggaaaggccgttgtgaggaatgagctgggcctaaagaggccactggccggcaggagctgggcctgccgaagtggccgaaaggcaggagctttggactggggaggccgcagtgaggcaagagctagctgggcatggagagtcctctgtgaggccgaggccgggcccatgcagaccttcgagaggcaggaggccgggcctgccaaggccgactggaggtcaagttctgggcctgaagaggccaccaaaagtcaaaagcggggcctgggaagaccgccgagagccatgagctgggctgggccgaaagaggccactgggaggcaggaggagctgggcctggagaggctgactcgaggaagttttgcacctggagaggccgccgagaggacggagctgggcccggggaggccgacttgcagctcttccaggcccacttccaggctgacctgaggatgacttgggcctgcagaggccaccgggaggctggagctgggcctggagaggccgacttcaggacgatttgggcctgcagaggctgccgggaggcccaagctgggcctagaggagcccaccgaccggaggccgtttggggcctggagacgccgtcggagggcaggagctgagcctggagaggccaccgtgaggccggagctgggcctggggagcttggcttcaggaagttgtgggcctaccagggccgctggaagctgggcgggagctgagtccaaagaccttgttgggaggccggagtcgggcctggagacgcagccgggaggaagagctgggcccggagaggacgccgggacgctgcaggtgggtccggagaggccgacttgaggaggttctgggcctggcgaggccgccggaagggaaaaactgggcctggaaaggccattgtgaggaatgagccccatgggcctgaagaggccactggcaggcaggagctgggcctgccaaagcggccgagaggcag

SEQ ID NO: 347220 - DNA, 743 bp, Homo Sapiens
gagcatgccactaatggagaaagggggtattttcacagaatcagtactttttccccatcccgtctccacttgatgtcaatcaaaacataccattggctgtttagttaaaaaaaatgcaatatgcttgtgcacatataccagttatgtacaataaaggaatggggaagggggaaatgaaagaacagagaaaaccatatggtagtagtcaggatgtggtggaaccaaattgcagttttctaattgagaatgtaatcttggtctttaaggaacagagttctggagtaaagaagcaggttcccttttcagtagacacctcccgtctgctgttggaacacatcaattgtatcttcattctccatttccaactgtggcttacaataggctttcattagtttactaagtggtgtatgcctcttaatcttaaactgcaccacagaaccatcctgccccgccaccttcaaattagtatgatcgttgttctccgacttgactccttggttgggcttttcgtcggccatggcgagcgccggtctcctcagctgccacttcacaaaagaggtaccaggtccgcaccaaacgagcacacaagcagcaccaggagcggcagaaggaggcggcagtggtgggcgaggatagagcctttcagcaggactggtcctcagggaagagccagtgggctgggcagcagccaggatggagtcaggggggccttcctcctctgcagcgttctcacactttcccat

SEQ ID NO: 347221 - DNA, 1000 bp, Homo Sapiens
acctaccaaaatatttatataatggtggaaatattccaaaattccatattttgggatttatacacaaaagataaaaaaaattagaggccaagaggctgccggaagggaaaaatggggcctggaaaggccattgtgaggaatgagctgggcctaaagaggccactggcaggcgggagctgggcctgccgaagcggccgaaaggcaggagctttggactggggaggccacagtgaggtgagagctagctgggcgtggagagtctgctgtgattccgaggccgggcccgtgcaggccttcgggaggcaggatgccgggcctacaaaagctgactggagatcaagttctgggcctgaagaggccaccaaaagtcaaaagcagggcctgggaaggctgcctacagccacgagctgggctgggctgaaagaggccttcgggaggcaggatgccgggcctgcaaaagctgactggagatcaagttctgggcctgaagaggccgccaaaagtcaaaagcagggcctgggaaggctgcctacagccacgagctgggctggactgaaagaggccactgggaggcaggaggagctggacctggagaggctgactcgaggaagttttgcacctggagaggccgccgagaggacggagctgggcccggggaggccaacgtgcagctcttccaggcccacttccaggccgacttgaggatgacttgggcctgcagagtctgccgggaggctggagctggccctggagagcctgactcaagggcagtctgggcctgcagaggccgccatgcgggaggcagaggctgggtctctagaggctgacgagaggcaggagctggccccggaggggccctcgttgacgatgcgttgcgcctggagaggccgccgggaggccggagctgggcctggagagggcgacttcaggacgatttgggccagcagaggccgccgggaggcccaagctgggcatagaggaatccaccgactggaggccg

SEQ ID NO: 347222 - DNA, 1000 bp, Homo Sapiens
gagagataaggtctcactccatcacccaggctggtgtgcagtgacccaatcatggctcactgcagccttgaactcgtgagctcaagtgatcctcccagctcagcctcctgagtagctgggaccacaggtgcacaccaccatgccttgctaacttttatttttatttttgagacacagtctcgctctgtcacccaggctggagtgcaatggtgcattcttggatcactgcactccagcctgggcaacaagagcgaaactctgtcgggaaggggagaggaggggaggggaggggagaaggaaggaaggatcgaaagaaagacaaagaaggaagggagagagagagggggaaagaaagaaagaaaagagaaagaaagaaaaaaaaaggaaggaaggaacgaaggaaaaagggaaggaggaaggaaggaaggaaagaaagaaagaaaaggtaagaaagaaaaccgtggatgaccgcagacggccacaggtgacatttcaagctgtgaatttggagagagagggcgctccaggcaactgtggggtgactgctccccctggtggccatatatggctaaagcaagtagaagtccagacacacctggagaacaggtgccatcgcctgaaagcaaccgtaaccacgacaacaaggccaggtgcagaacccaggtctcccccctttattagaacctgtggagagatcatgaatgtattctccgatatgtttattttcaggggttaaaaaaaaaatctccccagtgtcacttctcccaggaacgtgtgtatgtgaatggcttaaaaactgttgcccttgacaaagaaatgtaccaatctccaatgacagaatatttaatcgaggaaaggtctcattaacagatgttaattaatctccttaacagatgttaaggagaactgcaaaccactgttcaatgaaataaaagagaatacaaacaaatggaacaacattccacgctcatgggttggaagaatcaatatcgtgaaaatg

SEQ ID NO: 347223 - DNA, 1000 bp, Homo Sapiens
tatcaaataaaaatttatttttacaagaatttaggggaactaccacatagctataaatgtaatatatatgttaactaagtatcatagataaaaaccatgctcccttcagcagcacgtgtaataatagatacaaagattgaaaggtaaaagatttaggatgaaaagaatcctctcttaaaaaggaaaacaaaattatatgtatgtgtatacaacagttataatacccatcacacagctttatagaaacagcatctattcaaaaataccagtatttccaaaatatttaaaataatatttaaagtaataataatatttaaataaataaatatatttaataaatatttcagtaaataaaataatatttaaataattctatacccatgtttttcaaaataaaccaataaaatagatagtatatattagacgtgttagtatatatatctgagacatgttaaaaatcacaactgaattctcacaagtcagtcacaaacctaaacagcaaataaaaatttctatcaccagaattatgtttttttctggtggggaactaccaatagctataaatagaagagattattatggaagtatcatagataaaaagagtgctcgcttcaggagcacatataataatacagaaaaaaatttaaagataataaaagatttaggataaaaagaattctcacttaaaaatgaaaagaaaattatctttaggtatatataacaactataactctcatcaaaaaactctacaggaacagcatgttttcaaaagtacaacaatttccaaactatttgaaataaacctattaataattcaatggccaacattttccaaacaaaccaataaaatgcatagtgtgcatgaagctatctgttacagtctgtggcactcatatttcacaaagaattctgtgccaatctgagcccctgcactgtgccttcaaatgctcctggactgtggcaaccaagtccataagaaacaggacctccaggttccgcc

SEQ ID NO: 347224 - DNA, 1000 bp, Homo Sapiens
tttatgaagaaaagaggtttaattgactcacagttttgcaggctgtacaggaagcatggctggggagccctcaagaagctgacaatcacggcagaaggcgaaggggaagcaggcacgtttctggccatggtggagcaggagagacagagagagtgaagcaggaggtgctgcatgcttctaaacaaccagatcccatgagcgctcactcactatcacgagaccagcaagggggacgtcagccgccatgagccaatcatctcccaccaggtccctccctcaacactgggaattgcaatttgacatgagatttggttggggatacagagctgaaccatatcaagggtagttcaaccactgagattgattgattgactgagatggggtcctgctctgttacctaggctggagtgcagtggcaccaaagtgagactccatctcaaaaaaagataaaaataaaaaataaaaaaaatgtatatatatgtatatatatttttccagacagggtcttactctgtctcacagtctgaagtgtagtgacgcaatcatagctcactgcagtctcaagttcctgggctcaggtgatcctcccacttcagcctcccaagtagctggaactacaggtgcatgccaccatgcccagtcagttttttttttaatttttcatagagacagagtctcactatgtttcccagtcctaataaacattatgtgataaaaagaaaaaagtaaatcatcctgaagttaagtctttaatgagaaatgcaaataaagcatttctcaataaattatgggaagagaatcaactgaagaataaacatctttagtaaatcttttgctcgtgtgcattaaccaatactcttgaaaaccaggattaatttactgtaccttcttaatattcctttgaaattccttatggcgcacaggtagcgtagaaaataactgcttcacgctgactgtggtccctctggggtgggggtagggggttttctggatgattttc

SEQ ID NO: 347225 - DNA, 1000 bp, Homo Sapiens
ctgactcagaactatctgatatttatttcccaatattttgatacttgttttacaactggaatacatggaatgaaggggctgatatgggaccccaggtaagagtgaggtcaggactctctaagggtctggggttccccctagaggggactttgggcatccagtttcagggactgagccgggttgggtcggggggcagcatggcatcggacgtggtgccgtctgtgcctctcctgcctgcggtacagccggcgcaggtgtttccgaacggcccacagcaccaggtacacctcccacagcaactcagcctccggagtcttcaaaggtgactgcgtcctcacttgggagctgactgaggcagaactcactgatgacttccagctgcacatctgccagccgctctgcagggcagagaccatgagcgtggagacagacttgacggccgtcctcggcagctgcagtagggattggccctgttggcccagctccacctcggtctcctctgtagtcttggccaacacgcagggatctgccagctcgggggactcacccaacttgggcttagcctcttttgggagctcgaccaacctcaaagtctcaaccacctggagagtcttctccatcttcttcaatgagtgtttcttggagtcagggtgtcctgagatggttggtttaattttttgcctccagaagaaaacccaggaaataatcctttgccaagcccgtctaacccatcggaagaacttcatgaccacaaccatctctcttgatgggaaaaacacagaagaaagggcagagctagcatttggtacggtgggggtggcgggtgggggatggggtgggctgtgggccggtgaccacctcttgaggggtctcctgtgagcttcaagcacagcagtaaagaaagaagtaggaaatcctgggggaagcccctcctggcaatgaatcccagaccttttctcccctccctgggacagggagaggagtcgaagtaggtgagaac

SEQ ID NO: 347226 - DNA, 1000 bp, Homo Sapiens
tttttcgccattcggagtcaacttttattgagcacctcctatattccagaaccaaaaacatgtttgttccttacaaaattctcaaagccaccctttaaggtaagtaaaagtatgttctacttaacagataagaaaactaagaatcagactgatagaacttatagaacttcctcaacatcataggcagaaacataattatattgactgccaattttaagaaaacatctatttgtcacatttgtgtcattactaaaatctctgcttttacagttttcttaaaatcatgtgactataaacagcatttttatttacattaccatcacttctctttcctaagagaaattctttgtctccctaagatcatgaccacttatgtatcatttcttgcttataaattttaataaaatatacataagtgggaatgtacagtattaagtattactctattattctggaatttaacaatgaataagcacatattttaaaggccacacctactaagaaacagatacaaactgtgatttctaaaatatatttaaaattaacctattaaaatatttggtttataaatataactgtgtaaatacagaacgtttagctcagatgactatgtacttgatggctagccacatgtaagttaccgaaatacatattctttcaagtctgaagtacctcttctaagaactgggctaatggatggttccttagtttagttcaactggaataaaattacagaagttctatcttggccaggcacagtggctcacgtctgtaatcccggcactttggaaggccgaggcaggtggatcacctggggtcaggagttcgagaccagcctggccaacatggtgaaaccccgtttctactgaaaatacaaaaataagctggatgtggtggtgtgcgcctgtaatccccgctactcgggaggctgaggcaggagaatcacttgaacccgggaggcagaggctgcagtgagccgagatcaggccactgcactcca

SEQ ID NO: 347227 - DNA, 702 bp, Homo Sapiens
tcaaggtatagagcacttggggagtctttgaaactcctcaggcttcacaactttgctttgaatggaatgttcatcacccccggcactcacggaggtacctttactctctcgggctgatctgtttaatttttctgtccagacaatggaaacttctgggagcacttctggtttcgtgtagcttcctaataattgatgtcccttaattccaggtgtcctcagggaaagttcctttgattctggaatggctccagcttttatgcttttgtgtttaatccgtaaaaaccaaggtgttaatttctgtctcatcatttgcagaatatcaattatccttttttcagaacttattagcaccaaagggctcacagtggcataggccctggtcacaagcctctggacacccaggatgactgaatcatatgtttatatcagaatcaagtaggatgacagaatcaaatccatcaaccaggaagtgctggggctgatggtgatggcctagagcgtgctcaggaggcaggtggtgcagacgcagaggtccctcatcaccctgctcaggtagaaaagcgtcttacacttgaagtcaaaatgaagggactcaaaaaggtctggagacaccaagaacacaatggtgagcagcatcatgatgtggacaagggccaagtgactggtggtcaggtcagtgggcttaggatccagaaggagcat

SEQ ID NO: 347228 - DNA, 1000 bp, Homo Sapiens
tcaggccttgagtgcagaaatgattaggtgagtgagggcaggactcgaatgcagaccctggctccaggggagagggtggggcgtctctggtaggacggcctcaccccacttgtcagaactactctggcgtgcccgggtcaccagcagcagcagcggcgttccatcgctcccaagatccttggcccacaggaagagaaccctccatgggaaatactggtcctccaggcgaccgattcccaggcaccctcggatgttcttgccccatacaaacagctctcctttgtaaactgtaaaaactgtcatgaagaaaaagtacaagatgctgtttaagaggtcaacccaggagatggcctctcctagcccggccttcaggtgggactctgtctgcaccagctggggcactcctgggcccatgtcaccatcagtggtcagtgcagcaaagcggctgagtccacatcggatgcgggaaacctggatttctgggttgaactccgtcaagccaaagagagtgggtggaatcatttcagggacggcactttccacgtttaacactgcacagcccgtgccaccgcatgcagcctgtcgcaccttccccactcctgagaagtgtaagcagcggggcacattcacctgtgtggagtcagtgacagaggccagctgcaggtactccgagtttccccaaccaaaaagtcctccgtcggcggacacggccaggcagcaatcaccgtaggtggcaacttggataacgttcactcccgccaggtctccacccagcttggtgggcgagctggtgatattgtagtgacccagacctgtttgcccatcagcaccccatccacaagaatagacttctcctttatccgtcaggaacagactatgatcctgaccacaggcgacctggaccacctggccatcgaagtcctgcatcctgtggactctgtgactttcactgtaaatttcattttcgaccacctttcttccacattgcccataagaattg

SEQ ID NO: 347229 - DNA, 1000 bp, Homo Sapiens
ttactgcgcaccgatttcgcccactctctgtccgctcccgggagccttctctgtctcaggacggttccttatctcccaaaccatgctcgtcctccacttcggacccacagccacccccaaatcccggctatccccgcttagcaccgcggtctccagcacaccctcccactggagtagcaggtgacccaaaccagacttacctgctgtgaactcttctctccctctctcttttcctggtgccttttcagggagaggggaacgggatgcaggctgaggtccagcggcgcggcaacccggggcaccggcgcgcgttcctctgagccgcagccctggctgagcaagcggagccgccggcagccctggcagagccgggaagctgcggccgtaggggccaggccgggaggcagggggcgctgctgcctcccccgagagccgcgctaggacaggcggagagcaaggcaccagctggagctttggggaggagagggtggcgaggaaaggcacgctccaaacaggagggcggcttttaagtttgtggtgtgaccgcagcagctgtcctgggagagactcagtctttctaaaaagaggatgctgaaaacgccggggattacctttccccttccgatctcctcccccagccctcgccccctccttccactgcgcacgccagaactcccaagcgtgcagaagttcatccctgctgcgcggaggctgccagcagcgtggatttagaggtagccctggccaagcgctgcgttccactatgtaaaacctcaatccacggttaatggccttgacaaggcaggcatagggatgaggaacagggatcaaccctccgttaaggggctgtattccaagtggaattaaactatttctttgtgcagtaactggcaagagcaggtccatacagacagcaggaaggcattccaacacttctgctttgttcaaggtcataagcagctgcttagccacagtgaaatcagtatccttcttgtcaaat

SEQ ID NO: 347230 - DNA, 1000 bp, Homo Sapiens
tcagggccgggccccctgctccatttgttggtgctggctccgcacagcaaacctgttgacatgcacaggtatggggacaacaatcttggggtttcttacgggctccccagaacggctgctcacattgccagctttgatgcgcttccacttggcccgtcgattctgaaaccagatcttgacctgcacctcactgagcttgagggcgtgggcgatctgagagcgctctgtcaagctcaggtatttcttgcaatgaaattccttctccaattccaaaagctgctcgctggtaaatgctgtgcggcgccgtcggcttttccccccaggagctgtgacccctgctgtcaccggtgccccctcctcagctccagtccccaggcttccctttagcttcggtttaggtcccagaagagcccctgggccccctgcagaactgtccaggaaaccgtcatcctcgctgtcaccgcctgagccctcttcctcctgttcgctgcctgctgggtctcctgctgatgcctccagcttctcctcatctgagctgtacaccttcccctctgcgggcagacttggaaaagtctctgagaagtgcggaggcggaggtggtgggggctctgccactttctcccgggccggcagcagctcatcagcttccagcccaccctctgggcgtcggccgcccagccccgcgcagaaggtgttggtaaggcggccggcgaaagaggctagcggggcgaggggcgggaggccagcgggcagcggcgcaggggccagcgcctgcggcagcacgagcggccggtagggcatgaacatggggtagccggtgtacagcaagtggccggagcgcggcggcggcggcccgattagggagtcgatggagaaggcagtgcccggcccccgccgccgcccccgccgttgcccccaggggcgacgcagggctcgctccctggctcccgggccgaggtggcggcggggcgcgggctcggcgcagtgtggctccggcgcc

SEQ ID NO: 347231 - DNA, 1000 bp, Homo Sapiens
catggtgagacactgtctctactaaaaatacaaaaaatagcagggcgtggtggtgtgcacctgtggttgcagctactggggagcagaggctgcagtgagccaatatcacagcactgcactccagcctgggtgaaagacccagaccctgtctcaaaagaaacaaaacaaacaaaaaaacaaaaaaccagaatgtctggcagttcgtgggagaatctctccttcccatttccagtgcacccaccaactctggaacagaatcctccccaccttctgcctgggcatgctttacactcccagccccacccgactccaggccatcttcggctctgtcaccagaagccttcccaggacctgggctatgtccacatctggcagtggggcactgtcagatctcatttgaaggctgcaaacctcacttcagcccagtttcactcagctttcccagtccaggttagtcaagtcccccaggctggcctctccagtacatcccagtgtcttcccttcccttccccggggggatgtgcagggcctccctgtaaaacacctggatgtcccagtagctgaagaggttgcagactgagcgaagcagttggaccagccagaagccggcagccaggaccaggaggaggaccagcagcgggctggagcggatcctctcagcacactgggctgagggtaggatggcatctgacagggtcactttgctgtggaacggcccaggtctggtatggttacttggttggttggcaaagagaacattgtaatccacgcatcgaaggaggaaggttgtgaaggtgacaatgaaaataaattgtcccagctggaagacatcctccagcaagatgcaggcaaagccattccgctggtggtagctgtagatcttggtgaagaaactgtccaggttctggatgtgatgccaggagcctcggagcccttcagggacatgaagcaggggttgctgctcctccccgtggatgggtgagtcttgggacccctcagg

SEQ ID NO: 347232 - DNA, 1000 bp, Homo Sapiens
catggttatggatttgttttttggaaaaacacatgtatgcaacatagacatagctacagacgtgtgtatatacacaggcacatacatcttacattcctagcctatgtccactgagagagcccagaagcaatgagcgcactgctcacccaaatcctgctgttttttaaattattatcctttttgagacggtgtctcgcgctgtcacccaagctgtagtgcagtggtgcaatcttggctcactgcaacctcggcctcccgggttcaagagattctggtgcttcagcctcctgagtaactgggattacaggcacgcgccaacacacccagctaattttttatttgtagtagagacggggaagggtttcaccatgttagccaggctggactcagactcttggcctccagcgatccgcccacttcggcctcccaaagtgctgggattacaagcgtgagccacagtgctcagcccaaatcctggcttctaaatgccaccttccataaaggaaccaacgtccctagggagatggctgactgcagggttggagcagggagagaacaaatgaccctggaatatctgaggccaggaggtaaggaaaagtgcagagaaggacggggacacgtcagcactcgggagccagcgtgaaggggcgctcactcaccaaatctggcatgtgaacatcaaaataaatcatgactgcaacagaatacttcccagtgaatgagacagaactctgcatccatatggtggtgactataaactaacaaataaatgagtaagaaaataaaatctctcctttacagtagaatgccaactaaaggtgtagaagaaactatggaaattattttaaaaagcaccactgggcaacaatcagagggcttcaggtagaagtcaccaatggaggttaaggtgggtctgcagaagtttcatgaataagacaatggttgtgttggtgaactgaagggtggctagatggctggtattgtttctggtgtgagggtg

SEQ ID NO: 347233 - DNA, 1000 bp, Homo Sapiens
tttttctttttagtattctattcctttatatgaaattttttaaagaagtaaatatatacagtatgcttcagctcgttctaaccaagaggagccactctagatcagtttctctagcattcatcagaagacgattaaatgcaggcaatcacttcctcagcagcacatctaaaagccccattgtgcaactcaacccttgatgaattgcaagctctttgcaagcgcccagacttaggaactactagatggcctaggagacttatctggaggcacctgtgccagcaccccatgtatacgtaagacttcaccagggagctgggagacactgctctgggtatggagcttttaccagagctgcaaacgcagcctgtgcccctgtttcgttggggaattgcttgttttcaagggtaccatggagctggagagagaaaagtggggaatagaacaagttaaaacaccacagactttgctgttcttatagaggttcagcagcttttcttgaattaatgccctttagattgttgtaaacctttggttaacttccaaagttttgaagaaaatgattttgataattttccaagtattttcattgtcatcatggaggagtgcatttccttggctattccagaagtcctacctcccttctgagattttataatggtatttcttatggttatcccaaatatacttggcaagtcgtcttataaaccaccaataatagcctcttaaaaattcaaaaattactcctcttggctaacaaaataaatgcaaattaatttaataattgttgaagaaattaaattttttaaaattaaaaaattgcaatgttgaaattctcaaccatgcttatccagatcttttcctatactactaactgccctgggcttatcttaaatacttctcagaagatttacttgttttataccaggataggcaaagtatggcccatggtgtatttttggactgtctgcaagcacggttgctataatttttaaaaggttga

SEQ ID NO: 347234 - DNA, 1000 bp, Homo Sapiens
ggagttattggtggtggcttctgtcttatccctgtacttcctaatttatttttttcctgaaaatgaccttttggtcttcactcccccagtccatccaatagcggtgtcagcctctgattccctgccttatcatcctttcaggtatcatctgaaatacccggagggacttctcttgtggatgagaggggtacaaacgctttgcttgtggcatcagcacaatctccatggcagagacatctcactgggcaccttccgtgcaagtcacccctccctgcttccttgtccttttgatatcacctgttggaatgtgactcttggaatccataggccaaaaggcttgctgctctctcttcaagattcaaaacaaatcttcaaaatctgaggaacacagaggaaaggccaggtgagcacacagtgagaaggcagctgtctgccacctacgaggagagccctcaccagacaccagctctgctataccttggtcttgaacttccagtctctggaacaatctaggttagggccaacatctcatgccttcctcctttcctccacttctcctcggttccctcttccctggatataacctctacccaacgataagcaagttgtaatgggtctcttggctggtggaagaatagaaagaatctggttcttcttaatttcccattcaggttctcagtgttccaggaagcagtttgctcaagtttcttttctccatttagctctcctgaatgcccgacttcagtgcctgggcattgctgccaaggatcccgctggtgcattcagctgccattcaaggcaacagccctccacactgcctcgcacttggaagtttgtcttacagcataaaacaggtggaaggacattctgcctttagagttctgctggcatgtcttatcacttctgttgtccagtgccaagaatgacaaaaatcttttgtgtatgtttgggggtgggaaagaccagatataactgggaacagcagttaacttgttgttca

SEQ ID NO: 347235 - DNA, 426 bp, Homo Sapiens
aagaattttctgtgcattctagtgtgatctcaatcctctcccttcccagttttaaaccgtgagacttctgtccagcaagactttttcacgctccaaggcaggcaagcttccctccttcacagggacccgagaactcagctttcagagctgttcctgcggaagcctcatgtcctccacgtgtgctccagaggcagagggagaccaactggagccccttccctttctcattcccagctgtgatgacagcagaaactgcaaaatttgagcttagagcagagtccttgcagatgtgaaaaggaagttggttcacagccctaatcagaggcttcctggcaggacaaggtcctggcatcagcattagctgctgcaactctgaagggcagggtgtgagcctgctgtgggactgccccctcctagggctgggcc

SEQ ID NO: 347236 - DNA, 1000 bp, Homo Sapiens
catctcgaaaaaaataataaggaaaaacaaagcagttttagatttagagaggggaaagtagctctccaagccaaaaaccaactcccaaggtgctccggtaaactcgtcctgggaaaatttcctatttaatctcaaaggcaaaacgagcccacggacgcccacgacacatttcccaaccacaaggattggtcactcgcgctgagacaccgccagctgcctatgacctagcctccaaagcggcagagtccttccctctctctccctaaactgccgtgatgggcatcccccggctctcctcccagacggttcggaaatagggacttctgctcctaaccccggccccgcagcctcgccctcagccacggggtggaagtcaggaccataggcttcaaatcccctcccaactccgggacgcttctgtccccccagggcgacgcgggatcaaatcccggcgcccctgccgcggccgggggctgtggtctgggtccgagcgtcccatcccggcgcgttccggggaggtcctgggatgggtcccgcgcgaccacagatgttgcttcggagccagcatcctggacggggaagtgggagccggaccgaggggagccgccggacagggaggcggccaggaagtgatccaggtcaggccgtcggggcacggccgggcgctggagatgccggcaacgagcacgttggacggagaggccgcgcactcgcccgcgtgtccgctggcgtccgagccgcagctcgcccgcgtctgcgccgtggtccaggtcaccgctcgcccacgtcgctcggcaggtctgggctccccagtccgctccagcctcacacacaccccctgcttgccccgcccccccggcaccgccagcgcacgcccgtaacgcacggcgcgcaaacgtcacttccggggcctttggctgcagaggaggctccttcatcccagcttcccgggtactccggtccccactttgccggctgacattctgccccccacgcccca

SEQ ID NO: 347237 - DNA, 597 bp, Homo Sapiens
aaagtgataactgtgtgagttcatttgttgatgagctagatttaacctttgcattttgtatatgtacttcaaaacatcatgttgtacatgataaaaacataaaatgttatctgtcaattaaaaaagtgaaaaatatataattacattatgatgcggaaccaacttacaccctagaagaaagtcataggcaaaacctcccattatggaattcgctgttttagttcttcttaactaaatcattgatgctttcccagcagagtctcagtcctgccccatgtcttttccttccagatcagtgcagtgcttactgccagagcccagggttcaaacagcctctatagccacaggcgcctctgctattagctgctttagcctccagctgttttggtcctcggaggataggcagcaccagctccctggggtggatgcaactcagtatcaataaattaagaagtaatgccttcaccttggcctctccaggtaccctcaccatttctgtttttttttttttccatgaaaaaaaaatcccagtcatcatcattatttgtgcaaggtctttaaagagcaaatagaaagacattcagcccatatattttc

SEQ ID NO: 347238 - DNA, 708 bp, Homo Sapiens
gattaaaactgtaagctaaacagatgacacaaatgacaattgggaataatttttagtggggacagaggctaaatactaccccctccccttttctacttctaaccaatatcttgagcattcagtgggacaatacagtcttgctgggtctcttgaaatcctctagcaagaagccagccaggagaagacccagaagtcccacacctgtggggccaggatggctgcttggttgctaaacccagacagggtccttccagtgcatctgcccctgtcaggctctgtctcgagactggggatcttccaggctggcttcattcgctctctgggcgggttcgagtgcgcgcgccgggcggggcgggacccgggggctgcggtgtttcgagaagcacgtgctacttcgcgcgcagcgcccccggagactgtgggcttcctcgctgcctggtctacggcagggcgggcgcgggggcgtgtttcaaagggtagggcacacagtgagacgccgggaggcgggatggatccgaaaccagctcgcagcgagtcccaagcggctgcggccgccgcaggggtctgggcgcggcgacgagggcggcgtggggcgacggggagcgggacggtggcactgcacgccgcgcacttcctgttcaacacgcgccgcctcccaccacccgcgctccccgagtggttccagattccccacttgggcacaggcat

SEQ ID NO: 347239 - DNA, 1000 bp, Homo Sapiens
aacaggacaggataatacttgtatttttaaaagtgttttacgcactgcgtgaagaaaggctgggcaagcgtgggtggtgggcaggctgccatttccatgagaccagagctcgaggcttcgtcgtttagcctctgtccttccacacagtgcaggcagcaggcagtgaggacaggtccctggatgagcaggcaggtgcactgggactgcaggggacccggtgggacatgatgctggtcacccacagccatgcggcctggagcccagcagagaggtccccctggagatatcatgcagagcagatgacactggaggccaggggacgtgatgggatcccgcagcttggctccaggcccaccttccagggctcccctcgaagcctcctgtccgctcagccccaggtgcggcatccgcaggtcccgtgggttccaccttcccagcgcctctgaggcctcgcggccgcttctccccgcgcccacccgcgcccgagcgaagtcccgcagcgaaatctccgggaggccgcgcctctcctgtcccagccccggggtctcccgtctcaccccacgaaaaggcaatctgggccgtgacctccgaggcccccagatccgcccccgaacgaggcgggcagggagaggacgcgtggcccccacccactcagctcccagcgcggagtcccgggaccaccttgcggagaaaagtccgccccgcacctgccacggaggagaagctgggggtgggggacccaggaactgcggctcggcccaggcgggggacctggaaaaacctcgcgcggggcgactggggacggcggcgaggagggaggctccgcggacgcgcgtggggcggcccgggacagcgggagccaggcagaggaggcggcggcccggggcatccgagctcaagcgccgctccgccgacgtgcatccggccgggcgcctccccagaacccaggagggaaccagcaaagcggcgttggcgccccggtctttcctgcgttggcgct

SEQ ID NO: 347240 - DNA, 1000 bp, Homo Sapiens
caagttgctcacattttagttggaaagtcagatcatgccaaagaattctctaaaacatttgtaagtttagagcaagctactaatgggagaaaggctcagtgaagtctactttttattatgttttccttatatggtgtcggctaataagtatttggggaataaatgtgtagatagtggtctgtttaaaagaagttacattatttggcatttattacattttatttttcttaattgattaattgcagttaaattaccttagcatgcaagagcagattttacagattttgacgtatgattaagcagcataaagcataactaatgtggttttagtggcatgctatgtattaaggcatgaaatttaaatacacacttcatcaagatttttttgcagttacagtgaattagaaagattcagatattggaactccctccaactcctgtgttagggagaggcaggaattttataattgagattattatagaagagtgtcctgacataactgattgactttagtgatgtgccttgaaagttcaaattcaaggtgtgcacttatttcagtcagcttgtcctgaatgtttaaataagaaatactctttctgggtattctgaataactcgttgtacatttattcctaatagtgagcatttggactaatgatggattactaatgagcatgtaaacgtaccacctgattacattaatatatgatcttccatgacgaggtctgaaatgaacatttctaatatgtatttcttttccccaaatggcactgtggtgtatactgagcgggactgagacgagggtgtttttaagagccactgatttagtcaattatcaaaaatcacattataataaatgctgttctaagaattttgattaacctttaaataaatgttactttggagaaaaaaaaatctgccaaatgcgttaatgataaattgtgaagtggtagtaattgcaagtatggctttatagataatatagttaattgataccacc

SEQ ID NO: 347241 - DNA, 1000 bp, Homo Sapiens
cagcgaaacacatttcctggtttattacaaatgatattccaaaggatatagaaaaagaaatgcatatagtgaggtatgaaggaaagggtgcggagcttccatactccttcccctttgcaccccccgaccccaggtggcaccctccagtaacatccatgtgttcaggtatccagaagctctctgaacccagtcctttgggagcttttatggagactttgtaacacaggcatgattgattaatccatcagccattggtgatccacttcaccttcagttgccctcctccccagatgttgatggggtggagctgaaattgccatccttctaatcctgctgtggtctttccagtgaccagccccatcctgaagctacccaggggctgccaggcatcagtcaactcatcagcatataaaaagacatcactttggagattctaaggattttagaagttgtatgtcaggaaacggggagaagatcaactatgtatttcacaatatcacaggataataacaattcctatctcttacggttggtgggaggtacattagtcaactttaatgcaataataccaccaagaatctcagtgttacaagagcatttgtttctctaacattacgtgggaccgttgtggttacatgtgagcttctgtggctctgctccatgtgtcttatcatcctggttcctagactaaaggggcagcccctacttgggacatgctattctcaaggcagagggaaagagcagagtcctggcagaaacacaatgacttgaagtttcttctgggatgtgatgtaccccttgcatccagtcacatgcggtcagccaattcaaatcagtggtcaagtcaacatcagtgggacaggcatgtggttcaccaggaggcaccggagtcacaccacaaagtgcagggaccaaaaccagagaaggtggagcaaaccctcaggaataatcatgcctcaggaatctcacgtgagatcctcaaatgctgcaaacagtgcct

SEQ ID NO: 347242 - DNA, 1000 bp, Homo Sapiens
atataccaacaatggagaaatttaattataggctggaaaattatctttcatttttgtcatttttatgtggatgaggaacagacgtaagggaattaattcgaaagaagtcaccaaatttgaaaagtcaatagacatatttgcagagatattttcattcctttgtgtttaagtaaattctttaccgttccattaaagtagttactgattttgacatgttttgttttacatagaagtttagtatgaaagttcttactggcaagttctgcattcactatgtaaagaaaatggcttgttttggtgtcaagaactgaactagaactgaaaagtaattacgagtattcaattatttggttaacaaaagcgccttcttaacaccattaatggcctctgaaatcaacatcagtgttttcgattacagctttgcaacatgtcgctgtgagtcattgttgtgtttgtaaagattatgactctttatacagtcatgggcctgtgacatgaaaccagtgaaataaattttcatgaaaccaatgaaataaaaaccagacaattttatcttctgtcaaaatcttctgagacaaatgttcaaatgagggtgtgccaatgcattgctacagtatactttatggtatcatagtatttgggatgtgtttctgtgccatcttcattgcttgacttctaccaggatgtgaatagtgatttgagaagtagttctgtacaacatggcgaaactgtcttttcgacaaaaatacaaaaaaaattagccaggtgtggtggttcatgcctgtagtcagtcccagctacttgagaggctgaggcaagaggattgcttgagctcagaagacagaagttgcaatgaactgatatcacaacactgtacttcagcctgggaaacacggtgagacccaattcacagactgtccttcctctcaatctccttttccccttgactttacccttgaggggccagatgcagcagctagcgaacaagcgaggaagtgag

SEQ ID NO: 347243 - DNA, 655 bp, Homo Sapiens
tcagcatcatgtgccattttataattatatctacaaatgatacgacaactcacaagatttagggatttctgaatgtttgtgaaaatattttgttttgtctgctgcttcttgttgatgtcacacatacccaaagacattccacgggtttaacaagtcttgggcatcttgtggaagactcagattctcatccatctcagagatggatggggaacttgacggttttaattctgtgcaccatgattgcaagggtcatctggtccagcatttcccaaacttctcttgagtcccattcacagagatatgcaatccaaccaatccctttgcaattgtgttcatgtcttcatgttggtgtgtcattttagtgtcttggcctgggttcccctcagaaagcatagcctgcaacaagggctttgtaagggaagattggtttggagagtgatctcagcagacaagagtcggggcctgagggtgtgaagcagggaagaaggtggtgacctgctccatcttatcttctgggaggatcctctgaatttgcagccttgtctcatttgttcacaaagaatccaaagccagcaacatcgatcagcttcttgctttttgtccaactacttgcctacaactctagaaaaacaacagaggtctgccaagaatctgc

SEQ ID NO: 347244 - DNA, 1000 bp, Homo Sapiens
tttggtttactaatattttatttaagatcattacactcatttcataattaacaatgacctataattttgctacactctattttatttgttcagttttattatcaaggttatgcatacaaaatgatgtgggaagttgtcctttttctattctttgaaaaagtttatacaaagtagtgcttatctgttctttgaagattttgtaaacttggctgtgtctggcctgttttttggagagggaggcatccggggaaggaaggctgtagatcattaacttgattcacttcttttgttgattataggtatattccagctttttctttcatcagtttttgtaattaatatttttctaggagattgtctgatttctctgtttccaaatgtattgtcaggaacttgtccatagtattctcttacaggctttaaaatctccatcagtagttatgctctgtttctttttcatgctttttcttctctcgtccttggtcattcttgccagagatggctttatcactcttttcaaggaaccggcttttagttgggttgatttctgcattattactttgttttctagctcattaattgctctccttatctttatggtttccttccttcttctgccttctttctgcttgctttgctgttgtttttctgttgtactgtgtcaagcaagtagctggcaaatttttcagtctttttcattttctaatatatgtgactgaggctgtaaatgtttatttgaaccagaggtggccagtcttttggcttccctgggccacatcagaagaagaagaattgtcttgggccacacgtaaaatacactaacactaatgatagctgatgaactaaaaaaaaaaaaaaagtctcacaatattttaagaaagtttacgaatttgtgttgggccgcattcaaatatgtcctaggccacattgtggcctacaagacacgggttggataagcttgatttaaagtatcatttatttaggctgcatcctacaggtt

SEQ ID NO: 347245 - DNA, 1000 bp, Homo Sapiens
cttctgttctaagttttttttttttttttttttttttaagacagagtctcactctgtcgcccaggctggagtgcagtggtgcaatctcggctcactgcaacctctgtctgtctccctgtttgagtaattcttgcctcagcctctcaagtagctgggactacaggtgtgtgtcaccacatccggctaatttttgtatttttaatagagatgaggtttcgccatgttgtctgggctggtctcaaattcctggcctcaggtgatccacctgtctcagcctcccaaagtgttgggattacaggcatgagccaactgtgcccggccagttttttaaaaaatttacaaatatcttcagaaatgttgtaagctttttctgaaaaaccacttacataggtggtatcagacacttgaggaaactgcaaagcaaaaacatgactcaaatgattaaacattccatactgctgtaatttagtaaaaacaaacattaaaatggaaattatctgtatgaacatatggatgtattcatagatgttaaataaacatgcaaagatttggccagttaaatgctttctttaagggttatatgaatgaaatgtatatacagcttctgaggtgaatgttaaaacaattttgacaaaaacaaacaaaaaatgcttttcttttcctactcccttccctcaaccactcttagaaattcttattttagattatgagataagggaaatcatgttattttaaatagctacgttattttacatacaatttattcagaggggcatccaaagtttaaactatgtcaacctgcgtaattctttaaataaaaccttgtttttcctcaaagattattttccatctaggtctatggacactgtgctccacttgcaaaggagaaaaggaatctgtttgaataaactagtacaaaatctcatagcccagggttgaccccatttttccttgaagttattttaaaaagaaaaattttagctagtatgcaaaattaaac

SEQ ID NO: 347246 - DNA, 1000 bp, Homo Sapiens
aagcattctaagaatttattttgagtaggaaaaaaaatcaatgcagagaattggatgcttttttctcccttgtaaagttgcatttgtatatgtcaaagagattgttaactagcctcagagatctaaaaattcaagaatgtgagaaagccacctgcaatggcactagttgcttgaattctcaaagcgggtgattcacaggaactcacttggatgctgctgccaacgtcatgtctgccaaatgcctgcgcatcttgctacagctgtactggaattcttgttttcttctgacttttaaatctctctttattgaatcccattggctgaatccaagctagacatctgcttgaaagtgattccaagagatggaattcttcgactctccactgtgatgcaagaaatggtttagtggagcatggaagaagctcagcttcagcttagtaacttcctcgccaacgctttccacaattccaagcaacttcatgtcccaagatcactggaaaacaacccttaggatcagctccactcagggtataggtgtcggtgtggcaaaccacagtggcaatgattgtgattcgaacttcattagcctttgggggtgccacctctatctcctctatggagagaggctttccagtctgccaggcaactgcaggcttgtacttgataacctggttcaccacgtccacggattctggtcaatgtgggggtcccaatttcatttctaatagagcttatttgatttttctctttttcttggtaaatctcattaatagtctataaattttgcttatcttttcaaagaaccagctttttgtttcatttatcttttacacttttttgtttcaatttaatttaattctgttctgatttttgttatttctattcttctgcctgctttggctttagtgtgttcttatttcttcagttccttgaggtgtgaatttaggctgtctgtttgcactcttttagatgttttgatgtaggcatttaactctatgaa

SEQ ID NO: 347247 - DNA, 1000 bp, Homo Sapiens
cagtaaaatagaaaacaacacatacaaatgagcactaggagatcaggacaagttatgataacctacacaggcagtcagttagggatacaaactgagcattctggcaaccaaaatgagaaggtcatttgcttacattgttttagaaggaaaaaaatatgtccattcttcaaggaaaacaaagcttttctaatacttagaattaagatgaattactccattggtcttcatgtaattatacaatgtctttgatataaaaaaatttatatttcataacacctagtatacagcagtttctctggtgaataaatatttagttcatagcagaaagtccagaaaggcagatgcgaagattgttcttaggatggagtgaggtttgcaggagcaggggggagagtatattaagtaatgaaatatttactgggtaccagaagaaacgctctttgtagatatttgagtacagttatgaaccacacaaggacattttggtcaataatggactgcagaaatgacagtgatcacataagattataatggagctggaaaatgcctattaactagtgacatcatagcacaattatatgtttgtggtgatactggtgtaaacaaacttactgcactgccagtcatataaaagtatagcactaaaggcctagtgtggtggctcacgcttgtaatcccagcactttgggaggccaaggcgggtggatcacctgaggtcaggagttcaagaccagcctggccaacatgatgaaaccctgtctctactaaaaatacaaaaattagccaggcgtggtggctcacacctatattcccagctacttgggaggctgaggcacaagaatcggttgaatccgagaggcagaggttgtcgtgagccaagatcatgccactgcctgcattctgggtaaagagtgagactcggtctcaaaaaaaaaaaaaatagcactatataatacctgataggaaagtactatatcactggtttgtgtatttaccttac

SEQ ID NO: 347248 - DNA, 1000 bp, Homo Sapiens
gatggaaatgcagtttattgtggcatgcatatgttatctacaagtattcagagtttaaaatttcaaaacactctgtcagtgctgcaaccatgtggataggctgaatgtggcccttagaggtccaatttgtaactcctgctccagaagaacatgctactccattcctttaaaagctgtctaaaaaaatgaaaatgaaaaaaaaatcacctcccctggaacttgtcctttctttctttattcatagctattggactttcctggtgcaggcattcctttacaagcatttgctaagcacttatcttgcacaaaacattgtggaatagcaaaagaaactatcaacagagtaaacagacaacctacagaatgggagaaaatttttgcaaactatgcatctgacaaaggtctaacatccagcatctataatgaacttaaataaatttacaagaaaaaaacaaacaaccacataaagaagtgggcaaaggacatgaacacttttcaaaggaagacatgtatgtggctgaaaatcacatgagaaaaagctcaacatcactggtcattagagaaatgcaaatcaaaaccacaagataccatctaacgccagtcagaatggctattattaaaaagtcaaaaaacaacaggcactggcgaggttgtggagaaaaaggaatgctttgaccctgccggtgggagtgtaaattagttcagccactgcggaagacagtgtggtgatccttcaaatacctacagacagaactaccattcaacccagcaatcccattactggatatatacccaaaggaatataaataattctatgataaagacacctgcacgtgtatgttcattgcagcactattcacaatagcaaagacattgaatcaacctaaatgcccatcgatggtagactgaataaagcaaaattggtacatatacaccatggaatactatgcagccataaaaaaggacaagaccatgtcctttgcagggacatggatgaagc

SEQ ID NO: 347249 - DNA, 1000 bp, Homo Sapiens
tttataaagaaaagaggtttaattggctcatggttctaaaggctgtacaggaagcatgatgctggtatctattcggcttctggagaggccttaggaaactttcaatgatggtggaaggtgaaagcgtagcaggcacgtctttgctttttttttttttttttttttgagatggagtctcgctctttcgcccaggcggaagtgcagtggcgcgatctcggctcaccgcaagctccgcctcccaggttcacgccattctcctgcctcagcctcccgagtagctgggactacaggcgcccgccaccgtgcctggctaattttccggctgcgtgcagtggttcacgcctgtaatcccagcactttgggtggccgaggcaggcagatcagaaggtcaggagatcgagaccatcctggccaacaaggtgaaacctcatctctacaaaaatacaaaaaattagccaggcatggtgatggaggcctgtagtcccagctactggggaggctgaggcaggggaatcatctgaacccaggaggcagagattgcagtgagctgcgatcgcaccactgcactccagcctggtgacagagggagactctgtctcaaaaaacaaacaaacaaacaaacaaacaaacaaacaaacaaactaccatgccttctcaacagtcctgcaaatatttaactcattccagcattaactcaaaagtccacagtccaaagtcttatctgagacagggctagtcccttctgcctatgaccctgtaaaataagaaacaagtttgttacttccaagatacaatgggggtataggcattggatcaacattcccattctaaaaggaagaaattggccaaaagaaaggggctacaagcctacacaagtccaaaaccaagcagagcagtcattaaatcttaaagctccaaaataacttcctttgacctcctatcccacatcaagggcgtgctggtacaaggggtgggctcccaaagccttgggcagcaccac

SEQ ID NO: 347250 - DNA, 1000 bp, Homo Sapiens
ttaattaatgtaatatctttatttaaataatacaaataaatagccagatgaagggattatacaggcgaggtctggaagtatcctgagaacaggagcttccattcttatgagttggggtacaacaccctctgggcacgtggatgagttcttgttcatgttcctatgagttcagctgtccagaaactccccaaacccctcctcttaggccttttatggagacttcatcggatagacatgattggtataaggacaactgtgtagaaatgtgattagacaaaaagggtataatctaatactaatagactgagtggggaaacccagcaaggcctgtctgttcagattcttcttagcctctccgtgcagcagtccttcctccagggaatggggcaagacccctctgaaatgaggattttatgacctgcaattagataagtcagagaatttctttatggctagctccaagacagaaagatggggggaaattagaatatatctttcatttctacagcctgccttggggagaaaaagaagcaggtgaaaggtagatgaagaaggtcagagagagcagttctgtcttctgaggcctaaagtcccccaacattataacgaaagactgcctttcaccttcatggctctgaagctgttctgaagctacttcaggaaccaaagacaaaaggacaaataattttaacaaaagatatgttttggtcatttaggaaataataagggctatgggagttatgaactaagaaccatggacaaaaacatgtgtgtgtgtgtgtatacacatacacaatataatcgtgtgtgtatgtgtgggtgtatatgtacatacacaatatcgtgtgtgtgtgcgtatatatatacacagtatattgtgtgtgtaatatacacacacacacacaatatacggtgtatatatatacatacacacatacacacaaacaatatatcatgccttatcttcaactaaggtcatatcttgtggtactcagggtta

SEQ ID NO: 347251 - DNA, 1000 bp, Homo Sapiens
aaaaatccaaagtttattccagagctattgattttccagtatgttttacagcacaagcattcatgttacactaaatttttgcattacttggtttaaaaactattctttcaacaacattgaatataaaatagcacaaatcagcagatcattcacaagtttcaaagcacatacactgcatttttaggagactgacaagtgatgtagttaaattttgtgagctagtgaaaggagaccagtatagtcataataaacactgtcctcagcttactgttcaaaagtattttgaaaatctgtgagtcgagggccaggtgcagtggctcacgcctgtaatcctaccactttgggaggctaaggcgggaggattgcctgagctcaggagttgagaccagcctgggcaacatggtgaaaccctatctctactaaaacacaaaaatgagccgggcgtggcagcctgcacctgtattcccagctactccggaggctgaggcagaagaattgcttcaacccaggaggtggaagttgcaatgagctgagatcatgccactgcactctacacttcagcctgggcgacagagcgagactccgtaccttaaaaaaaagaaaagataaaagaaaatctgagtcctaacaattttttaaaatattaaaagaattgcattatttcaaaccttgtgcataacatacaactttcaaatatttattcatattattttaaatttatataaattcccataaaacatgagagcattatactcatcaggcagcccttgcttggtacagttctgatatgcacgaatttcagtcaccatgatttaataacaccagtcccccaacgacacaactcaaatttcaggtacacagtatattaactgagttttcgcataaagtgcaggctgctagctcttcagtctacacatcatcacattaataacaaatgcatgtcatgatcagtaaccaatcacatcacttctgtctgttggtgactgctcactgtaagttt

SEQ ID NO: 347252 - DNA, 1000 bp, Homo Sapiens
acgggaaacaggaggatttatttagatgtacaccggctcagtggatttgtatctgaaaagctgaccattgaacaaagactgagtgtggtttttataggcaaacttacagaagcaaaacaaaagcagttaatgatacagtcacaggtcatgtaatctatagcataactgctgacttagcataacttgtggctttgcacagctgttggccttgcagctgtgtcaaaagaaaaacagagtctacaaatcttactaaatacaaccattggcaaacagtcatatttaatggttcagaaaaggagagacagtaaaggaatttttcttttcaactttgctccggaggaggctgtctggagcccattcctttggcctcgacttttcagtgttataactgtccttgaagtaagctggctaagcagaggaaaacttgttcttgttttctttttaacccttaccccctgccacataatcacatctttacacttcttttttttttttttttttttttttaagatgggaagtcggagtctcgctctgtcgcccaggctggagtgcagtggtgccatctcggctcattgtaacctctgcctcccaggttcaagtgattcaagccattcttgtgcctctgcctcctgagtagctgggattataggcgcacaccaccacacctggcgaatttttttttttttttttttttgaggctgagtctcactctatcgcccaggctggagtgcaatggagcaatctcggctcactgcaacctccgcctcctgggttcaagcgatcctcctgtctcagcttcctgattagctgggattacaggcgccctccaccacacccagttaatttttctatttttagtggagacggtgtttcaccatgttggccaggctggtctcaaactcctgacctcaagtgatccgcccacctcagcttcccaaagtgctgggattacaagcgtgagccaccacgcccagccaggaaacccattttcaacacctcc

SEQ ID NO: 347253 - DNA, 1000 bp, Homo Sapiens
cttattagaacgtttattggggagagtcaagattctcaacaaggagttaattattttttggggggaaattttcctccctgcaaatgctttggaagtattttctgtccagttagtaaaggcacatcactgaacacagtgtttttagcactggtcaggatgaccggaggcaccaggttgacttcacactgcaagtggggtttggctgtggcacaggcttcctgtggggcatggattggggatgcctttgacacaatatcttccccttaaatgtccaacttcctggggctatctgtccttgtctatgatctgtctaatcattgcaggataattctggccgacaaagatagcttgttggctgcaagatttggtacatgtcactttgcaggagggagccatgtagttgcagggatagccctggacaggctctgctctgacctgcagttctggcacattctgagatttcccaagctgcactggggaggaaaggggctcctggggacaggtgatatctattcaatgtctatgccccagcttctcttctatgaactccccagtgtctttcctaattttctgagcttcaatagtcccagtaaagacagctctacttttaactcgacctctattctgcacagatgatgacaaggagctacccttttcctaggaactttcttgttttccatatgttatgatgggtttattagactgctgcaaaaaggtcttcatcaatgttccgaaaaggttttcaggaggaggctgtgttttcaaggttggggaagatttgctcccaagcgactcccttgatgtcttgttatgaatagcatggctctttcttctgagttgggatgtccccaaccctgcatcccctccaccaagctctcctccattaggtcttagagggctcactctctttgtagctggtgaaaaattcttaacttggcatttctgtaagacatgcgtagggaccctgggctcctgctgctgtgccacacggattcctctg

SEQ ID NO: 347254 - DNA, 1000 bp, Homo Sapiens; identical to SEQ ID NO: 161557

SEQ ID NO: 347255 - DNA, 1000 bp, Homo Sapiens
tcatatacctgttgttatacgagccaatcttaaagacctcttggagtctgtgtgcatagtggagatggcaatattttcacatctttcctgaggtgtgaagcaccagcagtggtgaataagcactaccaggtccttttggaaatttttgttgagaaagccataaaagagagggtttatacatgtggaaaccatagcaaccaagtggcaaactacaaataccaggtcgtggtggcagctcatcagcacctcatgataccagtcaaagatgacattgaagatattcgggggcagccagcaggctccaaaggtcaccacgatggaaatcaacattgtgttgatcctcttgttctcattgagccggccctcattttccttcttcttatctacctttgcatttctcctgcggaggcagataacaatcttcaagtagcagatgaggatgaagcctagaggaacaaaatactgcagcagaaaaagggaggtggtgaagagcagccggtcctttttggagggccagttctccacacaggccacctggtgggtgtagaggtcagtggggagagagaggttgcggaagggctcatcagtgaggtggtaggacaggaagaagggaatagacagcagaagggaaaacagccaaatcagtgtgatgccccagtaggcatgagtcacactgggcttccagccacgggggttcacaattagctgatatctttcgacagcagtgaatacaagtgagaatatggacacagagattgagacactctgcacataggatgtgagtctgcacatggtatccccaaatatccagtggtccatcagagtgtagatgatagtaaaatggatgcacatgacacacaccaaggtatcagagagggagagattggcaatcagtatgctggtgaaattctgagcttttctctgcttcttaaagatgatgatgatgagagagaggtttccaaaaaggcccacaattaagaccacagtataggctatgcat

SEQ ID NO: 347256 - DNA, 1000 bp, Homo Sapiens
tttttgttaagacaggaaacacatttattgagagcacagtggggtgcgccaagccctgtgctttggaaccgcatcacagcgcccctcacaacagccctgtgaggtaggtgaaggagcccacttcccacatgcagacactgaaggctcaacagctcccctaggcctcagggttcctgcggggtgggcaggggtccagcccacgggtctgaccccaggtcagcggcgtccatcagtcagagggcgggtctctactcaaggggaggccccgggtccagagtctctgggtccagcctgtcccgtgggaataggtgcagggtgtccccgtggctgtggagggatttcgagctggagaggggctggggtcccacattcgaggtcccttcccacgtaggcatccaggtgatggcttccgcccaaaccaggaaggagacgagaggcccgccaggaagaagacttgggtccgggatggtgggccccatcagggcctcttccgcagcttccatccgcagttcttcagccgacccagccgggccacggcccacgtgcctgcagtttactggcgaaaccaacatcccacatactctaactgagccccactctgtgccaggctggtgctgggacaccctgaggagacacggggctggtcaagggcaccccgggatggccaggtcaggaactcattatgataatcagtgtgtttttccttcgcagacaaagaaggatccttatgcgacgaatactggaatccagcagctaacctcattaacgtctgcagcctcttccttcgacaaggcccgagattagccctttgtgagcgtgcttccacggagtagagcgagtcaggaagcagtgggttgaagaggaaattggaggtgaggaaggaagacagcaagtgtagacaggcctttcaagaagcttggctgatgcaaggagagcccgtggacaagggctgcctggagtgctgttggagaataaataagacaagtaagacaagcaagag

SEQ ID NO: 347257 - DNA, 1000 bp, Homo Sapiens
ctaggcaggttcgttcaatggaaatattggatttttactgagtagcgctagctctgctacccggtgcgcatgcgcatcacctgggcggcacccgcggtactgcgcctgcgcggtctcgcgccttcccaggtccgctccgcgagggcgagcgcgcgccagtcccactcgtgcgccgctcttcatgtccccgcggtcgaagacggtcacatacgcccccaagaaaacgtcgccgaggatccacacaggtactggaggcgaagcgatgtccaaggcccggaagccggacaagcagaggcggacgtcaccctgagcaaactggatgacgtaatcctgggccgtgagattaaaccagacccccccaatgaggagtgagactgcggggagctttgggatttctgagcaccggatgatgtactccccagccagcaaggggattcccccaatggctgcatgcagggcccggatctcctcagtgggtcctacgatgacaggtgtgcctgtatccaggatggcagcacagccctgggcacagagagtcagccgtgagcccaccttcacacgctccatgtggatctgccagtaggcggggactgtgactggcacgaaggtgaggggtgggatgtagtgtgccgggtctgagccccccaggaccagctctcctccatcagccacttcagggtccctgttgaagtaaaaggagaagacaggcttatccaatagcccctgctccaccagtacatccagcgggggccgaactccttccacagacagaatgggaaaaccgaggcccaatatcccatcggggcgggaaacagtgaagaccaggctggattcccacagagcttccccgaaaatcacggatgcacccttgattccaccaatagtcagcttgtcctcactcaggattccatctacccgcccagttccatactgaatggcaaacttggtcccactgggcttgaaggagctggaggcattgggattgaagcggtggtggaac

SEQ ID NO: 347258 - DNA, 1000 bp, Homo Sapiens
tgccgttgactctttattgtggatattacaaatgttttgacacatcttcagggtcagtttacaaagaaaacggattctgcatcctcctcaaaggtaatttttcagtgtttccatcatattttatagccattttcagtgatattgtcagagtaaacagtctaccaggctctttattataccccttattttcaggcatttaaatgtgtaaaacctccctttgaaatcaaattcgtttttatatttgggatatttgaaatattcctatagctttgatattctaatagctacaaatcccaatgaggtaaaaataaatgctttacaaaatcatagctgtgatgtgacagtgaagaaagctatacaacatagcacttgctagataaaggtgtagagagtttagatttaacctgtttgagagttagattgtgtttatattcctattaaggtttgaaacaaacaaaatggttgaataggttaaataagcaattactttggaaaaaattagagtaatcctttgattcacatattagtattaatgcatacacatctctctttttttgttgtttgtttttgagacagagtctcgcactgttgcccaggttggagtgcaatggcgtgatctcagctcactgcaacctctgcctcccaggcagctggctcagcctcctgaatagctgggattacaggcacctgccaccatgcccggctaattttttgtatttttagtagagatggggtttcactatgttggccaggctggtcttgaactcctgacctcgtgatcctcccacctcagcctcccaaagtgacgggatgacaggcatgagccaccacacccagccacatcttcctttgatgtgtacatacactgcataatcaccttatgtttttgagcctattcaggtttttttaaaccatttaaagaatttttattaaaccaagaatttcataatccaagttatatttccttgtttagttatcaattctgttatttaaaacataa

SEQ ID NO: 347259 - DNA, 1000 bp, Homo Sapiens; identical to SEQ ID NO: 161558

SEQ ID NO: 347260 - DNA, 1000 bp, Homo Sapiens
ctatatcatatctttattgactccttaataactactacaagctcacttgtgaatcacacctgatgtacaataaataagtcacaattctgaaccacatctatagaaacttgaattcctagtaaatataataattgaggatcttaaagctcaacaagtcaggccttccagtttttcagatgaggaaattaaggcctaaagatatgaagtgacttaccccaaagtaaaagatctagttagtaataggagctgagattgagatccatgacttttaaaacccagaatcatgctctctccactaaaccatgtgatcattctaagtagtcaacagttttcacgatcctccttctgtttccctgggaagggtctccatattaaccaaattcttaaggcattcagagaatctctccagtgtgaggtttttattgttgtaaaaaagaagagttttgtctaatggtttccccacactcagtatgtatatttgatttctcttcactatgaattttttggtgttttgtaagatatgtgctctggctaaaggctttcccacattcattacattcatagggtttctcttcggtatgcattttctgatgttttttaaggtctgtcctctgcctaaaggctttgccacatttaccgtattcataaggtttttctatagtatgaatgacctgacattgaataagaccagagcagtaactaaaggcctttctacattcattacatttataggatttttcactagtatgagttttctggtgatttttgaggtctgtactccaactgaaggcttttccacattcagtacatttatacggtttttctccagtgttgagttatctgatgttgaacaagtgctaaccaatcactgaaggcttttccacagtcagtgcatttactggtatgaaggtacagtcagggcttctttctggtatgaattctcttatgttgaattagggctgaacagaaactgaaaggtttcccacagtcattacattca

SEQ ID NO: 347261 - DNA, 1000 bp, Homo Sapiens
acgtttttaaactttattcaaatttcatcaaaaatggtagataaaacagtttgattgctcagatattagtgtttacaggccataataatatgaatagtatgtacattaaatacttaaatgggttttggtggggctttaatcaaagacaactgtccttccagaactaaattaaattacatgtttactagcattagaattatactgtttttttaagtgactgatagtccggttctgtaatattttgtcactaatatatcatgattggggaaaaggaaggaaagaagctttacataataaataaaagataatacactagtaaagtattcttagacctagttgaaaaggatgatttctaatctaatcatctaccaattcatttattatgcttccttacacgtaatgtgttatctttgttctaaaaagacaaggcacttctccatcttcttctaaagttttactacagtggtctctttcctaaattagcattaggagggaacaaagagtggagacatatctgggatggagttaataaatctgtaaataacacttgcccatattagttattaggaataaacatgttattggcttttaggacaagcttaaaaatagccagttggacaaatttatgaagccagaatcttgggccaaatgagaaacattggaacattaattttaaaaaacaattttagcttgtaatcttaaagccttgtgagatttatatactttggcaaatacatgttttgctctggaaactatcacaagtttcataaaggaatattatgtaacaaagaaattcaaaattactttcttcagtctaaaaacaactttcacaaaagtatgttactaacctaatggaaaattacaagtatgttctatcctaagcataacagaaaaaaggctccatgggggaggaattaatcaccagtgtgctgtgtcattttagcattcactgcaaccaatttcactgaaaacaaagcaaccccgcccaaacattacaaaa

SEQ ID NO: 347262 - DNA, 1000 bp, Homo Sapiens
ttttatctatatatatttaatagatttatgaagaacatatataaacatatataaatatagatacatcatcaaggaagacttaggacatatgaacatgcacatggcaggggttggaaagaacattaattctttcccagaaggggaaggggaaactatacttaatcggatccagctacgtcattggaagtcatttctcgccaaaaagtatctccacggcaaattctggtggataaattttccatgctttttgttgatgtggattatccaattcatttcttggtagataaagccgtgaatagaacctcagccccttttttgtgtctcagttggctccttccacctttttggtgagacttaaaaatactttaatcttcagcaacacatcagtaacacatgctgactctcttagcattgctttatatggcattaatgacttccaagtttaataaaatatctaaatttctctctgttattttgaataaaagatgtgttgaaccagaagaaaaatgaacaattgtcatagtatttaggaagattcgaagagaaaaactgcactttcacatcatcgtacagagatggactgtcatatacattagttaatacaccagctgtttcaatgtcatgcagtattgaacaatttcctaatgaagtactggaaaagacaacctttttctccattactatttggaattttagatcacatacatcgcctgttccaacaccacgaatcgaataaataatgaatcttattataaagagtatccgtcttggagggagattccagttgtagagatgtttcacttgtgcaaaatatccaacatatctcagtagcaggttttccatcattcttctcttgttcctgatgctagaattcttcactttgcatttcctcaattctgttttctcaaggaagccctggaattctctcagccttgtcctttccctggggcaagctgttcacaacggctctcccctgaatctttcttcaaggtattgaaga

SEQ ID NO: 347263 - DNA, 1000 bp, Homo Sapiens
tcagttgatgctgggccactcagtgcaagaggcactgctgtctatcaggaagacagtggtgtatagcagctcctgggcctgtggcagctcaaaccagatggtctgggggttgtcagctgagccatagttgacttccaggccagggggccccttctcctccagagggcttagcaggtggagccgctgcaggctcttcagggcaatgcggcagtacaggctctgggagctggggtccatgaggatgagatgctggcggttgagccccaggagagtgggtccggacagggcctgcatgctcactcgcagcaccccatagacggtgtagccgaagaggggcagctggctcatggcctcaatgaagctgatctgtgcttcctgggggctgtgtccttccagccgtctcagctcctgacccatcaggttcttgatggaggccgtgttcacctgccgttgcagctgctttggcacgtaagctagcaggtcctgccctgagggggtattcctgttggccttgctgaggtgctgcagggcggccagcctggcgagctgcgcgtctgccttggcgctgactggcagcttcccctgaaggtagtcccacagcacccttgtggggagaggggcttggaggtcgcccaggcaggaagccgcgccctcaaactgcagcagcagctcggaggcaggcaggctgacctggctgtagtgggtgctgatgtaggtggagttatcgaagtgcagtggggtctcccagtggagccgccggctgtgcaggctcacgtcctggtccactaccacgctgttgaggtattcggcgggctgcaggggccgcaccagctggctcttctctttgatgaggaagagggcgaattcctgcacttcctgaggctccgtgatacccatttgccggcacagctcctcctgcacttctgctgctactgtgaaagtctggatattcgtcctataatccacaccccccggcaggtgaataagaagcaggcgaatc

SEQ ID NO: 347264 - DNA, 1000 bp, Homo Sapiens
ggattgcaaaaatttattaaaattggagacactgttttaatcttcttgtgccatgagactccatcaggcagtctacaaagaccactgggaggctgaggatcacttgagcccagaagtttgaggctgtagtaagcttcaaaggccactgcactctagcttgggtgaggcaagaccctttcaagcagtaagctgcatgcttgcttgttgtggtcattaaaaaccctgaaagcgaagccaacatattaatcagggcaaaatacaaatgtgtgatgcttgttagtagagtaacctcagaatcaaaatggaacggttttacagtgatatcattatatttcatttggcagaatcattacatcattggttacactgaaaatcatcacatgtaccaaaagctgactcacctagtttaggataacaggtctgcctgtttgaagatgaaaaataatacccatttaaaatttgccctactcaatttccttctcagtcacattttaacttttaaacagctaatcactcccatctacagattaaggtgtatatgccaccaaaaccttttgccaccttaaaaatttccttcaaagtttaaactaacctgcatttcttcaatcatgaattctgagtcctgaaattaagggacaatacacagtaagacaacttgcatacaattaggagtaatccaaaatctccaaacattatagaatggctatattccccttttcggggcataaactagaatgttaccgccagatacatcagataggagcgaaagacttaatattgctcatcagcgttagtctgctgaactatgttatcatcattgtatcggctttacaacacttaaaaaccagacttgaggcggggcatggtggctcacgcctgtaatcccagcactttgggaggtcagtgcgggcagtatcacttgaggtcaagagttcgagaccagcctggacaacatagctgtacaaaattagccaggcatggtgtcacatgcctgtaatcc

SEQ ID NO: 347265 - DNA, 1000 bp, Homo Sapiens
ttacactggcatacttggcaaaccaggtaaatacagaaacccagccaaaagggtttgaggactgtttgcaactgtgttcttagtagatggaacaccatcgaaaatgatgacatgatccgctagataggtggccatgatgaagtcatgttccacaacaaaggctgtcttttttgcatgaagtatgaaacgtttgacaactcgagctgccatcagtctttgctcagaatccaaatatgcagatggttcatcaattaaatagacatcagcaggtttgcccaaacaaagggctaaagctactcgctgtagttcaccacccgataatgtctgcacctcttgatcgatgatgttttcaatttgcagaggcttcattacattagtcacaaattgtggatgtgtataagcatctcttatcttttcacgtagtaactggcgaacacttccagttgatttaggactaattttctgtaacttataactgacatttagaactggtacttctccttcttcatcaggttcaagtcttccagcaagcattctgataaatgtcgttttacccattccattttcccctagcatcatcaccatgatttcagaatctgtaaactctccagctacaattgctagctcaaactctcccatttttaaattcattcctgaatatttatacatacacatcattttgacttcttcttcatttgctgtctcagccactttaaaaacaagtgatgcatcttggaatctcaggttttctgttggaacatagccatccaaaaaaatgtttatgccctttcttacactaaaaggcacagtgacaactccataggtgcttggtacaccatataaacagcagatgaaatcagagagatagtctaatacacctagatcatattccactacaacgatatatctatctggatttatcagagattgtatagtaatagcaggctttaaatgctgtttgacatctaggtaacgagaagtctcaccaaacatgaaaata

SEQ ID NO: 347266 - DNA, 1000 bp, Homo Sapiens
ctaaagctcctccagcagagcccggtgttcttcctggctgaggagtggttccaacggagcgggctcttccacctccttcagcttccccagtggcgccggatctaggaaagattgtgcctttttctgaaactctggggttggcaggagctcatctaacagtctgggggtgtgtgtagacaagcgccccgactcctggagcggttgggaggtgcctggatggcttgcatatgtgcttgacgcggaggcctccggggtcgcgagcttcagaggtggaggtgcccggtcttcggtttcccacgccgccctggggaccccggggctccagccccaccgtggactccggtgggacgtgggtggtgcaaacacaccttgcccctgtgactcagcttgagggggcccaagctgtcccactgagcacgcgcccagcaggccgccgtgctgcgggtcctcttcctcctggcatttgttagggtgcggaggccaccgaggagtctgagggtgggacagtcctacttccagaggagccagggcagcgaacacaaaatccctgcgtgcaggggcaggttgagagattccttctgcctgcgcagcctggctgggctggagcggggggaaggcccttgctccctctgatttggtccgaggcttccaacttacatcaccatcaccaaccgtcgccatcaggatccttgtgaacctgcccaaggccccgactccggggagactcttgggagcccagtcttcgtcggctaaagtacaaagggttggcaacgactctctcttgagagagtcctccgcggtggggaccgagggcggctcgtcacctactgtgtggcccgcgcctcccccttccgagtcgggggaggatcccgccgggccgggccggcgtcctagcggttgggaggctgcgcgagcggtggctgtgccaggcgttccgtccggcgcgtgacccgctccgctgcgagccggctctccacccgctcccctgaggagcagcgac

SEQ ID NO: 347267 - DNA, 1000 bp, Homo Sapiens; identical to SEQ ID NO: 161560

SEQ ID NO: 347268 - DNA, 1000 bp, Homo Sapiens
tcagatggtcacgctgttctctaccatgctgggtcaaaggtactcacagggcaggtccaggactgcattccggacctcaatctccttgtccatggaagccagttcctcctggaattgtctcagcacagcttggggctcaggaccagagaaatatttctcctcatgcatgacaggctggcgtctgccaaggaactttgtgaaggtcttttgcatacgtgcctggtggagattgggcagtaagtccactatatccttctctgtcacatccttagagatgggcgggggcttctgcatggtgcatgggccattagggatccaggagtaccagtccagctggcccaggtggttagaagcatgctgacctgtgcatgtgaagatgcacatggtgacaaagtggcagagctgagcccgggactctaaggagatgaggaacccctggtcttgggccctctgcagtccagtctcagtcatctctctgcaccaggcctgcagctctagatcatccttcatggcttggtcactattgtagaaaagcccaaccatcccctccacgtacctattccggtcagccaggtcatcaggaggacagagggaatgataggtcaaacaagccatggctctctgaagaatgtccacgtggcttccactaccagtgctcaccaccaggtcaaaaattccccattcggagacaagactactctgggccagcgtgttgatcgccatggtgtagcggaagtgggggatcaggagcttgtagataggatggaggctaggcaagcttctcattgtagccacagcaataacctcagcaatcaagtgtcccctcagcagatgtgactgtaactgctgcagctggaaatcagagctccggacccaggtctggatgaccatgggtaagagtcctccatcaggctgaagcttcagcatgaccaaaggggctgccacgcattgctgcttaaaaatgatgacattaggcttgactccatccagcaaggagaaa

SEQ ID NO: 347269 - DNA, 1000 bp, Homo Sapiens
aattcagtacgtctcatccttcaaatatactgaccatgtgttcaataagcacccagtgtgtgccaagaaccaggtgggaagtggaggaaagcaatgaaaagacatcacaaggaccccggggagctcgcagtccaaagaggagacaggcacaccacccaacactgaccggcgatggagggtggagggcttcccggaggaggtgactgtgagctgggattgaaggatgaataggagtttctgtaaggataatggtgtgttcagaaaacaattcacacaacaatatctcttccagtatgtgcaagcaggcaggaggtctctccagcccagcccagggatgctgtgtacaggatccatcaaagtccctccagcctggcctgggaatgctgtgtgcaggatccattgaagttgtctgaggagtggccaagcccagatctggtccttcatatcttctgacacccgggggcaaacagggccctgccctcacgcagatacctcctgagtgccagatgaggcttttcactccagaacccttttcctctgtgggcctggtgggcaccaggctgcagaagcttctgtgcggccgtctgtcagcatccatctccaacgcaggtggaatgcagctccttgtcaggctggattgtccaggccacccagtgtcggggcctagcagcttcctcagggctgtgcagcctcaccacgtgctgccaagtctggtctctgcctctggtcatgcccacttcccacatgggagggtgcaggtgccaccccggactctggtgccatggcctccagccactcaaaatgccctgtggaatgtgcctgtgtgggtttagtgtgtcttggtgctttggcaacatgaagagctgtacattcattctttctgtaggaagcacttcatatgagagacagaactctctagaacgcatgacgtacctctgagaaatggagaagacctgattcacgcacacgacaggtgtgatcgaaggcactccaggcacga

SEQ ID NO: 347270 - DNA, 1462 bp, Homo Sapiens
  misc_feature (71)..(151): n is a, c, g, or t
  misc_feature (169)..(196): n is a, c, g, or t
gggccagagctgccaggaaacagctatgaccatgtaatacgactcactataggggatatcagctggatggnnnnnnnnnnnnnnnnnnnnnnnnnnnnnnnnnnnnnnnnnnnnnnnnnnnnnnnnnnnnnnnnnnnnnnnnnnnnnnnnntgtacaagaaagtggggnnnnnnnnnnnnnnnnnnnnnnnnnnnncagctcacaagacagttttattgaattagttgcatgcaggagcaattctgttcttcccatgagcagcagagtcgagtgttagagtgcaggatccagagcggggagaggctgggcggagttgggggcctggaggctggggcctggttacttggtgacgtgcagagctctctctggggggctgcagctcatcttggggggagctggactcagatgcccccgtaggtgcaaaagcaacatccacatctcactcctcccggtgctttttgcggtattcctgcagcgctttctccgccacggtctccataaatttagggttcttcctggagacttctacagggaccgtcacagtgatgggatcagagtcaaagagcttcacgaccacctcagtgacaccggaaggaacgtccgagtcagaagtgtgggaagccaccgtggtgacccgcagatagtactggtcttcgccttgcgtgaggtttgccagccgggacacccagttaaactgctcgttcagctgctccagcaaggaggaggtgttgagcatcttccactggtaggactttagcagctcgttgtatttcctggtcaacctctcagcgacctggagggattcgtcgagctcccgccgcagcttagcctgggaggggttgttggtggaacagtccacagacaagatctcccggcacttgtcacactggtccttcatccgcaggcagcccgtggagttgtggcggatctcccggcacacagtccggtcatcgtcgccttctcgtatgaattctgttggcgggtgctggaaggccgggctgtggaagtggatgtccatggcctgctgagcctcgtgtatcatctcaaggaagggctggaacatggcgtggaagttcaggggctcgtacggagagaagggcatcaagctgcggacgatgcgggacttgggaaagaagaagtgaggcctccggtggggcaggctgaagggcaggtagtggtaggtatcctggggctcccgggtgaagaacctgtcctggaagagctcgtctatgatgctggacgcgcggctgaagtggtcctgcatgacatccagcatgtgcgtctgctgccggtcgttctccagcagggagtcgatgcggtcaccattcatccagaagtagaagggcgagctctggttcaggaactcctcaagctggcggccaaccaggcctgagccacttctgcagacgcgtgcgtagaacttccctcgtgccgaattcgccacccaggcctcgctacttt

SEQ ID NO: 347271 - DNA, 548 bp, Homo Sapiens
aagtattataactttattaaaatgaaaagacaatattcaaaataatgcaacaaaatgaataaaatcctttgtccaatactgtacacataatgcagaaatcagtgcatttttcttaagcatgttttaaccttcatttagttcatacttataataagctttaaatagctcaaataatattcagcagtttaaactgtaaacagcttgtttaactgttaagagaacattgcagtaatgtacctctgttagtgagcaccttctcttctgtgcttatctcttcaagataaatacatggaaggatgtgaaaatcggaacaccaactatgtgtctcactgcatctaagtgaagcagccacagctgtgagagttttcaaagcagaaagatgctgatgtgacctctggaattcagacatactgagctatgggtcagaagtgttttacttaaaaagcaaacaatccccaggaaatactgaataggacccagcaacacaaggccagcttgtgttgtatgtttattaatacagtctagaaataaacgcagaaccacaagta

SEQ ID NO: 347272 - DNA, 679 bp, Homo Sapiens
  misc_feature (481)..(508): n is a, c, g, or t
  misc_feature (538)..(609): n is a, c, g, or t
ttggctctcattggaggagctgaccaaagcagccctaacgggccataacacttgaccaattcagctgctggcagagggaggaaacaagtgttttcccaagtggcattttcatctcgctttcaccctgactaaagattgtcttaagtagcagcccagcccgcccagccccaggtgggtagtggggaggagagctggcattcctccaggtggcaaatggcgactctatactctccgcccgccccagggctggatggattagaaaaatgcctatttttcttgtatcgatgtagagactctattttctcccaaagacactatttttgcagctgtttgaagtttgtatattttccgtactgcagagcttacacaaaattgaagaatgttaatgttcgagttttcttatcttgtgtttagaggttgttttttgcagatcttggtgttaatagaccaaataaataaataaatattcccagcagcttgnnnnnnnnnnnnnnnnnnnnnnnnnnnngaaacccaactttcttgtactaattggccnnnnnnnnnnnnnnnnnnnnnnnnnnnnnnnnnnnnnnnnnnnnnnnnnnnnnnnnnnnnnnnnnnnnnnnnccatccagctgatatcccctatagtgagtcgtattacatggacatagctgtttcctggcagctctggccc

SEQ ID NO: 347273 - DNA, 516 bp, Homo Sapiens
  misc_feature (323)..(339): n is a, c, g, or t
  misc_feature (357)..(438): n is a, c, g, or t
ttggattaaattttattttgattaggcaaggctctttcagttataattcttacggaattaagtcataaactacaatggaattacatggtatgagaacttagtctgattataataagccactcaagcttaagaaggcatatgcattcatggctatatttcattgttgagactgcaaagaagtccctaaaatttctagtccatctataaagttggtatttttctgatttagtattttcctctttactacagggatagtttgtttcaaaaagatgcttttcttagaaaatgaagtttgacacaaaggcatactggattgcattatnnnnnnnnnnnnnnnnncccaactttcttgtacannnnnnnnnnnnnnnnnnnnnnnnnnnnnnnnnnnnnnnnnnnnnnnnnnnnnnnnnnnnnnnnnnnnnnnnnnnnnnnnnnccatccacctgatatcccctatagtgagtcgtattacatggtcatagctgtttcctggcagctctggcccatgtctca

SEQ ID NO: 347274 - DNA, 706 bp, Homo Sapiens
  misc_feature (386)..(537): n is a, c, g, or t
  misc_feature (555)..(636): n is a, c, g, or t
ttgggtttaatattgccgtgagtgagaatgttctgggaactgttgtagttgatgacttttccctttctattccaggattatgacatctttatggcctaataataaatctcataaagtcgaaggacaaatgaaatggtaggaaatgccagataggagagaagaaaatttggatagatcatggccgtcctcctagacacatcagtttaaagtggtttattacttagccacaagaaaaaaactatactcaaaacaaaacttgtatatgtagtgtgcttttatgtgtattaggggaggtggagatatgtgtgggtgtggattgcaataggagaatggcagaggagttctctaccatacctaccattcacttaggaatctaacaagtgttnnnnnnnnnnnnnnnnnnnnnnnnnnnnnnnnnnnnnnnnnnnnnnnnnnnnnnnnnnnnnnnnnnnnnnnnnnnnnnnnnnnnnnnnnnnnnnnnnnnnnnnnnnnnnnnnnnnnnnnnnnnnnnnnnnnnnnnnnnnnnnnnnnnnnnnncccaactttcttgtacannnnnnnnnnnnnnnnnnnnnnnnnnnnnnnnnnnnnnnnnnnnnnnnnnnnnnnnnnnnnnnnnnnnnnnnnnnnnnnnnnccatccagctgatatcccctatagtgagtcgtattacatggtcatagctgtttcctggcagctctggccc

SEQ ID NO: 347275 - DNA, 739 bp, Homo Sapiens
  misc_feature (269)..(570): n is a, c, g, or t
  misc_feature (588)..(669): n is a, c, g, or t
ttggagatatttaattatcttctgctgttacatctgcatcatgtattggctggctgttcaaaagtatcctctctaggcaaataacgagatttcgccagcaggatctcccgttaaaggcgtgcatgtgtggctttgtagacacgtatgtgtgtgtgcgtgcacacctgcctgcccttgcacagtgggcactgtttccagtgtgcagtgaggcccctcccttcgtgtagaacaggacaggacaatgacaaagttattcaattaataattgnnnnnnnnnnnnnnnnnnnnnnnnnnnnnnnnnnnnnnnnnnnnnnnnnnnnnnnnnnnnnnnnnnnnnnnnnnnnnnnnnnnnnnnnnnnnnnnnnnnnnnnnnnnnnnnnnnnnnnnnnnnnnnnnnnnnnnnnnnnnnnnnnnnnnnnnnnnnnnnnnnnnnnnnnnnnnnnnnnnnnnnnnnnnnnnnnnnnnnnnnnnnnnnnnnnnnnnnnnnnnnnnnnnnnnnnnnnnnnnnnnnnnnnnnnnnnnnnnnnnnnnnnnnnnnnnnnnnnnnnnnnnnnnnnnnnnnnnnnnnnncccaactttcttgtacannnnnnnnnnnnnnnnnnnnnnnnnnnnnnnnnnnnnnnnnnnnnnnnnnnnnnnnnnnnnnnnnnnnnnnnnnnnnnnnnnccatccagctgatatcccctatagtgagtcgtattacatggtcatagctgtttcctggcagctctggccc

SEQ ID NO: 347276 - DNA, 687 bp, Homo Sapiens
  misc_feature (71)..(152): n is a, c, g, or t
  misc_feature (170)..(195): n is a, c, g, or t
gggccagagctgccaggaaacagctatgaccatgtaatacgactcactataggggatatcagctggatggnnnnnnnnnnnnnnnnnnnnnnnnnnnnnnnnnnnnnnnnnnnnnnnnnnnnnnnnnnnnnnnnnnnnnnnnnnnnnnnnnntgtacaagaaagttgggnnnnnnnnnnnnnnnnnnnnnnnnnncctggtttaataaggacttgtttattttgaggaaaaaaggtcccaaacatcaggctgttcacaaaaataacccacagtatcaactttagaaaacaaatcttaagactataacactaattatttttctagaggatgcatttgacatgccaactctcattcacaaaaatacattgttacatttgtgttgaactgccccacacagcacactaatgtgagggtgtaacacacatacttctaactcaaagctgctttcaagagctactcaactaaatgagattgcctttgcagttagggaagcaactactgaacttatgtatgaatgaaaagaactgtactccctgcataacaagagattattttggagacagttgataaaaaccatacatcctttttattgttaagtcataaagaggtatcaaaattaaaagcaaaaattacagggtgaagacttaacccaacttttttgtacaaagtgggccctgattagagagt

SEQ ID NO: 347277 - DNA, 1403 bp, Homo Sapiens
  misc_feature (72)..(153): n is a, c, g, or t
  misc_feature (171)..(191): n is a, c, g, or t
gggccagagctgcccaggaaacagctatgaccatgtaatacgactcactataggggatatcagctggatggnnnnnnnnnnnnnnnnnnnnnnnnnnnnnnnnnnnnnnnnnnnnnnnnnnnnnnnnnnnnnnnnnnnnnnnnnnnnnnnnnntgtacaagaatgttgggnnnnnnnnnnnnnnnnnnnnnagctttatttattgtaaaaataaagtttataacacatataatataaaaaatatatgttaattgactgtttaagttttcagtatggcttcccgtcaacactaggctatgattagttacgtttttaaggagtcaaaagttatactcacattttcaactgtgcagggggttggcactcctaatgctttgcattattcaagagtcaactgtatttcctttaaggtaattaaccatatttcaacatggttagtcatattagctattcttctttttgatttttagtacattaattgtaaagatattcacttacacatcatagctgctcagtgaatggttgaatgacttaaggaatcattgcatgaattaaagatggccaatatatcttcttgtgaactttgttggatcaaagttgaagattataaattgctgatgttttaacattctcaaaaatcttgtgagaattaaaacagcattgttatacaatttttatttcaaatgctcttttaacaaatgtgttccctctgattcctaaaaccaccatgctgggaacaagagtaaattttacttttcctagtttataggtaaggtaattaaagcttcttggaaaagttccttgacagagtcaaaggctaaaacctggacagacttatctatatagagcattcctcacttccagttttgctgttattcaccaaaccatgattatttcgtgcaatggaaacattgaactgtacaatactcttaaatttcacttattctgaaaggcatttactcatcccagcattccctaaattcaaaggagaacttgaataacaacctggaagactcaactacctgaccgttccagagttgacaatgatttggctggctttcagcagacacttctctttaagtgttacttcactgaacaagacactatatgataatgctatttcactgaccttcccctgcttcctaccacaggtttaaattatctgcaatttttgtgaaaacagtgcaaacccctgtggataagagctgaaaaggaatatcatttaatgaaaaccagtgataacttgaggaaaattggttaagaaaagtccaaagttttcaacttaattacttaaatggaagaatgaaaatgttttcagatattttttgttttgatgtgaataaataaatcaatttaaaatttaagttttaacccaacttttttgtacaaagttggctttattg

SEQ ID NO: 347278 - DNA, 914 bp, Homo Sapiens
  misc_feature (317)..(367): n is a, c, g, or t
ttggtttgctctttgcttaaacatattacttctgatatccatttctctaacatttataactgtgtttttagcatagttttctctgcagttatcaggccatagtgatatttagtcacattcaaagaaaagtatccagttttttttctgatttcttgtctatttatacttttttacaggtatctttaccttactgtttgatatatctatcaacttatcaaatacaatttaaaagcttagatccctgttctcttgtttatcctcttcattaaaaataaatttcaatctgtccaaatgcattaatggaactgtatcagtgnnnnnnnnnnnnnnnnnnnnnnnnnnnnnnnnnnnnnnnnnnnnnnnnnnnctccaaaggttgattgttgatgtccttcagccttgtttattattattattatactttaagttctggggtacatgtgcagaacatgcagttttgttacataggtatacacatgccattgtggtttgctgcccccatcaacctgtcatctacattaggtatttctcctaatgttatcccttccctaccccccaacccccgacaggccccagtgtgtgatgttctcctccctgtgtccatgtgttctcattgttcaactcccacttatgagtgggaacatgcagtgtttggttttctgttcttgtgttagtttgctgagaatgatggtttccagcttcatccatgcccctgcaaagaacatgaactgatccttttttatggctgcatagtattccatggggtatatgtgccacattttctttatccagtctatcattgatggacatttgtgttggttccaagtctttgctattgtgaacagtgtagcaataaacatagtgtgcatgtgtctttatagcagatgatttataatcctttgggtatataccca

SEQ ID NO: 347279 - DNA, 2001 bp, Homo Sapiens
  misc_feature (116)..(139): n is a, c, g, or t
  misc_feature (1821)..(1838): n is a, c, g, or t
  misc_feature (1856)..(1937): n is a, c, g, or t
ttggctcgggtacacgtgcagaatgtgcagttttgttacataggtatacacatgtcatggtggtttgctgcacccacatagccatcacctacattaggtatttctcctaatgttannnnnnnnnnnnnnnnnnnnnnnnagaaggctctggtgtgtgatgttcctctccctatctccatgtgttctcattgttcaactcccacttatgagtaagaacatgcggtgtttggttttctgttcttgtgacagtttgctgagaatgatggtttccagcttcatcatgtccccgcaaagtatatgaactcaaccttttttatggctgcatagtattccatggtgtatatgtgccacattttctttatctaatctattattgatgaacatttgggttggttccaagtctttgctattgtgaatagtgctgcaataaacatacgtgttcatgtgtctttatagtagcatgttttataatcctttgggtatatacccagtaatgggattgctgggtcaaatgttatttctagttctagatccctgagaaattgccacactgacttccacaatggttgaactagtttacagtcccaccaacagtgtaaaagtgttcctatttctccacatcctctccagcacctgttgtttcctgactttttaatgattgccattctaactggtatgagatggtatctcattgtggttttgatttgcatttctctgatggccagtgatgatgagctttttttcatgtgttttttggctgcataaatgtcttcttttgagaagtgtctgttcatatcctttgtccactttttgatggggttgttcgtttttttcttgtaaatttgtttaagttctttgtagattctggatattagccctttgtcagatagaggaggttgcaaaaattttctcccattttgtaggttgtctgttctctctgatggtagtttcttttgctgtgcagaagctctttagtttaattagctctcatttgtcaattttggcttttgttgccattgcttttggtgttttagtcatgaagtctttgcccatgcctatgtcctgaatggtattgcctaggttttcttctagggtttttgtggttttaggtcttatgtttaagtctttaatccatcttgagttaatttttgtataaggtgtaaggaaggggtccagtttcagttttctgcatatggctagccagttttcccagcaccatttattaaatagggaatcctttccccattgcttgtttttgtcaggtttgtcaaagatcagatggttgtagatgtgtggtattatttctgagggctctgttctgttccattggtctatatctctgttttggtagcagtaccatgctgttttggttactgtagccttgtagtatagtttgaagtcaggtagtgtgatgcctccagctttgttctttttgcttaggattgtcttgtctattcgggctcttttttggttccatatgaactttaaagtagttttttctaattctgtgaagaaagtctttggtagcttgatggggatggcattgaatttataaattactttgggcagtatggccattttcacagtatttattcttcctatctgtgagcatggaatgttcttccatttgtttgtatcgaagaggcaattttaaactcatattattctcctttactaaatccagctcaacattaaaataatgcattattgtgcaaaaagtaaaacaggttcttggtaattattggcaagcagttgataattattacagggtgattgttcaagcagtctgaaaaatacaactctctaaaattatttttttcnnnnnnnnnnnnnnnnnncccaactttcttgtacannnnnnnnnnnnnnnnnnnnnnnnnnnnnnnnnnnnnnnnnnnnnnnnnnnnnnnnnnnnnnnnnnnnnnnnnnnnnnnnnnccatccagctgatatcccctatagtgagtcgtattacatggtcatagctgtttcctggcagctc

SEQ ID NO: 347280 - DNA, 603 bp, Homo Sapiens
  misc_feature (71)..(152): n is a, c, g, or t
  misc_feature (170)..(186): n is a, c, g, or t
  misc_feature (336)..(375): n is a, c, g, or t
gggccagagctgccaggaaacagctatgaccatgtaatacgactcactataggggatatcagctggatggnnnnnnnnnnnnnnnnnnnnnnnnnnnnnnnnnnnnnnnnnnnnnnnnnnnnnnnnnnnnnnnnnnnnnnnnnnnnnnnnnntgtacaagaaagttgggnnnnnnnnnnnnnnnnnggttgttgtttaaattccttgatttacttgcttatcctgtgcgggataacgtaaggtagttgagagtggggacaatgatatattattctttatccccaatagctataacagcactggcacattggacacactcaaaacacttgttgaagnnnnnnnnnnnnnnnnnnnnnnnnnnnnnnnnnnnnnnnnactcaatgaaggacagtacatcactcacaggtgctcagaaaccttaaagacagcccacttgcccctgccacttattcctccagccaccaatgaattgtactctggccccagtttctgacctgctccgtttccgacctgggccggttcacccctccttaggcaacctggtggtcccccgctcccgggaggtcaccatattgatgccgaacttagtgcgccaactttttt

SEQ ID NO: 347281 - DNA, 1011 bp, Homo Sapiens
  misc_feature (219)..(282): n is a, c, g, or t
  misc_feature (553)..(576): n is a, c, g, or t
ggctgcataaatgttcacaccagttagaatgcatcattaaaaagtcaggaaacaacaggtgctgagaggatgtggagaaataggaacacttttacactgttggtgggactgtaaactagttcaaccattgtggaagtcagtgtggcgattcctcagggatctagaactggaaataccatttgacccagccatcccattactgggtatatacccaaaggnnnnnnnnnnnnnnnnnnnnnnnnnnnnnnnnnnnnnnnnnnnnnnnnnnnnnnnnnnnnnnnnagcaaagacttggaaccaacccaaatgtccaacaatgatagactggattaagaaaatgtggcacatatacaccatggaatactatgcagccataaaaaatgatgagttcatgtcctttgtagggacatggatgaagctggaaaccatcattctcagcaaactatcgcaaggacaaaaaaccaaacaccacatattctcactcataggtgggaattgaacaatgagaacacatggacacaggaaggggaacatcacacaccggggcctgttnnnnnnnnnnnnnnnnnnnnnnnnatagcgttaggagaaatacctaatgtaaatgaggagttggtgggtgcagcaaaccaacacggcacatgtatagctatgtaaaaaacctgcatgttgtgcacatgtaccctagtacttaaagtataataataaaaatacagaaattttttgaaattatacaagacctgttatttcttctcatatctgattgttataatattcctgagtaagaaagaggttggagtagaagggtattaaagtttcagaaggaatgtgggttctcctcattcttgagcctccttccattgtttataatactattttgtgcctcctctttcccttccttgccagataatcctttctgcctactattctaccctcaaattcagaggaacatttatgcatgctcacttatattattttacttattttgcataatatctttctgagttaacc

SEQ ID NO: 347282 - DNA, 816 bp, Homo Sapiens
  misc_feature (14)..(14): n is a, c, g, or t
  misc_feature (512)..(547): n is a, c, g, or t
  misc_feature (619)..(647): n is a, c, g, or t
  misc_feature (665)..(746): n is a, c, g, or t
atttcggcacaggngagagaagaacaaatggaacgcttggaagcccttgatgccaattctcggaagcaagaagcagagtggaaagaaaaggcaataaaggagctagaagaatggtatgcaagacaggacgagcagctacagaaaacaaaagcaaacaacagggcagcagaagaagcctttgtaaatgacattgacgagtcgtccccagggcactgagtgggaacgggtggcccggctgtgtgactttaaccccaagtctagcaagcaggccaaagatgtctcccgcatgcgctcagtcctcatctccctcaagcaggccccgctggtgcactgaagagccaccctgtggaaacactacatctgcaatatcttaatcctactcagtgaagctcttcacagtcattggattaattatgttgagttcttttggaccaaacctttttgtctttagagttgttcattgtttgtgattgcatgtttccttccttcaactgtgttctccctggcattcnnnnnnnnnnnnnnnnnnnnnnnnnnnnnnnnnnnnagcttcccaagagtagcctcaacctgtgcttctgtgcattattctgagaataaatttctgtttcaaactgtnnnnnnnnnnnnnnnnnnnnnnnnnnnnncccaactttcttgtacannnnnnnnnnnnnnnnnnnnnnnnnnnnnnnnnnnnnnnnnnnnnnnnnnnnnnnnnnnnnnnnnnnnnnnnnnnnnnnnnnccatccagctgatatcccctatagtgagtcgtattacatggtcatagctgtttcctggcagctctggccc

SEQ ID NO: 347283 - DNA, 1177 bp, Homo Sapiens
  misc_feature (32)..(32): n is a, c, g, or t
  misc_feature (184)..(184): n is a, c, g, or t
  misc_feature (203)..(203): n is a, c, g, or t
  misc_feature (289)..(289): n is a, c, g, or t
  misc_feature (324)..(324): n is a, c, g, or t
  misc_feature (383)..(446): n is a, c, g, or t
  misc_feature (450)..(451): n is a, c, g, or t
  misc_feature (455)..(455): n is a, c, g, or t
  misc_feature (459)..(459): n is a, c, g, or t
  misc_feature (461)..(461): n is a, c, g, or t
  misc_feature (471)..(471): n is a, c, g, or t
  misc_feature (476)..(476): n is a, c, g, or t
  misc_feature (490)..(490): n is a, c, g, or t
  misc_feature (497)..(497): n is a, c, g, or t
  misc_feature (499)..(499): n is a, c, g, or t
  misc_feature (503)..(503): n is a, c, g, or t
  misc_feature (510)..(510): n is a, c, g, or t
  misc_feature (513)..(515): n is a, c, g, or t
  misc_feature (521)..(522): n is a, c, g, or t
  misc_feature (527)..(527): n is a, c, g, or t
  misc_feature (535)..(591): n is a, c, g, or t
  misc_feature (608)..(608): n is a, c, g, or t
  misc_feature (611)..(612): n is a, c, g, or t
  misc_feature (617)..(617): n is a, c, g, or t
  misc_feature (626)..(626): n is a, c, g, or t
  misc_feature (641)..(641): n is a, c, g, or t
  misc_feature (645)..(645): n is a, c, g, or t
  misc_feature (653)..(653): n is a, c, g, or t
  misc_feature (655)..(656): n is a, c, g, or t
  misc_feature (665)..(665): n is a, c, g, or t
  misc_feature (675)..(675): n is a, c, g, or t
  misc_feature (694)..(694): n is a, c, g, or t
  misc_feature (696)..(696): n is a, c, g, or t
  misc_feature (698)..(699): n is a, c, g, or t
  misc_feature (706)..(706): n is a, c, g, or t
  misc_feature (708)..(708): n is a, c, g, or t
  misc_feature (710)..(711): n is a, c, g, or t
  misc_feature (718)..(718): n is a, c, g, or t
  misc_feature (720)..(720): n is a, c, g, or t
  misc_feature (743)..(743): n is a, c, g, or t
  misc_feature (754)..(754): n is a, c, g, or t
  misc_feature (759)..(762): n is a, c, g, or t
  misc_feature (989)..(1008): n is a, c, g, or t
  misc_feature (1026)..(1107): n is a, c, g, or t
cgctctgcgagctggatgtccaagccgcgggngctgctggcctcgggctgctggtggcgggtcgcgcctgccgcggatcaaaagccagaccatcgcttgtcgctcggaacccacctggtggggaccgcagcggctgcactcgggtggccgctggaactcagaggtcatggcgagcacggtggtnaagtacctgagccaggagnaggcccaggccgtggaccaggagctatttaacgaataccagttcagcgtggaccaacttatggaactggccgggctgagctgtgcnacagccatcgccaaggcatatccccccacgtccangtccaggagccccccaactgtcctgttcatttgtggcccggggaataatggagtagatnnnnnnnnnnnnnnnnnnnnnnnnnnnnnnnnnnnnnnnnnnnnnnnnnnnnnnnnnnnnnnnnaggnnttanaatncnttttttactntattngttacccatttttngtatatntncatncttttcnttnnntaaatnnctgtnttgcccannnnnnnnnnnnnnnnnnnnnnnnnnnnnnnnnnnnnnnnnnnnnnnnnnnnnnnnnaagtggcgtatgttcgntanntgttnttctgcatncttattttcctttantttntttttttntnnatttctttnatctatattncttcaggttggttcgtgtngnannttaatgntntnntgatccngntatatttgttctttttctttacngcccccataanttctnnnncccagtttaccggttgctaccattacctggggggtcgttttgtgccacctgctctggaaaagaagtaccagctgaacctgccaccctaccctgacactgagtgtgtctatcgtctgcagtgagggaaggtgggtgggtattctccccaataaagacttagagcccctctcttccagaactgtggattcctgggagctcctctggcaataaaagtcagtgaatggtgnnnnnnnnnnnnnnnnnnnncccaactttcttgtacannnnnnnnnnnnnnnnnnnnnnnnnnnnnnnnnnnnnnnnnnnnnnnnnnnnnnnnnnnnnnnnnnnnnnnnnnnnnnnnnnccatccagctgatatcccctatagtgagtcgtattacatggtcatagctgtttcctggcagctctggccc

SEQ ID NO: 347284 - DNA, 633 bp, Homo Sapiens
  misc_feature (333)..(464): n is a, c, g, or t
  misc_feature (482)..(563): n is a, c, g, or t
ttggctaatacctgtttttctccttttcttatttggaccttgtgtcttccgattagtttctcaattcatacaaaaccgcatccaggtcatcaccagtcattctatatgacaaatgtttcttctaacatctccacaatatcaccccttaccccgagatctttcttcagtttaatttctcccactctaggttcccatgctgcccctaatcccgctcgaagcagccctgagaaacatcgcccattctctctccataccacccctcaaaaattttcgtggccccaacacttcactactattttgttttgtttttcttattaatataagaaggcaggnnnnnnnnnnnnnnnnnnnnnnnnnnnnnnnnnnnnnnnnnnnnnnnnnnnnnnnnnnnnnnnnnnnnnnnnnnnnnnnnnnnnnnnnnnnnnnnnnnnnnnnnnnnnnnnnnnnnnnnnnnnnnnnnnnnncccaactttcttgtacannnnnnnnnnnnnnnnnnnnnnnnnnnnnnnnnnnnnnnnnnnnnnnnnnnnnnnnnnnnnnnnnnnnnnnnnnnnnnnnnnccatccagctgatatcccctatagtgagtcgtattacatggtcatagctgtttcctggcagctctggccc

SEQ ID NO: 347285 - DNA, 723 bp, Homo Sapiens
  misc_feature (72)..(153): n is a, c, g, or t
  misc_feature (171)..(188): n is a, c, g, or t
  misc_feature (190)..(307): n is a, c, g, or t
gggccagagctgcccaggaaacagctatgaccatgtaatacgactcactataggggatatcagctggatggnnnnnnnnnnnnnnnnnnnnnnnnnnnnnnnnnnnnnnnnnnnnnnnnnnnnnnnnnnnnnnnnnnnnnnnnnnnnnnnnnntgtacaagaaagttgggnnnnnnnnnnnnnnnnnngnnnnnnnnnnnnnnnnnnnnnnnnnnnnnnnnnnnnnnnnnnnnnnnnnnnnnnnnnnnnnnnnnnnnnnnnnnnnnnnnnnnnnnnnnnnnnnnnnnnnnnnnnnnnnnnnnnnnnntctcgagctcatttttaaggtaacgctgctagggttctgagtttgagaagggatcttctaaaggtaagcttaatattgcaactttcaccacagggcctctgtctaaattgcatttcaagtggaaggaaaggggtgtgagaagtgaaatcgaattttgctgcagaccaaaatcattctacaaaatgtagacatggtaatagcttaccacgaattcagcaagatttaacgccaagtacagtggtgtagactttacaagtatccacttccgttgggtgatcagacaagctgaagggacacacaggatttgggacagtagccctttagacaatgctgggtgttgaagacagaacttcatcgtaaatccgtatgttctaatctgatacctatacaggctatgatcgtctcctgaaatccaa

SEQ ID NO: 347286 - DNA, 666 bp, Homo Sapiens
  misc_feature (71)..(152): n is a, c, g, or t
  misc_feature (170)..(198): n is a, c, g, or t
gggccagagctgccaggaaacagctatgaccatgtaatacgactcactataggggatatcagctggatggnnnnnnnnnnnnnnnnnnnnnnnnnnnnnnnnnnnnnnnnnnnnnnnnnnnnnnnnnnnnnnnnnnnnnnnnnnnnnnnnnntgtacaagaaaggtgggnnnnnnnnnnnnnnnnnnnnnnnnnnnnnggcagctgggagagcagctttattatcatggctggggatagaacgggttcctctccctgggggctggggtcttccactggttaccacccgcagcggtcctggaggcaccacgcatctcagtgctggcttagctgcggggcagggccttggagaaggcgaactgtccagggaagtagaagctgtgggggtcctcaccagcccgctgcaccctgaggcactgggtctcctggtgctcctcagcctcccgcagaacttgggtctctatggggcagtggaccaaccggcccagaactttgtcctcagagcccagtttgatgcaggccaggcatttccgtttcctcccattgggcctgactttgcactcgggtttcttccagtccctcttccggcagcttgtctgctgcagcttaaattccagcctcacaaatattccagctgggaagggcgtgtccacggcgctctccccaa

SEQ ID NO: 347287 - DNA, 783 bp, Homo Sapiens
  misc_feature (309)..(614): n is a, c, g, or t
  misc_feature (632)..(713): n is a, c, g, or t
ggcaccatgctcaaggggctgaaaaaaagacccggagtgagcaaacaagacatagggtttattaagggaccttacatacagggtggtccagtggtggtgggctggacagagaatcactaccatttgtaaaaaccatgcaaattatatggcaccctccacctggcaaccttcacttaacccaaaacaaagggccttgatccttcatacagcctgtgtttcatgggatgagccagaggttcagatgttcttcataaataagaaatgaatttctgggttggccactcccagattccttagctcagaactccnnnnnnnnnnnnnnnnnnnnnnnnnnnnnnnnnnnnnnnnnnnnnnnnnnnnnnnnnnnnnnnnnnnnnnnnnnnnnnnnnnnnnnnnnnnnnnnnnnnnnnnnnnnnnnnnnnnnnnnnnnnnnnnnnnnnnnnnnnnnnnnnnnnnnnnnnnnnnnnnnnnnnnnnnnnnnnnnnnnnnnnnnnnnnnnnnnnnnnnnnnnnnnnnnnnnnnnnnnnnnnnnnnnnnnnnnnnnnnnnnnnnnnnnnnnnnnnnnnnnnnnnnnnnnnnnnnnnnnnnnnnnnnnnnnnnnnnnnnnnnnnnnncccaactttcttgtacannnnnnnnnnnnnnnnnnnnnnnnnnnnnnnnnnnnnnnnnnnnnnnnnnnnnnnnnnnnnnnnnnnnnnnnnnnnnnnnnnccatccagctgatatcccctatagtgagtcgtattacatggtcatagctgtttcctggcagctctggccc

SEQ ID NO: 347288 - DNA, 918 bp, Homo Sapiens
  misc_feature (381)..(432): n is a, c, g, or t
  misc_feature (434)..(749): n is a, c, g, or t
  misc_feature (767)..(848): n is a, c, g, or t
ccggggtccaggtaccattggcgggtgcctgtggatttgaagccccctcccacatcagggcaattgccagaggagccttggcccccagaaaggggctttttgcccacccagccttcagaaaaacatggcagctggggaagtggtttggacatgcacacccaaacccctgggttagagcaaggtaagcatctttttactaacccaaactaatttagattatgaatatgttcaagtgaggccatttagaagactgcagcaaatttgttgtgtgatgatgaagaatcagtcatccccaaattctctcccagagatgtttacaaagcatccttattaggtgatttctggagattgttttaagaatatagaacgtatttgacctgnnnnnnnnnnnnnnnnnnnnnnnnnnnnnnnnnnnnnnnnnnnnnnnnnnnntnnnnnnnnnnnnnnnnnnnnnnnnnnnnnnnnnnnnnnnnnnnnnnnnnnnnnnnnnnnnnnnnnnnnnnnnnnnnnnnnnnnnnnnnnnnnnnnnnnnnnnnnnnnnnnnnnnnnnnnnnnnnnnnnnnnnnnnnnnnnnnnnnnnnnnnnnnnnnnnnnnnnnnnnnnnnnnnnnnnnnnnnnnnnnnnnnnnnnnnnnnnnnnnnnnnnnnnnnnnnnnnnnnnnnnnnnnnnnnnnnnnnnnnnnnnnnnnnnnnnnnnnnnnnnnnnnnnnnnnnnnnnnnnnnnnnnnnnnnnnnnnnnnnnnnnnnnnncccaactttcttgtacannnnnnnnnnnnnnnnnnnnnnnnnnnnnnnnnnnnnnnnnnnnnnnnnnnnnnnnnnnnnnnnnnnnnnnnnnnnnnnnnngcatccagctgatatcccctatagtgagtcgtattacatggtcatagctgtttcctggcagctctggccc

SEQ ID NO: 347289 - DNA, 669 bp, Homo Sapiens
  misc_feature (480)..(500): n is a, c, g, or t
  misc_feature (518)..(599): n is a, c, g, or t
ttggaggggatccagtttcagctttctacatatggctagccagttttcacagaaccatttattaaataggaatcctttccccattgcttgtttttgtcaggtttctcaaagatcagatggttgtagatgtgtggtattatttctgagggctctgttctgttctattgctctatatctctgttttggtaccagtaccatgttgttttggttattgtagccttgtagtatagtttgaagtctggtagcatgatgcctccagctttgttctttttgcttaggattgacttggcaatgcgggctcttttttggttccatatgaactttaaagtagttttttccaattctgtgaagaaagtcattggtagcttgatagggatggccttgaatctataaattaccttgggcagtatggccattttcacgatattgattcttcctatccatgagcatggaatgttcttccatttgtttgtctcctcnnnnnnnnnnnnnnnnnnnnncccaactttcttgtacannnnnnnnnnnnnnnnnnnnnnnnnnnnnnnnnnnnnnnnnnnnnnnnnnnnnnnnnnnnnnnnnnnnnnnnnnnnnnnnnnccatccagctgatatcccctatagtgagtcgtattacatggtcatagctgtttcctggcagctctggccc

SEQ ID NO: 347290 - DNA, 781 bp, Homo Sapiens
  misc_feature (71)..(152): n is a, c, g, or t
  misc_feature (170)..(196): n is a, c, g, or t
gggccagagctgccaggaaacagctatgaccatgtaatacgactcactataggggatatcagctggatggnnnnnnnnnnnnnnnnnnnnnnnnnnnnnnnnnnnnnnnnnnnnnnnnnnnnnnnnnnnnnnnnnnnnnnnnnnnnnnnnnntgtacaagaaagttgggnnnnnnnnnnnnnnnnnnnnnnnnnnngggtcaaaagaaagctctttattgattgactcagcaatgcagggctggcacccatcagcttcaaaccacatcttatcgcatccactcctgtccactcccgtccactttgccctcttccaggctgaaatcttgctttcaggcaagggcttccggccagccttgcattagttctcagctatggtcttctgaacccagtcctggatggaagtcaccttcacatacacaccatactcagccacagcacagctcttatcaaagcttaagatcccagtcgcataccaggtgtcctcctccaggtcgtgaacggcaaaggcactgcccgcatcgccatagcaggtgtcttcttggtacttagacatgccagcacagaaggtgtgttcattcagtatgggctgcacccctacagggctcttcggtgtcttcttttcggggactgtgctgccttcataatgccttatgcattggtcttggtcagccacaggcagcatgacatacttcagatggtcagtaaatttaaaattggcatttcgcccccagccagaaacataacccccaacttttttgtacaaagttggcttttaaaag

SEQ ID NO: 347291 - DNA, 1209 bp, Homo Sapiens
  misc_feature (77)..(100): n is a, c, g, or t
  misc_feature (1012)..(1038): n is a, c, g, or t
  misc_feature (1056)..(1138): n is a, c, g, or t
ttttaattttctatcaactaatagtatagtaacaactatgattaacttgtttactttttctgaggattagtaaatcnnnnnnnnnnnnnnnnnnnnnnnnggatttacacttgagggtaaattaaatctggtaaactgaatttcctagttaaataaaattagttgcagtatatgatgaacagtgtatgactcaaacagctgccttacaattcactcattccatgtggaacaaacatttatcagatgcctattatgggcatatgtctctgctaagcaccatagttgtcaatgtgctgtgcaaatgctaagttccttttagcaattgttcagttggaagacgtattaatatttggggaaggaaaagaaagtagttgttttacaagggaggaaaaaagtgaatctggttacacatatggaagtaagcaaaatgaaaagcacttattgctttctgacagaattatagatgtaattttaagagttgctcctagcaagttaaaagtgcatataaaatatgcaactcttagttaaaggccttattatcagtcttacctatacaagtagtaaattttgtcattgctttagttacaaccatctgtaaataacttaaaagacttattatgtggggttcaaattgagtggaataaagtatagattaaaagtatacaatccttagcacgttatctcagggcttatgaaatgtaattaaatttattaagaaaatagatgaaaaattagggtacacagctggccaccaaatgcgaagtcaatctgctacttaaccctgaaaacaaaatcagttttgcatattaccactaacactaatacatatagagagcggaaccataactcattgaattttggagaggaataagcttagcgttaatattgacaatattaaggcaatattcttgtaggaatactatgtgcatgtttgatattttgccaaataacaataattaataattgttcaatgtttaagaataatattaacaaaataaaggagtttaatgcnnnnnnnnnnnnnnnnnnnnnnnnnnncccacctttcttgtacannnnnnnnnnnnnnnnnnnnnnnnnnnnnnnnnnnnnnnnnnnnnnnnnnnnnnnnnnnnnnnnnnnnnnnnnnnnnnnnnnnccatccagctgatatcccctatagtgagtcgtattacatggtcatagctgtttcctggcagctcctggccc

SEQ ID NO: 347292 - DNA, 996 bp, Homo Sapiens
  misc_feature (793)..(826): n is a, c, g, or t
  misc_feature (845)..(926): n is a, c, g, or t
gtgacagcgtgtaacaaagcttagagaaacctccaggagactgctatcatggcagagaagcccaagctccactacttcaatgcacggggcagaatggagtccacccggtggctcctggctgcagctggagtagagtttgaagagaaatttataaaatctgcagaagatttggacaagttaagaaatgatggatatttgatgttccagcaagtgccaatggttgagattgatgggatgaagctggtgcagaccagagccattctcaactacattgccagcaaatacaacctctatgggaaagacataaaggagagagccctgattgatatgtatatagaaggtatagcagatttgggtgaaatgatcctccttctgcccgtatgtccacctgaggaaaaagatgccaagcttgccttgatcaaggagaaaataaaaaatcgctacttccctgcctttgaaaaagtcttaaagagccatggacaagactaccttgttggcaacaagctgagccgggctgacattcatctggtggaacttctctactacgtcgaggagcttgactccagtcttatctccagcttccctctgctgaaggccctgaaaaccagaatcagcaacctgcccacagtgaagaagtttctacagcctggcagcccaaggaagcctcccatggatgagaaatctttagaagaagcaaggaagattttcaggttttaataacgcagtcatggaggccaagaacttgcaataccaatgttctaaagttttgcaacaataaagtactttacctatnnnnnnnnnnnnnnnnnnnnnnnnnnnnnnnnnnccccaactttcttgtacannnnnnnnnnnnnnnnnnnnnnnnnnnnnnnnnnnnnnnnnnnnnnnnnnnnnnnnnnnnnnnnnnnnnnnnnnnnnnnnnnccatccagctgatatcccctatagtgagtcgtattacatggtcatagctgtttcctggcagctctggccc

SEQ ID NO: 347293 - DNA, 675 bp, Homo Sapiens
  misc_feature (464)..(464): n is a, c, g, or t
  misc_feature (481)..(481): n is a, c, g, or t
  misc_feature (560)..(560): n is a, c, g, or t
  misc_feature (577)..(577): n is a, c, g, or t
  misc_feature (581)..(581): n is a, c, g, or t
  misc_feature (648)..(648): n is a, c, g, or t
  misc_feature (657)..(657): n is a, c, g, or t
gagaagttacaaattttttaagaaaatctgtaaaaaggatgaaagaaagtcgcctcgaagatacacaaaagcaccgagtggatttccttcagctgatgattgactctcagaattcaaaagaaactgagtcccacaaagctctgtccgatctggagctcgtggcccaatcaattatctttatttttgctggctatgaaaccacgagcagtgttctctccttcattatgtatgaactggccactcaccctgatgtccagcagaaactgcaggaggaaattgatgcagttttacccaataaggcaccacccacctatgatactgtgctacagatggagtatcttgacatggtggtgaatgaaacgctcagattattcccaattgctatgagacttgagagggtctgcaatccaagctatgctcttcaccgtgacccaaagtactggacagagcctgagaagttcctncctgaaagattcagcangaagaacagggacaacatagatccttacatatacacaccctttggaagtggacccagaaactgcattggcatgaggttngctctcatgaacatganactngctctaatcagagtccttcagaacttcttcttcaaacctttgtaaagaacacaggatcccctgaaantaagcttangaggacttcttcaaccaa

SEQ ID NO: 347294 - DNA, 323 bp, Homo Sapiens
cagagaaaagaggcaaaatgattaacgaaatttatgttttttagacagggtgttggctttacaccaacgaaaaagaaaaacagatgaataagcttttgatcttcattttctttctcttattctgcatggtaggctgagatgcttttaaatgtgatgttataagcctaaggcagcttgacttgcagcaacaagttttttaccctcctcggcaaagcaggtctccttatcgtcagccttgcagcacttctctacaaaagctgcgaaatcatccataacagagttcagttgctcccaacttttttgtacaaagttggcttttatcg

SEQ ID NO: 347295 - DNA, 1538 bp, Homo Sapiens
  misc_feature (160)..(160): n is a, c, g, or t
tgaaggtttatagaatatttatttcttttttggttgcagctatctccttcccaacctaccactgctaagactgtttcataagatgcacttctctacactcagctaatgaggtgtttcaatcagcagttgttctttggatgaggagccgatattgttttanagcctattattttcttgggtgggtattctggagcatggggagctgaaagtgttgcaaggaaactgctgtgtgaaatttgatcaggtccttggtattcatttttatgtttcaataactgatttattttttcccccttgtacttaagatttaacatgtgttgtatttccagcagttcaaatctaattgtgtcgaatttccaggattggaggaaaagttgctccctttcagccctcctactagaagcactggagctaggctggcgggcattggaccctagtaggtatagcaggctgtgaagagcgactgggtggaagcagccccagaagaacccgtgtgaacatactgtcctttgtttgcagccttgccaccccaggcagccagtgcactggcctgcagggcccgtccataagagaaacttagtttccagggctttggtagagggcaaaggttgatagcattgaggttgagagtggcatcctcttcactcatgccaccagacaaaacgcagatgccaggaacagctgcaggaacagtacggtggagagctgttacggtggccatagctacttgttctggagtatacttcttggtgcaggcatgtccagcagtcaccatgttgggctttagcagggtgccctccaggtaaacatgatggtcattcagggccttgtagacagcagccaggaccttctcagtaacatactggcagtgttccaggtcatggtctccatcaggaattacctctggttcaacaataggtaccagtccattctgctgacagatgctggcgtagcgagccagggcgttggcgttttcctggatagcgaggctggatggacactggtcggcaatcctcagcgcagcacgccacttcccaaagtcaacaccatctttcttgtactgagcacagcgctctgagaggccatcaagcccttgaatggtggtttctttgtttgttcctgcaagaggagcacctccttggtctaacttgattcccaccacgatccccttttccttgaggatgtttctgaacagctttccctggctgtccttctggtagagggtctcgtggaaaaggatcacacccccgatgctctggttgatggaactgtccacagagaagaggatttctcggaactgccggcggttctcttcagtgttttccaccttgatcctctgcaggcggttccccatggtacctacagattcatctgcagccaggatcccctttccattggcaacaatgctctgggcaatttctgagagctccttcttctgctcctgggtgagggctggaaatcggtgggccatggtgacaggtagtttgggagagaagagtcctcctagatatcaaaagctgtgggtgaggcagcaccaa

SEQ ID NO: 347296 - DNA, 1016 bp, Homo Sapiens
gcctcacccacagcttttgatatctaggaggactcttctctcccaaactacctgtcaccatggcccaccgatttccagccctcacccaggagcagaagaaggagctctcagaaattgcccagagcattgttgccaatggaaaggggatcctggctgcagatgaatctgtaggtaccatggggaaccgcctgcagaggatcaaggtggaaaacactgaagagaaccgccggcagttccgagaaatcctcttctctgtggacagttccatcaaccagagcatcgggggtgtgatccttttccacgagaccctctaccagaaggacagccagggaaagctgttcagaaacatcctcaaggaaaaggggatcgtggtgggaatcaagttagaccaaggaggtgctcctcttgcaagaacaaacaagaaagatggtgttgactttgggaagtggcgtgctgtgctgaggattgccgaccactgttcattcaggcctcgcttttcaagatgaacgccaacgccctgtcttcgcttctccagcatctgtcagcagaattgactggttcctattgttgaaccagaggttatttctgatggagaccatgacctggaacactgtccgtttgttactgagaaagtgctgcctgctgtctacaatgccttgaatgaccatcatgtatacctggagggcaccctgctaaagcccaacatggagactgcaggacatgcctgcaccactgctcctgcagatgttcctggcatctgctatctgtcaggtggcatgagtgaacatgatgccaatctcaaccttagagctatcgaccttagacctataccaaagccctggaaactaaggatcttttatggaatggccctgcaagccaatgcactggctgcctggggtggcaaaggttcttactaagaaggcacccgagacgctataataaacggggcctgggtttatggcaagggggccaaaggcaatatgttctccccggtttttaggggctggttccaccca

SEQ ID NO: 347297 - DNA, 509 bp, Homo Sapiens
gaatggttaagaaggaaggtttattggcttcaattccccagttgatgttcaacactttatttagttctcatttggattttaaacatttgcttgacaaataattttccatcaatttccatttctttggaaagctcccacgtgtaatttatttttaacatctgtgatgagcagaattaatgatatttcccagctgttgctccagatcatgtagggtagaggaggctgaagactgccacaagggaaaacatgtgtattgtctcaaaacatcagaatggtacggatacttttcccagagtgaagcaggtcaaatccttcatttattttttcaaaaggtaaaacatgggttattaatgcatccaatgaaaacttcttagccataaaatcagccacaagttttgggacacattctttacttttaaagccaccaagaatagctcccttccaggtacgtccagtcagtagcagcatagggttcattgagaggttttgggaatcaggaggtaccccaa

SEQ ID NO: 347298 - DNA, 835 bp, Homo Sapiens
tcatggtggaaggcaaaggaggagcaaaggcatgtcttacattgcaaactttcccataccttcctgtcatctgagccctccaagtctctaggaagttccaaactttcccacatcttgctatcttcttctgagccctccaaactattccagcctctgcctgctacccaattccaaagtcactttcacatttttgggtacctttacagtagtgccccactccaggtaccaatttactgtattagtctgttctcatgctgctaataaagacatacccaagactgggtaatttataaagaaaaagaggtttaatggactcacagttccacatggctggggaggcctcacaatcatggtggaaggcaaaggaggagcaaaggcacgtcttacatggcagcaggcaagagagcatgtgcaggggaactcccctttataaaaccatcagatctcatgagacttattcactatcatgagaacagcatgggaaaaacccactcccatgattcatttacctcccactgggaccctcccataacatgtgaagattattaccattcaaggtgagatttggatgaggacacagagccaaaacatgtaacactgtatctttacagttgttgacatgtgtcttgactgtgaatggtgccttatatggtctgtaagtgtttgtgtgcataaaatttgatcacttttaactttttttaattataggtttgtgtatatcttatggtagtaaataataagacgagtaactacatatattttatgcatttataacatacttaactttttcttaattttttgatatttctaggctacatggcttgtgagttttttc

SEQ ID NO: 347299 - DNA, 890 bp, Homo Sapiens
ggcgtacaaggccaactttgtacaaaaaagttggctcaggacacccgtcaagatccatctgggtagattatgtttcttctacctggtaatccttatttctcaaattatgtatttccttcttcttattactgaattcttatcttttttaaaaagcatatttctttaaagataattgcagagaacttaaataaaagccaacgcacaggcaagtcttgaattaggatttcaaagtattaaatatatatctaaatgattctttaaggagccatgggtgtacctgagagtctctaaacattgggaagttatcgttgacatctttcactttaatattacattcacatttatttgatagttcttctccatctttgtctgctccactccccacccgacgatagctgctagcttgctaattttggataaaaaataaattaaaataattaatcccaaagaattataaatggacactacttgattcctatgggtaaggaggtagaaatattcatttttatgtagatgacatttgtgggactctggatggttgggtggaggtctttaaggggctagggcaggttttctgttttgtgagcttcttatggcaggactgtactctaccgtaaccttagagcaaaaatgggcaatgagtagggtgggagtaataagctcacttatggagcttctctgttagtctattgggaaagccatttgtacaaaaataatatggggtctgaccgggtagcctgtggtaatggagatagaagtggtggtggtaggtaatgagggggattggagaagagattctttagtgctctggaagcaggataaaattaagagaagtcagagaaaaagtgtgatataaaagaagctttattccagacagaaatttctccctt

SEQ ID NO: 347300 - DNA, 856 bp, Homo Sapiens
  misc_feature (656)..(677): n is a, c, g, or t
gcataaaaagccaactttgtacaaaaaagttggacgttagggcattaaaaaatcttgctgcattgatgtgtctctgttgttggaaatccaaccagggccaagtaaatcatctgggccctgattgtgcagatattttggcaacttcttggaaggtcttcatagtgtagaaggcacaatggcaaatggtacctcctttagaatgtcgatgactggagttctatacgttctgggtcttctatgcaaatggtggctctgttcctctctataaagataacattaaagttatatgtgccatttgtgtattctgaaaatcttttccttacttgccttatagaaccctgattcttttgccccttctcctggctctgtgattattcttttcctgactccacttcctctgccttcccctcacatgttgctgtttctctggactctccccatggagagttaaggggagcttgtcaggtcagtgtagaagggtaatgcctggaaaccaaaaaagccacctcagctttgttggtcgaccagaggtcagtatgtgacattgagtgccattgatcctcgttcgctgggtgttgccatctcgtccatactaaccatatgaatgtgattaggtgatcgttctgtgatagatggcttccagtacagggacaggnnnnnnnnnnnnnnnnnnnnnnaaaatcttaattgcatcccatcaaaaaggatatgaattacggtagattttgctttgtgaaaaagtggtaataacaaaactgttgtattttactttgatgtgttaagttcttcatcttaaaataaaacagagtaaggctccttaattgtatcgtcgcacactgtggttgatggctcattg

SEQ ID NO: 347301 - DNA, 227 bp, Homo Sapiens
tcaatataactaatgtccttgtcaaaagaggaaatttggacacaaacacaaacatgcccagagagaagcaatgtgaagagacacagggagatctcatgtgagatgagatagagtatgcacagtcagaacaccaaagataccaacaacactgaagctagccaacttttgtacaagtggcatatagatagcattgctcatcaattgtgcaacgaacaggtcactatcag

SEQ ID NO: 347302 - DNA, 1280 bp, Homo Sapiens
caacaaacaatgtaaaaattttacggattggttctgctaacttactacagtttacattcctctcaggtgggagaattgttgagttttttcttaagatagaaaagcaattcagataatctgaaatctccacaagaaggataagaaacacagcagaaactattctaggcaggaagtcaatcctttcaactgtctgtgctccatagaaacaactgtctgcactgggaatcatatgcggtacagaccacagccagacctctgatcctctcattagtgatttcagaagaaattaccagtcaactgagtaattcactgagtaaagtaaacatttggcactgaaagaggttagacggataactattagtatcaccatattcatgaagctggaatattttccattactggtatcacatctgaatggaagatgttaaaaggtctctcatcttgtaagatggatatgacagaactttttctgggaaatgaaattattaacacacctgcgaggtggatggaagagaaaaaaaagaataatcagcttgagttcttctccttgataagacaactcactaaaaacttaaagagaaaaatacaagtttaaaataattaaccagaagaagacgactctagcgtttttaaattgctgataagattttaatttgctccaagttgaaaataattatattgcttgtgttttaaggcacataatgagcaattatatcacacgtgatagtttcagcagtaaaatattatccgttaacagctggcactcataaaagcatagcacaatgtgaagatggaatttgctaaaataaaccatctgctgaaaactgctattctgcaaatttaaaaataaagtttgaatgttatttgtcttatttaataggtttgtgaaaaaaatgagctatatgaaaagtagctgctaccttaattaattctttatattagacggctggtcacagtaatgcacagtaaggtgctacatagatatattgcaaaattttctgcatatactatgtatttggcttaaattatttgaaattatgtagttaaaataacaaatgcatatttaaatgttttgacacaaattgcaaatatacctttaaaaagcgtcttacactctaaatattatatgtcacctatatatttgtcttttctttataggaaagtttaaatttttcccttgaagctttaattacttgactctataaaacaaactgataatgtacaaattaacaggaaaaaaaggtttacagatatgtgcacaagtatgcacttggagccaa

SEQ ID NO: 347303 - DNA, 436 bp, Homo Sapiens
caggaaataagagctgctattattactactcttcatagcataatgtaagggtttccttcctctcatcccagctcggaagcaccttatcaaggtgaactgagccgcttctgtttcttctcttccctctagccaccacgccccttcctttccggcatcttgcccccattcttatctgcgcctctctccgcgagcccggtcttggccctgccctttccctggccccgcccaccagacctgcaccggcacagccctcgctcagcggggcaggaagctcatggtgtagtttcgtgggatcgtggcaaagcccacgtgtttgggggacacgtcaatgtccttaggtgactgggaggacttgaggcggaagttctgcatgacggtggtgaagaagagaaagagctccattctggccaggccttctccgaaacagttccgccaa

SEQ ID NO: 347304 - DNA, 605 bp, Homo Sapiens
  misc_feature (73)..(275): n is a, c, g, or t
  misc_feature (307)..(402): n is a, c, g, or t
attaatgtagtgttagtagaggttttgacaaacacccatgggtgagataaataaaaaagttgtttagtctgtnnnnnnnnnnnnnnnnnnnnnnnnnnnnnnnnnnnnnnnnnnnnnnnnnnnnnnnnnnnnnnnnnnnnnnnnnnnnnnnnnnnnnnnnnnnnnnnnnnnnnnnnnnnnnnnnnnnnnnnnnnnnnnnnnnnnnnnnnnnnnnnnnnnnnnnnnnnnnnnnnnnnnnnnnnnnnnnnnnnnnnnnnnnnnnnnnnnnnnnnnnntcttcatgtccagacattatttagcctaccannnnnnnnnnnnnnnnnnnnnnnnnnnnnnnnnnnnnnnnnnnnnnnnnnnnnnnnnnnnnnnnnnnnnnnnnnnnnnnnnnnnnnnnnnnnnnnnaacaattggacaagggcaatctgactggaaagtagaagttgctaacaactttgctaattctctgcatttatttttattgtttgtatttcttccctaaaatacatatttcatatgagaagagaactttatttggctcactaatgaataccagccacctgaaacactgtttagaagatactggctcaataaatatttaatgaatg

SEQ ID NO: 347305 - DNA, 942 bp, Homo Sapiens
gcttttgaaaataaacattttgtatcacagaattaactattgctttaagaagccaagatctattcctccgtaatataatcagataatcctcaaaaacagaaagtgtgagagcttagtgaccatatttccccacctgtgattttgtaacgtcaaacaattaatagacaagctggagtagtagagcagaatggttaataacacaggttctgggattcaaactccagtaccaacacttaatagctttggcaaattatctaatcctaattaattccagttttcttatctattttttacccaaattcctagtgttttaaggaccaagtgaagtactaagttaataaataggtttttaaattcacttaatttcttaatcagacttaaagggttttttgcactttggaaattaatagttggtcaagtagaaagatgccagctggatagaagagctaattttgagctcggtttataaagtctcaaggggcagtaccacacagagaggaaaacagttctgaaccaggttgaatagactctgagaaacagacattttgcttaatacacctgcctatcgtgcggttgtgcatgcactggttttattgacaaatactgggctcagatattttgtcaagtgacttgagagagaacattaatatcgattgttttctcttgatttttcttctatagtctacaattcacttgtttgtaaaatgtttggtttgatttagtaatgtatctccctttgctttgtaaacataaccctgaaaatgaggtaacacatgagcaatactttatatactttctgtcaaaaaaaggacaagcaatgccattaaaaaatcattctctgacacattgatcaagacattatcataggttatatgtaattttaattcatccatagtttgaatttaggcattaatgaaattctataatataaatcctagccaa

SEQ ID NO: 347306 - DNA, 943 bp, Homo Sapiens
gaggaaaagaacacacgggaatagtcaccaggttcctaggccagaaggctctacaaagaggtatcctttcctgtggagtatcagatggctgcttgcagcaaatacctggaatggttggcaaacagccttggaccatcctgataaggttcttgatacttttgttatgttgtagcccagaatcacagagctttgcagttcagaactactaattatctcatccagatgtgatcaggccctaaggaaactattgataggaacttacacacagggggctgattagaaccttgaaatacctgcatatgaatttatgggacaaataaccccacaggaaagaccagaatgtgagacctactgaccagacctccccaaatactaggtcaggaagttggaagatgcttatttttctggcatattctcggaagatcctgaagacatgaactgggtcagtaaattacggacactgctgttaagcatgtcttgtatcggccattttgtacctgtgcaaccttgggaaagtgacttagcctctatgaacctgaatcttctccttcattaaatgtatctacaattaattcctcctggtgggtgttattgaaaagattaaagatatttttaacgtagatgaaacattgtaaatctcagatggtaattgttgtcccgtaagtcttctataggcacctgcctgccaccaccctgattgaaatatccatgctggttattcaaataccctttccttacaatattactggtgaaaaactaataattcattttcatttactttcttaatatcacaacaaactagaattctcaattttgcaattttaaaagtatcagtatgtctttaatattgcaggagacatacttatattaagcaattattcattgatttgaaatgcaaatttgactgggcaccctgtatctttatttgctaaatgtgacccaa

SEQ ID NO: 347307 - DNA, 829 bp, Homo Sapiens
gacgtgaagttagggaaggtgtgtgtgatgccagagtaatggcaggggagggaggttgcattcttcttcactgccatcaatccgtgctggcccctgatgagatgcccacattcccctagagtcttccataataaattccatgctgacataccctgctttctcccattgtctagataatgaggtatctttggttctcctggccttctctcagctacctctgtgctcttccaagtgaaaatagggaaaactgttcaaatctctcccacaatgtcgtggaacccagtgaggctccatgaggctgccctggtacctttgagcctaaacatgtgtcttgctatttctactcttccgctggcacatcaaattggtgggtgtcaatgtggttgggtttaccatttcccaggatccaagatagaaaccagtatgcagatttctggcttgtgaaggtactcctagtttatcaggtatgatgtgtttggctgtaagtaacagaaaacccaactgaaagtgactttaataataagggacttgtgatctcatacaaccaaaactttttggtggtagttgtcataacatgttctatagagccctggacatccaatagaccacatttacattatttttagaaaatccaccgatgttgcacaatggcacatatttgtaaagacaaggctcattaattcagatatttggaattcaaaaatatttaaagttaaccacagcataatgaatcctcaacgtccagagttctacaaaaatccagcaaaacttacttttactcattcatcagttctatgtcacccaacttttttgtacaaagttttcattg

SEQ ID NO: 347308 - DNA, 672 bp, Homo Sapiens
ctccctttctgtttccggatgttcctgccctagtgcctgcttcagcaacaccagccacctctcctgatccagctgtgtctcgtgtcatgaatatgtctgccatcctgccactgcctgggcagagtgtggagcggctctgtgtggaccccagacaccgccaggggccagtgaacctgctctcagaccctgagcaaggggttgaggtgactggccagtatgagagggagaaggctgggttctcctggatcgaagtgaccttcaagaaccccctggtatgggttcacgcatcccctgaacacgtggtggtgactcggaaccgaagaagctctgcgtacaagtggaaggagacgctattctcagtgatgcccggcctgaagatgaccatggacaagacgggtctcctgcagcatcagatgacggcagacgcacgctgagggttcagggcaatgaccactctgccaccagagagcgcaggctggattaccaggaggggcccccgggagtggagatttcctgctggtctgtggagctgtagttctgatggaaggagctgtgcccaccctgtacacttggcttccccctgcaactgcagggccgcttctggggcctggaccaccatggggaggaagagtcccactcattacaaataaagaaaggtggtgtgagcctggg

SEQ ID NO: 347309 - DNA, 1284 bp, Homo Sapiens
  misc_feature (19)..(19): n is a, c, g, or t
  misc_feature (73)..(73): n is a, c, g, or t
  misc_feature (75)..(75): n is a, c, g, or t
  misc_feature (80)..(80): n is a, c, g, or t
  misc_feature (1009)..(1009): n is a, c, g, or t
  misc_feature (1061)..(1061): n is a, c, g, or t
taattatttggatcttccncccatggtggtccaggccccagaagcggccctgcagttgcagggggaagccaantntacanggtgggcacagctccttccatcaaaactacagctccacagaccagcaggaaatctccactcccgggggcccctcctggtaatccagcctgcgctctctggtggcagagtggtcattgccctgaaccctcagcgtgcgtttgccgtcatctgatgctgctggagatccccagagcacctcctggtaaaactggccaagggtccctccaacgtggctggagaagcggtcatgtgtcacgcagaaggagccggagcccctccccacggccatcccagaacaacaggccgatggtcactttgtctgggtcactgagcagcaggagacccgtcttgtccatggtcatcttcaggccgggcatcactgagaatagcgtctccttccacttgtacgcagagcttcttcggttccgagtcaccaccacgtgttcaggggatgcgtgaacccataccagggggttcttgaaggtcacttcgatccatgagaacccagccttctccctctcatactggccagtcacctcaaccccttgctcagggtctgagagcaggttcactggcccctggcggtgtctggggtccacacagagccgctccacactctgcccaggcagtggcaggatggcagagggagcctgtatgggggctggggtttgggttgtcatggttgtttcttcgattttcatattcatgacacgagacacagctggatcaggatttgaggtggctggtggtgctgaagcaggcaagatggccagacggcggaaggggtggtaagcagcatggtcaggaacatcaggaggtcctgggagtccaagttgcctggagctgagaaccccaggtctgaaattcatccgggagccagcagctccagcttgtctattccatcctcttcttggagaaaaggaagcctctgtgtggtcaagtcctgatnagatacaactgaactgaggcccgagggctgtcaccagccagaggagctgggnaaggcactaccctccacagccaggactgagcccaatctgtcaatctcccctccccccacctcctactttgtcacctggttttggtatttttgctccctggagataatatttgaagaaagtggaacctggaaatcagtgggacctgggtttgcatcttgcacccaccttcctgtggccccacttggatggggactgtattcttagtgctggggacagggcctga

SEQ ID NO: 347310 - DNA, 159 bp, Homo Sapiens
ataatttttcatctttcccttgcggtactgtatctattgcgccaggtttcaatttctatcgcctatactttatttgggtaaatggtttggctaaggttgtctggtagtaagggggagtgggtttgccaacttttttgtacaaagttgcctttttatagt

SEQ ID NO: 347311 - DNA, 837 bp, Homo Sapiens
ttgggttcatttgcctcctgaggggactcatgtgcactacgggagacaccccatgagctctgacgactgtccatggagaaataatttagccaaccacagcgcatgtgaagcgcttgtgtcaaccgattatttcatgaagcccgtttggcattgttgtcgcccaggcttagccccagagtggatggagctgcatccaggaacaggcctaggggggcctttttttcttccaggcccttatatcctctcagacccccagaacatccctagtgtaggcagaagtctggctcaggtgccctcgtttgagccccttgtggaactggcccaggagatgttctggggaggagtagaggctggagtggtgcccggctgtgccaagggcaaggctgaagtggacacgagggtccctgactccttaagccccctgggtcaggggacatttttaggagtccacttggtcctgctttggaggtgtgtatatcaaaagttcagcaatctcccagacaacctcccaaagcaaacccttccggcccccaccccaccctcccgtcagcccctgggctccacagacccctgcaggcatgttgggaggaatgtggtcgtgtctggggctgcctgacacgtcctatctcctcagacaggccccaacagcccctgctggaggctccactgctcttcctgggatcaactgttcctagaagagaagcaggacctctctcaccccacccccaaccttgactgtcaccaaagaagaagccagagaggggagccccccactactgtggcctatgagcttggaagacaatactgagacagacacctgtgctgtgggctccccaa

SEQ ID NO: 347312 - DNA, 1512 bp, Homo Sapiens
  misc_feature (940)..(1037): n is a, c, g, or t
  misc_feature (1084)..(1292): n is a, c, g, or t
gcagctatgctttgtaggaaacgttttactgcaggagctttcagtgaccatatggcacttctcagagcattccaggcctggcaaaaagcacgaagtgatgggtgggagcgagccttttgtgaaaagaattttctttcacaggctactatggaaataatcataggcatgagaacacagttgcttggtcaacttagagcatcaggttttgttagagcacgaggtggtggtgacattcgggacgttaacacaaactctgagaattgggctgtcgttaaagctgcattggtggcaggcatgtatcctaatttagtccacgtggacagagagaatctagtgttgatagggccaaaggagaaaaaagtacgatttcatcctgcttcagttctcagtcagcctcaatataaaaagattcctccagccaatggtcaagctgcagcaattaaggcactgcccacagattggcttatttatgatgaaatgaccagagcccatagaatagctaatattagatgttgttcagcagtgacgcctgtcactatattggtattctgtggaccagctagattggcaagtaatgctcttcaggaaccttcatcctttagagtggatggcattcccaatgacagtagtgatagtgaaatggaggacaaaactacagctaatttggcagccttgagacttgatgagtggctccatttcacactggagccagaggtaagttgctttcaagtagtgtaataaatttctttcattcagttagtgtgaattgatatataatatgataaaatttttttctttactattgagcccttagtatcagagaatataacttgtttttcagttttcttggggacctcattcattctcttctgtattggggtttattccaacagaggacttggaaaacctagttgtggctcattatttaagcaaggtaatnnnnnnnnnnnnnnnnnnnnnnnnnnnnnnnnnnnnnnnnnnnnnnnnnnnnnnnnnnnnnnnnnnnnnnnnnnnnnnnnnnnnnnnnnnnnnnnnnngtcggttgagggctgctggaccctgcctcctatagagtggaggaatnnnnnnnnnnnnnnnnnnnnnnnnnnnnnnnnnnnnnnnnnnnnnnnnnnnnnnnnnnnnnnnnnnnnnnnnnnnnnnnnnnnnnnnnnnnnnnnnnnnnnnnnnnnnnnnnnnnnnnnnnnnnnnnnnnnnnnnnnnnnnnnnnnnnnnnnnnnnnnnnnnnnnnnnnnnnnnnnnnnnnnnnnnnnnnnnnnnnnnnnnnnnnnnnncagtaatccttgagtatttctggatatataagaaagtattgagtattgggtacacaagaactccctttattttgtgtaactgtgttttctgagagaaagatatgattccatactattttctctttgcatatacttctgaattgggggtttgagggaggatgaatgtttcttttcaaattacaaattttcatgacaaagcctccccttgattctatcccaa

SEQ ID NO: 347313 - DNA, 917 bp, Homo Sapiens
  misc_feature (591)..(599): n is a, c, g, or t
ggtttttttaatgttcattactttaaaagcttacatttaggaaactcaagctttgcttttctataatggttaacttttccatattatcataagaatcaactttctgattaatatttctcccttttttcttaagaagtcaatagttcttcatatccacagtcatgagtcatttttgaggacatgccagaattaccaatgtaactgtgaggcaggaaaagtacactcccagggaagtcagagtaagcctgtttccaccgcagcacagcagtgagcacagctaggcagaattccagcagagtgcaaatcagcatcagagagagagttccagccagactggctttggctgtatagcagtccgtggtataaagtgaatcatgataaaagtaagaaacataacttcttgttggtatattatttttgtccaactcacactgcagtgaggcaggatttaaggtggcctgtttgacagacaggataatgaaacccaccagggcagacagagcactcagaatgcttccaaccaggctgctatgcaccaaaagcttggttaaccttttctctgtggcgattgatagagagccagagatgatnnnnnnnnngggtcctatgaatgggtaagcagagttcaacagtgtagaagtcacttgggtaaaatttggagagaaggaagcagatgccaaaatgatccccaagctcaataccatcatgccacacaagatctggatagtcccaataactttgatttctgcgtgtagatgtttcttcaggctatcctgcccctggttggtgggttcgggtttctctgcttgggagaagttgatggtgttgccaactgtgcccgttggttccagctgagtcctcagaagctccaaagaggttttaactctggtttctcagtcccatcaacggtttctact

SEQ ID NO: 347314 - DNA, 738 bp, Homo Sapiens
  misc_feature (625)..(675): n is a, c, g, or t
ccctgtttgctatcctttattaaagggcccacatcctcatgggactccagccaaaccagtcaggtcccccaaatatagcaggaggcctggaaggggaggggaatgacttatgatcctaccatgcctcccaagaaacagaaaccaccacagacagacagacagacggacaggggctggggagaacttgcctcactctcagtcctctcccactttcccccacttgaaaagaaagtcaaacactggctacgcagcaccccagccccccaccccacccatagcagcgtttgtgggacacaccccctttgcaaggggtggccccgaggcagcttcctatctctctcttcactttggtttgctcctggcaactccgtgccctcttcctttcctcagcctccggctcggtctcccccttgtcttctatcacctactcggaccttctctctcatctcctgggcctccctgccccagcacttctggggaagcagcgtctcgggcgtcttcccttctcctagcaaggggccccaccaggccctctgcccaggatgtgggactcacacagctgccccactctccttgaggtcaggggcagaacgctgccgtctcattcgtgggggagtagtgtatnnnnnnnnnnnnnnnnnnnnnnnnnnnnnnnnnnnnnnnnnnnnnnnnnnntggggataagagttgtgctttttgggctggaagtgctggggttcaggctgtgcagaaccccaa

SEQ ID NO: 347315 - DNA, 471 bp, Homo Sapiens
ttttttaacaaaatgtcattatcttcttaacttttggccccccaaataaatgaggaaactgttaaaattgtattcaacaatccttgttcgatatctcctttgatatttaaacttttaccagtgtattaaaatgatgtctttgcattcagaaggttaaagaaatttgttttttaaagtcaggaagcatctaaatatggtgtcctccggaaaaaagtattccaggaaatctgggaagccgtctgtggaagatcagtttacgagagcctatgactttgagactgaagataagaaagatctgagtggatcagaggaagatgttattgaaggtgcagtacatctcatgttgggcagtgatgtccttcagttcatttgttttgaacccattgagactatcgtacaacttagtttgtaaagcattttcaggtatggtcttccctcccccggtatttgtggttacagaacctgctccaa

SEQ ID NO: 347316 - DNA, 1393 bp, Homo Sapiens
ttggagagacaatacctagtttttcaccagatttgctaccgtttctaatcataactggaatctacctttgggagagtgaatctatgaactttagattggattttcagaaagaagagttaagtaagcccttgggaacttaaacctaaatttctggaccttcttggattttttatgtcccaaggtaatttattacaattatataagtgcaaaatgggctaaactgaaataactgacagcctattttaaaatatgtgcatataaaatctatcagcatcagtttgttgaggttgatttatcatctggcactttgaatttgtctaaaatagacaagtagaaagcagtaaaattattatattttcaggcaaagtagggaaaacttgcaatctcgggtcctttgtaacatctccaagtagagcatcttactctaatggatcttagaggtcgtctggcccgacctctattcaggaagcccttttgacatatgaacagtgaaagagaagagtgaactccggataaatgaagagggtaggagaaaatgaaggaagcattatattttgaaaggtaaagactatccataaaaatagttaccgacattaagtcacctgattcagataaaaatatagccttatagaactcaaactagtactcacatcactagcaatgtctcttgaagctttagctagctgtacagaaattgcatcaactgggagatcatagcctttcttcaaagcttcttcccatccaagtttatagagtttctgactatacagtgtttgattctgcttggcttgtaaaatatcaggtgtatcaggcatcacatgaatcttggtcttatctttattccaatccatggtgtataaatgcttgttcatggtatgtgcattctgcttggcaagcaccatgtccatggaatcagtcagcttcttaaactggaagttgctcgggtgctggcggtatttctgatcactggcatattcagttgctttcttggccttctccacttccagagaacctgctggactccagccaagccctttgtaccattcattgtaatcttgcttatattcattatcactctgtatgcgattcatattcctggtcagctcaatgttcattgcatctggaaggaggatgtacttgtgaatcaggtgcttgtagttagtgttggtgatgttggcttgggcatcctttgcagccgtgacactgagcatgtcggcaggggtgtggtagctggtctttgtgttctcatagtttttcttgtactcccgatcagattgcatcttagccacttgcatggaatggactaatttgggatcatcctcgagactgcggaaaccaaccattttccccttccctttttcataattgtacttgtatttataatcacccccgg

SEQ ID NO: 347317 - DNA, 502 bp, Homo Sapiens
  misc_feature (272)..(272): n is a, c, g, or t
  misc_feature (334)..(334): n is a, c, g, or t
ggtgtcctagaaatatggggtttagttggcaacaggaaaaggcaagtacttgtcctaggttaagactgtcgaacaggagccaaagaagagctttgttgcaaatgtatacactttttcctaaagtgattttccatgacctgatatttggtcagtgagcactttgacaaatgaatggctgggtagttttattaagccagttttttgttgctgttgtttttcccgctctctgtcttcttcttcttcatgtagctcagtcccagttccagaatganggaagctgcctcagggtcgccctgtttcctccccttggaccttgagacaagagtttctgtangtctgggtggaacgctatggatgatataggtactgtatgaggactttgtccataaataaaatggcaatatatgacagtgacttgctaaatgtctacagggagtgggcacataagcctggtgtggccaggagctagtcctggagttcagcaagccttggtttgtaccaa

SEQ ID NO: 347318 - DNA, 1404 bp, Homo Sapiens
  misc_feature (983)..(983): n is a, c, g, or t
  misc_feature (1140)..(1140): n is a, c, g, or t
  misc_feature (1383)..(1383): n is a, c, g, or t
tataattaggataccacactgaattagtcgtcatgcctaattagcctctggtctgtgatagttccacagtctttctttttcataaccttgacagttttgaggagtactggtcaggtgttttgtagaatattcctcaatttgggtttgtctgatgttttcctcatgggttagagtggggttatagatttttaggaagaataccagaggtgaaggtccttctcactgcatcatgtcaggagttacatgctatcagcttgatgggtgtattaactttgggacacttggttaaggtagtgtgtgttggttttttgctgctgaaaattactgttattttccctttccatacttctgttctttggaaaacagtcactaagtccagtcatgggaggtggtgggtgggaaagattacattcaaccccctggaagtgggaatatccatatgtagtatttggaatttttctatatggaaaatttgtttctccctcccaccctaatttgtttacgtcggtatggactcatgtatattttgtattttgggtaacacagtatttattttgtcggtttaaggtcgcccagctcggctattgacgagttcctgcccaggcgggcctacttaggccccctttagatggggccccgtacctttctaagtttattgaaggacgttccttaactttttcttgggcacctaacgaagtatggcctcccccgggtgtccgatgctttgggacataatttcccccctggcctccccgacactcccgtaagaagaatcccgccttacagaacaatcctggccgaaggggcactcgcgcctccgcgtgtggcgagtagcgtcgtctcgcgcgatcccgggctctctgtcgtcgctgtgtcgcggcaccgcgcggccgaccccggcgcccgctgttttcccggagtgttatctcactttggcctcttgcagtgaaaagtaatcgcccctctgcttgcgcccgctcagnggaaagactgccaccgtgttgctgaaacatgatactactcgcggaaggacgctccccgccccgcggtgatgcagaccccacgcgaagacgtgtagcgtgtagtatataagcccctggagtagtaccgtcttcggggcggggcgcgccaatcacagantcggtttggagtttatgcggacgcgccatgacggggggagatagaatgttgcctggctgtgtgcggcgtgataccctgtgcgatcgtatatagtcggcccggcgcccgtattagttgcgaaactctccatctcttcaactccccccctgttgtgagggtatacgacacgcccatcgcaccacatattatacgcgccacactccaatctccgccgcacgcgctcgtttgactcactgtagaaanagagcataaggccgcgcaccg

SEQ ID NO: 347319 - DNA, 862 bp, Homo Sapiens
  misc_feature (53)..(95): n is a, c, g, or t
  misc_feature (161)..(255): n is a, c, g, or t
  misc_feature (258)..(279): n is a, c, g, or t
cagcccagaaattgatttctatttgccattctccaaaagacaaaaaaagttgnnnnnnnnnnnnnnnnnnnnnnnnnnnnnnnnnnnnnnnnnnnaagagatagggtcttgctttgttgcccagactggaggtcagtggcttttcacagctgcagttatannnnnnnnnnnnnnnnnnnnnnnnnnnnnnnnnnnnnnnnnnnnnnnnnnnnnnnnnnnnnnnnnnnnnnnnnnnnnnnnnnnnnnnnnnnnnnnctnnnnnnnnnnnnnnnnnnnnnngtcttctgtctcttcagttttctaaaactttttctatagctatctttaggttcatttattacccctttgcagacaatcttatgagtacaacataaaagttggtggttttcttattaaatttctttattctctccatttcttctactggataaaaaaattggaatttttctctcccctgtttgttggcttaatttttcttaaccagccttgtagtttgttaccagccaaactatggagggaaaatgctgttttggttaatgtattagtatctgggatctcccctgggggaaactagagtcattcgctggaaaggccaggtgctttgtttcatggtcaattgcttggctgcctaaattcctctttctttgaataggatgaaactgattccaagacagcctccccgtggaaggtaagaactcctttgcaaattattgttttcaagagttttgcgagatcatgaaatatgtccttttctggtgtgcctttctctgaatattcagcttaagtctttagtcatttctggacttgtttgggctggtttctttctgaatctgttaactctaaaatgtgatgcttaatccaa

SEQ ID NO: 347320 - DNA, 778 bp, Homo Sapiens
  misc_feature (261)..(579): n is a, c, g, or t
atgggccaccacacccagcccctgaagctatcttttaaaaaaatttttactagcacttaggtgatttctgctttgacctaattggtactctccttgcaaaatttgccagtgaaaaaaacttactaatgtctgattttccatgagatgttctccatatagttacatatcatatgtaattactacattcaatattattggacataacaggggtatggtgccgtcttgtttggggagtttgacattgagcgaagatgcttcctnnnnnnnnnnnnnnnnnnnnnnnnnnnnnnnnnnnnnnnnnnnnnnnnnnnnnnnnnnnnnnnnnnnnnnnnnnnnnnnnnnnnnnnnnnnnnnnnnnnnnnnnnnnnnnnnnnnnnnnnnnnnnnnnnnnnnnnnnnnnnnnnnnnnnnnnnnnnnnnnnnnnnnnnnnnnnnnnnnnnnnnnnnnnnnnnnnnnnnnnnnnnnnnnnnnnnnnnnnnnnnnnnnnnnnnnnnnnnnnnnnnnnnnnnnnnnnnnnnnnnnnnnnnnnnnnnnnnnnnnnnnnnnnnnnnnnnnnnnnnnnnnnnnnnnnnnnnnnnncagatgcttcctaagagaaatttgtccacaagagtacagagggtacggttttgagagatggtcatagtaattaaacttgactaatatgccagtttgtgctcgtttttttaggatgaccatttttactctatcttagaggttttcattgttttatatttttacaccatatatataaagtgtaagtgttagagacttttac

SEQ ID NO: 347321 - DNA, 447 bp, Homo Sapiens
gctgggtggcgaattcggcacgaggctcctggagcggcgtccagccagcccgctgggccctgctgggggcctcccccacgccccccaggacagtgtccccccgagtgactccgcagcttctgacacaactcccctgggggctgcggtaggcgggcctagcgcggcctccatggccccaacggaggcgccctcggaggtggggtcctgagccgcacagctgagccgcctctgacccctgctggctgggcctgaccttcccgagcccgtgggggtgggggaggccagccacctccttcctctgggactgcccagcctgtgtcgggggctttcagggtttcgtggggtttgcccggaaggcggctttcctccccctggtgtgaggtcgcgcccgaggcttgtacccgctagtgaggtgtttgaactggtcagcaaggagagggggtgggg

SEQ ID NO: 347322 - DNA, 736 bp, Homo Sapiens
  misc_feature (673)..(673): n is a, c, g, or t
ttggttttttttaactaaggttcacaaaaaggattctggcttttggcgagattttggctttggaatgacttgtcagtatcgttcagatttcctgaccattggtggatttgacatggaagtgaaaggttggggtggagaagatgttcatctttatcgaaaatacttacatggtgacctcattgtgattcggactccggttcctggtcttttccacctctggcatgaaaagcgctgtgctgatgagctgacccccgagcagtaccgcatgtgcatccagtctaaagccatgaatgaggcctctcactcccacctgggaatgctggtcttcagggaggaaatagagacgcatcttcataaacaggcatacaggacaaacagtgaagctgttggttgaaatcataattaatgcgttactgtatgaaccacaaaacagcactatttatttagccttacttctacttccagatgcagtgcctcttttggagaagacatgtttatttttcatgttctttctgacattactttagcaattcaacttgatgtgagaagaaaaaacaaatgtttcaacacaaaatctctgttttgtgagaatactgcactatggaataattgacaaattgaaatctcatatttgtcccaaaagttgttttgaagttagttctacctggtgccntgttctgattgtgtgtgggattgcatggtgtcctgattgcatctaggtggaacggatggaatt

SEQ ID NO: 347323 - DNA, 957 bp, Homo Sapiens
  misc_feature (538)..(558): n is a, c, g, or t
gggaaaagtgtaatctattgcaaatagagggccatcattactgctcttaggctccctttaggattagggatgcaggttatcatctaggtcctgtggtctcctagagagagcagggagcaccatctccattagtcgaaagaaagaaatgtaaatgttatgagatgagactagggcaatgactccctgttcttgagacaacgagtcaattcagtgtcgaagaaaaactcagtaagctttgatgccttgctcttaacctacaaacttggtagagccacagaaagaacatggaacaaaatgaagaaatggtttagttcctctaaggatcctttcatacttaggcattgcttaatccagttgactgatttttcaaagaatcttgccatatctgatttgaaagcacacaaagtaggtggctacttcacgcctcatctcttggctctaggatcatattgggatcaggttctttgcagatcagaaatggcataggggagtgtaccgggaatcagacaaacctaagcacacatccagattctgccannnnnnnnnnnnnnnnnnnnnagctgtgtgggaaaatctctttgctactgacatggtttggctctgtgtccccacccaaatctcatgttgaattgtaatccccattgttggaggtggagcctggtgggaggtgattggatcatgggggtggtttctcatgaatgatttagcaacatcccctttggtactgtcctcacaatagtgagtgggttctcatgagatctagttgtttaaaagtatgtagcacctccctcctgtctcttgctcctgctcctgccatgtaagacatgccagctccccctttgccttctgccatgattgtaagttccctgagacctccccagaagcaaagcagatgcccacatcttgcttcctgtatagtctacagaactgtgagccaattaaatctattttctttat

SEQ ID NO: 347324 - DNA, 826 bp, Homo Sapiens
tcactcttgcgatgctttagcaaagagactggcagcattgtgcccctgctctaggaatctgtggaactttgaacttgaaagagatgatttagagtatttggtggaagaaatttccaggcagcaaaactttcaacatgtggcctggctgcttctagcagtatatgctcatatgtgcaagcaaagagatctgaaattggaacttatatttaaaagggaagcagagcatataagtttggaaaatttgcagcctgatcatgtggtagaaaagaaaaacccattttctggggaggaattcaagcctgctgtagaaatttgcataagtaaagaggagcagaatgtttaatagccaagacactggggaaaatggctagaaggcatttcagagatcttcacagcagcccctcccattacaggacactactccctgtgtttcagccactccagctccagccatggctaaaagggccccagatatatcttaagctgctgctccagaggctgcaagctgtaagccttggcagcttccacatggtgttaagcctggggttgcgcagagaacaagagttgaggcttgggagcctccacctagatttcaggggatgtatggaaacgtctggatgtccaggcagaagtctgcaggacttgttgcaggagggacctggttggggtgattggatcatgggggtagatttcccccttgctgttctcatgatagtgagtaaattctcatgagatctggttgtttaaaaatctgtcacaattccccctttactctttttcttctgctccagccatgtaagatgtgccagcatcccctttgccccaa

SEQ ID NO: 347325 - DNA, 572 bp, Homo Sapiens
  misc_feature (249)..(302): n is a, c, g, or t
gaacaaatatggaaagaatagaaataatataattttttttggtagttctcttttttagtttgtagaaacacgaaaccatgaaagaaaaaaatgtttcctttagttcagttctgccacaaatatggagaaaaccttttatcttaaagagcaagattgttctgtaaggttattttgattcctttgtttaatcctccacttaccatattttatgcactattaaatattgacatcaggattcctcctgattgnnnnnnnnnnnnnnnnnnnnnnnnnnnnnnnnnnnnnnnnnnnnnnnnnnnnnnatttattaaagaaaaatagcaacagtgtagttctgcttactgatattctgatattatacaaagtaatttatttcccttctacagaatttatgtatgaggacctaaggctgttcagatatctaaagaaaggtttgaagccttcttctagctggtaattcccttctttattgtctggccctgaactagaaaagctatgatgggagggatgtggtcccttagtaaacagcaatgagctctggcccatgtgcaatttccctttctatctaaatt

SEQ ID NO: 347326 - DNA, 1115 bp, Homo Sapiens
  misc_feature (82)..(389): n is a, c, g, or t
ttgccaattatttttaatcttcacttaattacatagcaaaaaagaatatctactttcttaatcttggtttttttgttctgtnnnnnnnnnnnnnnnnnnnnnnnnnnnnnnnnnnnnnnnnnnnnnnnnnnnnnnnnnnnnnnnnnnnnnnnnnnnnnnnnnnnnnnnnnnnnnnnnnnnnnnnnnnnnnnnnnnnnnnnnnnnnnnnnnnnnnnnnnnnnnnnnnnnnnnnnnnnnnnnnnnnnnnnnnnnnnnnnnnnnnnnnnnnnnnnnnnnnnnnnnnnnnnnnnnnnnnnnnnnnnnnnnnnnnnnnnnnnnnnnnnnnnnnnnnnnnnnnnnnnnnnnnnnnnnnnnnnnnnnnnnnnnnnnnnnnnnnnnnnnnnnnnnnnctatttattttgttatttgaatcactcatctaatgatatcaaagctactattaaattatgtataaaaatcctcaaacaaggttaatattttgacttacctcatcactatggcagaacataggagtaaatacattctccaaaagggaaagaacatgttcatatgcttcaaaaagacatctcatagtttgaagtttcacaacatctatgtatgggccttcagcaactattaaaaaaattctactgtagaaattatttataaatagcataaatatatacagttctaaaacgttttactgaaactccactgaaacacactagattgagaaattagaccaaccaagctctagttctgacaaatacataaagtataaataagttttttctttaaagctttcatctcattagtaaaatagaataatagctgcccatgtactgcagctagccactgcaataataaacagaaaataaatggaaaaactgtaagagtgctaaataagtcattcttatcgtctttgacttacttctttgaatctcttctacaatgaagggatcaaatctaattttgtcaatactttcatccaaacagtatgttttataaatcttctgcaattcttcatgaagagacagcatttcatcatttgataattctggtcgtaaaattctatcattaaattcctctaacaaatgagggaatgaataagaaaaaataattttaatatataccaa

SEQ ID NO: 347327 - DNA, 403 bp, Homo Sapiens
gaaccagaacaccagtttattaattcacaaagggaaacatacgtcagttggtcagcaactctctagaagattcaagatagaaggattaactataatcaaaatgttccatggtgaacacgaaaccagaaaaggacaacttagttggctgattggaatgacttatgcctttgagcctgctgcacccttctccacttcggggtatgctagttaaaggagacatgatacttatgtcctctggtctaggcaacttcaacttcttgcttggctctgaacactgctgaagacacactgttgaattcttcctcaaagtctctactagctgtagaaagagtacaatatgtctgggtcaatgtcagcttttttagttacaatgatatgccaatcttgccttcgtgaaatcatg

SEQ ID NO: 347328 - DNA, 995 bp, Homo Sapiens
tccagatttcacttttaattggtgaaaccttctccatctgtccgctagttaaaagaggcctttctttcattctcatggttttgtctattgtaaagtactattattattggtttatgtatctttcttcaacccactgtgattttcttgagggcaggatctatttcttattcatttactatatcctcaacccctagtaaagtgcttttgcacatcctaggcattaagtaactaaatgatgagtaggatttgttttgctttaaaaatttattatattttagggaagggaacaacacacaccagggcctgttggaaggttgggggcgaggggagggagagtattaggacaaatagctaatgcatgcagggtttaaaacctagatgatgggttgataggtgcagcaaaccaccatggcagatgtatacctatgtaacaaacctttacgttctgcacatgtatactataacttaaataaaataaaaggcctgtagatacccctatgggtaacagtgactaaacaaagaggaagcacttatgtttgtctctagcacagaaagtcaagctgctggagaaactgcacagcagtgccagtgtgaaacatcttacagaagagcgtggtgtggaaatgaccatacaggacttgccgaaacagaaggataaactgttgaagttctatgctgaaagtggtaaacagaagttaatgaaaactttttaaaaaatactgtgtaaagctaaaaatgaagatctcaattgtgtattagatgattgcatctgtcggcatggcagtgaacacatgccacttaatgatattctgattatgaaacaagcgaggttctatcatgatgaactgaaaattgaagggaactgtgaacactgaacaggctggttgcagacatttaagaaaagacatgatatttgatttttacagctttgtggtgataaatcatctgatcatgaagcagtgaagaaatcgttgatgagtttgcgaaggtcccaa

SEQ ID NO: 347329 - DNA, 436 bp, Homo Sapiens
ttcttctggtgtgccagcccgttactcctcctgctgaagctgaaggttggtggagtgatggagcgtggggatggtaaaggaggagtaagtagctttccacagactcccaggtctctggccccttcccagcttcttgggaaattgagagccctccaggcagacagagaacagaactagaaggaggggtggtgcttagtcttaaatagctcaaggaggcaggttggagtgtgaaactgctgttcttggcaacccagaaggctactctgcctgggggaaggctggaaactcacctgcttgtttttatttttccgagaagatctgtgctgtctccttgagcttataaaaacagaggaagcacagggtggcctcctcgcaaagtcaaggctagaagactcccttctcctgttctcttttccactcatgccctcccttattt

SEQ ID NO: 347330 - DNA, 785 bp, Homo Sapiens
gaacaaaacacccatttattgctagaaaattccaacagaatatcatcagttaaaacactgttttttaataaatcccaatgtttatagaatttataaaaacttaaaattaatgcaaaactatcctacgtttttcacacaatgttcagcagtttatcactgtaataaataacccaatttcatatcttatgattacagtttgtttaatagtctgttgatacctaagaataaggctgtattatttttccatacactataccttataaaaaatcttagttcatgttatcaaatttgattggcataaaacatggagcaacattaagacacagatatgaaagggctggatttgaagttagaactattcttcccttatgcagccaaattatctgtcatttgaatatcctttgcttttcttcacttttctcctgtcagttaatacagaagacagtttctctatcaatgaagatccatggccatcatatctagatcattccatcctgacagatactttcattcgtgtgtctctaaactccaatccttagcaggatgctctccttcctagcatgggaacctcaggctacccagctgtccctggctacttttacgtgtgcattaaacaatgtaaccatggttatattaaagctatgatagtaaatatgttttaattctaatctcttagtttccatttcctattttctgtcatatcaaagaaatgtaatttaaagctttcgggtaaatgggaaagaaatattaaaagctcataaccattacattgaggtttgatccaa

SEQ ID NO: 347331 - DNA, 1199 bp, Homo Sapiens
  misc_feature (167)..(197): n is a, c, g, or t
gttaccatttttattctttttccaggaacagccagcccgcccggaaatccccaaaaattaggcttcttttctttgtgcggaggaggaaataattacccattaaaagttccgcctggccaaaggagacaccctccagaagaacaccacacatgggaggacccgatgtnnnnnnnnnnnnnnnnnnnnnnnnnnnnnnntataatgtatagatatttatagatacatctggaaacagcaaaaaacaaaattccaagatttgcagtgttatctacagtaagagggatgaattctaccagctttcaaacagtcacattcagtattcagaagaagcacatgagggggtagaactgggcagaaactaacacgccaccaggctagtcatggcttaagattatagaaggggggtgatgtgtgtagaggaaatacgcatataggtgtcctctcagcctcagaacacccgccacaacccttcccccgtccacagccctgcatgttttcactgctctctcccgttttggggtttgtgattattgatttagggtctgagacaaatggctctggtttctgggccgcaagatgctatggggtaaggtgagtggatggaaagcatacaacgcagtcctgggcttcaggggacagcaggaggctggggtgtaggggaagcctttctcttctacctgacccttgttcatgtccagaaccttcagcccccagtaagccccagcccaggcggctatggggtgtgggactgtagaagcctcgctgccttgggccagttgactaaataaactctctcttccttagtgatgcgtccgggacacactggcacagcctggccagagctctgcctgaaacaccacactgctactgatggcgttgccctctggggaacctgggggcaaaaaaggggtctccaggaactcagctacccctgcctctggccacctgcgggctcccaaaggcagtcaccacgaagttctcaggggcacacacaccacacatgggctctctcctccttctccctcacccccagtcaggtcactgtggggacagaggaccaggcaacttctgcctcggggaggccttggctcagaattgggacagggccaggaggtggcagagtgtgggctggaagggacagtctgtggggttcctgccctgacggttctccatgttctgtcttccttgggcagagccaa

SEQ ID NO: 347332 - DNA, 1104 bp, Homo Sapiens
  misc_feature (35)..(35): n is a, c, g, or t
  misc_feature (65)..(65): n is a, c, g, or t
  misc_feature (72)..(72): n is a, c, g, or t
  misc_feature (122)..(122): n is a, c, g, or t
aataaaaccaggcctggaaagtaaataaccttccnggccccttaataaaagagttttttaagaantctcccntttgaagggcctttaagtttccttggagaaggcctttgttgcccaatgtntgttgtcaattgaacacattaactgttgcttctcctttccttagacatgaagcccagggtgtgacttctcattctgcccctttcccaggttcccagattgtttttgtggtaagctcaataatgtcccctaaaggtgttcacattctgaaccccagaacttgtcagtatgttaatttacatgttacaagggacttgcagatatgattaagactttgaaatgaggggattatcctggattattaggatgggccccaatgtgatacaagggtccttataagatggagacaggggaattagagttatagagtgaagatgtaagactgacaagtggtcagagaggagagaagatgctatcttgatggctttgaagatggaggaagggactgtgatcccaggaatggaaacagcctctagaaaatggaaaggaccagtaaatagcatctcacctagagcctccagaagaaacgaacctcactaacagcttaattttaaaccagggaagtaaatttttagactttttacctccagaattataagatgataaattcatattgttttagctactaagtttttggtaatttttttatattagcagtaagaaaccaacacagattttggtacctggaagtagagtgctgctgtaccaagcacctgaaaatgtggaagtggctttggaattgggtaatggttgagaatggaaaaattttgagaatacgtggaagaattttgagaatgattgaggatggagaattttgagaagtgtgatagaaaaagcctatatttctttgaattctttgaattgttagtagaaacatagatgttaaacattctaatagtgagggcccagaaggaagtgaggcacatatcagagaaaacctatattatcctaaagaaaatctgtatcagcttgttaaaaatacagacattaaaaaagcttcatgtgaaggcagatatgtagactttaaaggtattgctggtccaa

SEQ ID NO: 347333 - DNA, 882 bp, Homo Sapiens
  misc_feature (506)..(552): n is a, c, g, or t
  misc_feature (675)..(765): n is a, c, g, or t
tctactcacaggcacaatcgtagcgcactacagccctgaattcctgggctcaagcaatcttcctttctcagcctcctgtgtaactgggactgtaggcatgtgcaccatgcccagctcttgcagatactttaagagtcacgtgtggctttatttagttatgataaaacatgtccagaaagatataaataatgaagaaaaattggataccttgtttggcttcattcatcactcattttaatctttctagctttttaaatccagttttcaattggatacactaacaactagttcagagtaaggctggcaatagagagaagggtgggcagaattttggtcctctgcaaattcagggccaacacatttgtttctttgccctgccctcttcttccaacccctacctgctctgaagtgccaatctccactctatactccaagatccctttttgtccagtcccatttactgtgctgtcccaaattcctctagtcagaatggtgtcagagtgggnnnnnnnnnnnnnnnnnnnnnnnnnnnnnnnnnnnnnnnnnnnnnnncccactttaaatcattatcccaatcctttggctcctcaatttgtagtattaacctatttagttttgttattttatattttgtagggatggggtctccctatgttgtccaagctggtatcgaannnnnnnnnnnnnnnnnnnnnnnnnnnnnnnnnnnnnnnnnnnnnnnnnnnnnnnnnnnnnnnnnnnnnnnnnnnnnnnnnnnnnnnnnnnaccattctctccctaagatctccagttctgtccttctgtcccatcactcgccatccacccacacactgaactctagctccaaatatgggattgtggagtagctcacatctggaccaa

SEQ ID NO: 347334 - DNA, 977 bp, Homo Sapiens
  misc_feature (37)..(37): n is a, c, g, or t
  misc_feature (54)..(54): n is a, c, g, or t
  misc_feature (736)..(754): n is a, c, g, or t
tccattaatgtgccttaatcaatcgcaaccctcttancccacccaatacaattnaaataagtattttgttggaatgcacttgtgcctgaatgcttctggctgcagcccaggcaattgggggcctgactggggagggaccatagcagggactcgatgtcctgcaggtctgcatgtaattgtgcacggccgactcctcattggtcatggctgacttgctttatcctgcggtcccaaggggcaacgattggctgattatatttctgaacgaattttgacaaagttgttttcaggagcccaggaagcaaatcagttgtagatttgaatttttcaggggatcagaattgttgaatatatatatagtcttttacatgctgataattatttccacatcacaaagaaggctggctattaggaggctgctgttcatttcctttgccccgtgaactcatgagctgtggctatgtggggggcactcagttgttagagctgtttcccttcataataacatcagccaacattctaaataaatgcaggaaattaaatagtcttccccagacaggtactttgcccttctaaagtgaattacacattctaaaataaaacacagtcacattaaaaaaacaaaaggtctttgtgtcaggttggtctggcttcagcaaagataatatttgcctccagagtagaagatccgtggaatccacggtattacatatggcagccccacatcttgtttccnnnnnnnnnnnnnnnnnnnaactaaaagagttgtcaattttattttcacatttcccaatacaaatgaaaactgcatcttttttggtcccacttctcccctccaaaactattctctttgatagggcaagagggcaagtcttccttatgctgttaagaaaactcgacatcacagcagcatgatctcctggtgaagggagcaggtaaatataaaattcatataggccaggcgcagtggctcacac

SEQ ID NO: 347335 - DNA, 895 bp, Homo Sapiens
  misc_feature (140)..(152): n is a, c, g, or t
tggtagaatttctctcaatgctcaagaccgaggagtttatcattcccttgacccctgggctttagctagaaatgtccagaactcccccatcctaactgagaagggcagttgcttgccccaaacccacaaagactaattcnnnnnnnnnnnnnaatagtaaatgctatttttttctgttggattttatagtattgctaaaaagtaacggtgaatttatacatatatgtggttatcttcatatgtaaacaatagcatatatttgatgttgaaataatctttttatttgtccgtcctctaagctcccaaggaaattgaaaaatacccgaatactgggttaatcccaagtttttactattcatgtaatttttaaaaataggtaaaagctagttttataccagccctcgaaagttgtagagcagctgtatctggtaggaagaatccgtactcaatgaaaatgtcggtgcagacagaacaggcttcagtagatgtttatagatgttttcacatgttacaaattaaagtatattcatctccagtgcacaaagactaattctgtattgaagagtccctcagctgctagggtgaccagcagcccaggcctgagggctttcctggaacctgaaactttcaatgctaaaactaggacagtcccaggccaaccaggatggttggtcattcttctagttgctgagattttgaaatcaatatttagtgttcattctactgttattggaattgccttgagccctggctcgggacgttgagggagggactgggcagtgtctttattttatatatctacagaagccagaacaaaggcaagcttacctatgaagcccagtaagatcctgcggtaggttttctcaacagcagtgttatggacatttggggccaa

SEQ ID NO: 347336 - DNA, 849 bp, Homo Sapiens
  misc_feature (435)..(435): n is a, c, g, or t
gctgccaaaagcctttaatatgccctggtcccaggctgtgttcatgaaagcggacacagcagtgcttccagcttcatggttcccaggttcaggttcctcccagcggaggtgggagggcagccctcacacctggcacccgtgagtgccatactcctggaggaagtcgttgagctgggcacaggctgcccgctggcgggtgctccggcacaggcgttcagagggcatctcctcgatccagcttattcgagtccagcagggtacttgggggtgtccctcgaggtcattaggtggccccatccagacccatgatcaaatattctttcccaggttccaagcgaaggcggcaggaggctcgaaccaggaagttgcgcatctgattagcagcggccttgacatccttggctgcggggatgacgtgcgcaaaagtggtcagangtggaagagaaggtgcagggtgagcccaggctggggactctgtgtagatcctctcattccaccttcgccaccaccatggagaggtgccactgcctccctatttatggccaagcccaaggcttctgacgagcccaaggggattttcacacttccagatggtcaggtcctcggccacacctcagcctccctgtctccccccagccctgcccgcctctccggtttgcttcatactgaagtgcaggacttgggtgatcttggtctcaaagaggcggaaagcagctctgctgtcttctcggagaaccttaacctggaagcctaagagggggtgaggagaagggggaaaggtgagttactttgaggctgagagggtaggaagttggtgccaacttttttgtacaaagttggcatttactg

SEQ ID NO: 347337 - DNA, 737 bp, Homo Sapiens
ccttccttttgaaaatcaggtttattgaagtatactttagagtaaaattcacccttttttcgtggtacaaatctacgaattttgaaaaatatataatctacaattaagatacacagtattttaacactcaaaaatttgtcctgtccatttgtaggcaatcatgtaccactaccttttgcctctaacaatcatgacttttctgttactttcattttttcctttccagaatgaatggaatcacaggtttctgaatgtagcttctttctcaaacacaataatgcttgtgagattcataaatgttgtagcatgcatcagttcatttctttttaatggtgaacagtacttcatcatatggatgtatcacaatttgtttggttattcaccagctaatgaacatttaaatacactactttatgcaggcatggtttcacttctcttaaatacgtacataagaggaggacaggtcatatgagaagtgtatgtttaaatttataaaatactgccagacttttacgtgacaccactatacattcctacctgcaatatatgaaagttccagttgctacatattctcactagcttttggtatcttctggcttttcccccctttgtagttttactctgcttttccctaatggctaattaatggtgttgaacacctttatcttgtgtttatttgccatcagcaaatcttcaataaagtatctgttaaaaccttttcctggctgggtccctga

SEQ ID NO: 347338 - DNA, 813 bp, Homo Sapiens
  misc_feature (627)..(753): n is a, c, g, or t
aaatgttctttttgacatactcttgggagctggaggcagattatggtaagtttgggacccaggaagatctgggtagcatacttgcctgaccacatcactgttgaatccagaccatgctccacaaatggatgcctcagtgatgtgctcccatgtttccaggtttcaacaacagcgttgcccctgaccttttcagaagggatgctcttacacatccagggaatctaaacccagagattcagttgaacttatcccaggaacctaccggcaattaactcattttattgcagttaagtttgtatttgctattcagtcaaaactgagcaatgtatcctttgaggatacaaacaagttggaaatctataaagaaaggcaaaggaattactaacacaaaggtttggagaggaatttccttggggtggaggctcggggctgtcatagagaagacgatcaaagggcgcttctaagctactgacatgattcttctgagcctgagataagtgtatgcgggaattaattttattcttcttctgctcttacataaacattttctattctattatgcatgatacatttcacaaaacaaaattattcttttaatttaaaaaacagtcatggccaggcacggtnnnnnnnnnnnnnnnnnnnnnnnnnnnnnnnnnnnnnnnnnnnnnnnnnnnnnnnnnnnnnnnnnnnnnnnnnnnnnnnnnnnnnnnnnnnnnnnnnnnnnnnnnnnnnnnnnnnnnnnnnnnnnnncatggtggcagatgcctgtaagcccagcttaggctgaggcaggagaattgcttaaaccca

SEQ ID NO: 347339 - DNA, 968 bp, Homo Sapiens
caaagggacacctgcacccccatgtttattgcagcaatattcacaatacccttgtagttttagcgcttagaggcatttaaacagcctctctcctccagactacttcactgtagtttattatccctgaccctccacaatgtgattaccacccgctaggatgagttgcatcttattataaagtagcaaattacaagattgtaacattagactttttaagaaaatccagtcagcttttatactaatccatcttaatttctaggttactcagaattccaggtattctgatttggactcacatctcgtattgtattgcctgtatttaactaggaagttactgccaacagcatctatctctattaaatgtagaggaattgacaaaagaggggaaagaaagttgttaggtaatagaactgcttcagaaatagggctattcatgtttgaagtgtttctccttcgtttttcagggcatctcattgggagatattcctcttccaggcagtatcagtgatggcatgaattcttcagcacattatcatgtaaacttcagccaggctataagtcaggatgtgaatcttcatgaggccatcttgctttgtcccaacaatacatttagaagagatccaacagcaaggacttcacagtcacaagaaccatttctgcagttaaattctcataccaccaatcctgagcaaacccttcctggaactaatttgacaggatttctttcaccggttgacaatcatatgaggaatctaacaagccaagacctactgtatgaccttgacataaatatatttgatgagataaacttaatgtcattggccacagaagacaactttgatccaatcgatgtttctcagctttttgatgaaccagattctgattctggcctttctttagattcaagtcacaataatacctctgtcatcaagtctaattcctctcactctgtgtgtgatgaaggccaa

SEQ ID NO: 347340 - DNA, 172 bp, Homo Sapiens
aggtttgaggggggatgctctagtgcttggggagagggaggacacacctggaggaaatggccttctttttaaaagcaaaaaacacaaaacctcacaactgcctggcaagcccagtatcacttgtttgggccctagtgggactccaaggcagccacacgcccctcctggaagg

SEQ ID NO: 347341 - DNA, 1164 bp, Homo Sapiens
  misc_feature (380)..(528): n is a, c, g, or t
  misc_feature (575)..(675): n is a, c, g, or t
ttgggtgctgtccctcaaagaaaagactggttatgtggaaacagcacgtttggagagattattctagtgaataacagtgtatatttgtggtaggcaaatttctaagaatgacccctactgacacccccaccaatgaccttgtataatatcctcccactttgagcatgggtggaacctgtttgatccatgattatatcatgttatgtagcaaaaggaagactgtctgggggtggctaatcaaatcttgtgactcctttaaaagcagagagttttctcgggctggtggcagaagtcaagagacaaagcagaaggacctcaggcaccattgctgttttaaggtagagggggctgcatgagaaggaatgcacatggctttgagnnnnnnnnnnnnnnnnnnnnnnnnnnnnnnnnnnnnnnnnnnnnnnnnnnnnnnnnnnnnnnnnnnnnnnnnnnnnnnnnnnnnnnnnnnnnnnnnnnnnnnnnnnnnnnnnnnnnnnnnnnnnnnnnnnnnnnnnnnnnnnnnnnnnngaatccagccctgtgagaccctaagccgagaactcacttaagcctgnnnnnnnnnnnnnnnnnnnnnnnnnnnnnnnnnnnnnnnnnnnnnnnnnnnnnnnnnnnnnnnnnnnnnnnnnnnnnnnnnnnnnnnnnnnnnnnnnnnnngtattttaaaagaggtaaagaggaaatcttcatacttgattccctgtagtatgctggatatttcttggtaaatgcatgaataaagtctttagtagcaagtcatgtacctggaccttgttggggatgttctcgccagagatctcaattagtcttcattggacgtttgttggcaaagttgcagcatcttactgagtagcgtttggtaaaggaactgctagaatgagactataggaataggactgaaacagtgtgtaagggatcttttttatttctagaagaggtgttactttatactgatttagactgctctgagcctgtcagaagtaaattcaagaatgattaacagtggtattttagatacattaagagcaaaaataacctttgccttgtagagatcagataatctgtgtatcgagggatttaattttttttaaccaaaacttagtttctctttttatcatctagcacagatcaaatcctgtatgggcc

SEQ ID NO: 347342 - DNA, 619 bp, Homo Sapiens
  misc_feature (31)..(31): n is a, c, g, or t
aggattcaggagataattctgcgaacagaanttcctgagaactgagatgggggaaatcgctggtattagaagagtgaaaaggtcagtaattaaggctacgactgtgctcttagaggcaaaagaagaaaatgagactgccaggcatgaataatgagaaatctttgatggaattagccatgcagaacagatacttaaatgcatcctcattcttctcatagtcaaaagtttttgcttaagctggatgggaaaaagagcatcccatttcactaagtataaaagaggggattttagagaaggtctcagaagaaagagatgtgggggtttggtgaaactcaccagaggctggaccctctccagcataacacagggattgggaggagtggggtggcattaggccaggtgcgtagcccagtgctgctctctctggacttgtttgctagctgaactcatccatttgcataattttcagtgccatttctcagctgatgagtcctgaacttttgtcttgaggttagacttctccttcaaacagcagtcttaaacactcaacttctttcttgttttttccacttgtcaactcatgaacacctcaaccttgttaaatccaaagccaaactca

SEQ ID NO: 347343 - DNA, 890 bp, Homo Sapiens
  misc_feature (37)..(37): n is a, c, g, or t
  misc_feature (75)..(75): n is a, c, g, or t
  misc_feature (90)..(90): n is a, c, g, or t
  misc_feature (123)..(123): n is a, c, g, or t
  misc_feature (227)..(427): n is a, c, g, or t
gaccatgacaagttttatcacaaactcaaaggctttnccccatgattcaaacggtctgctcctgcccactgaatngtctgtatagtttcnggttcagcttccccagagctcaggattctgccnatggaagacactggtttgaagcaagcatactggatgttttcttgaaaaaatgttaagcttaaattgtttataataaaataaattcatacttactttactaaatnnnnnnnnnnnnnnnnnnnnnnnnnnnnnnnnnnnnnnnnnnnnnnnnnnnnnnnnnnnnnnnnnnnnnnnnnnnnnnnnnnnnnnnnnnnnnnnnnnnnnnnnnnnnnnnnnnnnnnnnnnnnnnnnnnnnnnnnnnnnnnnnnnnnnnnnnnnnnnnnnnnnnnnnnnnnnnnnnnnnnnnnnnnnnnnnnnnnnnnnnaatactttttagaggtcgtatagcacttcattatgtggatatacaagtattaacctagttaactattgttgggaagttaattaattttctcatttttcatcatttaaaatattgtaataatcttagtgtatattattgacaagttttctgaagtataattattggataggaaattatgaacatttcaaggccctcagtttctgcacttggccagtttgctttccagatggggtgtgccagtgtatacctggcctgcatgggagagtgctctctgcctctgccaaggaggggacctcctgggtcagtaggtgatggtgctgccactgtttttgcagccgttgttgagtggctgggcccaggactgcagtctccagtctcattttgatcatatgttagtggagctgtaataccctcttctccttgaagattgtatgagagatacatatgtaaagaaccagaccta

SEQ ID NO: 347344 - DNA, 1287 bp, Homo Sapiens
tattatacagtgaagcccatggcaaataggaagaaagctcagtatcggctcctcccaccataacccccacttcctccactgcatcctggaccatagtatcctccaccatatggtcccccccatgttcctgctaccagccaaagtttccactcttcattggaccgtagttagaaggttgctggttataatttccaaaatcattgtaatttccacttccataatttcctcctccatagttgtcataaccacctccgtagcccccaccctggttgccatatccaggtcctccaccaccatatcctcctcttcctcctccataaccggggctacctccaaaattgccacctccaggtcctcctccatacccattatagccatccccaaatccacgtccactgccatatccatcagatcctcctctaaagttacttcctggtcctggtccgaaatttccaccgccaccacgtgaatccccaaagccaaagttgcctcctcttccactcctagaactctgaacttcctgcatttcttgtctagacaaagcctttcttacttctgcattatgaccagattgatggtatggtatttctgctatacgatttttatccaacaggatcatggtcatcaaaaagtagacaaagccaaagcctcttttctgttccagactgcctatcagtaattgtatctcaatggtatcaattgtttccatattcctcaaagtaatctctaaggtgatgttcctcagtatcttctttaattccgccaacaaacagcttcttcacagttacatgagcccctggttttccagattcctctcttgctacagcgcgttttggctcaactggtctcccatcaattgaatgaggtcttgcagccatggcagcatcaacgtcagccatggatgaaaaagttgcaaaaccaaatcctcgttgatcttttgcttgcaggatccctcattaccacacagtctgtgagctttccccattgttcgtagtagttcctcaaactttcttgtgtggtttcaaagcttaagccaccaataaagagcttacggaactgttccttttctctctttttcctctccaaaggaacagtttctaaagttttctccatcgcggactcagtcgcttcagcccgatttcccgcagccgagcgagatgagagagatctccgcggacgaacgcgagccggactcgtcctggcgtctgtagtgagaactgccgctgctcgagaaacaactctgcgaggagcacctccgcacgggacccggcgctgctgctactgccc

SEQ ID NO: 347345 - DNA, 826 bp, Homo Sapiens
agattcagagagcaaatgtgcaggtttgttacatggctataatatattgtgtgatgctgagatttgggcttcaactgaacctgtcacccaaatagtgaacatagttacccaataagtagtttttcaacccttgcctccctccttccctttccctttttggagtcctcagggtctactgttcccttctttatgtctatgtgtacccaatgtttagttcccacttacaagtgagaacatgtggtatttggatttctgttccagtgattaattcacttaggataatggactccagctgcacccatgttgctgcaaaggacataatttcattctttttttatgggtgtaggtgtaccacatgttccttatccaattcactgttgctgggcacctaagttgattccacgtctgtgctattgtgaatagtgctgcaataaacatgcaagcgcaagtgtctttttggtataacaatttattttgactacatggtttgatctatagcataaaccacattcattttataaataggtattcactttaataattacatattacagtacttgtgagcccagtatacaaaagataagctccagacccctcaggatactgtaaagttcacaaatacaatgatgaaaacatctagattgcttcatgaccccctcacacccccaaagcaggaagcaaacagcccgactgagataacaaagaatactccgcatcaagatgggaccaaatactctaataaacccacacccagttagcctcagggaattttaaatttttgatctgaaaaagacaagatctcaaccctgagttccccttttccttc

SEQ ID NO: 347346 - DNA, 702 bp, Homo Sapiens
gagaccatacagacagattacattgtttatatggatgaactctcctccttcattggggcaaagcccaacatcccatggctgtttctcacagatcccaaattggccatggaagtttattttggcccttgtagtccctaccagtttaggctggtgggcccagggcagtggccaggagccagaaatgccatactgacccagtgggaccggtcgttgaaacccatgcagacacgagtggtcgggagacttcagaagccttgcttctttttccattggctgaagctctttgcaattcctattctgttaatcgctgttttccttgtgttgacctaatcatcattttctctaggatttctgaaagttactgacaatacccagacaggggctttgctatttaaaaattaaaattttcacacccaccctgccttttcctattccagcatcttttgcagtactctgtagacattagtcagtaatacagtgttatttctaggctctgaaatagcccactttaagaatcatgtcatgatcttaagagagcactaatcatttctgtttgagttccactaacacttcaaaatcagaactatgttctttatatctaacttaaatcatttcctgaaacattttgacatgattcctttttccttttaaacaatgtatgaaagatgtattttaaatctaaataaagagcaaattaagcag

SEQ ID NO: 347347 - DNA, 641 bp, Homo Sapiens
ttggcagacgcattcatacacatcaagaaaagatgtgggatggtaatttccctctttttcccatttctgacttgtaaaggaaatacatgaagcgaagtccttgcggaatggacccgacagcctgaacctttctgagatgagcagggcgctctttcaggggaaaatccgagcctcctgcactggcagaagtcaccaaatcagttagcatgggtcataaaaagtcagaatcccatgtcattccttggaccacaattttttaagtttgaaaggaagtgaaaatgctccttaggaactcacaccttctgaattgaattgagcagtacgtgatttccagagcttttcagtttccccctgagaattcaaatttcttcacatgcatagaagcttggaggacttgtaataacatttaaacacaatttcctcttcatggtacccgtggacaagtttcagctggggaaccctcctggccccaccctggggcttgtctatctaatgagtgtatttgggggaaggagctgggactccttggctgagttctttcccctctcctgtaacttctacctgctcaccgagagcacacattctggagagttctcacgtgggggagcctgtggcttcccagtctgcacaccagtgactga

SEQ ID NO: 347348 - DNA, 945 bp, Homo Sapiens
  misc_feature (444)..(444): n is a, c, g, or t
ttggcaaaattttcaaaaatgtattcctagctgtagtttccagctgtttaattcttttaggatatagttaaaatacttgtgattaagtcccatcttcaaaaggaatcttagaatatgattttctatttccttgaatcttttatcttttttcctgccctactgtttttttcgagcagaacagtttaataggaaatgacatttattgagcatttactatgtgctggccacagcttctcaatgcatgctagctcatttactcctcagagtgacacagattgatgagttggtcttgggagaagtaagttgtgttttattgtcacccagctttctccttctatcatttatttttccatgattgtgttgcgtttagaagtaaaccacagattgcagagataatcagaagttttaaaggccacgtgaggaagatgctgcggcatgcggaantcatcagccatcgtggagtacgcatacaatgacaaagccattttggagcagaggaacatgctgacggaagagctctatgggaacacatttcagctttacaaggtgacatctccagaagtctttttctagtatttttacttttcgatatgctcttccttaacttccggtgccctatatatcttttgaatgtatttttactgtggctggttctttaagagaccatcttatgcccttgattttccctcatgctttattttgtttctggtatagtgagcaagtttctctttctccagagcattggctttaaatccccttcaattcaaactttgttcctctcctgagtgctctgtgtgtagcacttcaatacttctatttttacagtcatactgaagacaagactcccaatagttagcaaagttgtgtgaccacccccaaccagctctggctgaagtgtattgggctctctgttgctagcttctcctgtgtttttcatgtgcatgc

SEQ ID NO: 347349 - DNA, 987 bp, Homo Sapiens
  misc_feature (934)..(946): n is a, c, g, or t
gttttctcttccctctagttaaaaacaacctttaatattttcttctcatattctgcaacctctttactctcaaactttaactccgtggaagaccttgctcattttttcagttttattatgtctgaaactttgctaactatgaaaaataatttaggagccattagttttagttttgaattatgtaatctaaaaagttttcagtttttagagttattctcttgattcctcttatggtttaaggtcttaggatggtgcttatcaaactgaagcgtatctctctgaggtataaactttactcagttgggggaaaaataactggtaattatgttaaacattttaataaaatagatgactgtattgtggaatgggatataagtatttcaaaaaatctgagtgcctataaaataaaacttcaaggacattttagaccattacatgggctgcctcagattgtgccttcaaatcctctggaatcatacatttactctcatattctaagttgactgtctctgtcatgaagattatagtcgtaaaaactgaagcagcattatttaagccaaggtatgttaaaaagactgtttctttaaaaattatctttttcttggtttctgtgcctagatactaactttgatatcactcttttctatagtacaggagagagaacagttagccatgaaaagatgtatagataggacaaaaactttataaataaatacctttcttcttataagccaaaaaatttatttttacatagaattggataaattttagaatacctattaggacaaagaaacaaatacaaacctctcaactctaaccaattagcttttcttaaaccctctcagttttggcttattctcagctaaataaacagcccagatcacaagattatagatacctctttgcttttttgtccaactgataccatgtgtcnnnnnnnnnnnnnaatttgcccgatatgactgttgaaagttggggcgcccccaa

SEQ ID NO: 347350 - DNA, 1603 bp, Homo Sapiens
  misc_feature (1407)..(1407): n is a, c, g, or t
  misc_feature (1448)..(1448): n is a, c, g, or t
  misc_feature (1503)..(1503): n is a, c, g, or t
  misc_feature (1539)..(1539): n is a, c, g, or t
  misc_feature (1592)..(1592): n is a, c, g, or t
gatgcagtgaatacttttaccaaatatatatctccagatgctgctaaaccaataccaattacagaagcaatgagaaatgacatcatagcaaggatttgtggagaagatggacaggtggatcccaactgtttcgttttggcacagtccatagtctttagtgcaatggagcaagagcactttagtgagtttctgcgaagtcaccatttctgtaaataccagattgaagtgctgaccagtggaactgtttacctggctgacattctcttctgtgagtcagccctcttttatttctctgagtacatggaaaaagaggatgcagtgaatatcttacaattctggttggcagcagataacttccagtctcagcttgctgccaaaaagggccaatatgatggacaggaggcacagaatgatgccatgattttatatgacaagtacttctccctccaagccacacatcctcttggatttgatgatgttgtacgattagaaattgaatccaatatctgcagggaaggtgggccactccccaactgtttcacaactccattacgtcaggcctggacaaccatggagaagtccagtgtgaaaaaagccagtattaaaatactgaaaaattttgatgaagcgataattgtggatgcggcaagtctggatccagaatctttatatcaacggacatatgccgggaagatgacatttggaagagtcagtgacttggggcaattcatccgagaatctgagcctgaacctgatgtaaggaaatcaaaaggatccatgttctcacaagctatgaagaaatgggtgcaaggaaatactgatgaggcccaggaagagctagcttggaagattgctaaaatgatagtcagtgacgttatgcagcaggctcagtatgatcaaccgttagagaaatctacaaagttatgactcaaaacttgagataaaggaaatctgcttgtgaaaaataagagaacttttttcccttggttggattcttcaacacagccaatgaaaacagcactatatttctgatctgtcactgttgtttccaggagagaatgggagacaatcctagacttccaccataatgcagttacctgtaggcataattgatgcacatgatgttcacacagtgagagtcttaaagatacaaaatggtattgtttacattactagaaaattattagttttccaatggcaataacccatttatgagagtgttttagcctactggaatagacagggaccacatcctctgggaagcagataagcatagaactgatacttgatgcacactcgtagtggtaactcatccctaatcagcattgtaaagcaggtgccagaggtggtttgctttgtccttccaaagcaggtgagtcagccccaccgagagccagggcagctttnagtggcagcgtggtgctagcagcttcagcgggaacagggtnagagttaattatgcagtcttcttgacagcgggcattaattttggaagggaaactnacaagtcatggggtcaagttttcagttgactttccntcctttcctcttgattgggcagttatattagtttttcacatttttaatttccntccctcctggg

SEQ ID NO: 347351 - DNA, 526 bp, Homo Sapiens
aagagcagctagtttttaatgaatcttagcccagaatacaaagcagggtgtagcagttgccttaatggtgatataattgtaaacaatagctttttcttcccctataaactcgagttataggaagcgtttcagagagaggataacacatttgaatctattttttaaaaatcatcctgacagctagcagtattgttgtcgtttagaaggttcctcatatactcttaccctcagccaacccaccatgtttatcaattcaaattgtagaactttcttgacccaagagattttgtaggctgctgatcttgctgaactttccatcaatggctgagggaggaagcttgcatgattcttatgagttcttctgaggcactttgactgtgacagttttcactttagtgtatgctttcagcccgtactcgcccaactgtgggccactcaccgacatctgtgtagcccacaaagggtaactgggctccatacacatcatagcagttgacccacacagtgcccgcctggagggcctggg

SEQ ID NO: 347352 - DNA, 861 bp, Homo Sapiens
  misc_feature (526)..(535): n is a, c, g, or t
ttggctgctttttgccatcctcactctcagctatgagctgaggcccaggaagctttctgccagcctcagctgctgttctcagattaatctgctgagttctttttgcctagtaagaatctctgaatttaggaatatagatgttagcgcttgcatttctaggttttccagttcccagggccattaaacattttttccctttcctttccttcttccaaaaacattggtgattcccctgggtccctgtggtttaacctcacaaatggtccatgatgacaccctgttacattgttttgtcatagttaataccttgttatcccatttgctcagtcagtttttgtgagagattcagggatattaataaaactgtgctgctactgctactaacatcttgcgtaaaagccctattaattaaaatgtttattttgcatgtgatttgaacttgtaatttgtattcaaagtttttcaacagagatccagaaaagaccctccttatattttttttgtgcattgcaacactttttagtgnnnnnnnnnncatgagaacaacacaagtgattttaaaagaataaccctccattccattaattataaaatgaaatcttatgcaggtgttaagattgagggattcaataagaaatttgtgtggggtacctataaacttttaaaaaataaatttaatgctcatgtgcccatattatcgttaaaaaaatccaagcatccttgcacacacccttcaagcaaaatgggtacacgcatttaaaaatatttaaattaagtaaatggcccaataatttaacttcgtacaattctatgttctctgattattttatatgccagaaacaggcattactgttttgttta

SEQ ID NO: 347353 - DNA, 455 bp, Homo Sapiens
  misc_feature (335)..(350): n is a, c, g, or t
  misc_feature (395)..(403): n is a, c, g, or t
aacaaaataattttaatactttgtgcctgggctagcagcatcttgcactgtgacattcctatacagacataagcattttatccaagtacaaatgttaaaagcagagtaacttaagcaattgtgtatacaaaggtatacagacactgtaggttatttttcttcttgaatcatttttgctgcatagtaaattgcaattacatgtcagtataatgttactgatctatagaatacactttgaactgtgaggtatggcagctccctatgagagagagctaacatgtaaacctgaatattttgagtgatttttgttttagctgccacagatgggaaagacnnnnnnnnnnnnnnnnttccagcattcaaagaccctagagacttacttttctaatcaattnnnnnnnnnggtctttcagtacttctcatctattttctagcattcccttatcggagcaccc

SEQ ID NO: 347354 - DNA, 328 bp, Homo Sapiens
gaagaggacagacgtgaaaactgtttattcatacagaggaggttccaagccacgaggcgcccgtcgaaaagcacatcacctctgtaacaacacacgagacacggccatggcttcacagctgcagcaaatcccaattcgccccacgacacatttgtttgccctttgaccatcattcaatgtccctccaagttcattcaagtcttctccttaaaactgtttcctaatcttcatgctatgaatggtattttcttaacacataattttgtagataaagaaaaacaattaaagtgtcatccaacttttttgtacaaagttggctttctaagtt

SEQ ID NO: 347355 - DNA, 1137 bp, Homo Sapiens
  misc_feature (122)..(130): n is a, c, g, or t
ctttttagctgcagtgtttgccactaggcacaaaatatgcagcatcatttttttaaattaatttttaaaaatacatactttattccagcttgggcaacaaagtgagactctgtctggagggnnnnnnnnngatacatattttaacaggagaaaaagacaaggactaatataaagaacctactataaatttgacattaaaaaagattaactaaaggtattctctggaaaatgcaatggatgatctgtatgccagtaaatgaatccatgctacaaataagagtgtaggaacacgaatagtacagatagatccaaataatgaataacttggtaaataaaattcatcagaggtaaaaagcaatgtaagttgttaaagtacaatttaattacaaatatttgaaacatacttgcattcccagcctccaaattagttacaaaccttttacagaaaagtcccaaagaatcaatagagaaatttgaatacagctggtgggtaaagggaagacacatagatatgtgatatttacaagtattggtaaaatttagcttgtggctataatgtttttcattataaaccctttcacttttgttgtatgtttgtgatgggcttcaggacatggtaatccccaaatattttaagctgaaggaatgtgggaaaacaacagaagcaggaaggtaaccttcaccttcctccatctcctcctctgtagcaggacataaaaccttcccaggttttatgggttttctgaactcttccagaagcaagtcataagaccctcatgtgacaggttcctagaggaaaggagccaaagacacagagagaccaagaagaatctgaacaaacaagtctaaattaccccccatttattaccattagatcatacccgctttgtccaattctattgctccccaattatctacttcattatcacatctagcataaaaatatacaagtttaactgtttcttcaggttttcatttctttatgaagccctctgtgtcacataaaacttaagaaaacactgattatgcttttctcttgttaatatgtcttttgctataagactttagccatgaacctagacaggtgaggaaaagacattttcctcccctataattgcttacattttttttaaaaaa

SEQ ID NO: 347356 - DNA, 848 bp, Homo Sapiens
  misc_feature (189)..(199): n is a, c, g, or t
  misc_feature (239)..(359): n is a, c, g, or t
  misc_feature (436)..(635): n is a, c, g, or t
  misc_feature (666)..(682): n is a, c, g, or t
cctcctctaatttcctaatttttataacgagagtgttttactaattttttaaagcatcttttttgtgtatgaattaaggatggttacaataactaaggtggaaataaatgaagtttataactcagataatttagtcaaaatcaaattagtttgtagccataaacaatgactatcaaaggcccttatgcnnnnnnnnnnngtaagcttctgcagtccttaaattaagagggtttctcaannnnnnnnnnnnnnnnnnnnnnnnnnnnnnnnnnnnnnnnnnnnnnnnnnnnnnnnnnnnnnnnnnnnnnnnnnnnnnnnnnnnnnnnnnnnnnnnnnnnnnnnnnnnnnnnnnnnnnnnntaccattaacagtctgaagagaatggtcttgccatctcaaatatattacaactttattaaaataaagcagttaaggnnnnnnnnnnnnnnnnnnnnnnnnnnnnnnnnnnnnnnnnnnnnnnnnnnnnnnnnnnnnnnnnnnnnnnnnnnnnnnnnnnnnnnnnnnnnnnnnnnnnnnnnnnnnnnnnnnnnnnnnnnnnnnnnnnnnnnnnnnnnnnnnnnnnnnnnnnnnnnnnnnnnnnnnnnnnnnnnnnnnnnnnnnnnnnnnnnnnnnnnaacccagggggcagaataagaccctgtctcnnnnnnnnnnnnnnnnntttaactattctagaaaaactcaatgctaataaatagctgaactacagtttatctttcataagcaagagacagacaccaaaaaccaatttaaccaatttctcagtatcattaagatatgaatatggacactaaattaattaacaagcttaaggagccacaatccaa

SEQ ID NO: 347357 - DNA, 912 bp, Homo Sapiens
taagggaagcaaggagaacaaagagatgagaagagtacaataatgagggaagaaaaaaagccaaagaatgaaaggtgagagaaggagtttaaaaaagggacaagtgactgaaaatgaacaaagtaatgaggaaagaggaaagaggttaaatattaaaatgctaggcatctttcaggaatagcttatgaatcaggtcatgaatccaagccaagtgtaccaaaggcctaatttgattaagattcgataaaggcgggcttgattcaattcaattaacgatcagagaccagatatcttaacctaagcttttacttttaactacttataaatgttctttaggtctttcctttgcgatttgagtttttttctcctcaatttttagtcaggttttccccgcaaagctgaatgttatctgaagaaaattcccaaaagctcactcaacaatttttagagcagaacaaagtacatgtttcacacttttaaagaaaatgttcaaattttgattgcagctgagtaacttcaaaatggcttcattttaaaacctaccagaagagacggatccaaaggaaatgcatattttagactaattgtttaaagatagttcaaagtcaaatgagcaatacaggaactctaaatgactggtaaaggatctctggctggtctactactaccaattggtgtaagaagagcttagaggtagaggagagttatttcaactccttcatgaaagggcaggattttcattctacttccaccctctttgctgccttatagctcctcttgctttttctttaagtttgtctctaacatctagaagacactatgagggaagggaaagaaagctggtctggaagggcaggggacctggccttcagtgaccttggccacaggccttcatctcttcattcctgccaa

SEQ ID NO: 347358 - DNA, 851 bp, Homo Sapiens
  misc_feature (436)..(470): n is a, c, g, or t
tgttagctcatcagctatcattagtatcagtgtattttatgtgtggcccaaagcaattcttccaaagtggcccagggaagccaaaagactggacattcctgatctacactatctcgttttgttcattagtttcacagacattaggttaactctccaattagactttaggcagcctgtccctcaactatttataataattcaaagtatacgtactcattgaaaccaccggctgccagaaaggggacctataacgttttcagggagggctaagatgaggaaggaggctgttaaggccaaatagctgatatcagttaagggggtggggagcagaaaaaacaggagtgacatttacaccgccttgtgcaggtattgtctaaaggggctttcacagccacgacctcgctgaatcaccacaaccatcctctgagaggggtgnnnnnnnnnnnnnnnnnnnnnnnnnnnnnnnnnnncgctatggatcatttttaaaaactaatgcaatgaacaagcctcctttcagtatatattctgtgtattcccaccagccaggattttgtcaagctttacaattacgatggttttagaaaaataatatttatattggaaatgctttctcaaacttctccttgagtttcactcctcacttatgagctgatgaccctcagcaagttactgagcatcttggcacctcaatttccttttctataaagtggagatactctccttaccacagctccacgccttttggggaagcagtccctactgtccctattatcaaggagagttggtgtgatgccagagaaatggcacaagctttggagctgagccaccaccatttggcctctgcccaa

SEQ ID NO: 347359 - DNA, 859 bp, Homo Sapiens
cgtgtgtctttcctccacggataagcttgggaggtcattgttttactgccctcacattttgtttgaaatttcagaactgtttttctatgtaaatattgcacataagttatatttaagggaggagggaattttttttaaacaagcttaggtcctttcccgagctgcattttctaagttgggtcatcgtgtcggctggttgtctgacgagcatcgttacaaacaccatgatgaggggtttggggttttattttgatgtcttttcttttggtcggaagtgagtgaaggagccaggtcgccctgaaggttttccaaagggcttggctccagagccacctggcagactgtgcgtggccctgctgtcgggccccaggccgttgtcctgctctgaccacagagttttaatgttttggttttcacttcttttaaactggacaacaaatccagcatttcaagtgccagaagtataactttctaaggagagaagggttgtcacattataaaatctttaggaaaatgtgaactggaaaacgcttcggtcagttttagtgacatagcctgtgatgatgggtctggtgactattattgcggaccgtggtacccagttttaggaatgtggagaaaggaattctgttgattccgttgaggaatctgtagcgtatgcattcgttctgttaagagcaaatctaggagaagtgcttcagctgcccagtgcgccgtggggagtgttttaacggatcgtgtcgcacgagagcacagcccagcgttggggccgggaccgctggcgcccgacgtctgaagcatacagtatactatgcaagtgtattctgccacaacaaccactgtctttgttacctttttt

SEQ ID NO: 347360 - DNA, 942 bp, Homo Sapiens
cccagaggactaggagggaaaaatggtttcctgggccaggcctagggcattgctgctttgtgcagtctcaggacttggtgccctgcatcccagccaaggctaaaaggaggcaacatatagctcaggccattgcttcagagggtgcaagccccaagcgttggtggcttccatgtggtgttgggcctttggatgcatagaagttaggaatttaggtttgtgaacctctgcctagatttcagaggatgtatggaaacacttggatgtccagagcagaggtgtgctgcaggggcagggtccttatggagaacctctgctagggcagttgcagaagggtaatggtgggtgcggagcccccgcacagagtccccactggggcactgccttgtggagctgtgagaagagggccactgtcctccagaccccagaatggtagattcactgacagcttggaccttgcacctggaaaagtcatagatacttagtgccagcctgtggaagcagctgggaaggagagctgtaccctgcaaagccacaggggcagagctgcccaaggcctgtgggagcccacctcttgcatcattgtgacctggatgtgtggcatggagtcaaagtagattatttggagctttaagatttgactgtcccactggattttggacttgcatgaggcctgtaggcccttcattttggccaatttctcccgtttggaatgggcgtatttaaccagtgcctgtacccccattgtatctaggaagtaactaacttccttttgatcatacaggctcataggcagaagggacttgactcatcttagatgagagtttggactgtggacttttgagttaatgctgaaacaagtcaagatttttggggactgttgggaaggcatgattggttttgaaatgtgaagacatgagattttgcaagggccagaagtgccaa

SEQ ID NO: 347361 - DNA, 1111 bp, Homo Sapiens
ctttatgagttcttctgagagattttcactgtgactgttttgacctctgtatattcatggaaaccgtactctcccagttctcttccatttccagacatcttgaatccaccaaaggggcactgggcacttaccacgccatagcaattcacccacactgttcctgcctgcagagcagaggagattgttatggctttatcaatgtctttggtaaacactcctgctgataagccatagaaagtattgtttgctcttttgatcacgtcatctaaagatttaaacttcatgatttgctgcactggtccaaaaatctcctctttggcaatgcgcatctcatctgtaacattagagaacactgtgggctggacaaagtagcctttattcccccacgggcctcctccacattccagtttggccccttctttcttcccactctcaatgaggtcaagtattttatcatattgttccttgtcaatctgagggccttgagtgactcctggggtcagaggatttccaaggatatacttcttagcccgctcaacactccttcgaacaaactcatcataaattgattcttccacaaaaatcctggatgcggctatacaacactggccctggtggtagaataccccatggtgtgcaaattcaacagcattgtccaagtcggcatcagctaacacaatgcaagggctctttcctccaagctccagggtcaccctcttcagattgcttttcccggcagcttctttgatcaacttgccaacctctgttgatcctgtgaaggctactttgtctatatccatgtgagaagaaatggctgcccctgctgtaattaaagatgccacgtggagagcagtgagaggagtttgctctgctggtttgacaaccactgtgtttccacagctcagtgcaggccctatcttccaaaagagcataaccaacgggaaattccaaggaatgatttggccacatacaccaataggttcatgtcttgtatatgtaaaaaaatttccatcaattggtattgtacggccctggatcttgtcagcccaacctgcacagtagcgcaatgttttgatgcagcctgctaaatcattcagatatgcattggaat

SEQ ID NO: 347362 - DNA, 1040 bp, Homo Sapiens
  misc_feature (388)..(388): n is a, c, g, or t
  misc_feature (471)..(479): n is a, c, g, or t
  misc_feature (525)..(525): n is a, c, g, or t
tgggccgcgcgcgtgtttttttcctcacggcggggccaaagatacttaattcccgccacaagcgcgtggccccaaggcggtgtcgtgagatccccgccctgggggagatatctccagggttttcagttccagggggggccgtatttggtggagggggcgtttctcccactatttgcgggccaggagaaacggcctttataaagtgggagttttgcacccgcacgctgctttctcctccaatgtgagggtgggccaacggcgcccggggggcctgtaaatttgctggaatatgtgcgggagggtctcgcgctcttggggagcacccccctcgctcctgcaaattagagatttcccccacaggtcagagtgtgcgccccttccgaggganaggatccgccacttctctcggggaatattttgttttccagagaaaacggccctccggggtttggcccgccccccggggcgggnnnnnnnnnatttggggggagagaatcccccaaggccaccttaggtccatggacnccagggatcttcccttagggaaaaccagctattggccccactgtttcccgtttaccgtgcgtggggccccgcggcgcccaaacgagatggttgtagaaaagcttctcgaggggccgagggcgggcccgccatggtatgtgaattttgcgctgcttttgtggttcaatgagtttttattagcaggtaagtcatgatttaggatcctggggtggggatcactgggtaccaggtcccccttcaccatcctgggagaaggatggaggacagaggaaagggagatgcagccagttcagatcttcccgggaaacgtgccttcagcccgttgctcatcccagtctgtgacccaggtagttctgccagcagtttctagtctggttctggttggggaagcggctgtcaaaaggggcggtcttgtagttcttgattttggtctccatgtcttccgccatggtgctgaatcctaaaggcaccccggattcaacctgcagctcaatgtgaccctcagcaaagacccc

SEQ ID NO: 347363 - DNA, 1038 bp, Homo Sapiens
ttggccaggctgtattttaagaaatttttgtgaaatcaacagcatatatattattaaagcaagtattttctgtccctagtctgtggtccagggaatgagcaataagatacaaatgaacggttgacaccataccataaagattaggaataagcatatcataaagattagcaataagttggatcatgattttacagtgagctcggttttagtaagccataaaaaggattttatggtgaaacataagcttaatataatctctttatcatgttccccctaataactgttcattactgcttcagttcattttgtttacacttgtcacatacatctctacagtacacagacacagacttatattttctatacattttttagcattgagttgcctttggatcaatatagaattagtagggatcagtgcaggaaataatattacctttttctgaaagtagagtcttacttatgtatatagcacctttgatttaaggatctcaaggtactttaacattcactgtagcatacttctaatatctctgggtagggaaactattataaattatcattattgcctttttatagaaggaaaaaataaaagcaaagaaaagcgaagtgctcagtgagatgacagtcacagcagaaactcgggttttcagctcagcattctactttgtgaactgtaactctgtaatatattccatatcaaaaggtataatggtttcctccatttgtataacatctctctgtggatgatgttaaataaaagggcaggaatgacggtaaattcccaccaacggatcctcctggctgtgcagttatttcctgcagttctttatgttggctaaggagtcccataaattacagaactgtcctgtgcttctccactgaaaatcctaatcgaccgctaccaccccagcatttccagcaggagggaaaaaccagtgatccacagtcatgctcttcagctgggcatttgtggccagtaaagtctgggcagtgactactattagtgctttcttttataacctcccagatgtgcaa

SEQ ID NO: 347364 - DNA, 441 bp, Homo Sapiens
  misc_feature (14)..(14): n is a, c, g, or t
  misc_feature (283)..(345): n is a, c, g, or t
acgaaagccctccnaagccttttggcggggcttcccaccctgggggggcgcccctcaagccctcccttgggtgtccaacgctgggcccctcccctcccccagggcgggctggaaaagtaatcctcaagtatgtttaaagtttgtggggtcaatgaaatctcccattctgcggacttaacttctgtaaatcccttctttcgatccatgaagctcttaacttcttctttgggttctttgtcctttttaatcttttcatctttgatctgattttctccaatgctcnnnnnnnnnnnnnnnnnnnnnnnnnnnnnnnnnnnnnnnnnnnnnnnnnnnnnnnnnnnnnnngcatccctccaatcattcttctgtaggacttggtgactgtttctgtttcctctatctcgtatctttcttggcgactttcacttttttcttccttct

SEQ ID NO: 347365 - DNA, 839 bp, Homo Sapiens
  misc_feature (34)..(34): n is a, c, g, or t
  misc_feature (53)..(53): n is a, c, g, or t
  misc_feature (69)..(69): n is a, c, g, or t
  misc_feature (85)..(85): n is a, c, g, or t
  misc_feature (254)..(254): n is a, c, g, or t
ggtctcctgatctagccggctccaagcaggagtnagatagttgtgcaggggtncatttaagcaaacctngctggtccattttctnaactagccagtccactagaattttgatgaagcatctcatcaggtattggacatgttgactaagagtcaactctgtaaaatgtttgaagagatttattctgagccaaatatgagtgattatggcccgtgacacggccctcaggaggtcctgagaacatgtgcccaaggtngttccggggcacggctttggttttatatattttagggaggcatgatgacatcaatcaaatacatttaagaaatacattggtttggttcagaaaggcaggacaacccaaagcgggttgagaggtgggaagcttccagagtataggtaaatttaaacattttctgatcaacaattggttgagtttgtctaaagacctgggatcaatagaaagaaaatgttcaggttaagacaaaagactatggagaccaaggttcttttgaagtcttatagtggctgcccttagagacaatagatgacaaattgtttcctattcagacctttaaaaggtcctagactcttacttaatctcttaaagattgggaggatctggaagaaaaagatctaactacgttaatagagattctttagatgcacatttccccccacaaaggacagctttgcaggaccatttcaaaacatggcaaagaaacgagttttggggtaaaatattttgactttcttctttgtcacataatgttatgccacagtcagattggaaagtaagtcatgatatatgaagttaaaaaaacccaacttttcttgtaca

SEQ ID NO: 347366 - DNA, 1257 bp, Homo Sapiens
  misc_feature (633)..(896): n is a, c, g, or t
  misc_feature (910)..(963): n is a, c, g, or t
gtcagaatctagctatcaagttgaaataggttaatctgatcttatcaccagcagacgcatctcagtcatctggaagaaagtgctgttacaagaagtaactctgggtatgcgcttcaggaatgcagttgtggaaaccatgtttgcggctgctttaaactgtttcccaggagtcaaggaaaattcaacaatctgagaccaaaaaggtatcttcggcacagtcttccttggcacagccgtggagaacagagccagggctttgagtcagaggaattgggttgaaacctgcctgtattggttgcaacctgggtgaccttgggatatcctttttattctctgagccttatataccccctgggataaaatatatctgatggaaacctgctgttgcatgttctgggatttaaatgaataacaccgtacctaaagcatttggtgcagggttaggacgtgtagaagcttaagttgttattcttcttcttaacattttcctggaactccggtgaggctccccgagcatgggactttttagctccgtctgacgactgatccctgcagttaactgatcattctacaaagccaccatttgctgaatccattgccaaagaatcgatacaggtgatatctcagcccaannnnnnnnnnnnnnnnnnnnnnnnnnnnnnnnnnnnnnnnnnnnnnnnnnnnnnnnnnnnnnnnnnnnnnnnnnnnnnnnnnnnnnnnnnnnnnnnnnnnnnnnnnnnnnnnnnnnnnnnnnnnnnnnnnnnnnnnnnnnnnnnnnnnnnnnnnnnnnnnnnnnnnnnnnnnnnnnnnnnnnnnnnnnnnnnnnnnnnnnnnnnnnnnnnnnnnnnnnnnnnnnnnnnnnnnnnnnnnnnnnnnnnnnnnnnnnnnnnnnnnnnagcccctacctccnnnnnnnnnnnnnnnnnnnnnnnnnnnnnnnnnnnnnnnnnnnnnnnnnnnnnnacacttagtctatagcaggtgaattggctgcttccatcctggcttggaacttcagacatagaagccttgggactttctcaggactttctccagatctgactcatgctcagcaaacaagcatctctgtggatcacgtgaccttagccagggatgttggtgaaactgtgtgttggtctaggtacctagcccatgctaggtgctcatcgaatagctttagtgggtgactgtgactgaagaggcatcctgggctgtgctttcacaccaccagtgccaatgctatgcatttgctctttt

SEQ ID NO: 347367 - DNA, 917 bp, Homo Sapiens
  misc_feature (409)..(417): n is a, c, g, or t
tgcgcgcgtgtatcgcgcaggctaccgcctcgcatccccgtcacaatctcctcggcgcgcgtggcgtcgtatgcgtcgcccggtcgtagagtgatggcacgaggaaggcaacgctgaccgtgatgtgagtgagtcggacccgtcgccacgcgtccagtggtgggcctcccgagcggtaggtttgtgtttttctcgccgttgcggagccctcatgactcttgcggccatgacaccgggctctcttcctcgcgagcctaggcatttggcccacatcttgccttggcgttacggggggcccgcgtgtgcaagggagacggtttttggcaacgtttttgagtgccacagggctgtccgaacacggcctccgtggcctctccttgctttccctcgcttgcctatgtgcccgggnnnnnnnnngcggtaaaaagctttatttccatttggtctaaggcttgggagagggctctagagttggtattaaaaaaggtgcctagtggctggagggagaggtttcggcagagcggggctacttcagatgtcgctgggttcggtaggctcccgtgtgcctgagggtgaacctttttgcccagcccggcctggaggccggctggcctgtgaaggttggtcaggtggtcacctatcttcttgatgagttttactttttcatctaggaagtggctctccaggaagtcacagatatgggggtctgtgcaggtggaacccaaggcatgaagatccaaaagggtccagttcaggttcttctccagggccagagtgacttccatcgcacccagggttttaccccattcatctttacatggcttctggatgtccgggaagacagtgcggccgccacactggttttgcattttcaagggacactcagcgcccttgtgcttctccttggccaatttgcc

SEQ ID NO: 347368 - DNA, 997 bp, Homo Sapiens
cccggttcttctgctcggtcacccacctgggtattgaagccctataaaaaccctttttacttaccttaatatagtctggcgttgcggggacctcacagtgttctttcacactttttatgtaacttaggaactgaaataccactcatgcatttgttctaaagtgccaaagttctgtctaacttattaacacgtctagacccataactccataacttttactgaaataacacaaattcagtttaggttccttctctaaatcctgacatttatttgcactatgacatttatttgtagaaattgcaattttcaaaaacatttttaaaagttagcattagtaacaagttagtaattagtattagaggcagtagttaggaatagatacgggtttgaaagctatctccactgtatctgtctagtatagcattaatgtgttcaacaaatggtaattactactaagaccacctcaaaaatatattcccattatacttccattttgctaaaactaatttaaaaatcaaattgttcaacgcctttgataaacagaagcctatcttttgaaataaaaaatttaatttcattaaatcaaggattgcgcaggtactgaaaattatccaatactctcaaaaagttaccagaattttagcaataggcagtttttacatgactaagcctagagataaaaaatgtgtcctatgtacatagtttattatctaaatgaaactgcactgttagataaatcttgaggtatcgagccaaaatcctgtaaatattaacactgctattactgacttatacctgtgtaaacacagtatacaaaagcctacatcaaaataattcacttcaacaaaagtactttatatcacgtgacattagagaaaaagaagtaaagcctttgctgtttaccggtcctcctgcaagcatctgattttacacataaaacaggcttcaatttgaagcctagtacaggtacatacaaaagtaaaacttagaagtgcca

SEQ ID NO: 347369 - DNA, 463 bp, Homo Sapiens
aggttgtttgttgtttggggagattttggcagggctgccgtgcatgtggctgtgagggctgcacagtcctgccaaggggcttcctccttgtcaccccgaaccttgtaatcgtgtgctggcgtggcagccctggctaagttaatccccaccgctttcagtggtagaaagaattccctgagtgggccaggctggtgccctcctcctaccctggcttttctgagtgagctgcctggagccctcatcccctctcccaggctgggctggccctgggcggggccactgtgtgctggcccactgtgacctgacccgaccttgtgcagcccccctgccctggtgtcctgggttttcgtgatgatctttgctctgtttccagtggggtttgaagcagagttcagggaaccctgcccaaggtcctcctgttcagacattcctatgttaaataacgtacgtttgacttccccgg

SEQ ID NO: 347370 - DNA, 377 bp, Homo Sapiens
tcgtaacaattcatctttatttcttattttcctctggagatgcagaatttggtatatttcaccccaggtatatttgggatagttggctcctcgctgggtcaggatggctgggtgccttctcccctggcatggttctcttctctgcagggcgaggggcagggagctagtagaacctcgcaatgacagccgcaatggcagacccaatggagcccaggatgaacttggtcaatccggagagtccagttgctcccagtgactgctgatgaggtgagagcagaggcctccatgcctgctcgggttaattccgtggcccaaagaaggagagttcctgagaatgtgaagctgacctcaccgtcttaagcttggatgtgttcccc

SEQ ID NO: 347371 - DNA, 940 bp, Homo Sapiens
aaacttgtacctgggatgaaagttcctccacagcctccagttgcttggtctgccttgttagggtggggtgggcagggagggacaggtaaggcctacaacttatgggaggctggtggtgtggctgtcgagagctgaggaggagatggggtgagtgggatgagggttcagttaagtcaaccatggagctcactgatactttacttttccagacactcatgccaacaagaacctgtgcccctccttcctaacgtgaggcctggggttcctcagaccatctccttcattgctgggcagtgcccagccaccggctgacccacacctgacacttccagccagtctgctgcctgctccctcttcctgaaactggactgttcctgggaaaagggtgaagccacctctagaagggactttggcctccccccaagaacttcccatggtagaatggggtgggggaggagggcgcacgggctgagcggataggggcggcccggagccagccaggcagttttattgaaatctttttaaataattgcacgtgttagtctcatgtgtcagcaatgctgtgtctggttcagtgatccccacgggaacgcgagccggggggtcgactggaagtgctctgtcccttgagtccatgctggggctcccctacacggggagaagagccggtcagcccatctggaactggcactgtccagcaagtgtgctctgttcttacagggtgtcctgaaggccaaagttggaggcctgagaccacgggctccactgctaagagcgtgccccaggcagctgcaggctgggtgtgggtggcttggcgtggtgccctcggtggcagaggagactgcccgcctcacagttcaggttgcggtagcgggcaacagctggtgtggggcgggggcacatggacaggaagccaaagctgaaggggccgaggcaccaa

SEQ ID NO: 347372 - DNA, 919 bp, Homo Sapiens
  misc_feature (445)..(445): n is a, c, g, or t
gaggatgcttcgccagattaattaaatttatgattcctcctctcttccaacagtggatgtgttgctatttaaaaatgattctagcagggcaaggtggcaagtgcctatagtcccagctcttgggaggctgtggtgggaggttcacttgagcccaggagttcgagactagcctgggcaacatagtgtgatgctacaataattcacctacttatttctaacattattgaatgaaagaacatgaaagaacctaaggctgtattatataatatgttacattctaattttttgtccatttaatattaagcatcatacttgattttaaggttatagtttataatctttaaaaggtaatttatctccttggatatttaaaagcaatatatctcctcaataattttaaaactacatatgagggatatttattttttgttcattttctcttttnaaaaagcagcaaaaacaaatcaataaatctacatttgtattatgtagggagaataacggaaaagatgtacctaggaaacaaaagtcatggtagtcttggtaatctagccatgtccttccctatgggtgttttaaagccaggatgaatttagagttttcatattagtactataaattgttttccaggtttacttgtttccagagtagaagtaaaacactttacttgaaattactaccaagaataatgcccactgagaatccagtttggaaaaaatgtttgaagggggtatgaagtatatccttcagttcagtattgccatctactaggttattttacaattttttcatggtcttgcatggacaggttgcatggacagcacttatttcttcttctattatataatttatttccttttgtatcaaaggaggaagaagccagacgacagtcaggagctcagtatggctcttttcccaa

SEQ ID NO: 347373 - DNA, 999 bp, Homo Sapiens
gagccagcagtgagggtttaaagttggacttgatgaccaccttgacctccagtttggtgcgtcccacttctcgcactagcgggatcacccggaagggaaggatgatgtccttggttgtgcgatacctcataagctcaaactctccatctggcgggataaagctgatgctgcgttcagagtcaaacttgctgagtcgcacacactggtggaaggtgcagtcatcaatggcaattgattgcttcccgctcttgcttgtttcatcagctgtgcctttgccctgcttttcaataacaatcttgtcattcatcccaaacttgcattcaggcatgccactcaggtagctcttcatcaccacccggcccgacacatgggcactcagcacctgcccttgtggggacatgagcaggttcacactctccagcacatccaggaagagctcattccgacgatacttgataccctctcgcggccagccaatctgcccagttacctggctggtgatctgtgactgctcttcttttgtctgatgctgactcttgatgccctgctgcgtgatgaaggttttcagcgcgcctgtctcggaattctgtgggtagccaaagtcctcgctgatcttgccaaagtaggcagccatcacgtcacacatcttatagaggaattcgaagaccatggcagcgttgacattctgcttggtgactgctgccagccaaatgttggaccgcttaacgtggaagaagctggtgcgagcaatgttggtgacggggctgcgcacctgctgccgggcatggataacattgacccgaaaggcatccactgcgttcctcccgatgtcatctcggtagactcgggagatgagcacctcccccttgtgattatagatgaataagcctccaatcatggcggcagatcagtctccgcggcccatcgctctgagaacagacctggtgtcctcggccccctgctctgccggcccggccactctccggatcccaagatgtc

SEQ ID NO: 347374 - DNA, 362 bp, Homo Sapiens
ggttgaccctcctggctcccctgaattctgtattcaaagatggaacccctccaattgatgcccatacaaggaatttgcttcggaaccacataattaaagaccagctggcctctaagtatctgtaccatggacagaccctggaaactctgggcggcaacgcggcccacgacaagagggggaggtacgggaccctgttcacgatggaccgggtgctgacccccccaatggggactgtcatggatgtcctgaagggagacaatcgctttagcatgctggtagctgccatccagtctgcaggactgacggagaccctcaaccgggaaggagtctacacagtcttcgctcccactggccttccggcc

SEQ ID NO: 347375 - DNA, 548 bp, Homo Sapiens
  misc_feature (111)..(111): n is a, c, g, or t
tggccggaacattcaacctcaatagcttaataatgatgccaatttctcccagcttgtgcaagggctttaacaaaaaattgtgcccaggacttccccatgaggctgggattnctggattcatgttttatgagccccacaatactgaagctccttttccagggacttggcataggcagtcaattccacatttgggataggtcctctctggaaagtgaatgtcaggccagtgacatcccaagtttactgcatgccagtgggttaacagccatgtttagggggaacatgatttaaaaagtacatctctctccctcctcccccacatgcacaaggctcacatctcattatggtgcggcccatgtacattaaagtgtgatacttggttttgaaaacattcaaacagtctctgtggaaatctgagagaaattggcggagagctgccgtggtgcattcctcctgtagtgcttcaagctaatgcttcatcctctctaataacttttgatagacaggggctagtcgcacagacctctgggaagccctggactcgtgcc

SEQ ID NO: 347376 - DNA, 1134 bp, Homo Sapiens
  misc_feature (84)..(109): n is a, c, g, or t
  misc_feature (689)..(689): n is a, c, g, or t
  misc_feature (711)..(766): n is a, c, g, or t
  misc_feature (772)..(819): n is a, c, g, or t
tttttgttaagacaggaaacacatttattgagagcacagtggggtgcgccaagccctgtgctttggaaccgcatcacagcgccnnnnnnnnnnnnnnnnnnnnnnnnnngaaggagcccacttcccacatgcagacactgaaggctcaacagctcccctaggcctcagggttcctgcggggtgggcaggggtccagcccacgggtctgaccccaggtcagcggcgtccatcagtcagagggcgggtctctactcaaggggaggccccgggtccagagtctctgggtccagcctgtcccgtgggaataggtgcagggtgtccccgtggctgtggagggatttcgagctggagaggggctggggtcccacattcgaggtcccttcccacgtaggcatccaggtgatggcttccgcccaaaccaggaaggagacgagaggcccgccaggaagaagacttgggtccgggatggtgggccccatcagggcctcttccgcagcttccatccgcagttcttcagccgacccagccgggccacggcccacgtgcctttgtgagcgtgcttccacggagtagagcgagttaggaagcagtgggttgaagaggaaattggaggtgaggaaggaagacagcaagtgtagacaggcctttcaagaagcttggctgatgcaagaagagcccgtggacagggnctgcctggagtgctgttggagnnnnnnnnnnnnnnnnnnnnnnnnnnnnnnnnnnnnnnnnnnnnnnnnnnnnnnnnctcatnnnnnnnnnnnnnnnnnnnnnnnnnnnnnnnnnnnnnnnnnnnnnnnnattcccccagaaaaggataggaagatcttcagagaggtggggcgtgcctttggtgattcagtagcatgctcattccagaagcccacccagggccttggagttgccagcaggatgctggccaagcccttggcccaggtccccctcctgagaatttcccaaagggatccttccattcaggacatcataagggtgatgacagagtcagtcgacaaagactgacacccccttggggagggaaacactccagtttgctagcaggtgaacacaagcaaagacttataggaaagtactcatagagtcaaagtatgagcatag

SEQ ID NO: 347377 - DNA, 1210 bp, Homo Sapiens
  misc_feature (78)..(78): n is a, c, g, or t
  misc_feature (246)..(246): n is a, c, g, or t
  misc_feature (250)..(250): n is a, c, g, or t
  misc_feature (699)..(746): n is a, c, g, or t
  misc_feature (756)..(806): n is a, c, g, or t
  misc_feature (833)..(833): n is a, c, g, or t
cgggatcagagagggagcgcgccttggctcgctggccttggcggcggctcctcaggagagctggggcgcccacgagangatccctcacccgggtctctcctcagggatgacatcatccgtccacctccttgtcttcaaggaccacctcctctccatgctgagctgctgccaaggggcctgctgcccatctacacctcacgagggcactaggagcacggtttcctggatcccaccaacatacaaagnagcnactcactgacccccaggaccaggatggcaaaggatgaagaggaccggaactgaccagccagctgtccctcttacctaaagacttaaaccaatgccctagtgagggggcattgggcattaagccctgacctttgctatgctcatactttgactctatgagttctttcctataagtctttgcttgtgttcacctgctagcaaactggagtgtttccctccccaagggggtgtcagtctttgtcgactgactctgtcatcacccttatgatgtcctgaatggaaggatccctttgggaaattctcaggagggggacctgggtcaagggcttggccagcatcctgctggcaactccaaggccctgggtgggcttctggaatgagcatgctactgaatcaccaaaggcacgccccacctctctgaagatcttcctatccttttctgggggaatnnnnnnnnnnnnnnnnnnnnnnnnnnnnnnnnnnnnnnnnnnnnnnnnaaaaaagagnnnnnnnnnnnnnnnnnnnnnnnnnnnnnnnnnnnnnnnnnnnnnnnnnnnaaggtttgacaggtcagtcccttcccnaccctcttgcttgtcttacttgtcttatttattctccaacagcactccaggcagcccttgttcacgggctctccttgcatcacggctaatctcgggccttgtcgaaggaagaggctgcagacgttaatgaggttagctgctggattccagtattcgtcgcataaggatccttctttgtctgcgaaggactgaagaactgcggatggaagctgcggaagaggccctgatggggcccaccatcccggacccaagtcttcttcctggcgggcctctcgtctccttcctggtttgggcggaagccatcacctggatgcctacgtgggaagggacctcgaatgtgggaccccagcccctctccagctcgaaatccctccaca

SEQ ID NO: 347378 - DNA, 427 bp, Homo Sapiens
  misc_feature (21)..(21): n is a, c, g, or t
  misc_feature (204)..(239): n is a, c, g, or t
gcccatacccacctcccgggnaaagaaacctttgtagttccatagttcgaattagtgtgtcctttaggacaataggtcccagccctacagattagctgggtgaagaaggcaagtgtctcgacagggcttagtctccaccctcaggcatggaaccattccagggtgaagcctgggatgtgggcacaggagactcaggctgatatnnnnnnnnnnnnnnnnnnnnnnnnnnnnnnnnnnnncctgttgcttgtctgaatagatttgagcaacagtcttgcttttgttaaaatcctggagccgttaagtcctgaatattcttctggacatcattgctggctggagaaaggagccccaggcccggctcggctgacatctgtcaggtttggaagtctcatccagcttgcctggataagggacttaggagaaa

SEQ ID NO: 347379 - DNA, 911 bp, Homo Sapiens
  misc_feature (468)..(468): n is a, c, g, or t
  misc_feature (495)..(555): n is a, c, g, or t
  misc_feature (626)..(626): n is a, c, g, or t
  misc_feature (643)..(643): n is a, c, g, or t
  misc_feature (699)..(699): n is a, c, g, or t
  misc_feature (704)..(704): n is a, c, g, or t
  misc_feature (722)..(722): n is a, c, g, or t
  misc_feature (732)..(732): n is a, c, g, or t
  misc_feature (734)..(734): n is a, c, g, or t
  misc_feature (752)..(752): n is a, c, g, or t
  misc_feature (760)..(760): n is a, c, g, or t
  misc_feature (764)..(764): n is a, c, g, or t
  misc_feature (768)..(769): n is a, c, g, or t
  misc_feature (775)..(775): n is a, c, g, or t
  misc_feature (785)..(785): n is a, c, g, or t
  misc_feature (790)..(790): n is a, c, g, or t
  misc_feature (792)..(792): n is a, c, g, or t
  misc_feature (830)..(830): n is a, c, g, or t
  misc_feature (850)..(850): n is a, c, g, or t
  misc_feature (859)..(859): n is a, c, g, or t
  misc_feature (863)..(863): n is a, c, g, or t
  misc_feature (867)..(867): n is a, c, g, or t
  misc_feature (884)..(885): n is a, c, g, or t
  misc_feature (888)..(888): n is a, c, g, or t
  misc_feature (890)..(892): n is a, c, g, or t
  misc_feature (895)..(895): n is a, c, g, or t
  misc_feature (909)..(909): n is a, c, g, or t
aactaaaatggtcacttttaatgggaaccagaggtatagttacaattacatagtccgacacaaaaaaacccttgggtgatcaggaattggaaggttacaaaataacgagggtaacactgggtacaggacaaaaagctgttccagaacctggggagccaggctaattaatacggcctctccctgcgatcctgtctgtgctcacccctggaatccatcttgccagggccaaagccacctctgtccccaccaccccggccccctcggaagcctccacggtccccgccgcggccccggtagccgcctcgatcatagcctcctctgccaccacgacgatcatccccgtagttaccccccatgtgagagccacctggtccccctcctgggccatctggtttaggggccttacactggttgcattcattcctccaagagaagttcatattctcacaggtgggattaggtcacttncagtcaccagctcgctgctgtcctccnnnnnnnnnnnnnnnnnnnnnnnnnnnnnnnnnnnnnnnnnnnnnnnnnnnnnnnnnnnnntagcctccacggcccatgggtcctcctcgccctcggcctccacgaccattgccaccaccccgattaaagtntgctcggcgcagtagcnaaatgagaacttgataggatttccggagaattctttaccatcaaaccagtcaatanctgcnttagctgaaaggtgggtnatcaaaaganancgttgcctctcccttcancttgccantttncctnntctgtngtacaaattnatcangnggctgtccggttttcttgtttgtcttaataatacaatntgcttgaagttatcagcccnagactcaantgtnacantctcacccaggcctttnncanannnggngttgttgtctgaanta

SEQ ID NO: 347380 - DNA, 515 bp, Homo Sapiens
  misc_feature (496)..(496): n is a, c, g, or t
taacttcaggagccagctcgtgatctcaggatgtatggaaaaataatctttgtattactattgtcagaaattgtgagcatatcagcatcaagtaccactggtgtggcaatgcacacttcaacctcttcttcagtcacaaagagttacatctcatcacagacaaatgggataacactcattaattggtgggcgatggctcgtgttatttttgaggtgatgcttgttgttgttggaatgatcatcttaatttcttactgtattcgatgactgataaaggttttcatgcctctgggattgagattagaggaagaaagcaagaaaggacatttttttacttcactgttcatggtgtaattgtgtgcctgacggctgtagctactaactcttacgttgactggctactaagggactctaggagtcagaaactaaatgctgagtctctcaaaggcgtagagagaatttcagagggccttaccatgacatgaggattaaactncaagttctggcccgattct

SEQ ID NO: 347381 - DNA, 408 bp, Homo Sapiens
  misc_feature (394)..(394): n is a, c, g, or t
agctcatgatctcaggatgtatggaaaaataatctttgtattactattgtcaggaaactttgagcattcagctgaggggccaagttggctgcctctgagaagaagcccttccacctccactccactgcacttgggtgccattcccctcatttgaatgtctccaagagatgagcaaagaaattgtgagcatatcagcattaagtaccactgaggtggcaatgcacacttcaacctcttcttcagtcacaaagagttacatctcatcacagacaaatgggaggaaacgggacaacttgtccatcgttttcactgtaccagctcctgtagtgattaatacttcattatttttgtgtgtgatgggctggtattattgggaacgttcctcttaaatttnttaacagtattcgg

SEQ ID NO: 347382 - DNA, 902 bp, Homo Sapiens
  misc_feature (274)..(296): n is a, c, g, or t
gagcaatttattttttttcaaagaaatccatgcaaagagagaacgatagaaagggagggagtgagagagaaagacatggtaaccatgttctagcagccaaacataggagaataatttggcacaacttgatggttttttttctttctttgcaaaaggacaatctatatgctaccactaaaatgtatcttcctccaaaagataccatttgattttcgaaaacataacacatggttagtcctctacttcatggctggaggaggtatacaggataccnnnnnnnnnnnnnnnnnnnnnnntaagaaagtggttccctttatcgaggaagaccacagggtgctgtagggcagcacatgtgctgggcaccaggcagtcagtgcaccaggaagaagaagcacaccaccgagatggcccatgctggtgagaagcttcagcggggaatgaacgttcccgaggttgtgaaaggtgcttatctcgttgtccttcggagttgcctgctgactgtttccaggcgcatcatccacatccagatcataggccagttctgcaaggaagcggagctgattcttcacttttatcattccatcaccagagcctccaatgcactcatcttcatcatcaccgcagtctccactttcaaacccttcctcatccaggtttttatccagaactctacctttgggcatagacatggttctcaggagctggttaatgtgcttcagtttgtcaataatttgactgaccactggctcagggcccttcattttcagctcatggagattgaactggtttttcattccattccttgctgccttttggctgtatctctccatgagttcttgtccattccagcaaagggtgtcgttttccgccacagggccctcgtgccgaattcgccacccagg

SEQ ID NO: 347383 - DNA, 861 bp, Homo Sapiens
  misc_feature (181)..(181): n is a, c, g, or t
  misc_feature (193)..(256): n is a, c, g, or t
acgtgcgaaagccccggactcgtggagttgtgaacgccgcggactccggagccgcacaaaccagggctcgccatgaagccaggattcagtccccgtgggggtggctttggcggccgagggggctttggtgaccgtggtggtcgtggaggccgagggggctttggcgggggccgaggtcgangcggaggctttnnnnnnnnnnnnnnnnnnnnnnnnnnnnnnnnnnnnnnnnnnnnnnnnnnnnnnnnnnnnnnnngaggcttccattctggtggcaaccggggtcgtggtcggggaggaaaaagaggaaaccagtcggggaagaatgtgatggtggagccgcatcggcatgagggtgtcttcatttgtcgaggaaaggaagatgcactggtcaccaagaacctggtccctggggaatcagtttatggagagaagagagtctcgatttcggaaggagatgacctgggtggtgtggaccagatccacatcaaaccgggggctaaggttctctacctcggggctgtctcgggcaccacggtctcccatgtctctgacatcgttggtccggatggtctagtctatgcagtcgagttctcccaccgctctggccgtgacctcattaacttggccaagaagaggaccaacatcattcctgtgatcgaggatgctcgacacccacactaccgcatgctcatcgcaatggtggatgtgatctttgctgatgtggcccagccagaccagacccggattgtggccctgaatgcccacacctttctgcgtaatggaggacactttgtgatttccattaaggccaactgcattgactccacagcctcagccgggccgtgtttgcctccggtg

SEQ ID NO: 347384 - DNA, 400 bp, Homo Sapiens
  misc_feature (128)..(128): n is a, c, g, or t
  misc_feature (250)..(250): n is a, c, g, or t
  misc_feature (341)..(341): n is a, c, g, or t
atgggatcccagccacgccgggcataggagcccctgggaacaagccggagctgtatgaggaagtgaagttgtacaagaacgcccgggagagggagaagtacgacaacatggcagagctgtttgcggtngtgaagacaatgcaagccctggagaaggcctacatcaaggactgtgtctcccccagcgagcaggtccagggctcagaaatcagctctattgacgaattctgccgcaagttccgcctggactncccgctggccatggagcggatcaaggaggaccggcccatcaccattcaaggacgacaagggcaaccttcaaccgcttgcatcgcagacgtngtcttcgctctttcattcacggtcatgggacaagctgcgcctgggagattccgcggcca

SEQ ID NO: 347385 - DNA, 665 bp, Homo Sapiens
  misc_feature (227)..(248): n is a, c, g, or t
ggagcagtattcacattttttatttcgaggtgtaaaatatacgtggccaacattgtaactttcatccacagatggaatagctgggaagtataaaaacctgtacatgacctttagtgaagattatttgtcatcaaattacccatatccaagtttccatgggcctggaatttcctttccacttgatagaagtatatattaggaagtccagttaatagtatttttatttnnnnnnnnnnnnnnnnnnnnnngaatcagcagagtcaagttgtcttagtcttaaggctttctggatttcttccttggaggaggtcaggatcttcccaaggcctgggtcctcgaatattcttccagtcatcaaacttggagtctttgattttctcatattccgactctaaagatattttattctctttcagttttttttcaagctcaggatccattttactcttcacagcatcatatcggatttgagaaaactcacgaagaccaaaagaacctccaacaatcagcaacaacatggggactccatagccgagagtcttgttcttgcgaaaagcacgcatcaccgcgggtgcaaacatgagtgaactcttccatcggctcagaactccaagcgggcctagcgcagactcccaaatctcagcagctcacgctctcaccaagac

SEQ ID NO: 347386 - DNA, 805 bp, Homo Sapiens
  misc_feature (45)..(45): n is a, c, g, or t
  misc_feature (171)..(171): n is a, c, g, or t
  misc_feature (216)..(237): n is a, c, g, or t
  misc_feature (502)..(603): n is a, c, g, or t
gagttgtaaaaaatatagcgtgggcccaacaattgttacttttcnatcccacaagatggaaatagctggggaaagtataaaaaacctgtacatgacctttagtgaaagattatttgtcatcaaattacccatatccaagtttccatgggcctggaatttcctttccactgnatagaagtatatattaggaagtccagttaatagtatttttatttnnnnnnnnnnnnnnnnnnnnnngaatcagcagagtcaagttgtcttagtcttaaggctttctggatttcttccttggaggaggtcaggatcttcccaaggcctgggtcctcgaatattcttccagtcatcaaacttggagtctttgattttctcatattccgactctaaagatattttattctctttcagttttttttcaagctcaggatccattttactcttcacagcatcatatcggatttgagaaaactcacgaagaccaaaagaacctccaacaatcagcaannnnnnnnnnnnnnnnnnnnnnnnnnnnnnnnnnnnnnnnnnnnnnnnnnnnnnnnnnnnnnnnnnnnnnnnnnnnnnnnnnnnnnnnnnnnnnnnnnnnnntgacagagtgagactcaacatggggactccatagccgagagtcttgttcttgcgaaaagcacgcatcaccgcgggtgcaaacatgagtgaactcttccatcggctcagaactccaagcgggcctagcgcagactcccaaatctcagcagctcacgctctcaccaagacgagtacgtccttaactcacttccttttccttccc

SEQ ID NO: 347387 - DNA, 526 bp, Homo Sapiens
gccagcatcaggccatgagcagcacgcggtccacagcacggagggcgcagacggactgaggagccgctgtgactcgcaggtgggcgtgtgaggctgcaacatcatagcagaatccccaatgtcgtccccggtaggtaaagcagcatagatgagcactctatcgccaggagcaatgtctgtcttcacatggattgagatggcagcatggcccttcatgtcttcctgcttcacgagcagtccatgagttgcagttcgggcaatgcctccctttgccattatcagataatagaagtagagcttcttcagccccagcagggtgcctccattcagcatataatgtgcctggtctgtctgagtaaggccacagggtagttcattagacatgggctcaaggtgcactaagctcttgcttggggagaactcgagataagcagtgtgatgtgccttgtcgtgctcctctgacgtgcactggtagccgtaacagggacttcgatccatgtaagtgaccctgacagtcagagaggta

SEQ ID NO: 347388 - DNA, 760 bp, Homo Sapiens
  misc_feature (32)..(32): n is a, c, g, or t
  misc_feature (84)..(84): n is a, c, g, or t
gccagcatccagacaggcaaagggccctgccnttccactcgtgatggtgtcaggaactgttactcctacctcagcaacactgcntgagacaccaccaaatcccagatccatgtctcagggaagtactttcgtacggtctccgtgtaaggctcttcaacatgcaccaggcgtgcatggcttcttcccattacatctgactcataaaaacctacgggtttacgaatctttgagttggtgaatgcctttaagcccatgtcctctaggaagcctgtacatatcccatttgtacttgatactggagtatatgtgattccattaatatagacattatgacgattgatgcagtcttcatcgtcctggtcattcaaaggcccagggaagccagtgaggtccttttctggtagcaggttgtaaaccgaggacgccgagagctcagcatcaggcttcatgagcagcacgctttggtccacagcacggagggcgcagacggactgaggagccgctgtgactcgcaggtgggcgtgtgaggctgggagactttgtgatgggctgaagctcaaatccaccttgttggccagacaattttcaacatcatattttgcagaatccccaatcacgtccccggtaggtaaaacagcatagatgagcaaccgagcgacaggagcaatgtctgacttcacagggattgagatggaaaaatggcccttcatgtcttcctgcttcacaagcagtccatgagtcccagttcggacaatgcctc

SEQ ID NO: 347389 - DNA, 1060 bp, Homo Sapiens
  misc_feature (30)..(31): n is a, c, g, or t
  misc_feature (36)..(38): n is a, c, g, or t
gccagcaggtgcagaccccgcagtcgatgnnccctnnnccccagccgtccccgcagcccggccagcccagctcacagcccaactccaacgtcagctctggccctgccccatctcccagtagcttcctgcccagcccctcaccgcagccctcccagagcccagtgacggcgcggaccccacagaacttcagtgtcccctcacctggacctttaaacacacctgtgaaccccagctctgtcatgagcccagctggctccagccaggctgaggagcagcagtacctggacaagctgaagcagctgtcgaagtacatcgagcccctgcgccgcatgatcaacaagatcgacaagaacgaagacagaaaaaaggacctgagtaagatgaagagccttctggacattctgacagacccctcgaagcggtgtcccctgaagaccttgcaaaagtgtgagatcgccctggagaaactcaagaatgacatggcggtgcccactcccccaccgcccccggtgccaccgagcaaacagcagtacctatgccagccgctcctggatgccgtcctggccaacatccgctcacctgtcttccaccattccctgtagcgcacattcgttccagccatgaccgccattcacggcccacccatcacgggcccagtggtgtgcacccggaagccggccggctgaggatgatgagcggagagcaatcccagtgtgcccaggtgagggtggcaaggctggaccccaaggtccctggtaatctggacctttctcagtgcagcaacaaggagcgtcaacctgatcctgcaagctgattagaggactcccaagagtgcaccactgaggccacgatgtgcccgtgataactgccaagccagggggtaacgcagggagacaggccaaccatacacagcggggccgtgaagacgaccaggcggaagccccgaaaagaccggccgctggaaccccgcagagcacagcccttaccgaacaaacagaggcccccacgaagaacccggaacaggcccaccggagagaccagcacccaggccacacacaca

SEQ ID NO: 347390 - DNA, 613 bp, Homo Sapiens
  misc_feature (545)..(545): n is a, c, g, or t
ctgaagcgccacttctcagaaacacagagctttagctccgccaaaatgaaacactcattaaacgcacttctcattttcctcatcataacatctgcgtggggtgggagcaaaggcccgctggatcagctagagaaaggaggggaaactgctcagtctgcagatccccagtgggagcagttaaataacacctgagcatgcctcttctccctgccgacttccacaaggtggacctggagaagatattcagtgaagacgacgactacatcgacatcgtcgacagtctgtcagtttccccgacagactctgatgtgagtgctgggaacatcctccagctttttcatggcaagagccggatccagcgtcttaacatcctcaacgccaagttcgctttcaacctctaccgagtgctgaaagaccaggtcaacactttcgataacatcttcatagcacccgttggcatttctactgcgatgggtatgatttccttaggtctgaagggagagacccatgaacaagtgcactcgattttgcattttaaagacttntgtaatgccagcagcaagtatgtcacgaccattcataatcttttccgtgctgactcatcgcctcttgg

SEQ ID NO: 347391 - DNA, 898 bp, Homo Sapiens
  misc_feature (8)..(9): n is a, c, g, or t
  misc_feature (13)..(13): n is a, c, g, or t
  misc_feature (18)..(18): n is a, c, g, or t
  misc_feature (24)..(24): n is a, c, g, or t
  misc_feature (28)..(28): n is a, c, g, or t
  misc_feature (36)..(36): n is a, c, g, or t
  misc_feature (53)..(53): n is a, c, g, or t
  misc_feature (62)..(62): n is a, c, g, or t
  misc_feature (64)..(64): n is a, c, g, or t
  misc_feature (88)..(88): n is a, c, g, or t
  misc_feature (90)..(90): n is a, c, g, or t
  misc_feature (92)..(106): n is a, c, g, or t
  misc_feature (113)..(113): n is a, c, g, or t
  misc_feature (117)..(117): n is a, c, g, or t
  misc_feature (124)..(124): n is a, c, g, or t
  misc_feature (127)..(128): n is a, c, g, or t
  misc_feature (134)..(156): n is a, c, g, or t
  misc_feature (160)..(167): n is a, c, g, or t
  misc_feature (201)..(201): n is a, c, g, or t
  misc_feature (248)..(248): n is a, c, g, or t
  misc_feature (254)..(255): n is a, c, g, or t
  misc_feature (257)..(257): n is a, c, g, or t
  misc_feature (263)..(263): n is a, c, g, or t
  misc_feature (314)..(314): n is a, c, g, or t
  misc_feature (338)..(338): n is a, c, g, or t
  misc_feature (341)..(341): n is a, c, g, or t
  misc_feature (378)..(378): n is a, c, g, or t
  misc_feature (426)..(426): n is a, c, g, or t
  misc_feature (436)..(436): n is a, c, g, or t
  misc_feature (439)..(440): n is a, c, g, or t
  misc_feature (444)..(444): n is a, c, g, or t
  misc_feature (448)..(448): n is a, c, g, or t
  misc_feature (452)..(452): n is a, c, g, or t
  misc_feature (455)..(455): n is a, c, g, or t
  misc_feature (466)..(466): n is a, c, g, or t
  misc_feature (478)..(478): n is a, c, g, or t
aagaaaannaacnttttntgttantttnaaaaattnaaatggagggaagaatnggggagggnanaataaggcatttctgatgcttaantntnnnnnnnnnnnnnnngaggatnacancctaaanccnngggggnnnnnnnnnnnnnnnnnnnnnnntttnnnnnnnntttttggtatctgttcaatgaaaataaggtatgncccaagtttttacctagtctgactagaagtattccacttcaaggtcngaagtnngncttttnccttaaaaaacaacaacaaacaaaactatcacaccggatcgatacgacgangcggttaaaccgttttgtgtaganctnttcggcgccgaactacgacacgcgccttatcgatcgnaaaatcgcgcgatagttcgcgaactaatcgtacacgaactaaatcccnttaaactttncgnncgcncgtnaaantcncgtcgaagtcntcacgttatccnaaaataaatatacacaaatatcgaaatataatcgtttcacgattcgcaacgcgtaatatcgtaatacgtacgtgtttgtaacgatactcttcgtgctaatattaactagtagtattttgatttgtacagtcataatttgttaaaatgacttcatttaacattcactgatgtagattaataatgtaagttctgatttaaagaatggtggcaaaatggtgcatgtaatacttttgcaagtgttggggagatcggtatgttttgaaaagagtaatttaacttttgggtgccaggaaatgggttttctcaaagtccattgccggcaatgggcaggcctgcaaatactggcacagagcattaatcatacaccttattaacggtgaggtgaataactttgaaataaagttttagagaaatgtttca

SEQ ID NO: 347392 - DNA, 484 bp, Homo Sapiens
aatggtggaagagggcctctgttaaaattgctctggcctccacgactttcattgtaatttcctcgaggagtattcgaagcaggtggtgtgaaaaacctattctgactgtggaaagcaccccgtcctcctctattgcctgaaaacccaccacgggaagaaatcttctgtgatactttgagtggccgttttggtggaggtattccatcttgaggaaccacttctttactttcagcagcaacaaagtcatccacatgcatagatggtggtctacttgtgttctgttttctctgacgaaaaatatcatgaggtcgtataccctgtccaaatcctcccctgccccttcctcttggtggtggcacaacatgagctcttttggcaggttcaatgtattcagattttccacttgacgttataaaggtctcaaacttgggaagcacaagcatgagacctttataacgtcaatgtattcagattttccacttga

SEQ ID NO: 347393 - DNA, 586 bp, Homo Sapiens
tcaatgtcttatttttattgtcctcgtgaaatgttcatatacagttaagatgttcccaaaaggatttttatcgtgtaaaggagcgtacatgacgacctctaccactgcctccactaacaaactttcctcttgagcctccactgccgctatttgcactagcccaggaaggtccaagtcccccacgacctctagaagcacggtcccgaggacttgggcggtaacctgtagaactaaggggtcgtaatggtggaagagggcctctgttaaaattgctctggcctccacgactttcattgtaatttcctcgaggagtattctgagcactccaactggagcctcttgttccttcccgacgactgtagtttccttttgaagcaggtggtgtgaaaaacctattctgactgtggaaagcaccccgtcctcctctattgcctgaaaacccaccacgggaagaaatcttctgtgatactttgagtggccgttttggtggaggtattccatcttgaggaaccacttctttactttcagcagcaacaaagtcatccacatgcatagatggtggtctacttgtgttctgttttctctg

SEQ ID NO: 347394 - DNA, 764 bp, Homo Sapiens
ggagagcatatggaaacccagaccagagccacgagctcagatggggagggctgctagcagcgatcaacttagggacaatagcccgcccccagcattcaagccagagccgcccaaggcgcaaaacccagaacaaagaagaatcctatgacttctccaaatcctatgaatataagtcaaacccctctgccgctgctggtaatgagaactcctggggcatctaccaaagggtatcctcctcctgtgtgcagcaaaacctacctttgggcgcgctatactgagagcccttcacttccatcccttctcaagagggtgaggaggtgggagagagcagtgaggagcaagataatgcgtcccaaatcagtcctgggcaaagtcaaaatatttgagaagatggatcacaaggccaggttacacgagaatgcaggagctccaggaagcacagaatgcaaggatcgaaattgcccagaagcatcctgatatctatgcagttccaatcgagccacagagagcttcttccagaccttatcaggatacccagaggaagttatggcagtgatgccgaggaggaggagtaccgccagcagctgtcagaacactttcagcgcggttactatggccagtctgcccgataccgggacacagaattatagatgtctgagcacggactctcccaggcctgcctgcatggcatcagactagccactcctgccaggccgccgggatggttcttctccagttagaatgcaccatggagacgtggtggg

SEQ ID NO: 347395 - DNA, 736 bp, Homo Sapiens
atttcttaacctgtaaaaataactgttgaccatgctaatgtatatatacttgtgcatcttaggacattaagtggtttgctgctttgatggaaattatggttcagtgggttggatacaagagagatgactgttcacagaataacctgtgaactttcacccctctgtatggaaacttgtttcagggccaaatccttgtagctgtcttcttgccccggtcagtgccagccgtactattcacaacactgctgctaccgaggcctaggatcagttcttaagagcagccccggtaactggaggaatgggagccgttttgatgagaaaaatgggctggagagaaggagaaggattaggaaaaaacaaagaaggcaataaggaacccatcctagttgattttaagacagaccgaaaaggtcttgttgcagtaggagaaagagcacgaggtctgggaacttctctgctgcaatgaaagatctgtcaggcaaacattcctgtgtctgctttgatggagatctgttatcatcgcaaacattttctctttagggtattgataaatggaagcgcttaccagcccagctttgccagcccttataagaagcatgctaaagccacagcagctacttgtggttcttcaagcaatggccttgtaccaaaggaccttatggcttatgccacttgcttaagagtgcctcacgtagatagaatggagtttataataatcttcagtttactctgcatc

SEQ ID NO: 347396 - DNA, 396 bp, Homo Sapiens
agggagtgtctcactcatcatcctgctcaccgatggcgaccccactgtgggggagactaaccccaggagcatccagaataacgtgcgggaagctgtaagtggccggtacagcctcttctgcctgggcttcggtttcgacgtcagctatgccttcctggagaagctggcactggacaatggcggcctggcccggcgcatccatgaggactcagactctgccctgcagctccaggacttctaccaggaagtggccaacccactgctgacagcagtgaccttcgagtacccaagcaatgccgtggaggaggtcactcagaacaacttccggctcctcttcaagggctcagagatggtggtggctggggctccaggaccgggggcctgatgtgctcacgc

SEQ ID NO: 347397 - DNA, 691 bp, Homo Sapiens
  misc_feature (389)..(389): n is a, c, g, or t
  misc_feature (547)..(547): n is a, c, g, or t
  misc_feature (585)..(585): n is a, c, g, or t
  misc_feature (589)..(589): n is a, c, g, or t
  misc_feature (634)..(634): n is a, c, g, or t
  misc_feature (675)..(675): n is a, c, g, or t
ctttttgtccaagaaaacttttcgtgtttgcctgtagctgatgtgcagttgtttctgctcccaaatcaacagggtttaatgaaaaccctagaaagtagaaacccgtgggagagaaaagaaaaaagacaagttcacaaggttcctgggtggagctacccatgaacagcagcaatggcaatgataatggcaatgggaaaaatggggggctggaacacgtaccatcctcatcctccatccacaatggagacatggagaagattcttttggatgcacaacatgaatcatgacagagtagttccagaggcagttctcactgtgacagcccttcgccacaacgaagatgggcagatcatgtttgatgtggaaatgcacaccagcaggggaccatnagctctcagtcagaagaagaagttgtagaaggagagaaggaagtcgaggctttgaagaaaagtgcggactgggtatcagactggtccagtagacccgaaaacattccacccaaggagttccacttcagacactttaagcatgaggaaaagtggagccntgaagaaagggggtattttctccgcagaatttctgaangggntcattccatctctcttcctttctcatgttttggctttggggctangcatctatattgggaaagcgactgagcacaccctctgccancacctactggggggga

SEQ ID NO: 347398 - DNA, 375 bp, Homo Sapiens
ttttcccccaaaacctagtggccatttctcagttaaactttgtcaaactgtgaacacatggactttcaggagaggagcccactggatgcaaagaaaatgtagttccggacgataggttacttcatgtctctgagctcctctctaaagggtgtgagaacattgagttacattgttccaaaacttagtacaagggcctaactgctttcacccccattgtatgatttgcctccctttaaaaaagttgtcataaaatagacataataagtaatgcatgttattctgcaaccactaccaatatctaccttcagaattttcatcttcccaaactgaagctcggaactcattaaacatcaactctccattatcttaattatg

SEQ ID NO: 347399 - DNA, 462 bp, Homo Sapiens
tgacacattccggcgttcttggttttcttgctattttcacacagctcttcacagtccagggctctttcccttcctccaacatggagataatattcatatcaaaatgacacagtcccagagaaacaaggttccagtagttctccagcatcacgtccctgtataaggtcctctgagcagggtccaggcatttccactcctcctgagagaattctatggccacgtccctgaatgtcaaccgtacctgtcttcattcccagcatgctccaacaaggatgtagaaaagtgagctcctgtttcctaacacgaaaacatgtcaatgttcaaaacttgcaggttaacatatcacaaccaaacattcactgaggaatttgtttaaatctcataatgatgtcaaaatacatttctacaggacttgcactgacccttcccacagaattgagaacagggctccccactaagatg

SEQ ID NO: 347400 - DNA, 515 bp, Homo Sapiens
ctggatacttggagatttcttccagtagctgagagttcactaaggtcagcaaagggtgagaagattcttctgattcccatctgcctaagcagctcatgcatctccatgtttctgagccatgtctccaccaagtctgtggtcaggtagtcttcaagggcgaggtggtcacccattttctcccatgaggaccaccagcatggtggcaatttccttggtagggcagtttgaggacatgacaacgaaaattcttgtcaaaggtggaggcaaacttgcctgcaccgtacatcatgggcaccttaatggtcttgtacttgtcccaggtggaaagtgtcgacttcggtgaagacagggtcaaatggggtcaaccatttccctgtgccaggaggacggagagcaggagacttggcaccaccttcatgtgatcggctgcggaggccaaggagtgcctcccttcagctgcaagacttccagtgtgtggccttgggtcctggaaaagtccttcatttagagcagaa

SEQ ID NO: 347401 - DNA, 297 bp, Homo Sapiens
ggctcggtgaaaaaactgcttctttaaaagcctgttgcagtagtcaaccacagactccctggttgtaaataaagcttcctctcctttcttggcctttgcccactttgaatccaaaagacagtccactgcttttgaagcaataaaataatcaacccggtgacccatcatattggtggactttgttggacagttgaatcgaagatacttggccacagccttctcttctttagatggttcaccaacttcctggatccgcttcttgtgtctcctgcgttccgccatgttggccgctccccc

SEQ ID NO: 347402 - DNA, 886 bp, Homo Sapiens
  misc_feature (774)..(774): n is a, c, g, or t
  misc_feature (779)..(779): n is a, c, g, or t
  misc_feature (802)..(802): n is a, c, g, or t
  misc_feature (839)..(839): n is a, c, g, or t
agtgaacggagagcgtagtgacctatcatgagcctcctcaacaagcccaagagtgagatgaccccagaggagctgcagaagcgagaggaggagtgaatttaacaccggtccactctctgtgctcacacagtcagtcaagaacaatacccaatgtgctcatcaactgccgcaacaataagaaactcctgggccgctgtgaaggcctttcgataggcactgcaacatggtgctggagaacgtgaaggagatgtggactgaggtacccaagagtggcaaggcgcaagaagaagtccaagccagtcaacaaagaccgctacatctccaagatgttcctgcagctggggactctatgtcatctgtggtcctgcggaacccgctcatcgccggcaagtaggggccgcctgtctgttgatgagcacttgggtattgtcctggagagagttaatctttctgcagcctctgctacctaaagaatgacccaatcttcacatatttatctaaacggttaggaacggagtatagatgacataggtcacctcattcctgaaggcctacagaagaacactttctcgtgggtactgtataacatggcttcattttactggagaattaagaatgagccatatcaggtagtagaatgtgccatgcgagcactttcacttctcttccaggcacaatatagacattgccctggtcaacctggcaaacgttctacacagagcacacttctctgctgatgctgctgtcgtggtccatgcagctctggatgacagngactnctttaccagctattacactctgngggatatatatgcaatgcttgggggatataccaaccntgctctgttatgacacgctttgcaggccagacctggtttgagcgctt

SEQ ID NO: 347403 - DNA, 1031 bp, Homo Sapiens
  misc_feature (938)..(938): n is a, c, g, or t
  misc_feature (963)..(963): n is a, c, g, or t
  misc_feature (991)..(991): n is a, c, g, or t
  misc_feature (995)..(995): n is a, c, g, or t
  misc_feature (998)..(998): n is a, c, g, or t
  misc_feature (1020)..(1020): n is a, c, g, or t
  misc_feature (1028)..(1028): n is a, c, g, or t
gcagggcaacaggactttaggttcaagatggtgactgcagccatgctgctacagtgctgcccagtgcttgcccggggccccacaagcctcctaggcaaggtggttaagactcaccagttcctgtttggtattggacgctgtcccatcctggctacccaaggaccaaactgttctcaaatccaccttaaggcaacaaaggctggaggagattctccatcttgggcgaagggccactgtcccttcatgctgtcggaactccaggatgggaagagcaagattgtgcagaaggcagccccagaagtccaggaagatgtgaaggctttcaagacagatctgcctagctccctggtctcagtcagcctaagggagccattttccggtccccaggagcaggagcagatctctgggaaggtcacacacctgattcagaacaatatgcctgggaactatgtcttcagttatgaccagtttttcagggacaagatcatggagaagaaacaggatcacacctaccgtgtgttcaagactgtgaaccgctgggctgatgcatatccctttgcccaacatttctctgaggcatctgtggcctcaaaggatgtgtccgtctggtgtagtaatgaattacctgggcatgagccgacaccctcaggtcttgcaagccacacaggagaccctgcagcgtcatggtgctggagctggtggcacccgcaacatctcaggcaccagtaagtttcatgtggagcttgagcaggagctggctgagctgcaccagaaggactcagccctgctcttctcctcctgctttgttgccaatgactctactctcttcaccttggccaagatcctgccagggtgcgagatttactcagacgcaggcaaccatgcttccatgatccaaggtatccgtaacagtggagcagccaagtttgtcttcaggnacaatgaccctgaccacctaaaganacttctagagaagtctcaccctaagatncccnaantgtgggctttgagactgtcacnccatgggnggt

SEQ ID NO: 347404 - DNA, 449 bp, Homo Sapiens
ttttagagtacgttctgcattttatttctgcaggcaacacttttgctcaccagcaagaacacagcccgaggaagggacccaataacctttcaaaacgcaaactgctgcctgcggtgagggcccagggtcttccacggagaggacaggcatcttcctttcccaccaggaaggagtgagcccggagcctctgctatgtgcaaggcggtgtgcaagcaccggctgcagctttttgctctcttctttctctttggggctgggctgggtgtgcgttctggtgctgatgctttggcctgtgaggctgaggtcggcatctcgacccgttcaattacagcaacgaagaagccaccgctaagcgtggtcttgggggaagcccggaggcagtgctcggcacccgggaacgtgctcaggcctcggtggggccgggcaggcagggcgggagctagcctgaa

SEQ ID NO: 347405 - DNA, 740 bp, Homo Sapiens
  misc_feature (70)..(70): n is a, c, g, or t
aaccagcgtatacaaataaccttctgaagggtttctaaagtcctgagggtgaggcactcagtagcacccnaattccgtgccttcttaaatatctccgtgtgaccatccactccaatgatcctggctgctcctgctgctttacaccccatgacaacagacaagccgtctcctcccaggccaaacacagcacaggtagatcctggagtcaccttggcagtattgattgcagcaccaaaacccagtggaagagccacagctaattaggcatactttctctagaggagcgactgcatcaatcttggcaactgagatttcctttcccttgcaggtaaacctgctggtaccatcagacatcagttgggtttttgactgtttgaattgtatacaaaaattgccctcagaattcaggcaagaggtacattctccacactgtggcagaaagagtgtgataactttgtcacctggtttcactgtgcttactccttctccaatactctcaacgattccagccccttcatggcccaagatggtggtatacaagaggtccaagtgtttactccccaacactttcatctctgtaccacacagtccggtggccacaacctttatgcgaacttcctttgcctttggtggggccacttctacctcttcaatagaaaatggtgcaccaggcttccagagtatggctgctttgcatctgatgacttggcctgtagtactcatgctgattttctccaccg

SEQ ID NO: 347406 - DNA, 614 bp, Homo Sapiens
ggctctttccaacgctgtaaaaaaggacagaggctgttccctatggcagaaggcaaccacagaaaaaagccacttaaggtgttggaatccctgggcaaagatttcctcactggtgttttggataacttggtggaacaaaatgtactgaactggaaggaagaggaaaaaaagaaatattacgatgctaaaactgaagacaaagttcgggtcatggcagactctatgcaagagaagcaacgtatggcaggacaaatgcttcttcaaaccttttttaacatagaccaaatatcccccaataaaaaaggatatggagtcagcgctgagggcatttgctaccagaccagagcacaagtcctctgacagcacattcttggtactcatgtctcatggcatcctggagggaatctgcggaactgtgcatgatgagaaaaaaccagatgtgctgctttatgacaccatcttccagatattcaacaaccgcaactgcctcagtctgaaggacaaacccaaggtcatcattgtccaggcctgcagaggtgcaaaccgtggggaactgtgggtcagagactctccagcatccttggaagtggcctcttcacagtcatctgagaacc

SEQ ID NO: 347407 - DNA, 619 bp, Homo Sapiens
  misc_feature (446)..(477): n is a, c, g, or t
tcatttctgtccagatggacgcactgggcaatatctggggattgctgctccaaagccaccagcacgttgcaagtcttgaagtcaaagcccttggctgagtcatcgtagccgatgtgcttgatggtgtccctcaccacccgctggtagtccaccatggccattgaggtgatctcaccacacagcagcaccatgccggtcttgcacactgtctcacaggccaccttggcattggggtcttgcttgagatgggcatccagcactgcatcactgatctggtcacagatcttatccgggtgtccctctcccacagactccgatgtgaacatgaagactccttcacttagagagtggtcacacaagccatccaccggtccattcatcttctcacacttctccactcacgcttctttcagtgaacaattttgaggctgtgactttgcctgagnnnnnnnnnnnnnnnnnnnnnnnnnnnnnnnnaacccaacaggcttgtctttggcagagccacggggatcacttctgcctaactgcctgtgagcacgtgagaacaggcgaggactgctgagaagggagggagtggatggaacacgggatgtgtccctccctccagcttgccacc

SEQ ID NO: 347408 - DNA, 985 bp, Homo Sapiens
  misc_feature (6)..(6): n is a, c, g, or t
  misc_feature (12)..(12): n is a, c, g, or t
  misc_feature (19)..(19): n is a, c, g, or t
  misc_feature (38)..(38): n is a, c, g, or t
  misc_feature (45)..(45): n is a, c, g, or t
  misc_feature (49)..(49): n is a, c, g, or t
  misc_feature (79)..(79): n is a, c, g, or t
  misc_feature (85)..(85): n is a, c, g, or t
  misc_feature (105)..(105): n is a, c, g, or t
  misc_feature (130)..(130): n is a, c, g, or t
  misc_feature (822)..(856): n is a, c, g, or t
gggacntcgatnaaaaccnccattggctgcaggtgtanacggttnttcntcaagtacttggcggcaccacgccctgatnactgcntccttcagggcctgcgcatntcctccagcgtgatgtcttcgttgnctgcacagagatgacgatggtgtggatgcgcacagggatgactgcgccattgtcctgcatgtactgaactgtcacctgagtcttagagtcaggccgcagccaggggaggaggccggagcgcctgaggtctgccatccgggcgttgagcttgtgagcaaggatgatggtgaggggcatgcactcctctgtctcgtcggtggcatagccgaacatcaaaccctgatctcctgcccccacatcctcctcatttctgtccagatggacgcactgggcaatatctggggattgctgctccaaaagccaccagcacgttgcaagtctttgaagtcaaagcccttggctgagtcatcgtagccgatgtgcttgatggtgtccctcaccacccgctggtagtccaccatggccattgaggtgatctcaccacacagcagcaccatgccggttttgcacattgtctcacaggccaccttggcattggggtcttgcttgagatgggcatccagcactgcatcactgatctggtcacagattttatccgggtgtccctctcccacagactccgatgtgaacatgaagactccttcacttagagagtggtcacacaagccatccaccggtccattcatcttctcacacttctccactcacgcttctttcagtgaacaattttgaggctgtgactttgcctgagnnnnnnnnnnnnnnnnnnnnnnnnnnnnnnnnnnnaacccaacaggcttgtctttggcagagccacggggatcacttctgcctaactgcctgtgagcacgtgagaacaggcgaggactgctgagaagggagggagtggatggaacacgggatgtgtcccatccc

SEQ ID NO: 347409 - DNA, 372 bp, Homo Sapiens
ccatatatcaacattctaagaagaaatggagaccaatttaaagcgtacatctgcctttaaatattaaaaatacaagattgcttcacttgggtgtctccagccaaaatgcagttaatcaatattccatagaacggagcattgtcggaggtgactgctgtccttttctgcatagccttgtgatacactcagaatcatcccggcaggaggctccaataggcctgagggaaacccctctccaaaatggggtcattctccgtggccttctctttgccgaactcacttctggtattggggagccatctatctggcccaacagcaacaggaagatcatgaggactgcacaaagtttgaggtgccacatcttgacagggg

SEQ ID NO: 347410 - DNA, 465 bp, Homo Sapiens
  misc_feature (432)..(432): n is a, c, g, or t
  misc_feature (442)..(442): n is a, c, g, or t
tggctgagtcaacacatctttattaaacacctgaagttactgggaggaggccatgatgctggacacactgtcaaagtcaatcttctccacaatgttcttgggtttaatgctctcttcttggctacagatgaagatctgccccgactcgtcggcactccagccgtatttgctcatccacacctttagctggctgtactttcggacagagtcttcaaagccagttataccttccaagaggtccatgttttcatccaggggcttgccagaaggcctggggaaatgggcagggtctccagcagggtccccgagggtacaaaatctgtcgggattgggccgttcttcttgatgtgcctggggtcgatcatgcacttgcacaggggtgaaaatctgtggtgcgggcaagttgggtgaggggccttcagcagggatctnggggcgggtnaccgtgggtcttgaaagaaggct

SEQ ID NO: 347411 - DNA, 440 bp, Homo Sapiens
tggatcccccgggctgcaggattcggcaccagaagaagaggaacctggtggtgtctgtggacgacggtggcacctttgaggttgttttgcaccgagtgtggaaggggagctcggtccaccaggacttcctgggcttctatgtgctggacagtcatctgatgtcatcccggacgcacgggctgttggggcaatttttccaccccatcggttttgaagtgtctgacatccactcaggctctgaccccacaaagccagatgccactatggtggtgaggaaccgccggttcacggtcaccaggggtttgcatcacaacaatgtggttgtactcatcgatggtgcctacactgattatatcgtccccgacatcttttgagccctctggccagcacgcctgtcctcccccggggccggcagaggaggaggacgacatcctgcctgc

SEQ ID NO: 347412 - DNA, 660 bp, Homo Sapiens
aaagcagctgtcacctatacagagatgaatcatcggtgctcaaggaacctgtagaagtaagagacatcatcatacagagaaatgtagttaagttaagttgaagcttggaaaagatcacatgaaaaaaatctagctcttgccttatctcttcctaagttaagcataaattagccgtctgcaatagccgcctgtaagacaaatgataacagaagacaatcacacatggtgaatggtttccagtggagtcttctaaagagacagtaaacaggtcacaactcattccttgagaaaggattcctattaaatacccagaaacagctatcaaataaacagccaaagctattacttgttttcatcacatctctgtatcttcagaattggaagaagaatgtgaggctgtactgtgggcccgttcttttgccatgtgcgagtcatggtttgactccaccactattccttctttagaatctggaggggtgtcaagtggatcagccagggaggaaacaatagggattttcttagcttggaaataatcataggccttctttccacagactagaagtgtgacattcttcccactgctctggattctatccaccaccttctcatagggttcatctagcacattcaccccattcacttcaatgatgacatcctcat

SEQ ID NO: 347413 - DNA, 833 bp, Homo Sapiens
  misc_feature (168)..(168): n is a, c, g, or t
  misc_feature (178)..(178): n is a, c, g, or t
  misc_feature (195)..(196): n is a, c, g, or t
  misc_feature (528)..(579): n is a, c, g, or t
accccctcttgttcccttggcccccaggagtttttcccttaggggaaaaccaggcttaatgggccccaaggtttcccctttacccttactgggcgccccgcggcccccaaaccggaaatggtcttagaaaaggtttttccgagggcccgaaggcggccggacaagggnttgttttctnttgtggtctgcccgggnnggggacataattttttatttatgtatcaaaattgtcttccaatataagttacaacttgattaaagttgatagacatttgtatctatttaaagacaaaaaaattcttttatgtacaatatcttgtctagagtctagcaaatatagtacctttcattgcaggatttgtgcttaatatgacaagcaagagcaaacatctggaaaaatataaaccaaagcaagccgaaccccccgctcaactacaaatgtcaatattgaatgaagcattaaaagacaaacataaagtagcttcagcttttctctagcaatgcagaatgaatactaaaattagtggnnnnnnnnnnnnnnnnnnnnnnnnnnnnnnnnnnnnnnnnnnnnnnnnnnnntcccaccaatcttcatgggtaaactttcctgctcagggatgtaagctgactctagaccatctcgcggttcctgcggatagcacagcacaagatcatactgaagatcatgccaaatatcatgaccacggcaatgccgatgcccactgcgccgatgatgtggaatttattgtcgaagacctctttgatggcatcaggacaggacttcacggtgaaggtttcgagtacgtccttcttggggcagatgtctgagatcc

SEQ ID NO: 347414 - DNA, 902 bp, Homo Sapiens
  misc_feature (704)..(745): n is a, c, g, or t
ttcagataccaccaccaatatttattacccaaagcaatctgaaagaatcgggcacaaggtcatggctttcccaggttacaagaaaatcagaacctcttcaaactcaccctccacccatagccaaagtaaggaattaaaggctatagctcaagctatgtcatggctactatatcctcattcttgatgaatagtctcaaagtcacaagttggcatgatgcgatttaggtccaaatcttaccagaaaaaaaacccaccattaaaataagacaagttcatagaaatcattccaacagaaagataccaagagcctttactggtaatgagaagaggaaagattttctgtttataataaccagaaagaaatggaattgtctaataaccatcaattgagtatgagcctagttgagttgagtatgagtctagtatgggatgctaatcttctggggtgggggaagtcctgtgagctaaccaaaccctcctggtctctggtgaggtccacaagtagcagtttcctggttgcctggtgacaagggaccatgcttaggggtgggctggggcatgttggggagggggtccttcacttggcaagtgaaataacacaattctcagaagctgtagaagaggcaatcttcaaacagtgctgagtagtcctcttactttttccacattaggggaatgcaaactggtttaacctcacatgacannnnnnnnnnnnnnnnnnnnnnnnnnnnnnnnnnnnnnnnnnaaaattatcctggatccaggaaagtgatgccttttcttattctccttttatcatcaaaacaaacagccaatatgtctctagaaacattgcgttctaaactggaagtgctgacaagccttcatcccagaccctgagtggcagattttcatgaaaatca

SEQ ID NO: 347415 - DNA, 910 bp, Homo Sapiens
  misc_feature (255)..(291): n is a, c, g, or t
  misc_feature (541)..(557): n is a, c, g, or t
tagtgggcaaaagggaggtatcttgcccaggccgtttccctatccattctaattctgtctccctcatcccccctgaagtttcacccccgtttcccccaatgacttagaatggctttgtgcttagttttaattgtagtttgtgctattctgtgaattaacaattcaaacaaaataagaaagccatgttgttaaacagtagaggagccagggactctgtctccattctctcatcacacacaagtcatgcatctcccnnnnnnnnnnnnnnnnnnnnnnnnnnnnnnnnnnnnnctgtcctctgaggaggcacaggtgtgacagataaggaacctgcagctcagattcaacaggcacctgccaagtccacactcaggactgtgacagcctcaacaacatgaggtccagacacattcactgtggaaggctctgcccacgcgaacaaagctgtcagctctagcaaaagggacactgccttcttcctccctcacttctcacctggtaagcccgggaatcaaaacagcaaaaatgagcccccaaaaannnnnnnnnnnnnnnnnagcagccactgttaccagcagcacccgctgcacaggcagaagcacctctggtgccactttcaagacaaaacaagagcacagttgaaacatctaatttgaaaatgttgatctcctttcctaagacattgctaaggggcccacaggaaggctggtggcaccagggaataaaccctggaagtggtgcagccactctgggaccaggcagctccggccagaggcctcaatccatggcagccagctgctcgatggcacggcgcactttcttcgcagtttcctcaaattctttcttcttattgttggtttcctttgcaattttgttcttggctctttcctcgtgccgaattcgccaccca

SEQ ID NO: 347416 - DNA, 367 bp, Homo Sapiens
  misc_feature (102)..(150): n is a, c, g, or t
ctttatgttcagagtgacttttgattctgattctttatgttttgtatggagcggcacttttatctgtgttttagcagaactgttcctctgtatcctttacgnnnnnnnnnnnnnnnnnnnnnnnnnnnnnnnnnnnnnnnnnnnnnnnnngtgtgtatgaaattaaagcctttattaaccttctttgatttgactgttatttctgaaaaggacacattcttgctgatacttgtaacaacctgttcaaagttgtggaaatcaccttctgttggctttctgacatggacttccttgcagcactgttacttcttaaaaaggaacagaatggcaaaccagtggtctgggcccgtagtcccccattggattc

SEQ ID NO: 347417 - DNA, 851 bp, Homo Sapiens
  misc_feature (780)..(796): n is a, c, g, or t
ctgagcttttattttctcctctccagtggggttggcttttattgtttcttgtttgggtttggaatggaaatatggatagcagcataaagtacttttattttgacaaaattcatttttttcaacaatggagacatagatttgacccacaataacttctccccctctctttttactctgctcaaaaagcatctctcctcccattacccaaccttggtcataagtgtgcctggctggtttgcagatatttgttctgctttgtaaaaattggccattagtgcatttattgagatgatctctaaagagctatgccctgacctacccctgattctatgacattggggcccttcttttgctgaaactgccttacgtaatggttttactccttgaaagagatttgacggaatccattttatgccaagtgctgccctgcactgtttctgcaatatgtggtgtatgctgtggtgatcttgctgggaatgattataagtgtgtgtgtggtgggggagtgggtattacatgcattgctgaagagtcatcctggtgttcctcattcctcccaccttcccgtggtcattttaattacggggcagtgtcaccgcaaagggaggaaactcaaagccgaaagcaaaattccaggcctgattctggcttttgaggttcctggttcttgaagccaggcctgacccgactctcaaatggggtcagtcccgtcgctttgcagactgaccctggaaatctacaaaatgcagattttcctgatttcctcttctcttgcccagnnnnnnnnnnnnnnnnnaaagcctggattgtaaccagattttcttttttcccccttctcagctgtaagatat

SEQ ID NO: 347418 - DNA, 379 bp, Homo Sapiens
tctttatgataacgcaagaatagtagtttagatgatggtataaacagtttttctacaaatgatgatggcagtttcgtatttatctgttcaacaatcagcgtgagtaaattcaagactgagatgatataattggtaccacaagtctggcaattctccagttggtctaatccatatgtaatgaccatgtcacaatgtatagtcatgctaggatccaagctgtgtctctgaagcagcggtttcccctcgaacttggccgacaccaccaggactcggaagctacaggagcaacggttgagggtcgtgtcctccacctcctaccgagcggaagaatatgaatggtgccgaacccgccccccgagctcttttccccttgtccggc

SEQ ID NO: 347419 - DNA, 816 bp, Homo Sapiens
  misc_feature (230)..(241): n is a, c, g, or t
  misc_feature (493)..(493): n is a, c, g, or t
  misc_feature (520)..(520): n is a, c, g, or t
  misc_feature (540)..(540): n is a, c, g, or t
  misc_feature (544)..(544): n is a, c, g, or t
  misc_feature (557)..(557): n is a, c, g, or t
  misc_feature (591)..(599): n is a, c, g, or t
  misc_feature (653)..(653): n is a, c, g, or t
  misc_feature (683)..(683): n is a, c, g, or t
  misc_feature (689)..(689): n is a, c, g, or t
  misc_feature (729)..(730): n is a, c, g, or t
  misc_feature (737)..(737): n is a, c, g, or t
  misc_feature (764)..(764): n is a, c, g, or t
  misc_feature (798)..(798): n is a, c, g, or t
  misc_feature (800)..(800): n is a, c, g, or t
  misc_feature (809)..(809): n is a, c, g, or t
ctcctcgctctcgccaccgccggacttcaatgcccagtccccagctcgccagcgtttttcgttggaatatacgttgcacatttatggcgattctgagtgtgagggcagacttctgccaggctcagcacagcattttcgctgacaagtgagcttggaggttctatgtgccataatataacattgccttgaagactcctggacaccgagactggcctcagaaatagttggcnnnnnnnnnnnnaaattgcaagcatatttcttttaaatgactccagtaaaaattaagcatcaagtaaacaagtggaaagtgacctaacacattttaacttgtctcactagtgcctaaatgtagtaaaggctgcttaagttttgtatgtagttggattttttggagtccgaaggtatccatctgcagaaattgaggcccaaattgaatttggattcaagtggattctaaatactttgcttatcttgaagagagaagcttcaaaangaaaaaacaaagttgaatagagaaaanactgattgataaaaggcaanttantggtctttttaangttttctgctgtgaacaattcaaaatttattgannnnnnnnncactttccccatcacactcacacgcacgctcacactttttatttgaccaaaatnaaccgtccagcccctgtggagatctcctangagaanatgcgttttctgataactcacaaccctaccaatgctactnnaaaaaanttcacagaggaacttaagaagtatggngtgacgactttggttcgagtttgtgatgctacanangataaagcnccagttg

SEQ ID NO: 347420 - DNA, 407 bp, Homo Sapiens
ggggaggtttcgtcttcccggaagcgttggaggacattccctgttgactgcgtcgcgatgtgtggcgactgtgtggagaaggaatatcccaaccggggtaatacctgcctggagaatggatctttcttactgaactttacaggctgtgcagtgtgcagtaagcgggattttatgctgatcacaaacaaatccttgaaagaagaagatggagaagaaatagttacctatgatcgagtataccatgctgtgtctgttatgcggcaaagccgaagatactatcagtattctccctgatgacccccgacaaatgactctcttattctaaggatccttctacagatctgttataactatattgtgttggtttacaatacagcaagcctgatggtttgtcttatttcattcat

SEQ ID NO: 347421 - DNA, 1092 bp, Homo Sapiens
  misc_feature (678)..(678): n is a, c, g, or t
ccgagagccccgggagcgggggcgccgcccgcgcactcatttacccggagacagggagaggctcttctgcgtgtagtggttgtgcagagcctcatgcatcacggagcatgagaagatgttcccctgctgccacctgctcttgtccacggtgagcttgctgtagaggaagaaggagccgtcggagtccagcatgggaggcgtggtgttgtagttgttctccggctgcccgttgctctcccactccacggcgatgtcgctggggtagaagcctttgaccaggcaggtcaggctgacctggttcttggtcatctcctccggggatgggggctcgatgggggctgggagggctttgttggagaccttgcacttgtactccttgccgttcagccagtcctggtgcaggacggtgaggacgctgaccacacggaacgtgctgttgtactgctcctcccgcggctttgtcttggcattatgcacgccgctggtcagggcgcctgagttccatgacaccgtcaccggttcggggaagtagtccttgaccaggcagcccagggccgctgtgcccccagaggtgctcctggagcagggcgccagggggaagaccgatgggcccttggtggaagctgagaaagcgtagacgtggacgtgcgttcctgggccccagtagtcaaagctgtnttctacccagccactcgcgcaaaagtacatgcccgtgtccgcggcggtcattgaggtcatttttagggagaactggctgtggtgactgtccactgacatggagactcgactcctgagagatgggttgtagttggtctccccattgtcgttaatttctccaatccactccaggcccctccctgaagaatgacggagccatgtccaaaagtgaccgctgacgggcccaccgtagacgtagcaggtgagggacagggtgtcccagggcttcaatggtcctgcctcccattgttgaagatagacctcggacagaacccatctgggagctgccaccaggaggaggaggaaccacaggtgtttcatgttcttgtgcgggaggtccatgactctcagaaagcacttcccaagtgagctgga

SEQ ID NO: 347422 - DNA, 576 bp, Homo Sapiens
  misc_feature (160)..(208): n is a, c, g, or t
ttgtggtcactgtaaaattaatatttggtagacagaatccatgtacctttgctaaggttagaatgaataatttattgtatttttaatttgaatgtttgtgctttttaaatgagccaagactagaggggaaactatcacctaaaatcagtttggaaaacannnnnnnnnnnnnnnnnnnnnnnnnnnnnnnnnnnnnnnnnnnnnnnnngtgcctttactacatgtgtgatctgaaaaccctgcttggttctgagctgcgtctattgaattggtaaagtaataccaatggctttttatcatttccttcttccctttaagtttcacttgaaattttaaaaatcatggttatttttatcgttgggatctttctgtcttctgggttccattttttaaatgtttaaaaatatgttgacatggtagttcagttcttaaccaatgacttggggatgatgcaaacaattactgtcgttgggatttagagtgtattagtcacgcatgtatggggaagtagtctcgggtatgctgttgtgaaattgaaactgtaaaagtagatggttgaaagtactggtatgttgc

SEQ ID NO: 347423 - DNA, 516 bp, Homo Sapiens
aacggctagcctgaggagctgctgcgacagtccactacctttttcgagagtgactcccgttgtcccaaggcttcccagagcgaacctgtgcggctgcaggcaccggcgcgtcgagtttccggcgtccggaaggaccgagctcttctcgcggatccagtgttccgtttccagcccccaatctcagagcggagccgacagagagcagggaaccggcatggccaaagccgcggcgatcggcatcgacctgggcaccacctactcctgcgtgggggtgttccaacacggcaaggtggagatcatcgccaacgaccagggcaaccgcaccacccccagctacgtggccttcacggacaccgagcggctcatcggggatgcggccaagaaccaggtggcgctgaacccgcagaacaccgtgtttgacgcgaagcggctgatcggccgcaagttcggcgacccggtggtgcagtcggacatgaagcactggcctttccaggtgatcaacgacggagacaagcc

SEQ ID NO: 347424 - DNA, 786 bp, Homo Sapiens
  misc_feature (428)..(454): n is a, c, g, or t
  misc_feature (604)..(689): n is a, c, g, or t
tatgggtctctctagacaaaaggtttttcttcgaagaggcgccaggaaggcgcggccccccaacacgggccccgctcctgcgtgtcgtgtctccccccctccccggggaaaataaacctttttaaattggcaccattctgtgtccttgggtttatctgttggggtgagaaaccctcctccatttccaatccccagtattcggggtacaattctggtgttgtggtctggctgtcggcgaggggtagaggtgggtccaggactggccccccgagtctgcaccgacctcttcagggcagggagctcagcccatggtagtacttgcactgcttcagggcctcgctgaagccctcacacagggacaggtcactctgagtggtggaacagtccaggaactgcctgatctcataggcgcagggccccatctgcannnnnnnnnnnnnnnnnnnnnnnnnnncctgctggacagcaggctgggagggctccgagctccccccgctgaaggctccggtcagggcgctgcccatgacgtgtcccacagccgagcccacggctacccctgcggccgtggtcgccatctgagccatgagccccggctggcccgaannnnnnnnnnnnnnnnnnnnnnnnnnnnnnnnnnnnnnnnnnnnnnnnnnnnnnnnnnnnnnnnnnnnnnnnnnnnnnnnnnnnnnggccgcgctgcggcttccccgaggcatggtggcggcggtgggacccgggcgaccttagagacggcggcagcggtgctgtcgcggggacaaatgcccc

SEQ ID NO: 347425 - DNA, 893 bp, Homo Sapiens
  misc_feature (569)..(595): n is a, c, g, or t
  misc_feature (745)..(797): n is a, c, g, or t
ggtttttctccttggggaaaaccaaggtatatgtgccccacgggtgcacccttgacccacacggggggccgcccgcgcgcccccaaccagaaatatggtctagaaaaaactttttttcaaaggggcccggggggcgcccccacacaattttcccgagctgtagtccatagattgcgatgacaagagaatacgttcccaggtcggggcctttcctggttcctgcagttgtttgccaccccgttgtaggacgcggggctaaaaataaaatttttaatggcacaattggggtcttgggttatctggtggggtgagaaaccctcctcacttccaatccccagctatcggggtacaatctggtgttgtggtctggctttcgccgaggggtagaggtgggtgcaggactggcccccgagtctgcaccgacctcttcagggcagggagctcagaccatggtagtacttgcactgcttcagggcctcgctgaagccctcacacagggacaggtcactctgagtggtggaacagtccaggaactgcctgatctcgtaggcgcagggccccatctgcannnnnnnnnnnnnnnnnnnnnnnnnnncctgctggacagcaggctgggagggctccgagctccccccgctgaaggctccggtcagggcgctgcccatgacgtgtcccacagccgagcccacggctacccctgcggccgtggtcgccatctgagccatgagccccggctggcccgaannnnnnnnnnnnnnnnnnnnnnnnnnnnnnnnnnnnnnnnnnnnnnnnnnnnnagagggcgcggctgggcggctggctggccgggaggccgcgctgcggcttccccgaggcatggtggcggcggtgggacccgggcgaccttagagccc

SEQ ID NO: 347426 - DNA, 688 bp, Homo Sapiens
  misc_feature (15)..(15): n is a, c, g, or t
  misc_feature (216)..(216): n is a, c, g, or t
  misc_feature (233)..(233): n is a, c, g, or t
  misc_feature (323)..(323): n is a, c, g, or t
ggcagcctcccctgntgtgatcccctgggcccgtttgttgtcgggggagaagacctttgacccttttgggcttcggaaaggtggcatgattgtggatcccctgggttctggcttcccaagagcccttattgacccttcctcaggcctcccgaaccgacttcctccaggcgctgtgcccccaggagctcgctttgacccctttggacccatttgganccagcccacccggccgnaggcctgacagacgcgggcagtgatgagccctgttctggagtggaaagagcacgatagagcaccaggctaagaggcacgagatcaaggcnggtagtcactttcgctctgcagctagcatttcaaccatatgtggatcctttcatttctcagctccctggattccttcccctaaattaggacctattatttacctgtaggtaagcaagctactgtagctcttctgaggtatctgccaggctgttttctgtagcctcagattgcctatctgcttagcctgagaacaggtagatgaaaactaaactgatgcctaggcccagggtcagtctcagatggaagctgggcctgggtggggaggctagcatgcgtggctccctgggtatttctgtcagtccccaggcaagcagtgatttagtaaaacaccccagagtcagggaagccaaccaccttaaacctt

SEQ ID NO: 347427 - DNA, 769 bp, Homo Sapiens
atgtattgagaggaactgttttctggtaaggcatcttcattcttctttccaattaagaaggggcatgtaatttgccaccagtctgggcccatgatgtgcttcccgatgtacttttgccattaaatttcttgctttccagaatcataaccaggggaatcgtttggtactgtgagggatagacaagcctccatccacagctcccttcagggcaccaaaaactttattgccagtggtagttctgggcaaggcctgcatccaaatagcaggtgaaggcacctggctgaccatcaatgctttccacattgtattcatcaccagtcacctccacttggccttcatagatcttgtccatgccaaacctattgagaagcctgcgggccagcagcaggccagtacaatatgctgcagcataatttgtcaggccaaccttcacaccatattttggcagttcgtgtgcatacgctgcgcagactatcatatccccctctatacgggcataagcaatctgacaaatgatatctctgtttgtcacacgaactatcatcctgtatttgggtgtgttgtatttatttttatcttgtatcaccaagcgtttccgagcataataatcagttttaccctctcgtcgtcttctaaatttcacttggtatctcttaaagtaggccttattcttaacaactttaacaaaccccatcctgcggaacagagaccggcgtccgctgctcgacagagacctgcaggcccagcggcgctagggggtgggaaaagg

SEQ ID NO: 347428 - DNA, 518 bp, Homo Sapiens
aacaactggtcatcaatttattaaaatagttgacttaagcatctgcaatggtgacttccacctcaactcctggctcaatactgatggaagtaatctgcttaacaatctcagaaggactgtgcaagtcaatgagtcgcttgtgaattctcatctggaaacgatcccacgtcttagaaccttcaccacaaggagtttttcttgtagtgattctcaaagtcttggtaggcattcgaactggtcctttcactttgagattcttttcttttgcgcctcttatcaagtcagcacacaccttttccaaggattttacgttgcggcttgttagggtgattcgaattcggtgaattgccacctccggctccacgggtgtttttccggtatccttaaaagccatggctgttgcgcgcgggcttcctgaccgacttgttcctcggcgagagcgaacagcggtgagtcaggagcaggagcgtgcggaccaaaaatcctcagcccttacgaccgcgtcttcctcaaaaaaa

SEQ ID NO: 347429 - DNA, 1154 bp, Homo Sapiens
gctggaaagagcggagagcctgctgcaaaccagggcaccttgtaggcaggcaaggaggcagagtcctcaccagcccttccagagccaggccagttagagagggcggccctgcagagtcctatgtccaaacgcagaaggcgcagaagcagagcagggggagggccggccagggcctctgccaggttagaagtcaccatcgcgctcccccaggggctgtgccgcctgctgcctggcagcctccaggaaggccagctccttggcttccttcttctggtttcgcgcctcatactccaacctgttggtgatgatccgctggacgatgaggtctgtggtgaggttgctgccactgtcaatctgacggaagatgccccttctcttgggctcctggtatgggtcggagccatccctgtcagggataatttctgtcttgccgtgacacaccaggtccaccttgaagtgacttaggagctctgctgtgaccgcgtacggggctccaatcaccacttctgacacgtactggtcaaagtgtaagcccgcgatgatgtagggcctctctgccagcctgtgcaccttctccaggaagtccacatgcccgatgtggaacaggtcgaaggcaccagccacatagatgactgtctcccctggctggggctccttcccagaagcaaactggatgatcttctgagatgtctgcaggaactgggataccccggtccaggggttccgcccaccagggcacttgccaaaactgtctgcatactcccggtactcagaggacatctcctgcacagaaggtcagagcagggctgaggggcctgccctcccggcgtggccaccccagaaccggctggggatggggagcagtgggcaggaggaccctgagagggcagggaggtgcccctcctttcccctggagacctcgacccaggggcctcggggattccgccgccgactcacctggctgctgtgatgggctttggttaccagcagcatgcggcccacgaggtctgtggtggacaccccttgcgtgcgcttgcattctctgtacctcccagcctgctttacttcctcataggtgtcccggccatctacagtcagggtgatgtcattgccgtgaacacagaagtcacagttgtatttgtccagggtctcta

SEQ ID NO: 347430 - DNA, 627 bp, Homo Sapiens
gactgaggaagaatataagttagcctcgtagtgaccatgtggaagtcctgacctcgcttgcagacttgacctctggatgtgacaaggtgaggttctgtgttcactgatacatccccttccttcaccgggctcatgaaaagaaatgctgaatcagcaaatagagtgaacgaacaatcaagatgagatggctgctgttgatgtgattctctaggttactacctttcttcctgctgcaaatgctgcatgacactaagcttacaggatctagaagcagactacaaaaaaagaagaaattcactctgaagactgaagaaacactaggctgatcttaagtttccgaaatacaccctgtaacactacactgattctttgaatctcttgcaaaaagaatcaaaccaggacaaagttcaacagataactggtcaaatgcttaggaatgtctatgtccaccaagaatatggaaccattaatgccatgcttcaggtaaacttgttacaaaatttagtcttcgataaattagtctctgcaaatgatttaccattgctctacattagtaagctgaatgtttcactaacaaataagaaaataaaatatttcatgtttttacagctaacaacttagtaatac

SEQ ID NO: 347431 - DNA, 364 bp, Homo Sapiens
tgatcttttaggccttcatttatcttctaaaattcctcatctcaaggccaccagtccccagttatcacccttggaaatcctctgtttagcttagttgcacaaaaggtagtatgtccagtggctagaggtggggtgggaagagaggaggccaggccaggccctcaggaattccctggtttccactgggccacccacttgctggacagtctgagccaagtccctcctgctggagaaaagcctggaactgccaaaacaaatgcccagaggggctggggaaagggatgggagccaggaaagatttaggggcaggagacagacacgtaacaggaactcggaaggtagaacttagaattcagaacttggg

SEQ ID NO: 347432 - DNA, 951 bp, Homo Sapiens
  misc_feature (69)..(69): n is a, c, g, or t
  misc_feature (412)..(412): n is a, c, g, or t
  misc_feature (510)..(539): n is a, c, g, or t
  misc_feature (588)..(588): n is a, c, g, or t
  misc_feature (764)..(792): n is a, c, g, or t
  misc_feature (929)..(929): n is a, c, g, or t
  misc_feature (932)..(933): n is a, c, g, or t
  misc_feature (937)..(937): n is a, c, g, or t
  misc_feature (944)..(944): n is a, c, g, or t
  misc_feature (946)..(946): n is a, c, g, or t
tcatttttttcacaatttatttaaacatctcacatatacaaaataggtacaatttaatttttctgcttncccaagaaacaaagcttctgtggaaccatggaagaagatgaaaatgagactggcaaagaacaaatgctgaatctgaagaagatttgggcaaataatctgcatacttttaattgggaataagatggaaaatatgaatgctaaatcaaattttttaaaaaatacaccacacgatacaactcaatacaggagtatttcttctcaaattcttctagcaccatcaacattcttcaagtatctgaaatactattaattagcacctttgtattatgaacaaaacaaaacaaggacctcagttcatctctgtctaggtcagcacctaacaatgtggatcacactcatgggnaagtgttttgaggtagtttaaacctttggaagtttgggttttaaacttccctctgtggaagatattcaaaagccacaagtggtgcaaatgtttatggnnnnnnnnnnnnnnnnnnnnnnnnnnnnnncttacaaaggttgacattttccataacaggtgtaagagtgttgaaaaanaaattcaaatttttgggggagcgggggaaggagttaatgaaactgtattgcacaatgctctgatcaatccttctttttctcttttgcccacaatttaagcaagtagatgtgcagaagaaatggaaggattcagctttcagttaaaaaagaagaagaagaaatggcaaagagaaagnnnnnnnnnnnnnnnnnnnnnnnnnnnnnagattgagttcatttatttgaaacagactgggccaatgtccacaaagaattcctggtcagcaccaccgatgtccaaaggtgcaatatcaaggaagggcaggcgtgatggcttatttgttttgtattcaatgattgtnatnnaaantaatttntnttttt

SEQ ID NO: 347433 - DNA, 891 bp, Homo Sapiens
  misc_feature (17)..(17): n is a, c, g, or t
  misc_feature (27)..(27): n is a, c, g, or t
  misc_feature (65)..(65): n is a, c, g, or t
agcaaaccaacaggttnacagtaaccnggaggaaagatctcagcggggaaccttcacaaaagccntgagttgtgtttcaaaagccaagctctgggtctgtggcctgtgtcaccaactcaggtcacaccacagcacggggaagttagtgttgcagtttcacttctagtcaatcttgttaattaaattatcccaattaggaagacaatattaaacaggtattagagtccttttgcaaaactgactgtcccccttggtcaaggaaaagactttcacttggatggcaacccatcaccatcaccatgtccaaggcacagatgaatctgggctgggcaatcacaggcaatgcttgacaaggggtgggtgacatcatgtccacaaagatgcccagaaatgaggtcgtgaggaagggtgggtattaggaagcaatgtggtgggtcctggccgaggtctaacatccctagcagccttcctcaggcacactgtgacagtggagtgggcacacgtatcgtttcaggcaccttggctgacagcccaacgcggccacctgggtgcatggacatttgcagctgccaccatgccagcaccctgggccacagattagctcaactggccacagtctgtcttcacgacgtccatgccctctttgacgtgaccgaacacaacatgcttgccatccaaccagtctgtctttatggtgcagatgaagaactgggagccgttggtgttaggaccagcattagccatggacaggacacctggccccacgtgcttcagtgtaaagttctcgtcaggaaagcggcttccgtagatggacttcccgcctgtgccattgtggttggtgaagtcgcccgcctggcacatgaaggaagggatcaccctgtggaaggtgga

SEQ ID NO: 347434 - DNA, 1084 bp, Homo Sapiens
  misc_feature (794)..(807): n is a, c, g, or t
  misc_feature (895)..(937): n is a, c, g, or t
ggaggcccactgatcagcctgaaatgggaacacaatggtgagcccccttaccaccccggtgatggattagtttggattcaggaaagcgtgattatcgttgaaataacgaagctgaatagacatgctgacctcattcaggtgatgagaggcagggaaaagctgggttccaggagctgccagccctcagagagctcagccctattgggccaactggtaaagtgcaattcattgggctagtgtcaaccattacccccttcggataaagatgttgcccagatgaagccccagaagtgagcttcacccagactctgtagctcagagtccagaaacacgcatgggaaactaggtcaatgggtaattctaaattttggtcttcaagggaaggctgcctgaccttaagcggaagttgcctgaagttagagcccctaatttgagaaaggagaaaatggtggaaaaccggaaggcactgaggtccttgttatctaccataccaatattccaggccaccaggaaaatatcattagggttaaaatttcaagaagagtaaggccattagttggatcatgagaaggccagaagattatagttttctaaccttgtaaggatcactggatcctactggattatgaagtgaatggcagtaatcccacttactccttaaacagtgggcaaagagtgtgctgaaaatctgcccacatacttggacactgccatggccataacctgggattcttcccttaacataaaatgacccacattttggagtaggcagttgaggtttttggttcttttcnnnnnnnnnnnnnncctcctcagttcttcatatttctctcaaattacctttcaacaatatgttcatatctcagccaataaagcgatggttgatccacatgcnnnnnnnnnnnnnnnnnnnnnnnnnnnnnnnnnnnnnnnnnnntcagactgccaaaaatagatgaaatagctcagaagagacataatacttatgaaaactgagaaagtgatctttttattttcaaccaagataattcaattcataaattgttgctgtattagcaacttggaacttgaaattggcaccagg

SEQ ID NO: 347435 - DNA, 611 bp, Homo Sapiens
attttgttttggacaccgagcaggagctggcggccgctgcagacgaaaggcaggaaagggcaggccgggtgagcagacggatcggccgactagacagccaaccagcaacaacgaactgagctcgcatactaccgcttacgcatctaaccaaccgcccatctagctaacccgagcccctccaccgtcaactcaggttcggccggtccccggcccgcctgccggagccgtggtggcagccccgggaggagcactggcgtctgtttccttcgattctcgggattcgaagatggctgcacagtcagcgccgaaagttgtgctaaaaagcaccaccaagatgtctctaaatgagcgctttactaatatgctgaagaacaaacagccgacgccagtgaatattcgggcttcgatgcagcaacaacagcagctagccagtgccagaaacagaagactggcccagcagatggagaatagaccctctgtccaggcagcattaaaacttaagcagagcttaaagcagcgcctgggtaagagtaacatccaggcacggttaggccgacccataggggccctggccaggggagcaatcggaggacgaggcctacccataatcc

SEQ ID NO: 347436 - DNA, 318 bp, Homo Sapiens
  misc_feature (49)..(49): n is a, c, g, or t
  misc_feature (53)..(53): n is a, c, g, or t
aatggtttattaaaatagtgttgggggggcgctgctcgtggtgggtggngggngcagctgctacaattaattctccgctctgcttttgaaaaagcctgcaagtctggaaggggaaaaaaaggtcacactgtaaaatgacgtgtcatttggcttcactgggcacttctcgtactaactctatccattttttggtgttggggggtggtcttattttatttgactctccttcatcctccttccacggcccggcctggcccgggacacgtctgtccgcgcacacacagtcagtcggtcctgcccgaaacgcaccaagtcgcg

SEQ ID NO: 347437 - DNA, 198 bp, Homo Sapiens
gctgctgcccaaggaccgcggagtcggacgcaggcagaccatgtggaccctggtgagctgggtggccttaacagcagggctggtggctggaacgcggtgcccagatggtcagttctgccctgtggcctgctgcctggaccccggaggagccagctacagctgctgccgtccccttctggacaaatggcccacaacact

SEQ ID NO: 347438 - DNA, 985 bp, Homo Sapiens
  misc_feature (56)..(56): n is a, c, g, or t
  misc_feature (89)..(89): n is a, c, g, or t
  misc_feature (119)..(119): n is a, c, g, or t
  misc_feature (247)..(247): n is a, c, g, or t
accaaccgggcagccagtgctgggaattcttgcaagccaccccagcatggggcaantggcaggagggcccagttcccacccccagggtnggggcagcagttctgccccaccgggccagnttgtgtgctgttcacagccgatgtctctggggtgggataaggaagcccggcgggcaggcatcttctccagtccagccaggatctcgcttcctcgctgacactgcccttcagctacacacgtgtagccntgggggcagcagtgctggtggtccgagcagcagacagcctctgggattggacagcagccccactccccagacgtgagttggcagcaggtatcggaggagggtacagctgctgacattatcacagggtacatctctcttcaaggcttgtgggtctggcaggctgaggtgagctggggccttctccatccagggcacctggtggggcccctgttcacaggtacccttctgcgtgtcacacgtaaaccccgcgggacagcagtgtatgtggtcctcacagcacacagcctgggtaaaagggcagcagccccaggcccccgagctgtagacgtcagcaggtatagccatctgggcagctcacctccatgtcacatttcacatcccccactgtgtgcgcaggcagcttagtgaggaggtccgtggtagcgttctccttggagaggcacttactctggatcaggtcacacacagtgtcttgggggcagcagtgcaggtgatcggagcagcaggtggcgttgggcattgggcagcagccatacttcccactgggcagctcacagcaggtagaaccatcagggcaccgggaccgtgcgtccggacacatgaccgagctggacaaggccacccagctcaccagggtccacatggtctgcctgcgtccgactccgcggtccttgggcagcagcaaccgggtagcgctcagactcctcgtgccgaattcgccacccaggcctcgctacc

SEQ ID NO: 347439 - DNA, 681 bp, Homo Sapiens
  misc_feature (117)..(117): n is a, c, g, or t
  misc_feature (382)..(382): n is a, c, g, or t
  misc_feature (600)..(631): n is a, c, g, or t
aggaaaacaccatctcaactttgcccgctcattatgtcccttgcccccatgtagcccatttcccaggttatgctcttttctttctcagggtcctctttggtgggcagccactccccngagatgttgccatcagttttctgcagtccaaagagggtatggttaggtacgggtcttcctgcctcattcctcttcctctttgtgtaggtttcagccacaaaactgtcattcactctaggggacccctactaaagggtaacttcaggtgtgcagccctgagctccaaggctctgcaccatgccacacacttgctgtaaggctagaagtgaagaccttattaataggagcataattgcgagggagaatcatgggttcttgcagtctnggtttagacactggaataacagcacagaaaaatctatgactcccaatatcttctagaataaagaattttccctctttaacacaagggccctccttgtcattgaccttagctaaaccatggcaattcataaatagaggaaacattaatgaattaaaagcattccttattttttaactaatatttgtacattttcttagtctctttccaagtctttgccnnnnnnnnnnnnnnnnnnnnnnnnnnnnnnnngacagatggtatcccttcctggatcattcatttcaccttggtttctaact

SEQ ID NO: 347440 - DNA, 1244 bp, Homo Sapiens
  misc_feature (94)..(128): n is a, c, g, or t
  misc_feature (141)..(141): n is a, c, g, or t
  misc_feature (143)..(146): n is a, c, g, or t
  misc_feature (179)..(187): n is a, c, g, or t
  misc_feature (899)..(899): n is a, c, g, or t
aatttgtggcaaacacgcagtggaaaaagaaacccgaggggccactagaatgggcggtgaacgaaggggggaagtacaaagtacgatggttacnnnnnnnnnnnnnnnnnnnnnnnnnnnnnnnnnnntggtgagtgggtnannnnaactaggaaggtactttaatagtttttcttagnnnnnnnnntttccagacacttaacatttcacaacatttcaacagcaaagtattagttgagagaggggtttttcaggagttggagattatagaatattaggaagaaatgttggtatcctccattatagatggatggcataggtcacaaatgggagactggcagctaagccaatatcaaaacccagtggaatgacacttctatggagtttacttttcttcctgctatcttccctatcccacggaaatgtctgtccccatgtaaagcccagtagcaggcagcttaggctccagtcttcccccttgggtaggaaaaggagtgaagggaatgtcactcctgcgtttccatgctttcttcttcctctccttgaggtggttcttctgtattctcgtcttcttcctctccttccttcttctctggtggcttctcataagccttttctgaaggtgttactatcactccatcccaggtagatatttcagaagcaagatagctggcatcaccctcctggccaaggatcttcctaaagccaccatgtgagaggattcggacgagagtctgagctgtatagcagaccatgtcctgctgttctagggtcatgactgtgtgtactctaaagttgccactctcacaggggtcagtgatacccactgaaccctggcaggaaacagtcctgcagccaagaatctgcaagcagcgccctgtaatgcaacgtttaagggnccaaaggctgtctggtggggttgttcatccacagcataatggccctagtaggtcaaggatcccagggtgtgaggggctcaaagcccaggaaaacgaatcctcaagtccttcagtagtctgatgagaactttaactgtggactgagaagcattttcctcgaaccagcgggcatgtcggatggctgctaaggcactctgcaatactttgatatccaatatggagttctggatccagttttcgaagattgggtggcactgttgtaatgagaatcttcactgtagcatcagaagaactgatttcaaagccagtttcgttggtcagcatggttaaaacttcagaaggatc

SEQ ID NO: 347441 - DNA, 1011 bp, Homo Sapiens
ctatggcacccccaaacccaaacgcccagcgatccttacctaccacgatgtgggactcaactataaatcttgcttccagccactgtttcagttcgaggacatgcaggaaatcattcagaactttgtgcgggttcatgtggatgcccctggaatggaagagggagcccctgtgttccctttgggatatcagtacccatctctggaccagcttgcagacatgatcccttgcgtcctgcagtacctaaatttctctacaataattggagttggtgttggagctggagcctacatcctggcgagatatgctcttaaccacccggacactgttgaaggtcttgtcctcatcaacattgatcccaatgccaagggttggatggattgggcagcccacaagctaacaggcctcacctcttccattccggagatgatccttggacatcttttcagccaggaagagctctctggaaattctgagttgatacaaaagtacagaaatatcattacacatgcacccaacctggataacattgaattgtactggaacagctacaacaaccgccgagacctgaactttgagcgtggaggtgatatcaccctcaggtgtcctgtgatgctggtggtaggagaccaagcacctcatgaagatgcagtggtggaatgtaactcaaaactggaccccacccagacctcgttcctcaagatggctgactccggaggtcagccccagctgactcagccaggcaagctgaccgaggccttcaagtacttcctgcaaggcatgggctacatggcctcatcctgcatgactcgcctgtcccggtctcgtacagcctctctgaccagtgcagcatccgttgatggcaaccggtcccgctctcgcaccctgtcccagagcagcgagtctggaactctttcttcggggcccccggggcacaccatggaggtctcctgttgaatggcccttgttgccctagagtgggacccagccctcacctcccccagagctaacct

SEQ ID NO: 347442 - DNA, 383 bp, Homo Sapiens
attcacaggttttacaggaagcacgtcctccattagtatccgcagacgatgagatatatagcacaagtaaagcatttataggacccatttacaaaccccctgagaaaaagaaacgtaatgaagggaggaatgaggcacatgttctaaatggtataaatgacagaggaggacaaaaagagaaacagaaatttaactctgaaaaatcagagattgacaatgaattattccagttttacaaagaaattgaagagcttgaaaaggaaaaagatggttttgagaacagttgtaaagaatctgaaccttctcaggaacaatttgttccattttatgagggtcataataatggtctcttcctgatgaagacttggggtgagccagacttc

SEQ ID NO: 347443 - DNA, 640 bp, Homo Sapiens
  misc_feature (486)..(487): n is a, c, g, or t
  misc_feature (494)..(494): n is a, c, g, or t
  misc_feature (519)..(520): n is a, c, g, or t
  misc_feature (528)..(528): n is a, c, g, or t
gggcttcaagcaacagcgacgcaagatggcagccaccacgggctcgggagtaaaagtccctcgcaatttccgactgttggaagaactcgaagaaggccagaaaggagtaggagatggcacagttagctggggtctagaagatgacgaagacatgacacttacaagatggacagggatgataattgggcctccaagaacaatttatgaaaaccgaatatacagccttaaaatagaatgtggacctaaatacccagaagcacccccctttgtaagatttgtaacaaaaattaatatgaatggagtaaatagttctaatggagtggtggacccaagagccatatcagtgctagcaaaatggcagaattcatatagcatcaaagttgtcctgcaagagcttcggcgcctaatgatgtctaaagaaaatatgaaactccctcagccgcccgaaggacagtgttacagcaattaatcaaaaaggccacagtnngtaaatntctagatacgtcttgtagacctcannagtaccgnaaaggagctcccattcaaagggaattattctaagatacctgtaatgatacttaatttttggccatttgaaatatataagtgtgctataaccaaatcatctggtcagggtaac

SEQ ID NO: 347444 - DNA, 380 bp, Homo Sapiens
ctttatctctggcggccttgtagtcgtctccgagactccccacccctccttccctcttgaccccctaggtttgattgccctttccccgaaacaactatcatgagcgcgaggctgccggtgttgtctccacctcggtggccgcggctgttgctgctgtcgctgctcctgctgggggcggttcctggcccgcgccggagcggcgctttctacctgcccggcctggcgcccgtcaacttctgcgacgaagaaagagcgacgagtgcaaggccgaaatagaactatttgtgaacagacttgattcagtggaatcagttcttccttatgaatacacagcgtttgatttttgccaagcatcagaagggcgcccatctgttcgtttt

SEQ ID NO: 347445 - DNA, 880 bp, Homo Sapiens
  misc_feature (46)..(46): n is a, c, g, or t
  misc_feature (53)..(53): n is a, c, g, or t
  misc_feature (62)..(62): n is a, c, g, or t
  misc_feature (74)..(74): n is a, c, g, or t
  misc_feature (101)..(101): n is a, c, g, or t
  misc_feature (113)..(113): n is a, c, g, or t
  misc_feature (141)..(141): n is a, c, g, or t
  misc_feature (445)..(445): n is a, c, g, or t
  misc_feature (502)..(502): n is a, c, g, or t
  misc_feature (546)..(546): n is a, c, g, or t
  misc_feature (556)..(556): n is a, c, g, or t
  misc_feature (566)..(566): n is a, c, g, or t
  misc_feature (724)..(724): n is a, c, g, or t
  misc_feature (749)..(749): n is a, c, g, or t
tccaccttgaaattcctaataacgagaacagttctctgccctgccnaaccaanggcagaaanccagcattttgnctcaacctgctcttcagtctggcaggntccccacgctcnattttcccacatagctgcagggtgctantgtaatgactcagggatggtgctgacaacgtgggttgcctctgtggctgcgggaggggagccaaagaaggtgttggtttgattcctctgctgatctcggaggtaaggaggaactgacgaacttttgatatggaggatcctggtgtccatcacctgacagtcaatctgcatcatcacttcgtagtcctgcccattgatcacattctcatttatgtttattgctggtaacacaattgacatttttggtcttgtggtcttgttatgggtggtagctggtaacagcaggtgatcccttcgaaatgacncaacataaaatgtgtctccccttctgcggatggcttcaaaaaagtcttgataacttntgggtgaagcataatacacttgtagctcactccctgagttcctnctgatactantagtggtttntgtgtattgaacagccatcagctgagaatttgagccctgttccagagcaccctgaagaatacgggttttctgttgattatttgccattcttcttgacttggtcctttctacttcatgtctatgaacccatcctcgaagttcatgatttaacctgaganactctgttgtgttaattaggggctnacaaggaggtggaggaatgtaaacgcaagtgtgttcttcagttagcaccatgcagggctgttgtcatttgaaacagaatgatcatatactgtagctgtttattgctggataataccatgctgatgtgtcct

SEQ ID NO: 347446 - DNA, 416 bp, Homo Sapiens
tctgtagttggttgatacgacgacagcatcaagtctgtctgctgtccatcttgacagcaagtcataaccacttagagcagcacttcccacgcaccagcctccaccatggatgtaaaacaacccccttcttagtgtctcagtcacagtgacattttcatctgaggttggtgggacttcatcaaagctcccgacaaccttaaaggaatccataaaatggtgaagtcccaggagctccacaaatgtagccaaattttgtatagttttcagatgtgcgtttatccacatcattctccatggctcctcaacgttatctgggagaggcgtataaatataatatgctatgaggatccccacaatcagaaggtacagcgattttcttcccatggtgaacgtcccgcttcttggtctctagaaac

SEQ ID NO: 347447 - DNA, 1043 bp, Homo Sapiens
  misc_feature (9)..(9): n is a, c, g, or t
  misc_feature (16)..(16): n is a, c, g, or t
  misc_feature (28)..(28): n is a, c, g, or t
  misc_feature (39)..(39): n is a, c, g, or t
  misc_feature (45)..(45): n is a, c, g, or t
  misc_feature (47)..(47): n is a, c, g, or t
  misc_feature (64)..(64): n is a, c, g, or t
  misc_feature (77)..(78): n is a, c, g, or t
  misc_feature (84)..(84): n is a, c, g, or t
  misc_feature (97)..(97): n is a, c, g, or t
  misc_feature (106)..(106): n is a, c, g, or t
  misc_feature (109)..(109): n is a, c, g, or t
  misc_feature (124)..(124): n is a, c, g, or t
  misc_feature (128)..(128): n is a, c, g, or t
  misc_feature (132)..(132): n is a, c, g, or t
  misc_feature (134)..(134): n is a, c, g, or t
  misc_feature (139)..(139): n is a, c, g, or t
  misc_feature (145)..(145): n is a, c, g, or t
  misc_feature (147)..(147): n is a, c, g, or t
  misc_feature (153)..(155): n is a, c, g, or t
  misc_feature (157)..(157): n is a, c, g, or t
  misc_feature (159)..(172): n is a, c, g, or t
  misc_feature (175)..(175): n is a, c, g, or t
  misc_feature (179)..(179): n is a, c, g, or t
  misc_feature (192)..(192): n is a, c, g, or t
  misc_feature (194)..(194): n is a, c, g, or t
  misc_feature (334)..(442): n is a, c, g, or t
  misc_feature (1040)..(1040): n is a, c, g, or t
atactgccncctccgngggctcgcagcnaaagagagagncagaanantcggcgcttgagtaccnccgtcgaagcggnngaggtnaggcctggaggcnatgccaggngtnaagacacgaatcgcncgtnaagnancggtngatccntngagcgnnnangnnnnnnnnnnnnnnccngttnttcgaggtttacnanggcccgagccagaggacccgtagctgctagaagggcaggggtgtggcttctgggggctggtcttcagctctggcgccttcatccccctgcctctaccttcattccaaacccctctcggccgggtgcagtggcttatgctnnnnnnnnnnnnnnnnnnnnnnnnnnnnnnnnnnnnnnnnnnnnnnnnnnnnnnnnnnnnnnnnnnnnnnnnnnnnnnnnnnnnnnnnnnnnnnnnnnnnnnnnnnnnntcaacccttcttccccaccaaaccacccaactcctctctactcttatccttttatcctctgtctctgcttatcacctctcttgcgtatttctggatctccttccctcctttctcgtccaaatcatgaaatgtttggccttagtcaatgtctatgcccgtcacataacagccgaggcaccgaggcccacagggaagcagctgggagcttggaaacctggtctcttgaatttcaaacctggtttcttacaggtggttgtctggggtgggtggagtggcgacaggatagagctgaaggactatgcaaatgaggaagtaagtcagggcgggctttgagaaggggacccatatcctacaggcaaaaagcaggctaggtgaccttgggacactacgctaagggagggaggctaaaggcggccaggtttgcagtgcgggaagatgagcaggccagtgggaggaggggcagggcagggctgtagttggtgactgggtgttcattttagctctaagaaaaaaaatcagtgtttcgtgaaggtgttggagaggggctgtgtctgggtgagggatggcggggtactgatttttttgggaggttatgagnaaa

SEQ ID NO: 347448 - DNA, 694 bp, Homo Sapiens
  misc_feature (164)..(164): n is a, c, g, or t
  misc_feature (230)..(288): n is a, c, g, or t
cagctattgagatcttcgaatgctgcggagctggaggcggaggcagctggggaggtccgagcgatgtgaccaggccgccatcgctcgtctcttcctctctcctgccgcctcctgtctcgaaaataacttttttattttaaagaaagaaagacaaaagtagtcgntccgcccctcacgccctctcttcctctcagccttccgcccggtgaggaagcccggggtggctgctnnnnnnnnnnnnnnnnnnnnnnnnnnnnnnnnnnnnnnnnnnnnnnnnnnnnnnnnnnncccatgcatcccttctacacccgggccgccaccatgataggcgagatcgccgccgccgtgtccttcatctccaagtttctccgcaccaaggggctcacgagcgagcgacagctgcagaccttcagccagagcctgcaggagctgctggcagaacattataaacatcactggttcccagaaaagccatgcaagggatcgggttaccgttgtattcgcatcaaccataaaatggatcctctgattggacaggcagcacagcggattggactgagcagtcaggagctgttcaggcttctcccaagtgaactcacactctgggttgacccctatgaagtgtcctacagaattggagaggatggctccatctgtgtgctgtatgaagcctcaccagcaggaggtagcactc

SEQ ID NO: 347449 - DNA, 648 bp, Homo Sapiens
cccgggctgcaggattcggcacgaggccccgcagcccacgacctcacctggtaccagtaccattccttggacgtgattggtttcctcttggccgtcgtgctgacagtggccttcatcacctttaaatgtgtgcttatggctaccggaaatgcttggggaaaaaagggcgagttaagaaagcccacaaatccaagacccattgagaagtgggtgggaaataaggtaaaattttgaaccattccctagtcatttccaaacttgaaaacagaatcagtgttaaattcattttattcttattaaggaaatactttgcataaattaatcagccccagagtgctttaaaaaattctcttaaataccggtgtctttgatcaggatgacatgtgccatttttcagaggacgtgcagacaggctggcattctagattacttttcttactctgaaacatggcctgtttgggagtgcgggattcaaaggtggtcccaccgctgcccctactgcaaatggcagttttaatcttatcttttggcttctgcagatggttgcaattgatccttaaccaataatggtcagtcctcatctctgtcctgcttcataggtgccaccttgtgtgtttgaaggggctttgtacctttagagtgtaggtg

SEQ ID NO: 347450 - DNA, 584 bp, Homo Sapiens
ccagatttagtactacattttataacaatagagagtagctgaaaatactacatgctaacacagataatatgatacacaacctcaggggggaagctggcagggagcacgtggcagaggccacaggtttagactaagagcctttcaatggactgctgaatggattggatctgctgtttccagctgcgagccttctttgatggtgaacagaacaggcgatgacaggccctggagaccccacaggctctccccagggcctgcttggagcgcacaaacacgtagggcacattcttgtcttcacacagcagcggcaggtgcagaatgatctccagtggctcggcgtctgcagccatcacgatgaactcagagatgcccctgttgagggttttggtggcctcattggctcctttccgaagctgcttatagttacatgactgctgaacgaggtccagtagcttcttggtgaggtgggcatcggcaaggggataggcctttggattcacatcagcctcagtcatggctgcggttccgcgggctcagcactcctaggggagcgcagctgacgtttcagaagcactcgcgtgcac

SEQ ID NO: 347451 - DNA, 745 bp, Homo Sapiens
agtacattatagtaattcttttcacgagtcttaacatttctttgtacaacaggcaaatagtttaataccttccatcaagacatttcagagctctagacgtttagaaataaggtcaagaatctctttcaaatgcaatcattagtttgtattaaactaaaatgccagacggcaagtctcaggtttctaaaatagttttaaaaaacaggtttacagcccatagtaagtcttagaaacctcaacgataggtcctgtcatgtctaaacactacaactatctgtggataaaaatctgcattcaaacgtacaatactttcttctagatctgaattaaaaccttatttaccccaattcatccatgtattctgatacgttcagtgaaaaagccaggatcattggggctgttctctctatcaaaggaaagagctccgatcacctacattataattttctgtgcttattttctgcaggggaggaaatacacatctattcaacgccacactggacgttacaaaatgcatgcatattctgccccagtgctatctgttcattaccgttttgtctccttaaagaactatctaacatagtgtttcccaaaatgttctccacaggacattagtgagaggttcataagtatcccaaaggagaaaaaggtcctggtgtcaaaatagtttgggcaatgctgggttagacagtttttcactaccggatgccaagcccttactgcgctaaagtgcattgtaagtttc

SEQ ID NO: 347452 - DNA, 560 bp, Homo Sapiens
agtagctaggatcacactccaagtatgggcagtgatggcgctctgtgggccacagtgggctatctaggccctccctcacctgaggcccagagtggacacagctgttaatttccactggctatgccacttcagagtctttcatgccagcgtttgagctcctctgggtatcgttgagattgagcagcgcttggtgatctctcagcaaacaacccctggccgtgggccaatctacttgaagttactcggacaaagaccccaaagtggggcaacaacttcagagaggctgtgggaatcttcagaagcccccctgtaagagacagacatgagagacaagcatcttctttcccccgcaggtccattttatttccttcttgtgctgctctggaagagaggcagtagcaaagagatgagctcctggatggcattttccagggcaggagaaagtatgagagcctcaggaaaccccatcaaggaccgagtatgtgtctggttccttgggtgggacgattcctgaccacactgtccagctcttgctctcattaaatgctctgtctcccgcg

SEQ ID NO: 347453 - DNA, 884 bp, Homo Sapiens
  misc_feature (187)..(187): n is a, c, g, or t
caacaattaaaccctgaatcgctgctgttcaagaactcccccagatgatcatggttgtggtgacagcagaaagggattatggataatctgcattgtctagttgctccccatgccacccgtctcgagggaaagcctgacattgattagatattgagccaggctaatgctggcagcagagatctgcgcnccagacatctgacggatctcattgaggcgccttgacgcccgattatgcagccaatcaaatcgggaatggtgagttcatgagaagtagtctgagcagatgcatccaaacctgcccaatagcctttcacctctggagagctggattcaatgccactgaatccggtgttgccatgcgtcatgggaaaatgagactgttgcattgccaactggtgcagcttggtcaaatctggctgtggaatggcatactgtccttgaatggtataggcctctagaggtggtccctccaggtcagggttgaggcacatggacggggtggtgtggggaaagctcgcactgtcgctgcctgtgctgtacctgtcctgaccacctgcaaagatgaccggagagctggacggcttgggccggtacgggatggtcacgcccttcgggggggactgggagagagtctccaacatgaccacgcagatctgtttgacacactcaatgatggattgtggaatgccagcaatagtgatggcccgctcagttgagttgggtagcatatcccctgccaccccaatgagagagccacactgactagcagggaccaccagcctcagggtgaccgggggtctactggcagctgtgctattggtcatagagctgcttatgtcctcttccagtttgtcaatgatcatagcaaaggctttgaagatggc

SEQ ID NO: 347454 - DNA, 866 bp, Homo Sapiens
  misc_feature (83)..(93): n is a, c, g, or t
  misc_feature (95)..(99): n is a, c, g, or t
  misc_feature (101)..(111): n is a, c, g, or t
  misc_feature (113)..(114): n is a, c, g, or t
  misc_feature (116)..(130): n is a, c, g, or t
  misc_feature (132)..(133): n is a, c, g, or t
  misc_feature (135)..(151): n is a, c, g, or t
  misc_feature (264)..(295): n is a, c, g, or t
ttcattttccttttgtggccccccgcggccaaagaaatggttttagaaaaatttttcagggggccgaggggggcccaacatgnnnnnnnnnnntnnnnntnnnnnnnnnnnanntnnnnnnnnnnnnnnntnntnnnnnnnnnnnnnnnnncccagtccatcttttaattttttgaaaaaatccctgacattacagaactaaactgaaatgtattaatattccactcttacatttccatgacaaacagaaaaattcatgagccnnnnnnnnnnnnnnnnnnnnnnnnnnnnnnnnccagggagaagcttataaaactaaatatggatctcagcatcaacagctgaacagagaaaggaattaaaacgctttaattaaaaaatcacgagtggatgataaagtgtgtagaaactgaaaatttacaaactatttaaaacctggaatcgctgactgttcagaaactacacagatggatcatgggtggtggtgaacagcagaaagggattatggatgaatctgcattgttctagctgctccccatgccacccgtctccgaggaaagcctgacattgattagatattgagccaggctaatgctggcagcagatccagtgatggtaacctgcctatcagtagatccttccactgggttcgcaattttgatctgcgccccagacatctgacggatctcattgattttggcgccttgacgcccgattatgcagccaatcaaatcgtttggaatggtgagttcatgagaagtagtctgagcagatgcatccaaacctgcactgaatccggtgttgccatgcgtcatgggaaaatgagactgttgcattgccaactggtgcagcttggtcaaatctcc

SEQ ID NO: 347455 - DNA, 1007 bp, Homo Sapiens
  misc_feature (266)..(266): n is a, c, g, or t
  misc_feature (898)..(898): n is a, c, g, or t
  misc_feature (917)..(917): n is a, c, g, or t
  misc_feature (933)..(933): n is a, c, g, or t
  misc_feature (935)..(935): n is a, c, g, or t
  misc_feature (937)..(937): n is a, c, g, or t
  misc_feature (939)..(939): n is a, c, g, or t
  misc_feature (945)..(946): n is a, c, g, or t
  misc_feature (949)..(951): n is a, c, g, or t
  misc_feature (958)..(958): n is a, c, g, or t
  misc_feature (962)..(962): n is a, c, g, or t
  misc_feature (970)..(970): n is a, c, g, or t
  misc_feature (972)..(973): n is a, c, g, or t
  misc_feature (977)..(977): n is a, c, g, or t
  misc_feature (981)..(981): n is a, c, g, or t
  misc_feature (990)..(991): n is a, c, g, or t
  misc_feature (998)..(998): n is a, c, g, or t
  misc_feature (1002)..(1002): n is a, c, g, or t
aggagaatttagctgttctttattgacatggaatttggggtggcgagggtagccacaccctccaggaggatgaggtaggttcagtgcttccagctcacacctttcctgggtcttccttcagtgtgacagttcggttaaagacaagctttccctgatggctgtctggatccacggagaaatatccaagacgctcaaactggaacttgtcgaagggttttgccagggccacagagcagtccactaatgctgcatccaccacgtgtagngatgcctgcaggcagggaacttaggcacaccctccaggaggatgaggtaggttcagtgcttccagctcacccctttcctgggtgttcctatcagtgtgtcagttcggttaaagatccagctttcacctgatgtctgatctgtcagggttcttgtgctgtccactaatgctgcatccaccacgtgtaggtgatgcccggttcaggtcagctttagcatgcactgtgcatctctgtacctgcgctcttccgggttcttgttctgtcatagtcgctcatagaggcgaacctcacacatcaaaggctgtgacccccagtgaataaaggcgctttggcttctctccagcatctgcccgtctgcaggtcacctccagactctctacacaaccactggggcccttgacaacatgctgcagctcaatgacgtagcctgtattgcctcaggcccacaggctggccccaagccaggcgcttaaatcctggctctggctcctccttgaagtcagtcctctcaatgaagacaatgggtgcaaagggaacctgatggaagcctttggtctcatcagctgggaagttgggcacctggatgtccaaggacttggcagcaggaaagttggtgatgatgacccgtagtnactccagcacagccatggntcggtggggctgtgtnantnancacatnncgnnnacaaggntttngaagaatngnnccantgtngtttttgcnnagtcacncccncccgg

SEQ ID NO: 347456 - DNA, 630 bp, Homo Sapiens
atgggtggtacgtgcacctcctgtttcaaaaacgccagcagaaattggttctggacaagggcaagctgcaactcaatttctgctgcaaccctagctcaggtaagttatgtttattccttcgctttgctgatatagtcagtgagtctgtttatgccttcttcctgctgttctagattctccagtttgttcttgaggttccgaagtctcaacgatgcatggataaacatcaacagcaaaggaaaagtaatgccaaacacaaagaccatgactcctccaaacatggagataaggaaatagctcgccaacatgaccaccataacgaacgtcgtggggtagcgcttcttcatccggcgaaggacgtctttattgtgggctgcccacacaaaccctgtgaacaccagcaccaccacgattcctcccagggggtcatgttgaagggactcagaaaccccacaatggaaatggtcatggcagccaccaccaggtagttggtctggtaatagagcaggttgctcactacgcggttgttccatttggaaatgtccctgaagtccggccgggcaaagcgatcggaacccgggaagaaatcgtcccaggcgcggagtggggcgatattaacgtccatgttct

SEQ ID NO: 347457 - DNA, 639 bp, Homo Sapiens
tatgccaattgccaatgggccccaattcgtccatttttttaaaggggttttcccgatttgggcctattgtgtttaaatttagagttctgcatcttggtggtcatatttattggagagcttgagaagaatgaaaataccatttagcttaagaagttgtgagttatctgcaaatcaactcatttcaggagtggaagaatccccggaattatttcttaatatcaaaatgtatgcaggtttctcctatgaatgttttgtacttttagagaggccactgtacaaagtctcccgttttccatacaggacaaattctttgtttcagccaactctcagtggaggggcaaccaggacaacgccatctccccggacaaagagcattggaatattccgtttcggtgatttatatatctcttcatatgtttcttcatcaatttctatagtagtcacagtttcttccacatctcccaagatcatatttaaatgttgatcataagcatgtaatctgtctcgaagctctcggtcatttctcattttcacatttaaacgctcatctaggctgagcctgctaagttccaaagggccctagtcaagggtggtaaaatgaagctggtgtccttagatcgccgtgtttcatcctctgtg

SEQ ID NO: 347458 - DNA, 579 bp, Homo Sapiens
  misc_feature (65)..(128): n is a, c, g, or t
tttttaaaatgaagatctcaatgtttattaattacaataaaaagtaaaatcacagagctattttnnnnnnnnnnnnnnnnnnnnnnnnnnnnnnnnnnnnnnnnnnnnnnnnnnnnnnnnnnnnnnnnattctaagtaagaaatctagtacaagcaaagatgacattttaaagtatcatcaatgaatttccacacagcctttccatcacaataatataaatttataccttcaatcttatgcagcaacaaaaacacagtgagaaagacagcaattgcttctgaaagaaaatcaaagaagcctatagtggtgaattttttctaaaggatcctagggagttgaataaggcctgcttctccatgggttgacaatgtttggctgtgaagggaatggcagcctcctttcctctgatttttttaccgatggcacacacttcaggggtgggcctgtttcctggtccctgctgtggcatcttcttttgtcactctggatttcagtgtggcgacttctcccttatagggtgcacgctccacaggggtaggtgtgcaagtctgaaagagaacatttcatttctctcttgg

SEQ ID NO: 347459 - DNA, 467 bp, Homo Sapiens
  misc_feature (65)..(128): n is a, c, g, or t
  misc_feature (373)..(373): n is a, c, g, or t
  misc_feature (442)..(442): n is a, c, g, or t
tttttaaaatgaagatctcaatgtttattaattacaataaaaagtaaaatcacagagctattttnnnnnnnnnnnnnnnnnnnnnnnnnnnnnnnnnnnnnnnnnnnnnnnnnnnnnnnnnnnnnnnnattctaagtaagaaatctagtacaagcaaagatgacattttaaagtatcatcaatgaatttccacacagcctttccatcacaataatataaatttataccttcaatcttatgcaggcaacaaaaacacagtgaggataggacagccaattgcttctggaaggaaaatcaaaggaagcctataggtggggtgaattttttctaaggggatcctgggggaggttggaataggggcctgcttctccanggggttgacaatgtttgggctgtgaggggggatgggcaggcctcctttcctctggattttttttaccgnggggcacacacttcgggggtggggg

SEQ ID NO: 347460 - DNA, 774 bp, Homo Sapiens
  misc_feature (90)..(127): n is a, c, g, or t
  misc_feature (290)..(290): n is a, c, g, or t
  misc_feature (368)..(396): n is a, c, g, or t
gaatctcacctcgttggtgaccgactatgcagcagaaccctctgctggattcagcgagagctgtcagtgcttgagcagagttttgaaatnnnnnnnnnnnnnnnnnnnnnnnnnnnnnnnnnnnnnngacaaataacaaattattgtgggtctcattttgaccacccaaactaatacattgtagtgatcaacagtgtgacctttgaagtgagacagatctaagttagaattctccatttgcccatttactacacataggaaactgacaagttaattaatgcctccaggcntacttcctcatccatgaaatgggggaaataaacctatctctcagatagtggagaatttccagagccaaagcattttcnnnnnnnnnnnnnnnnnnnnnnnnnnnnntcacacagccccagagagtacaccaaacaccgagtatccaacacagaacaaggcccacagctcctgcagccacagaatttgaagcactgcatcgggtgtgcactgagtgctcaggaaatggggggactcctgcccttccctcaccaggccaagcctctgctcactttctgtatctgtctaaatgctttgctggacttccattttggctcactgtctactcagtctttgagccctgttctcatcttgaggaacacagacaccaggaaatgaagggccagcctcccatttctaccaccttggaccaccacatctgaaaccttaaactcactaataccccactctctggccacatcctccctttcaggtccttggtccctg

SEQ ID NO: 347461 - DNA, 615 bp, Homo Sapiens
cccaaaggagtcagaccacaaatgtatgaccagcacaattctatgatcaaactctacctctagcaaggcgtctcaacaatcaagttctatttaaatcattcgctcgtgtcttctttcagtcatgatgaaataatgagaatatcataaggaacagaaggtaatgcattggtcaccaccccctgcatagtcttcattatccagtcaacatagttctttacccgtgtgtagagcccataggtcccacactggggcccccaggacaccaggccagctgcgtagaatttggtcttgtcattgggatcctgtacagcaaaggccccaccactgtcccctttacagctatccatgcccttctctcctccagcacagatcatgttaggagtgaaaacataggcctctgcatctgctgtgggtttctccactttcacttctttgcattttcttaaaggagctacaggtaaccttgccgccttgaggcgaacagcacgatctctcttctctgttcggccccagcctgagatcagtcccaggtccccatccatgaggttgtagtcggaagaggtgcctggtaggcagatgggagagacggtgggtcccattttcactgggtctttc

SEQ ID NO: 347462 - DNA, 703 bp, Homo Sapiens
ctttttccccccccgggaggtgtaagtttccttctttcctcacaaccaaatttgtggcgggcaaaaagaacaatctttcttttccctccatggtcatcgccatcaatagacctgtggtggtgcaccctcattcttgggggaacctcataaaataagttttgagaataataagcactggtttgcggctctttcgcaggtgttctccgttgcacattcataaaagatgaacttcagctatcttctctagaagatccatcatatgattgtgagaggcgggtctcccccaaaaatccacgcgcatgtattctttcgtttagaatctgaaagcctctttcttttcaggcttgatgactcttttaaggtatttgttatgcctctcttctgggtttttcgttttgccttatcaagtagctcaaattctttctccatggcaacagaaactgcttctatttcgctggctgctgcttctttctctttccttagcatacatgtcacagctctgtttagtctctggctcttaatacgttgagcatcttctttctcctgttgtgctaatctaaagaaggaatcaattcggagctgtgtcttttattcagtaaattcacttttaagaagatattctttggccgggcatggtggctcacacatgtactcccagctctgtgggaggccgaggcggaaaaataaagaggtcagctcgtgc

SEQ ID NO: 347463 - DNA, 697 bp, Homo Sapiens
  misc_feature (518)..(518): n is a, c, g, or t
  misc_feature (537)..(537): n is a, c, g, or t
  misc_feature (565)..(565): n is a, c, g, or t
  misc_feature (611)..(611): n is a, c, g, or t
  misc_feature (656)..(656): n is a, c, g, or t
gacggaactccctgggtaggagtttgaagctttcttaactcagaaagaaacttccaacacagtttcccaaagaaaaatgggcaccaagggcaaagttattaaatgcaaagcagccatcgcctgggaagcaggcaagcccctttgcattgaagaggttgaagtagctccccccaaggctcatgaagttcgcattcagatcattgctacctccctgtgccatactgatgccactgttatcgattctaaatttgagggcctagctttcccagtgatcgttggccatgaggctgcaggtattgtggaaagtattgggccaggagtgaccaacgtcaaaccaggtgacaaagtaattccactttatgcacctctatgtagaaaatgcaagttttgtctgagtccactcacaaatttgtgtgggaaaatcagtaatctcaaaagtcctgctagtgatcaacaactaatggaagacagtaccattctctcagtacactgtggtgtcagatatcaatcttgccaanatagatgatgatgcacatntagagagagtatggctgcttggatgtgngttctcaactggctatggcgctgcaatcaacaatgccaaggtcacntctggttcgacttgtgctggctatggcctaggaggtgtgggtctntcaggtgtaatgggttggaaagcaacaggagccttccagaa

SEQ ID NO: 347464 - DNA, 391 bp, Homo Sapiens; identical to SEQ ID NO: 162538

SEQ ID NO: 347465 - DNA, 628 bp, Homo Sapiens
gataaggtgggcaagggaaaaaggagtggatgcaaggggtaaaggtgaagaaaatagggattacgattgggacttacgtagaaatgcgcaggtgaaatgagaaaggcgagggaggaagtgttaagagagagaagcagggatggctaggtgactagggacgccacgagtaatcctaagacagtcagtagaggcaagagtaggacaaagtgaggacagggaagcgaagaacgaaaacaaccacaacaacacgcagacaacacctgtgttccaagcccaccccaacccccccagtgcttccaacacaattatttcccagcctgttgggcctgccgacgaaggagcacgtagatcttctctttaatccagtctttgttataaggctggtatgtctgggtatcagctcggtaacccaggcagctgaggtctgccagatcatcgatgaaatccagatgttcttcatacattttacaaacaccttccatgcattcattcacagattcgtagtcagcataagttctgccttctggcctcttggtaggctgtaccagcaaaatggtgtgagacatcgcgccaaactctcttcgctacagcagctgccgacaccgccgccgttacacgagcttaacta

SEQ ID NO: 347466 - DNA, 1147 bp, Homo Sapiens
  misc_feature (49)..(49): n is a, c, g, or t
  misc_feature (62)..(62): n is a, c, g, or t
  misc_feature (64)..(64): n is a, c, g, or t
  misc_feature (66)..(66): n is a, c, g, or t
  misc_feature (183)..(183): n is a, c, g, or t
  misc_feature (189)..(189): n is a, c, g, or t
  misc_feature (191)..(191): n is a, c, g, or t
  misc_feature (269)..(269): n is a, c, g, or t
  misc_feature (286)..(286): n is a, c, g, or t
  misc_feature (288)..(288): n is a, c, g, or t
  misc_feature (306)..(306): n is a, c, g, or t
  misc_feature (312)..(312): n is a, c, g, or t
  misc_feature (323)..(323): n is a, c, g, or t
  misc_feature (344)..(344): n is a, c, g, or t
  misc_feature (364)..(364): n is a, c, g, or t
  misc_feature (393)..(393): n is a, c, g, or t
  misc_feature (480)..(480): n is a, c, g, or t
  misc_feature (483)..(483): n is a, c, g, or t
  misc_feature (494)..(494): n is a, c, g, or t
  misc_feature (497)..(497): n is a, c, g, or t
  misc_feature (503)..(504): n is a, c, g, or t
  misc_feature (521)..(521): n is a, c, g, or t
  misc_feature (523)..(523): n is a, c, g, or t
  misc_feature (525)..(525): n is a, c, g, or t
  misc_feature (550)..(551): n is a, c, g, or t
  misc_feature (555)..(555): n is a, c, g, or t
  misc_feature (586)..(586): n is a, c, g, or t
  misc_feature (607)..(607): n is a, c, g, or t
  misc_feature (618)..(618): n is a, c, g, or t
  misc_feature (624)..(624): n is a, c, g, or t
  misc_feature (638)..(638): n is a, c, g, or t
  misc_feature (641)..(641): n is a, c, g, or t
  misc_feature (659)..(659): n is a, c, g, or t
  misc_feature (680)..(680): n is a, c, g, or t
  misc_feature (682)..(682): n is a, c, g, or t
  misc_feature (697)..(697): n is a, c, g, or t
  misc_feature (716)..(716): n is a, c, g, or t
  misc_feature (718)..(718): n is a, c, g, or t
  misc_feature (734)..(736): n is a, c, g, or t
ccgggatgggactggaagagagagacgcggtcgagtaggtgtgcaccanccctggcaacganancntctaccccgaactctgctggccttgaggtggggaagccggggagggcagttgaggaccccgcggaggcgcgtgactggttgagcgggcaggccagcctccgagccgggtggacacangttttnanacatgaatcctacactcatccttgctgccttttgcctgggaattgcctcagctactctaacatttgatcacagtttanaggcacaatggaccaantngaaggcgatgcacaacanattatncggcatgaatnaagaaggatggaggagagcantgtgggagaagaacatgaanatgattgatctgcacaatcaggaatacanggaagggaaacacagcttcacaatggccatgaacgcctttggagacatgaccagtgaagaattcaggcaggtgatgaatggctttcnatnccgttagcccnggnaggggnnagtgttccaggaacctntntnttataaagcccccagatctgtggannaganagagaaaggctacgtgactactgtgaagaancagggtcagtgtagttcttgntaggcttttantgctantggtgctcttgaanganagatgttccggaaaactnggaggcttatctcactgaatnancagaatctggtagantgctctaggcctcaaggcnanaaaagctgcaatggtnnnctaatggattatgctttccagtatgttcaggataatggaggcctgggctctgagggatcctatccatatgaggcaacagaagaatcctgtaagtacaatcccaagtattctgttgctaatgacaccggctttgtggacatccctaagcaggagaaggccctgatgaaggcagttgcaactgtggggcccatttctgttgctattgatgcaggtcatgagtccttcctgttctataaagaaggcatttattttgagccagactgtagcagtgaagacatggatcatggtgtgctggtggttggctacggatttgaaagcacagaatcagataacaataaatattggctggtgaagaacagctggggtgaagaatggggcatgggtggctacgtaaagatggccaaagaccgg

SEQ ID NO: 347467 - DNA, 629 bp, Homo Sapiens
  misc_feature (23)..(23): n is a, c, g, or t
  misc_feature (438)..(501): n is a, c, g, or t
cacaaattactggtcattttatntatgtttcaattcaatgtattattcattttcctcttcaaaggaatcacattttattttggaaatgtatgtgtaaaaaacatggaaacttgtggaaacccactcttgaacttccctggacatgattcagagactgattgaggaaagggctgaatgtctggctttagaggatgtttgtggtgcggcaatgggaagctgggaaaattggcctcaggaagtggcagcacctcaccttttcttagaggagggagtcggtacacagatccaatttgtctgcaatggaagggacggggtcctttacctgggcctcgccttcttaagtgcccaggtggtgggccgtggccatggcaacagtgaccttggttatggggtggtgggtcacaaggtccatagtcttggaaatcatggcagtggggnnnnnnnnnnnnnnnnnnnnnnnnnnnnnnnnnnnnnnnnnnnnnnnnnnnnnnnnnnnnnnnntgtccatggggatgctgtctatgggtatcatgttcatgaggatggtgtgcatggggatggtgtccgtggggatgctgttcatgggaatgatgcttatggggatggaggtcactggaattattattatg

SEQ ID NO: 347468 - DNA, 566 bp, Homo Sapiens
  misc_feature (238)..(251): n is a, c, g, or t
  misc_feature (479)..(501): n is a, c, g, or t
ttttgaaatttaaagaaaaaatttattgaagatctgaaaaacaattcctaaaagattgacttttccagaaaactagctacacaatgcattgcgtctatcatgttaaaacgtgcattagacacaaatacaaaaaccatgaaacaagccaccattcttcaacaatttgagccaagataaaatgcctaagtaacaacatggatgacttgcaaaggatgggctctttactttaagcaccatnnnnnnnnnnnnnngcacaaatggatgagtgtgttcagttatatacactgaattgaacctttggcactaggaatcagagcattttgtcatatagcattaacatgtattataaaagtgcgtagtgtcaaaggaatagaaccaccagcattcaaaagcagctttgtcaactaggcaataaaacactctacagcatatccctctgttgtccatcattgaaaacactggcagcaattttgaaatgnnnnnnnnnnnnnnnnnnnnnnnggagctattacccccttttattttttctctgtttaaaatcaaacagaaaacaaacatcaattgtt

SEQ ID NO: 347469 - DNA, 786 bp, Homo Sapiens
aagatgttctataagactcttcttacactaagttaccgcctactactttcaattatttctccatacccagaagaggaaagcccagaagaggaaaggcctgccactctaacctagtttccctgtgctggtttaaagtactcagttcccttccaatttccaactgtctttctcctacaactttaatgtgtgttgagtgtatgtatgattcataagatttctgatcaatactatgtgtgtgacattgaaaggagtcaaaatgaatgtatgacttagctgcatttatcatttattaattgatgacacatttatccaatgataaaagcatttgagaatctcaacttatgcttgagcctctttcattagctattatggtattatattcacacaagttcatgcattgaatttatctgataaggacagattcagaggcataggaagcacattcctaaagctttgtatttcattagagtcgttactttggatttttgatttaatttcactgaaattcagtcagcattacctgatgctagcatgtgaggcataatctggaagactgaatcacaatttactgctaggggagcctgccaagctttgccattctttcaggggagggtttccctgagaagccagtttttttagatagtcacttggctccagttggggaatatcagggttctgcctgtaatatttctgcaatttctctagaactgtgggcaacccaactgtggaagcatagaacatgggcccgcccttgtgccttggccatccatatccatgtaaatagac

SEQ ID NO: 347470 - DNA, 551 bp, Homo Sapiens
  misc_feature (399)..(432): n is a, c, g, or t
aagaattcggcacgagctaactactagtgctgcatttaactggttatttcttgccagaggggaatgtttttaatactgcattgagccctcagaatggagagtctcccccgctccagttattggaatgggagaggaaggaaagaacagcttttttgtcaaggggcagcttcagaccatgctttcctgtttatctatactcagtaatgaggatgagggctaggaaagtcttgttcataaggaagctggagaactcaatgtaaaatcaaacccatctgtaatttcgagtgggtggagctcttgcttttggtacatgccctgaatccctcactcccctcaagaatcccgaaccacaggacaaaaaccacctactgggctctctcctaccctggcctcctcccnnnnnnnnnnnnnnnnnnnnnnnnnnnnnnnnnngctctttagaacccagtgaaaaataccagggtactggggtgcaactctttcttatgataggtcattagtgctttaagcaaaagatattagcagctttgactgcagcattagcaattagg

SEQ ID NO: 347471 - DNA, 606 bp, Homo Sapiens
  misc_feature (496)..(496): n is a, c, g, or t
  misc_feature (586)..(586): n is a, c, g, or t
ttcggcacggagaactattaactgcctttcttctgtgggctgtgattttcagaggggaatgctaagagtatctcctgatatgcagcatgaatgaaaatggcaagtttcctggccttccttctgctcaactttcgtgtctgcctccttttgcttcagctgctcatgcctcactcagctcagttttctgtgcttggaccctctgggcccatcctggccatggtgggtgaagacgctgatctgccctgtcacctgttcccgaccatgagtgcagagaccatggagctgaagtgggtaagttccagcctaaggcaggtggtgaacgtgtatgcagatggaaaggaagtggaagacaggcagagtgcaccgtatcgagggagaacttcgattctgcgggatggcattcactgcagggaaggctgctctccgaatacacaacgtcacagcctctgacagtggaaagtacttgtgttatttccaagatggtgacttctatgangccctgttggacttgaagttgagcactgggttctaatcttcacgtcgaagtgaagggttatgaagatggagggatccacctggagtgcangtccaccggcttgtcccccc

SEQ ID NO: 347472 - DNA, 803 bp, Homo Sapiens
  misc_feature (154)..(154): n is a, c, g, or t
  misc_feature (231)..(285): n is a, c, g, or t
tagtatgaaattagtttttatttttaactaaaaataaatgcttaacatctttccaaaatcaaaactaaagacgaacacttagaaaaaagggtggaagtgtatttttccttccctggggaaaccagtaaggcagacattctaacgaagcttggtnttttccataggactagtctatgcaacagaatctctctccagccttttctctatgtcagttttatctacctggcaagnnnnnnnnnnnnnnnnnnnnnnnnnnnnnnnnnnnnnnnnnnnnnnnnnnnnnnngggacttgagaagttagagaaaacctttaacacgtttctgtaaaatcctttctgaggtggtttagtacaggtactacccatcagcaacttagcggccaggtgagttggtgcagaagcgcttcgggtgaattcataccagagccaccgggtgtgactcggctacctctcccaattaccacagggaggtcttaaaattgaatttcagtttcagcagatacttcagatttacctgagcaatatcatagacaatgtacctgaggggaagcttgttaaggagccaacagccatacaacagagggtatgtacatgtgcctcatctcccccaggctggcaggacgctcagtgccagcctgaaagtcactctaaggcctcttcatggggctgggttgcctcatctccccggggctggcaggatgctcaatgccagcctgaaagttactctaagtcttcttcaggcagactgaggagaggagatcatcctctggaaactgggggaaggctcataccctgtaagccag

SEQ ID NO: 347473 - DNA, 363 bp, Homo Sapiens
atgaaaatattgaaatttgttcaaaaatagttcaaaatattttgggaaatgaacatcagcatctttatgccaagattcttcatttagtcatggcagatggagcctaccaagaagataatgatgaataatcctcaaaatgttttttaatcctcaactatatgaaagcatttgaatttggcttatcagaataacaagcttcagtgggaaatacagcaattatttatttaaaaaatcagatttaagatggactttcttattgcatgagatggagaaacatgccatttttcaatgaagattctaatattttatctattttgttcattgaattccatggtttctcataacctgacttaatggttttgg

SEQ ID NO: 347474 - DNA, 1161 bp, Homo Sapiens
  misc_feature (638)..(809): n is a, c, g, or t
  misc_feature (813)..(813): n is a, c, g, or t
  misc_feature (827)..(875): n is a, c, g, or t
  misc_feature (896)..(909): n is a, c, g, or t
  misc_feature (1148)..(1148): n is a, c, g, or t
gggcctttccgtcaattcctgtcctgggcgtacgtcaagatggcggcgtctgtattaaacaccgtgctgaggcggcttcctatgctatctctcttccgaggttctcacagagttcaggttcccctccagactctttgcaccaaagctccctctgaggaagattctttgtcctcagttcccatttctccttataaggatgagccctggaaatatcatcttctatgctccatacacaggagtctgtgtgaagcagcacaagcggttgacccaggccatccagaaagccagggatcatggtctcctcatttaccacatcccccaggttgaaccacgggaccttgacttcagtacctctcatggggctgtgagtgctactccgccagcccccaccctggtctcaggtgacccctggtacccatggtacaactggaaacagccaccggagagagaactgtctcgccttcgccggctttaccagggtcatctccaagaagagagtggccccccacctgagtcaatgcccaagatgccccctagaacaccagtggaagcctcctccactgggcagacaggccactcagagtgctctgtaggagctgtagactgggaagagaggccaggcgtgcgtggctcactcnnnnnnnnnnnnnnnnnnnnnnnnnnnnnnnnnnnnnnnnnnnnnnnnnnnnnnnnnnnnnnnnnnnnnnnnnnnnnnnnnnnnnnnnnnnnnnnnnnnnnnnnnnnnnnnnnnnnnnnnnnnnnnnnnnnnnnnnnnnnnnnnnnnnnnnnnnnnnnnnnnnnnnnnnnnntcanttgatcccaggacnnnnnnnnnnnnnnnnnnnnnnnnnnnnnnnnnnnnnnnnnnnnnnnnntgacagctagaccctgtctcnnnnnnnnnnnnnngactcgaggaagagagctagagggactaggagcataatcgatcgtatgtagagtttatgtgatgggatatcaccctgcaacgagttgtgtcttttgtggccagtgacaaatccaggaaatcgaatgttgctgatagggataaatcttgaggctgagggcgggtggtacagatgtgtatgggaaacgcccaacccctaatatattgtaaatagatgggctgggctaaacattgttgcctntcatctttaccaa

SEQ ID NO: 347475 - DNA, 824 bp, Homo Sapiens
  misc_feature (277)..(295): n is a, c, g, or t
  misc_feature (701)..(701): n is a, c, g, or t
  misc_feature (706)..(706): n is a, c, g, or t
  misc_feature (787)..(787): n is a, c, g, or t
  misc_feature (810)..(810): n is a, c, g, or t
tttctatcgtatggggggactttgtcgcggtgtatgctctgtcagcgggtcggcgtataacctcttatttttgcccagggttttacccattttttatttcgattaaaaaacccgggaaaggagggggttccttaccccaccccctgcctggttactgggctctggaagggccactccttcaacttccccaagaaagaggacgcgtctctgacactgtgatcatgacagggggttcaaacagaaagtgcctgggccctccttctaagtcttgttaccnnnnnnnnnnnnnnnnnnngatcttctcagttacaaattctgggaagggagactatacctggctcttgccctaagtgagaggtcttccctcccgcaccaaaaaatagaaaggctttctatttcactggcccaggtagggggaaggagagtaactttgagtctgtgggcctcatttcccaggtgccttcaatgctcatcaaaaccaggcatggggaaggccctggcaaactgctccacccgttgcctgaggttggccagacgctgacttgtttctgagtccttaagcaggaaggatttgaaatcctggagcttggcagtcttgctcttcacctctaagccaatgttgaccccttcatctataaagtccacaactctccggaagtccatcctcacggaactgtcgagaagttaaaggctggggcccncaaancgcaggccgcccggtgtgatggcacttcggtctccaggacaggtgttcttgttggcagtgatggatacaagctctagcacnccgctcagcccgagctccatgcncagccttgggccgc

SEQ ID NO: 347476 - DNA, 677 bp, Homo Sapiens
ctccttccaacagtcaggtaaacccctacttgaaaatttgaaccctctctaacgcttgtaaaataatattaagtttccctggggctttccttcccttagggccttcatcaccacatttctgactactcttaattccttgccaagcttcctctatggtcagcaagctaacagaggctatcggtaaaatgcgttctgaatcttcctgcatgctttagactgctgttaggaaaactcaggaatgaagctaccacacactcactcttatttcagctgcacattacctgatgcttggctatgtctggccataacgtccgatcaatttcctagcaagttcctttaactgcttttctacgctttccgactgtcagtattgaaatttccatttcttcatcattctcagcagataccctcaactgtaatcagtcatcaactgctacatctcttgacttatatagagctgattccaactgtattctcttttctgcctcttccctcctttttgtcttacaccagctgtgccacctatgcttaatattgagtctcatgcagtcctgctcctctaagttcttctccactcaattatccccactctcctcatctttactgctcctctggctcctctttctttacatttaaacatgccaagctctctcctatttggctaaactccaagcttc

SEQ ID NO: 347477 - DNA, 424 bp, Homo Sapiens
  misc_feature (42)..(42): n is a, c, g, or t
  misc_feature (69)..(125): n is a, c, g, or t
tctgccaggtttaaggtcacctgcactcccagccaagtggtnatgtatgcctcccactctctgcaaggnnnnnnnnnnnnnnnnnnnnnnnnnnnnnnnnnnnnnnnnnnnnnnnnnnnnnnnnnaaatagctgcaccatcccaggccctgtgcggagcatcgggggaatacaaagatgagataaaacattgtccctgcccccgggggttcacatgccactggaaacaacagactcttaaactaacaattcaagcaggcgccaagtgcttacgacagaggtgtgaatgcatcaggaaatcggatggagaaccaccattcacccaagggtcagaggaggtttcaaaggcaaggcaaggaagggtgttgcagagagggaacagcatatgcggcatatcagttcatggcatcacatctttcctgggg

SEQ ID NO: 347478 - DNA, 566 bp, Homo Sapiens
atcatttattggcactgtcaacagattacttgtgaacaagatcactttgtacgcttaagtctgcgatgctacttagctatggttttctaccatgagcttatatatagataggtgtaggtatgtagatacattaatgctatacacaattttgcatggttactgagcgtcagtaaaaattatgaaaaaacacccatttataataaaagtgaggatgtactaagacttgctattactggaccttgttttctgtaaaagtgatgacacttgctggacggttactaaactctatggcactaatgtatgatggattcatttccagactgtcggccacggaagcacttcttcatggcctctgccctggacagcagcctgtcctccgggctccccatgtttttaccagcttctgctgagtttctacaatcttgagctctgctgagaattcttttccttgaaattcttctacctaaagccccagcccccaaaagagcatgtctcaggaactcattatgccctgagtcaacaagaacttgttgataaatggcttaaaagtttttacaagaagtaac

SEQ ID NO: 347479 - DNA, 1125 bp, Homo Sapiens
cccagataattcacagtgatctcaatgcctcttgtgacaggatccgttttcccaactcgatcaaaaacaatattgatggtagccatgaaaattttccaaacacagtaaatagagaaaaagtaaccaagaaaattaaaatatttccccttgaaggttttggagtattctattctctccttggtagcatatagatcagctgtttccagaaaaagctgcctgcttaattcttccaaagcatccacttcctgttgaataagagtaagattttccacttcctgatgcctgaagtggtaacactttttatcatttccccaggaaacctgatggtttgttatgcacttccccctttctggaacatttttctcccgtgccattgccatccttttctttttgcttatgatcatatccatggtttgcagcagtcgccgttccagggctagaatatccgtgtcagtcacattcctgaggaagtaagacatgtaagtgtatgggcagttgacagcaccaaatccagaaagaagagccatgagagtcactccaatcacaccaacccggctgatgagctgttctatggataagatcccatgttttgggctgagaatgggaaagggatctcctagtttccagaagaaatacataaaggtcagccataagagacaggaaaaaagcagtcgttgtttatgcactgagacagaggagacaaaagtagtcggatattgctcacaataaaatagccaatgtaaaaaggcaccatgaaaaccaggatcagcagaattacacacaggttcattttccagtgaaaataacgggagctgctattcaatactcctaagatttcaaagatgatgagctcaaacatggtgcaagaaaatgcaaacgtcacggagaagatcacctgtacaacatactgacgtatctcatagtctttaaacaattggcgcatgaagaaaagccacccaaatccaaaaaatagtatctgggaggtaatcatgatgctggagtcgatgaggaaactcatggcgaagtgtaaggaaggctcctgcctccacttcccactccccgaggccacagcacgctggggccacaggccccctcacacggtcgccttctcccaggtgctgcagc

SEQ ID NO: 347480 - DNA, 578 bp, Homo Sapiens
cttttttccagccccggtaccggaccctgcagccgcagagatgttgatgcctaagaagaaccggattgccatttatgaactcctttttaaggagggagtcatggtggccaagaaggatgtccacatgcctaagcacccggagctggcagacaagaatgtgcccaaccttcatgtcatgaaggccatgcagtctctcaagtcccgaggctacgtgaaggaacagtttgcctggagacatttctactggtaccttaccaatgagggtatccagtatctccgtgattaccttcatctgcccccggagattgtgcctgccaccctacgccgtagccgtccagagactggcaggcctcggcctaaaggtctggagggtgagcgacctgcgagactcacaagaggggaagctgacagagatacctacagacggagtgctgtgccacctggtgccgacaagaaagccgaggctggggctgggtcagcaaccgaattccagtttagaggcggatttggtcgtggacgtggtcagccacctcagtaaaattggagaggattcttttgcattgaataaacttacagcc

SEQ ID NO: 347481 - DNA, 361 bp, Homo Sapiens
actgaggtagctgtaagcttggagtttggatgggagacgacagacaagtgtcacaaggagcaacggcagagaggtgggtgggtggcaggaagcgccacaacactttccacacaggggtgggtggtgcgcctcacatttacagccgatcattttcaaacatttcacttgatttccataaagtataaaataatttaacattatacctctacatttcaaaattcacatcaataaaccatcctaattgttaaaatgcaaaccaattcaaagtttacattcttagtaaacataactaaatctcttaattcaaaaggacatttgatacaaattatattactccaataattccaacattcattttcca

SEQ ID NO: 347482 - DNA, 403 bp, Homo Sapiens
aaaaaacacataactatgtaattccaaaatagaaaagtgagtgagccatcactaaaaactggaaactaatattctttcatggaaacaactgataaacattttaaagttctatatttatttaaatttggctttttaaaataggtaagcttttcatttcaattattgtttaatactttaaagctagtttaaacaaagataaaaccaaggagaactagtaaagcattccttactttacatacagtgcctcaagtgccacatacataataacatatcacaaaagaatgtatatggtttagcagattacagagcaaacctaaaagtttatacaaagctaaacactgcctcccttctgttccatttattgtcttttaatttgatcttggctctgtattatccttctata

SEQ ID NO: 347483 - DNA, 722 bp, Homo Sapiens
tgaggaatttgactgaaaagttccctccctctcggctgatgcgccgtcccatcctgggctcctagtgtagggctcctacccttggctccagcaatgctgatgatgaggtgctggggtccccgaggacaggaggcctccaggaaggaaccggcctcagtccacgccgtccagggactgtggctctgccctctcgagctgtagcacctgattttctatgcaccgaaactgccaaggccagcttgtgttgtacagaaatggtcgcagatcaaacctgttgtcctcagggctgtagttctcggcgtggtacgcgggtgtgagcgtggtcatcttgtgtctgttcatggagtacttggagaaaaaccgcttcactttgtcagcgacctgtctcggggtgcagatgtgtctccacatgccgaggagtttgcagaacatgctgtagggccccatcttggccaccttcctgagtttcccatagaccgagagctccgcatatgtcatccccatatcttcctcgtcggtctgggacacctgtccatcagccaagggctccagctctgcggtggccggcgccaacaggatgctctgcagggcaggaagctggaagcgctggatgcagaactggacgaaggccctgaggtccgtcttgctgatcccgcctatggggttgatgtccgcactggagcagtcgtacttggtcaggtagcccaggagactctcatcca

SEQ ID NO: 347484 - DNA, 395 bp, Homo Sapiens
gagaaagaggacacatactctacacctacatgtccaaataatgatgaactcatctatacagctatctctccttaagtcaccactcatgatggtataaaagctggcaattacttaaccaccttgcttgtgggtaatgcctaggaagctgagctcaatttggttttggcagtaacatgcatctttcacatttgtattcatcttagagaatccaaagcaactgttaagcagcttcaggaaaatccattccacaaacatatatcccctttgattttaaaataatgttgtttcaattaagcccacaaaatatatattgtatatatagtatttctcaagacgtaaattaaatctaaattttgtctttcaaaaactgctttttaaaggtgtcagggttttcc

SEQ ID NO: 347485 - DNA, 763 bp, Homo Sapiens
agagccttcaattgttaaactcaacacagtgttgttatactgttgaaattcaggggaccaaatgaatgtccaattgtagaatcagttgactttccatgtcatggctaccactgtttagtaggtaatttacaatagaaaactaatttaaatgaagggccatttcccatgaattttactccagctgtttggagcagaagaaaatgattgatcataccctttcttgttttcttgttccctgatacctccccacttttgttctttagcagcaacactcagttattttggtaaattatttccaggtaaaacagaacaaaaattgtatgaaaagtaacgccaggaataggttttgtatagaagctctccttttaaacactgctctttggttataagctaagaattattattggaattgacagcaataatttttaagccaaaagtgtatattttagctaaatgttccagattacgcagtaaatacccaagtgagtaattggcaagaaatgaggtaaatgagttcagatattcaaatgattaaaagtaagtctgcatattaatagtagccttcaaagtaattctgatgttcatatttaatatcatttaacatttatacatattagtcactggagctttacttggagtacatccacacgaaaaaccaattatttattaaattttcctttcttagcaatagcctctaaatttgcaggcccaccccaaactgttcctaaaagatctctttcgttctgtaatgcttcctccaaat

SEQ ID NO: 347486 - DNA, 651 bp, Homo Sapiens
  misc_feature (16)..(16): n is a, c, g, or t
  misc_feature (36)..(36): n is a, c, g, or t
  misc_feature (43)..(43): n is a, c, g, or t
  misc_feature (48)..(48): n is a, c, g, or t
  misc_feature (105)..(105): n is a, c, g, or t
  misc_feature (246)..(276): n is a, c, g, or t
  misc_feature (472)..(506): n is a, c, g, or t
caaccccacggggccnccccacagccggggaccacnggccaangcccncccagccgggacggcccaggttggtgaagggccaaatggtaaacctcccaagggttnaacctcacccagaaggggtaaaggggctcccccacccggccaccctggtcctataaaaaaagtatactctgattacctagaatggatttttaaaattcaattcaaagattcaataactatcaacatttcctaaacactgannnnnnnnnnnnnnnnnnnnnnnnnnnnnnnaatatcctgcaggtaataacactgatttttctaatactcagaaacatctacttagcagttgtgatactaatttgcaaaatgtaataatgttatacaaatataagatactactaaatacatagtagaaataattgcatgattcctgatatttatattcaaggtataaacatgactgatttcgctgatactacagaannnnnnnnnnnnnnnnnnnnnnnnnnnnnnnnnnnaatatctcaattagatatttttgttcccaatctctttcagacagatctatgaaataatatagaatacactatcaatatgttctttcatatgaagtgaaaaaaatgggatttaagtagtgagataatttctattttttactttttt

SEQ ID NO: 347487 - DNA, 603 bp, Homo Sapiens
  misc_feature (207)..(237): n is a, c, g, or t
  misc_feature (441)..(441): n is a, c, g, or t
  misc_feature (460)..(460): n is a, c, g, or t
gggatcacaggcttcagccaccatgcccggactgctaatgtttgtgaaaggcaaattgtaaacttctatggtttaacttcaccagaagggtaaagggctccccacctgccaccttgttctataaaaaaagtatactctgattactagaatggatttttaaaattcaattcaaagattcaataactatcaacatttctaaacactgannnnnnnnnnnnnnnnnnnnnnnnnnnnnnnaatatcctgcaggtaataacactgatttttctaatactcagaaacatctacttagcagttgtgatactaatttgcaaaatgtaataatgttatacaaatataagatactactaaatacatagtagaaataattgcatgattcctgatatttatattcaaggtataaacatgactgatttcgctgatactacagaataaaaaaantaaagctgctatgtaaaanattaaagaatatctcaattaggatatttttgttcccaatctctttcagacagatctatgaaataatataggaatatactatgcaatatgttctttcatatgaagtgaaaaaaatgggatttaagtagtgagataatttctatt

SEQ ID NO: 347488 - DNA, 377 bp, Homo Sapiens
gtttacttatagtaatgctatatttttctttatctgccctgtgatttcgcttcgtgtccttcaaagtttttttattgtaattttaaaggaaaaaaacaatgtatttttatttgataactaggcaaaatcatttgccattttttatttcataaatatttatttttctatctcatacaatgatcagttttactttaaaaattctgcatttctcttgcctctcatgtacttcatccagttatttattattgtaaaatgttaactggagatactgcattcagtcggaccacttaacacttaccaggaatgttagtgtttcagctgttttagtaagtgaccaagtaagctatcaccttgtgatagctaattccatctttttg

SEQ ID NO: 347489 - DNA, 1055 bp, Homo Sapiens
  misc_feature (504)..(504): n is a, c, g, or t
  misc_feature (603)..(606): n is a, c, g, or t
  misc_feature (609)..(611): n is a, c, g, or t
  misc_feature (613)..(616): n is a, c, g, or t
  misc_feature (618)..(618): n is a, c, g, or t
  misc_feature (622)..(623): n is a, c, g, or t
  misc_feature (626)..(627): n is a, c, g, or t
  misc_feature (632)..(633): n is a, c, g, or t
  misc_feature (648)..(648): n is a, c, g, or t
  misc_feature (650)..(650): n is a, c, g, or t
  misc_feature (654)..(654): n is a, c, g, or t
  misc_feature (658)..(658): n is a, c, g, or t
  misc_feature (670)..(670): n is a, c, g, or t
  misc_feature (684)..(684): n is a, c, g, or t
  misc_feature (689)..(689): n is a, c, g, or t
  misc_feature (710)..(710): n is a, c, g, or t
  misc_feature (772)..(772): n is a, c, g, or t
  misc_feature (830)..(830): n is a, c, g, or t
  misc_feature (890)..(890): n is a, c, g, or t
  misc_feature (963)..(963): n is a, c, g, or t
  misc_feature (983)..(983): n is a, c, g, or t
  misc_feature (993)..(993): n is a, c, g, or t
  misc_feature (1016)..(1016): n is a, c, g, or t
  misc_feature (1033)..(1033): n is a, c, g, or t
  misc_feature (1041)..(1041): n is a, c, g, or t
ctcgtgagcttaggccgctggttttggtgatttttgtctgattgcaatgtctggacgtggtaagcaaggaggcaaagctcgcgccaaagcgaaatcccgctcttctcgcgctggtctccagttcccggtgggccgagtgcaccgcctgctccgtaaaggcaactacgcagagcgggttggggcaggcgcgccggtgtacctggcggcggtgttggagtacctgaccgctgagatcctggagctggcgggcaatgcggctcgcgacaacaagaagactcgcatcatcccgcgccacttgcagctggccatccgcaacgacgaggagctcaacaagctgctgggcggggtgacgattgctcagggcggcgtccttcctaacatccaggccgtgcttctgcctaagaagaccagcgccaccgtggggccgaaggccctcgggcggcaagaaggccacccaggcctcccaggagtactaagagggcccgcgccgcgccggccgccagntccccatgccaccacaaaggcccttttaagggccaccaccgccctcatggaaagagctgagccgcttcagactgcggggcaagcgggccgcggctcccnnnngcnnngnnnngntggnncgnntttgnngcccggcctcgagtntncgcncgcncccgctcccgtnccgcaccgcctgcngcgtnggcctcgggccctgccctgtncgccgtccgccctccggtagggttcgggccttccggatgcgggttgggcgctcttcgggganctccgtggcgcggaagacccgagcctgccggggggaggccggcggcgccgcacctgcncgcctcggcgttcgtgactcagccgccccatcccgagtcgctaaggggctgcggggaggncgcagaccttctggaagacttggccttccgctctgacgcagggccgaggtgggcagtccaggccgagagcggncggccctgaaggtgagtgangccctcggcngctgcagccggggtgtctggtcncccccggcgtggtgctnagcccggnatttcagacgcggc

SEQ ID NO: 347490 - DNA, 793 bp, Homo Sapiens
caaggtgtttggcttgtagctcgctgtccgacagaggaagccactgactttatggatctaaaagactttgcaaggacagtgactgttctgccaaaaaaggagccaaatggtatcaaacgggattgaaagttgagggtgggggtgagggatggggtccgggaattccattcaggaaaggctggtaactgtcaccaggggaactggcaagggaaaaaaggacgggggaggcatgcaagagcgagaatccaaaaaaaagtggaaatggttaggggagaaaactcccaaaagaccccggagtacgtcggaggtgagtacgacaatagcaatcttttccttcgtagaggacaggggaggagtccctactcggctgcaaactctggatgagggctggggattgagagcttcccagagagcatcacaagaaggcgtcgcaccactctcgaaggcatccgaagcagtcccgggactgcttggcgttggcgccacaagtgtctttcagccattcccggaagaggtcttcatctttctttagcaccagaaactggccaaggacaacataggccttgtcaaaacccctttcctccagcttcttgcccaggacttcaccaatcccagccaggctccccactggcttctcccccatgggctctgccacgaagtctcggtgcttttgggaggttgtcatcttgatcaggcttaatccgcaacttcagttcccgtaacggttcctcccgccacccggccgctcctgcggatacctcaagccactagaactttcttccacttccgcccc

SEQ ID NO: 347491 - DNA, 358 bp, Homo Sapiens
cacctaaagtaccttaattaaactataaagatagtgagacaggatactcctaagacatctttattatttaaatctctgggaatcatcacttccttcatattaatcttcctaaaacccatctttacacattatctccctgcttaaaatatactttccactaaatactttaaatttagcatttattccatactccacccctttcggatctttccaacctcatcactcctgtattacctctgtatctttcatcataggggttcaagaacctaaaatgtcctctctccctttaaactcataatcatatccatttttcaaagcccagccaattcattactctagtatataattttttgttcct

SEQ ID NO: 347492 - DNA, 673 bp, Homo Sapiens
  misc_feature (23)..(23): n is a, c, g, or t
  misc_feature (44)..(44): n is a, c, g, or t
attggggtccccctgaaggaagnaacctttgggggaaataaaangttccacacctctgaaaacaaggaaatttgggaagacatggggtcccatgtcccttcctaggcaggagtttgggggaccctgagatttcctgtcccctatgacaaaaggcctaatggaaagggggcttctgtttccttaagataggaagttttggaacttgtgtttgattctcctgacacaaagagtctggggagatgcaggactcaggagtttctaagtggaaaggtggaatggatgtggtggttggggaagtcttttttgactgattgagggagtgggacagtgagtagaaagcttctaatgggggcaggattctggggacacagagaagggctggaagtccccgtagtctaggggtaaccctgcgggccaaactcatggggatcacgtctccaaatctttggatctcgtggatcactgcctccatgtagggcatcttggcccggtcctcaaacttgggctgccggttcttgccgatcactctgtcaatctcctcatggaccttggcctccacctctgggtgcttcatgagcagcaagaagccatagcgcagggtggtgctgaccgtctcggtgcctcctgcatgcggatgagaaaggagtcgatgaagtcccgtggggaattggga

SEQ ID NO: 347493 - DNA, 616 bp, Homo Sapiens
agatcagcagattccatgctcttccatggatcttccaacaaagagagctccaggtgatgcctcttctgtttaccaggactgataatgccaggtgtgtcaagtagaatcacctgggtctccttctctgtgatgacccccagagcttggcagcgagtagtatgcaccttcctggaaacagggaacacctttcggcccagtagctggttggagagtgttgacttccctgcattcggggctcccaggaggaccactcgtaggacccgggaattctcaggcatatcagggtgatggaccaagaggacatcctgctcatctctgttcatggacaccgcggggacgcaaggagtcaccgaactgtcgggctgagagaatccgaggaagtggtccagggcagagccctggccattactgcgagaagccgaggccaagcggggaccagagaaagcggaccccgcgacgcaggacacgcacctccgttggaagcctaagagtgaggaaaaaggaatcacccgctccctcgcgacatgagggcccacctgccagactcttaacaccgattgaacaagcctagccccgcgccagctgggggcagccattacagccgcaaggcactgcg

SEQ ID NO: 347494 - DNA, 667 bp, Homo Sapiens
atggggacgagcagacacactgatctgaacatctggcccaagtgaagcatggcatatagtgcccttggaagaaaattaggcctcaaatgacagtagcattgaagtatttgctgcagagttgagggaaacccccagccaccctcccggaatccgagatagggtggcacatctgtcctgacagacgaggagtgtaactgaaccaggaatatttcctccattcctgctctcccactgcacacagggtggtggcacattatccctctggggggtggggacgcctgttgttttggctcaatttgggtttgttggtcacatggagctcttccatttcgtttagctgaataatgagttgttcctagaggagacagcctgtctctccttgttgcccccaaagcccatgccctgccgtggtggcagctggggctgtggatgggaggggtccccaacatggatgtgttgcccctcctccgcatgccaacgcggttcatgtacaaggcccctctgcaactggagagcagcttactgcagcactgttggtgttcggagctcttctgtgccctggcttcatgctttcacctacacaagcatcacctttctaatcaccgcggagtggggagcgtgtggctgtgccccttctctttaatctcattttttttattcatgctcg

SEQ ID NO: 347495 - DNA, 354 bp, Homo Sapiens
tttagaaagacttttttaagaaaaacaatgttaatataaaattaggtacagggtcttggaaggggccctgaagattaagcttccttagcgtcacaataagtccgtatctggttgcaattgctgatgcttcagtgagggtatctaagggtaattttatgtctgaaagtgtatgcagttgggtcagagcatgacctttaagatagcctctctcagctaacatatttatgaagatgaggcctggtgacccagcaggttcattggatacataagtgagaattcctggttcatgggcccctatgactctggagtatgcagacttggccattcgtccattgtggcctgcgggtcgccccc

SEQ ID NO: 347496 - DNA, 1035 bp, Homo Sapiens
gggccgcttttggctgcatcagccggggattgccggcgccaggtgctgggggcgactcggacagcgggagcgtggggtggagtaggatggagtctccctcccgagctgggggtgtgggcctaggaaaggctgcttcgccgctgtgttcggagagctctggatactgcggggcttttccgcggaggagcgcccgccggcatctgcatctgggaccgacctcctgggctggctgatcaaacaggacaccgcatcaatgtctgctgtgggggctgcaactccatacctgcatcctccgggtgatagtcaccgcggcccgagtgagtttcttgggggcccaacttccctcccaggtgccacccacggccccgctaactaggcgacctagacaggaagaccctccagacagttgccgaattttgagagacacccccccgcaggggggaggaactgtcgaccagggccgcgccaccgtcttgggggtcaaacgccaaccccgcccggagggagcagtctggggcggccatggctgggcacggcttgtacccacccctgcctccaaatccgggccccttcggtcttgccccccctcaccacgccttgagaaaccttcgaatcccgtttgcaggggacccaggcctccgcggaacgcttcctgcccttaccaccccccattcccgtgcgccccgacgcattacgcgccaccccagggcgcgattatggggcagccccccaggcgggttcccccttctttttcccgcgccctcgccgtgcccccacccgcccgacaaagcgtgagccccctacgatcttggtcgtaccaccgcgtatcaccttcaaaatttccaccgcgcagcgccccagatctggcagatggcgcacgccccaaactgtggcccccagcccgcagcggcaccccactgtttgtcgcccgcacccctccgacgcgcactgacccgcaacaaacgcgccactgatccatcagaaatataccgtcgaggcgcgctttcttatactcaatcgggagcccgcccaccc

SEQ ID NO: 347497 - DNA, 466 bp, Homo Sapiens
ttttgctgcagaaaggcttttactgggcagacggggtgagtctcaagccagtggaccagtgaggggtgagggcacgtcctccgaagacaaggggtccgtggtccttgttgttacatctgccttggttgatctcagggaggttgatctttcttagggagaactgtgggggtggggatgtagccttgggagggcccttcaagaagtaagagttgggggttggggagtgtggtaaatctataaacttgtaaggacgtcagcactagttactaatatttggaggcagtgggagatgctggccccaaggttgaggtatccgttagagcagaacaattggacctagaaccgggttttaccttggggttaagtgtaaagtaaccaatatcacttgagtggagaaatggagagaaagggttgtcactgtccagcactacacagctgcaggcacacagatggtacacattcccag

SEQ ID NO: 347498 - DNA, 353 bp, Homo Sapiens
gaaggcacccccattcccaccctgtgccttccttgcgggcagagagggagagaagggctccccagatctacacccctccctcctgcatctcccctggagtgttcacttgcaagctgcccatgatggcctctggttgttctgttgaactccttgaacgtttagaccctgcacacatctggaaggagctggcccctcagtcccttcctactccccaacaaggggctcactatccccgggagctgttggggacccacgacgcagcccctgtactggattacagcatattctcatctctggccccgaggctgcctgtggggcgagtggagacctcccatcactgagacagatcacag

SEQ ID NO: 347499 - DNA, 844 bp, Homo Sapiens
  misc_feature (59)..(73): n is a, c, g, or t
  misc_feature (196)..(196): n is a, c, g, or t
tctgtgccccagatttttccttgggaaccagcatagggcccatgtttcactttccgttnnnnnnnnnnnnnnncccaaagaaatggttgtagaaaagctttttgaagggtccgagggcggccgggcccggggattaatagagggggcgggtatagggggttgatgtaagaaactttattgctcagaaccttccctnccctggccaatggaaagagcttgggagaccagcccatgggggcagagtcagaggcactggggtgtagaaaagagcgagcgtgtggcacatttggtccattgtcatgtgcgggtatggcaggaggagggggtaatgtagaagccgcacatctagggcgttctagggacccagatatgcccccgtaggcaaggctcacatgccaaagcaaagcagatgaggtcagcctggcttgggttgagggctccattgcctctttagccttgcccctggggttcttggaccttccggaaactgagccacatcaggctcacgttgatagcataggtggtgatacaaacaatgcagaaatcatagagcacgaagaacaggatccaggccaggtagacagaaccagcgagagacaccagggagctcagcagcatcaggacagaggcccagcgtgtccgcaggcaacctggaggagaagacgcgcgaacagctgatggcggtgcccacgtcgcagagcgcgcggtaatcccggtcccgggcgcgcgccgccttcacgtgcagcgcgtagagcgagagcactaagcccgtcaggcaaagagcgagccgcacccagccagggctcccccaggtgctgcccattatctccaggttccgcccccc

SEQ ID NO: 347500 - DNA, 1149 bp, Homo Sapiens
  misc_feature (73)..(73): n is a, c, g, or t
  misc_feature (76)..(111): n is a, c, g, or t
  misc_feature (157)..(272): n is a, c, g, or t
  misc_feature (939)..(952): n is a, c, g, or t
  misc_feature (954)..(958): n is a, c, g, or t
  misc_feature (961)..(965): n is a, c, g, or t
attgatagatcatatagggcgccctgcgttaagcgaacgacgagcgcagcgagtagatgagcgaggaagcggncgnnnnnnnnnnnnnnnnnnnnnnnnnnnnnnnnnnnnagtcgacggtaccggacatatgcccgggaattcggccattacggcnnnnnnnnnnnnnnnnnnnnnnnnnnnnnnnnnnnnnnnnnnnnnnnnnnnnnnnnnnnnnnnnnnnnnnnnnnnnnnnnnnnnnnnnnnnnnnnnnnnnnnnnnnnnnnnnnnnnataaatatgggtcatactggctactttgtagaaaatggattgtaggggcaaggtatgagagcaggattgtagcacaaaatctcacacatggataaacatgtagaattgatcacacatggttggcagctgaggatgagctgtgctgagtcattgactttacctctcaagataaaaagacaaaagaaaatggtaaaagtaaactttctaattagactatttcaaacccctggattatgtataaaatatattgtttatgtattttcagaaggggaaatgaacagagaagtaagttgtttcttagattaaaagatagaacagccagcagattccattcattcgcttcagctggagactaagagaacaggaggagagggcaagtatttcctgccatatattcagacagtgagaaagtgttgccatgatttagtttagatgaattataatggcacacacaaagcacaagctgccttgattcaacaaagaagatggaaaacagaagccgctctgatcagtgaggaagaaaagaaaattacgaagacaagttatgtatttgctctgatttcagacactccgaaatgtattttggtcctgggggtggcagaattattaagaaaataacaggacccgcctcatggcatttaaaaagaataacccggcatggtcaaannnnnnnnnnnnnnannnnnaannnnnccttggtcgggccgccctcgggccccttcgagaagcctttctaggaaaccattccttttgggcggcgcggggcccccagaaagggtaaagggaaacatggggccctaaagctgggttttcccgaggggaaaatcccgggggccctggagaataggggggtttggggaatttcccccacccaaat

SEQ ID NO: 347501 - DNA, 343 bp, Homo Sapiens
  misc_feature (172)..(172): n is a, c, g, or t
aaaaattccccacaagggagaaagggaggaggaggcagagagcttatcaagaggttcaccctatatggggctggaggttggatctactggggtgaggaaaagggtgtagaggattggggcactggggcaggggcgctggcacattcctcagattctggcgggtcatcatggnatctcaatggagaccacgaagcccacgaacgcaatgaataggtaatcatccagggtcagggtcaggtggcaggccttgaagctctcctcagtgagtgagaagagcggggcgccctcgacttcaggagggccccggcactcagccagctgagaatctgctgtacagcgctgg

SEQ ID NO: 347502 - DNA, 1317 bp, Homo Sapiens
aaaaacatggaatacatatttatttctactttaaaatctccatttatatcttataagctttgaaatgcaagtacagctttaaagcatcataatgactaattataggtgaataataatacagacagtctatattctaggaggcagctgtaggcgttttaattggaaataagcattctgagataatgataatagcagtgtagaaaaatgaagttaaaaaaattcaaagtgttgagaatcctcctgtccttctgggatttttattttaatcatctcctccacagagaacaagcagtactttcctgtagtctccagatgtgtcacccttgatgaacgagtacagagactttccatagagtctcttgaagtgtgcccggatatccaacatgtcaatttctgctcgagaaaccatcactctgatgagggtgttatcatcggtgcccaagcccttcatcgatttatagagcttttcagcaaaatatgcagatttgttcctcatgcactttactatagccagcagagcatcttcaaagctaccagatgtttcagatttaatactctgttcaatatccttctgtgatatccttttgtattcatcaaacacatggcaacaggtgatttcggttccgggaacagagaacagttagaaatttcacctcgatctgtgccccatttcttctctccagcctcatacaggtcctgggcatccatgtctcacgagagcatcgtccagataatttccttcatccctcccaccagctgacagagacaccagcactcgctggaacatgaacgatgtgtcagagcgaatgtcatcttcaaggctccgtccatattgctgctggtaggtttggcttatgcgccggatctcctcaggggtccgggaggccaggatctcaattaggcaggcctcatcagtgccggctcccttcatggcccttcgcagctcttgcacgtcatacagcaccgtgggcgtcatcatccccacaatcacctgctcgaagttgccactcagttctgacttcaggtcgtctatcaagtccctgccgatggtgctcttgtaggctgtcctgatctcctggcgctgggcggtgttgcggtaggcaaggacgctaataatggcgtcttcatcggtgccgagccctttcatggccttcctcagggtctgggcatcttccatggcattgaatcctgaagcagctttgacagtacctcctttggttgccatggccatgactctaggtcaagatcagagttcagccacccaagcagaagttcttcgaggccgggctgcgcctcgtgccgaattcgccacccagg

SEQ ID NO: 347503 - DNA, 829 bp, Homo Sapiens
tccttggaaaacccctttttccaaagttttcttccctttggtggaaccatgtggaaaattctggggccagggctgcaactgtgggctagctccaatggtttgttgcatttcaggtttctcctcccattacttggttggaggatgatgagtgaagacttgatggcttctttcaaagtcataggacttggggtaaacttctgcaaaggagctctgggcaccctctgaagcagagccaattgctcgagcatcacactgtacaaaggtcccagatgggtccatatgaaacagctggggtcctttctcatcaactcctccaaataataatgctactccaaagggacgagacatggcacctggatctgcatcttcttctccaaactgcaaagccagattggacacagcttgggtcacactctccactgtcattgtctcattgtaggtgaaccagtggttctgtgtctccactctggctttatcaattaaagtcttagcatcagcaattagcccactcatggcacaacctatgtgagcatcaatctctacaattttctcaatgctgctgggctccatcagtggggaagtaattctcttctccacagctaggcacacaccctctgatgtctggatcccaatggctgtagaaccaagcttgatagcctcaatggcatattccacttgaaataatcttccttcgggagaaaaagtattcacgcccctgtcgtactcagaccgggtaagaaacatggcgagggtaggaggaggcagcggctacgcggggattctgaggaccaacacgactccaccggcacccaactcaccggcagccaac

SEQ ID NO: 347504 - DNA, 326 bp, Homo Sapiens
aaaaaaaggcccccagggcaagttatttacagtttaattgccactgtcaactgatctgggaccttgatcgggaccgggacctctggcgatccacaggtgctgggagacttaggtctacttggaggaccacgtttctgggtcttctcagggacgggaggcctactaacagaacgggacttgctccggctccggctcctgctcctgcttcttgaccggctgtaagatttgcgactacgggaacgggatcggctacgagacctagaggaacttctggtccgggatcgagacctgcttcttgacctactgtgccttttgctgccttcaat

SEQ ID NO: 347505 - DNA, 547 bp, Homo Sapiens
gcccagctggcacatttattggcattaaaacacaagacacttcccatcaccaggaagccacgcccaaaggggtgtccctctgcccccatttctgcaaaaactctcaggccttagcagtagcctgagctgcccccagggctgtgagctgctgaatcttctgactcatcatttccatgacggcctgtttcatggcgtgcttctcctgaagagctggttggattttctccatctgcttggttagaaaatctatcttcctcttgaagaagtccttggcatcctcagctgtcttctctacatagtacccagttcccacatcgatgagcacgtgttccacatcatgcagcttcccagggacatacatctggtccagctggttcttgagcatttctagctgcggcagattcagctccgtgatgttaatagactgcgccatgttgggaaggccgacttaacgaagaggaagtctctcggcgagcaacgctctagccgtcctctgcgcgtctcggtggcgccgggaggcctcgctgcgccagccagctctatccac

SEQ ID NO: 347506 - DNA, 731 bp, Homo Sapiens
gtcggacgccgccgcggcgcgctctgcagactccgggtcgccgctcctgcgggacgcgttggccggggcgcgcggtgcttggctgcggtgctcacactcatgaggagccggaagctcacaggtgcagtgcggtcttcagcgcgcttgaaagcacgaagttgttctgcagccaggttggcctctgcccaggaagttgctggttccacgtctgccaagacagcatgtctgacttcctcatcccacaaagccacagacaggcgaacgtccaagaagttcacatgtgacacaggacatcttgtgaagtcagaattacagaagcttgtccctaagaatgacagcgcttctttgccgtgacacctgagaccccttgtgtgtgcacagggggctgcaagagttcctctcggtggctgcagagttgtgagagactctcgctcagcacagactagagatggcctgtgcgtgccaaacacagtgccgggtccggagcagaagaatccaacagcagctccactgtgcagaagcagaatgaggcagggctacagacagaggatgtgcagaagccaccactttagatggcaacagcgtctttctagatgacgacagcaatcagccaatgcccgtgagccggttctttggaacgttgagctcatgcaagaccctccacctgcggtctcatccagtccttctatgagcgacgagagttcgaatgccttcagaggcgagatgatatg

SEQ ID NO: 347507 - DNA, 368 bp, Homo Sapiens
cgcagtaataagggcatcgagcaggcacagaacgaatacactgaactgtggcattcatgtaacaagtgttaccaaggtttgtcaatccacatggtaactccatagcagatgctaactgttcttctgtcatgtcttctacgaagacagggctgagggttcttctggaagagcatctgctgaccccatcattagtagagtcattccattttttattttgatgtttccccaatcatcatcctttagcgttcctcctttcaccataactttctgtctggcaggctggactccagtcaacgcaaacagctgagccttgaataccattggaggttcatctgtattcaattctacaccttcaaatttctcctttc

SEQ ID NO: 347508 - DNA, 370 bp, Homo Sapiens
ctccgcacagccggccccctagagtcttcagaaacagaggaggcctcacagctgaaggagagactagaaaaagagaagaagttaacaagtgacctggggcgcgccgccacgagactgcaggagcttctgaagacgacccaggagcagctggcaagggagaaggacacggtgaagaagctgcaggaacagctggaaaaggcagaggacggcagcagctcaaaggagggcacctctgtctgagtttcctctttggaaaaagaagttactgttcaacttacccaggtccaacttccggtagctccgagagaagccatgagagacaagtctcttagagccacagaagtagaccttccagagccccagtttgtaa

SEQ ID NO: 347509 - DNA, 279 bp, Homo Sapiens
gccgccagtatcaaacagaagcaacccgtaagtgtcgaagttcttcctgagtataactacttgctttttgttggtaaaaagttttgtaccgtccttggcgtggccgccgcctccgaggacctgagatcccggctcggcctccttcccatgcttctctcgccgcgggcgctgacagggacgccgcggccgcccgcgctctgtctcccgtcagggtcacaggcaagaggcaaccccgggacgcccggcagcctgcgagaacatgtcgactttctctcgtgc

SEQ ID NO: 347510 - DNA, 669 bp, Homo Sapiens
  misc_feature (595)..(621): n is a, c, g, or t
agaagaaaaaggcaaaaggaaaaaaggataaactacttcttggagcaaaaatacgtaagaatgtggggttgctggcaatgcagaccccttaccgataagtgttccaaaacaagtgttggcctcaacggggaagggcgggagggcaggacggcatccaaccctttccagaaattgagcagaccaaacccgccttgccagccactgaggggaagaggtgcaggtcaaggggaaaagcatggcagctcaaggaaggtggctgagacatttattatcaacattgaaggacaggtcgagtcattctgactcctctgaatttcaaccgactgatttgcggaaaaatatcctggcatggaaattgcggcagctggaggccgcgctccagggacccaccgcggggtgtcagcaggacagaagcactcccaggccatttctcacgcttctttagaaatgcaaaaaaagtcagagattttaaaaaaacagctgatgtggacaaaaggcagacccaggctctaacccagctacagaaaggaagtggccgtgccactgagacaggcggtcacagacacacgcagattggtctgtccccagagggtcnnnnnnnnnnnnnnnnnnnnnnnnnnngaagtgggcttgcttcttccggacggtccagtgcaggcactgggcgag

SEQ ID NO: 347511 - DNA, 671 bp, Homo Sapiens
  misc_feature (38)..(38): n is a, c, g, or t
gcaagaaaaacaaaaccatcaaggaatgggaagggtgngaaaggggaaagacaaaaatcagggaaagatctggagacaccaaaaaaggtaaaggagacccagggccggggggataaaagtacagccactggtggcagagtcacaacagaaaacacaatggtccccccaccaccacaagccggggggggttgatgttccaggagaagggagacaggggcagaatctggggggccacaaaagagtcctcagggagggacaccgagggagcaacatgggcagaaaataggcgctcggcacaggggggcatccggtgggtcagggcaaggagacgcggggacagcagtatttggacaggggcaacctccgggtgtaatatgtcttccgccaagacaagttggctatagggattcgggaccggtgcccagaaggcggcgaacacttggtcccaggaagtctggagcacgctctggcacaggaaatacttcaccatcgtcccggccgaagcgggtgcagcacccgcgcagcatcaggggtgcggagcctgggaggcacgcgagggccgggccgggccggggctcggcgcacacccgccgccaggctcgtagatcagtcagcaccgcgccgcgcccaagcagctctcgtgccgaatgggcacgagcggcacgagtcta

SEQ ID NO: 347512 - DNA, 455 bp, Homo Sapiens
aaattacaatcattttcattagaaatttgtgaactccttttctgtacatagttgaccacctctctatttaatattttattatttaaggaatggctatctgaactgctggtttgttttattttattatctgtctctaagttcttttctttatttgtaaaatcatgggctaagggtacattacaatgaactgaaaaaatactcctgttttggtctctaacagatggacaaccgaatgatttgtcttcattagtcatttgttcagatacatttttttcactccaattattgtttccatttttgcaagtcaaagaaaagttattcgtagtattaggattatgtgaaaatctctctatacttcgatcggcatttctgttagtcaatggttgcaattccttagtttccatctgttctttctggacagtttcttctgcggcctcctccgtgcttttggtctt

SEQ ID NO: 347513 - DNA, 763 bp, Homo Sapiens
  misc_feature (31)..(31): n is a, c, g, or t
  misc_feature (48)..(48): n is a, c, g, or t
  misc_feature (51)..(51): n is a, c, g, or t
  misc_feature (53)..(53): n is a, c, g, or t
  misc_feature (102)..(102): n is a, c, g, or t
  misc_feature (104)..(104): n is a, c, g, or t
  misc_feature (121)..(121): n is a, c, g, or t
  misc_feature (163)..(164): n is a, c, g, or t
catcaaatccctttccttttcccagcaactncgtggggcagataggcnttncnggggccttaagagagacccagtctggctcaaagccgacacaatgcgctngncatgccaatcattttcnatcatttccctcaagttgtgaacaagtgctaattcctcgggnncaatctgttcagggaagcgctcatttgtagttttgaaattcttcagccaggttgaagcctctaaaggttgatcaaagcgctgtttgttgtagctggactgcagaagatcccgacaatttttcacccaaagatgagcatctggaatatgtagtatcagccagtcctgttttgcacagaaatgaataacatggcaaagacttagggtttttcctgttcccttctctccatacagaagatatcgtatagctggataagcaaaactggtgtttttcaggtaatgcagaagttctagggctggtttccttaccatcaggcaagcttcactgaatgtcttcaccgggtcattctcattggtgcgggaaatagctctcggactctcaactggaacctggttatctaggtgagcagcaatgctttggcgagcctgggtccccatgtgtaaaaaacgcccagggtccaacttatggatcctagagataagccttgttattcctttcagcatcatccttgcacgtgagtcgaggactagttctccagactaggcgaccgacacacgctgcctggggccggctccaaagcgcccgtcctgagactgcccc

SEQ ID NO: 347514 - DNA, 148 bp, Homo Sapiens
tgaatgccaagtgtcttctgtactttcttttattaacatcatagtctttgcatcaagatacatagcaatgatagcaggtttctttttaaagcttagtattaaatattaaatatctttccccatttaaattttacattactctgccaag

SEQ ID NO: 347515 - DNA, 416 bp, Homo Sapiens
aggtgcattgcccctgtgggtgcatgcaagcttccctgtggctgagagtgagttccagagcgggagtgcatcttctggaatgcatcttctgccagcagcaacactgttctctcaagcagcttgggtgttacccctgaaaaggtcatctgggcagagctccacagtgtccccacatgcagattctccctgtggtgtgtgatcacaaaagcgcccatacatcctaactgatgctccccaacactccccagacaagggtgctttcccctgaggctgtcattggatgtctggtaaatgttgattattgctaaagccttcccacagtccctacacataaacttctctcctaagtgtgtccgtgcatgctcaaggctgactgatggctacagttgcccgtactctatactcataaggctcct

SEQ ID NO: 347516 - DNA, 823 bp, Homo Sapiens
  misc_feature (671)..(671): n is a, c, g, or t
  misc_feature (726)..(726): n is a, c, g, or t
  misc_feature (728)..(728): n is a, c, g, or t
agggcggtaactctgggcggggctgggcgccagggctggacagcacagtccctctgagctgcacggagacctcgcaggcccccggaactgtcgcccttccaggatgtggctccctgctcttgtcctggccactctcgctgcttccgcggcttgggcagggcatccgtcctcgccacctgtggtggacaccgtgcatggcaaagtgctggggaagttcgtcagcttagaaggatttgcacagcctgtggccattttcctgggaatcccttttgccaagccgcctcttggacccctgaggtttactccaccgcagcctgcagaaccatggagctttgtgaagaatgccacctcgtaccctcctatgtgcacccaagatcccaaggcggggcagttactctcagagctatttacaaaccgaaaggagaacattcctctcaagctttctgaagactgtctttacctcaatatttacactcctgctgacttgaccaagacaggctgccggtgatggtgtggatccacggaggggggctgatggtgggtgcggcatcaacctatgatgggctggcccttgctgcccatggcacaggggatgaacacagccgggggaactggggtcacctggaccaggtggctgccctgcgctgggtccaggacaacattgccagctntggagggaacccaggctctgtgaccatctttggagagtcagcgggaggagaaagngnctctgttcttgttttgtctccattggccaagcctcttccaccgggccatttctgagagttgcgtggccctcacttctgttctggtgagggtgtgc

SEQ ID NO: 347517 - DNA, 357 bp, Homo Sapiens
cccgtggcagccccccggcgactccccatcttcaatcgcatctctgtttctgagtgacaaagtgactgcccggtcagatcagctggatctcagcggggagccacgtctcttgcactgtggtctctgcatggaccccagggctgtggggacttgggggacagtaatcaagtaatccccttttccagaatgcattaacccactcccctgacctcacgctggggcaggtccccaagtgtgcaagctcagtattcatgatggtgggggatggagtgtcttccgaggttcttggggggccctctgtctcctagaatcttatgtgctgtgaattaggccttcactggccctccagtttttatg

SEQ ID NO: 347518 - DNA, 1519 bp, Homo Sapiens
  misc_feature (4)..(4): n is a, c, g, or t
  misc_feature (38)..(38): n is a, c, g, or t
  misc_feature (402)..(433): n is a, c, g, or t
ttanctttattatattcctagtgtcactgacattagtntaaaaacagcctgcaacaagaatattctcatcaccagccaccttttccacctttcttctttttctgttgctgtttcttttttgttgctggagcccctgcaggtttctggtgtcttgggggtatgatgttacttgtagaggcagaaactgttgcagcactgccaggtcttggggaggtgggtgggctgctcacagttttactggcatccagttcagatgaagctcctgcagttgctccctgggtcccttttccaatctgatccttctttttacccttctttcttccccggtagtaagaacgttctcgcattggcagccatctttctggatctggggtaacttttgggtcataattcttaggcaannnnnnnnnnnnnnnnnnnnnnnnnnnnnnnnagatctccctgtccttgttcctttggttgactatctccagtaacttttccacccttcttccgaatgtatgtagcaccagcagaattttcaagagccttaacatctacttttagagacatactatctgacgatggcaagtgtttactaagagctttggctttctctggatctacaagtgagttagcagaaataagctgtgccagggtgtgaatatcttttggattttgtttccacagctgttgtaggtcactaattgcctccttcttccgcccatatttgagtttgaagtttgcagcttctcttatcaaggacaaatgagcaggagattttggctgatggttttgataccactggatagcttgtgtgaagacctcaatggcactatcaatatcttcttcatggctatacatggtaactaatgcagataccatgcctggtttatgctttaactcctctatgcttctcaatattagacatgctttagaaatattaccttgagaaattttcaactgtgccatggtcagcttaatttcagctgcattttctggatgctgatctgaaaattcctgaagcagctctattgcttttgtgtgctgcttttcacggcagagctgggcagcttggattaacacaggtaagagatgctcgggactttgggactgtaaactggcagatattttgcggcattgttcagccttgttaatggtaatgatgttatttgcaattacagctagtaatcccacatctgttggttttagttttattatttgattgtaaagttgcaaagcctcctctgttcgaccctgaagctgcagaatataagccatctgaccatgaatgatggccagttctgcctgtgggtcttcctcagtcccatcagtgtcttctgataatgaacggcggcaaagatcttcagctttttgtaggattttcatggcctggttcagctggccttggcctatcagtgcacatgcagtgttgtagcacagctcatgtgttccttcttggaggcccaggttctctggaaccactttttcccaattgctttgagctgcaacaactgctgaaaggtttgttttcctctcc

SEQ ID NO: 347519 - DNA, 637 bp, Homo Sapiens
  misc_feature (234)..(234): n is a, c, g, or t
ccagaacaaaatcccgcagtccacaaaacatccaccaccggccagaaaaacccaaaccaccaggttatcatgatccttgtacaagcatgggtctcaactcaagatgcttcttcatcgtgccaagtgtgtctgaatcagagccacatcgtggcttctggggtcacactcagcttaggctgttggttccacagagcactcatctggctgggctatggtggttgtggctctaaaatnatcaaagtgagaaccaagaaggcaacataataatgttatcagaaagatgttaggaagtaaggacagctgtgtaaagcttgaggctgaaaagtagcttgccagcttcatttctttggtttcttgggtagtgggcgccggaacagcaagatgtgaggttctggttcatggatcatataatggacccatccctgactctgctgaacgccaagattcctccattcagattcagacatcagatgggagggaccagcttggctatgtccttgggcagcatgacatgtcgatactcaaactcctcgtcgtcgtatttgtccgaatagtaaatttgtttgtgcgacatgatcgctcggtttgctagccttcagccccgcgccgccaacctccaagcaactcccaacagcac

SEQ ID NO: 347520 - DNA, 747 bp, Homo Sapiens
  misc_feature (560)..(560): n is a, c, g, or t
gctattgccagtggctcggagctatcagaaagtgccttcggctactttgtcacagcctgtgctgttatcattttgaccatcatctgttacctgggcctgccccgcctggaattctaccgctactaccagcagctcaagcttgaaggacccggggagcaggagaccaagttttggagtttcagtctccaactctcagcccaccaatgaaagccactctatcaaagccatgctgatgatgtttccagccgtgactgttgaggtcaagtccagcatcgcaggcagcagcacctgtgaacgttacttcattcctgtgtcctgtttcttgactttcaatatctttgactgggtgggccggagcctcacagctgtattcatgtggcctgtgaaggacagccgcttgctgccaagcctggtgctggcccggctggtgtttgtgccactgctgctgctgtgcaacattaagcccccgcgctacctgactcgtggtcttcgagcacgatgcctggttcatcttcttcatggcttgcttttgctttctcaacgggtacctcgccagcctnttgcatgtgctttggggcccaagaaagtgaagacacgttaggcatagacccgaggagccatcatgggcttttccttggtctggggcttgcacctggggcatgtttcttcttactcgtcccggcacattgtttgacggattgggccaggacctgcctgcctcccttccttgtttgcctcctgcccttt

SEQ ID NO: 347521 - DNA, 1367 bp, Homo Sapiens
  misc_feature (219)..(229): n is a, c, g, or t
  misc_feature (560)..(616): n is a, c, g, or t
  misc_feature (719)..(731): n is a, c, g, or t
  misc_feature (743)..(879): n is a, c, g, or t
ccaaatgtgttggcggtggtttttcacgcgtgagagagaccaccgtgggctcatttttttctcttaatagagagatggtcttcttgggagagaataattttgttttgtttttctaataggcaccaaccaccggggtgggggggagttgttacaccccgcatgtctgtaattgtgtaacacggtgggcgcacaataaatgagacagacatcttgtttctnnnnnnnnnnntttgttttccacacagtgggggcgaaaaattttattttctccctcaagtgcggacccacagaggggtttcatattaccccgcgcgggcgagaatatagagggttctttaacacacacccgcctctgttgggaaggggcttttcccccttgtggggcgaagaagggtctttaaataaattttcatcccacatccctcttatataaatgggaccaggggcgggggggtgaaatttaaaaattggaggccgcgcgggggacaccctctgtagagaaaatcccgaaataaagcccccccggaactccccatttggagatgtttttaaaaaacccnnnnnnnnnnnnnnnnnnnnnnnnnnnnnnnnnnnnnnnnnnnnnnnnnnnnnnnnnatagccccaagttttctcttggagaacaaatatttgcaccatttttcttttcccttttgggggccccggcgccaaacaaaaagttttaaaaaattttttagannnnnnnnnnnnncgccacaaaggnnnnnnnnnnnnnnnnnnnnnnnnnnnnnnnnnnnnnnnnnnnnnnnnnnnnnnnnnnnnnnnnnnnnnnnnnnnnnnnnnnnnnnnnnnnnnnnnnnnnnnnnnnnnnnnnnnnnnnnnnnnnnnnnnnnnnnnnnatcgtggcttccgttacatcttattctaactcaggtttacggacacaatgctggaaaaccaattcctgctctacccacgcctcaacttgttaagaaaaaacaggatctaacaccgaggaatgtcacatcttcgccattcccacttcctttctgccctaggcattcgatatgtgccaccaggggccatcaggactagggctctgcacccatggcagcagacaggtgtgaagctcagagtccctcctaacagcctccctccagcgtcttcttggccgcagcggcgaagcagctccgcagggcctcgaactcccgcgcgcagaagtccttactcaggcggccgcccggggccgtggaggcctgcacgcacctgccgtacgccgcggcctcggccccgcaggcggccagccgctcggggaaggcgcggaggcggcttcgcacgcggccccacaccgctccgttagccgacatgagcggctattcccctcgtg

SEQ ID NO: 347522 - DNA, 901 bp, Homo Sapiens
  misc_feature (881)..(881): n is a, c, g, or t
gggaggtgcagctgccggatccttcagcgtctgcatctcggcgtcgccccgcgtaccgtcgcccggctctccgccgctctcccggggtttcggggcacttgggtcccacagtctggtcctgcttcaccttcccctgacctgagtagtcgccatggcacaggttctcagaggcactgtgactgacttccctggatttgatgagcgggctgatgcagaaactcttcggaaggctatgaaaggcttgggcacagatgaggagagcatcctgactctgttgacatcccgaagtaatgctcagcgccaggaaatctctgcagcttttaagactctgtttggcagggatcttctggatgacctgaaatcagaactaactggaaaatttgaaaaattaattgtggctctgatgaaaccctctcggctttatgatgcttatgaactgaaacatgccttgaagggagctggaacaaatgaaaaagtactgacagaaattattgcttcaaggacacctgaagaactgagagccatcaaacaagtttatgaagaagaatatggctcaagccctggaagatgacgtggtgggggacacttcagggtactaccagcggatgttggtggttctccttcaggctaacagagaccctgatgctggaattgatgaagctcaagttgaacaagatgctcaggctttatttcaggctggagaacttaaatgggggacagatgaagttgacaagtacatgactatatcaggatttcaaattgaggaaaccattgaccgcgagacttctggcaatttagagcaactactccttgctgttgtgtctattcgaagtatacctgcctaccttgcagagaccctctattatgctatggggagctgngacagatgatcataccctct

SEQ ID NO: 347523 - DNA, 466 bp, Homo Sapiens
  misc_feature (89)..(128): n is a, c, g, or t
  misc_feature (439)..(439): n is a, c, g, or t
tgtttttttaacagatcaacacatctttattaatagaaacagacagatggacagagaatgcagcaggggctgtgtgaaaactgtgatannnnnnnnnnnnnnnnnnnnnnnnnnnnnnnnnnnnnnnnaaaaggccttctccaggccaggaagggccccttggaattaggcccacctgtctagatcctctcctcagtggtgggtcctgggctgaaaccagcttccacatcatacccccaaaggaagaatgggggtctttctggaatggaagacgctgacttcaagcattcttcaaattactctcgttccccagctgagctttgttgctgagggggttggggacaagccacaggggcacttgcatagcaggggagtagaatggggataaggcatatggtgaggacaggggagaaggggaagggcatcatagctgcaggtngaagggggcctccaaaaggcagctcct

SEQ ID NO: 347524 - DNA, 971 bp, Homo Sapiens
gtactggggtcgctgcctgaggcgcaggcgccgtggactccacccgccccggggcctgggctcgctgtggactcgtcatggcgaccgagcagaggcctttccacctggtggtgttcggcgcgtctggcttcaccggccagttcgtgaccgaggaggtggcccgggagcaggtggacccggagcggagctcccgcctgccctgggccgtggcgggccgctcccgggagaagctgcagcgggtgctggagaaggcggccctgaagctgggaagaccaacactgtcatctgaagttggaatcatcatctgtgatattgctaatccagcctcgcttgatgaaatggctaaacaggcaacagttgtcctcaattgcgtaggaccatatcggttttatggagaacctgtaataaaagcatgtattgtggagccagttgtatcgacatcagtggagaacctcagtttctggaactaatgcaactgaagtatcatgagaaagctgcagacaaaggggtttatatcattggaagcagcggctttgactccattccagcagatctgggagtaatatataccagtcctgaggggttgagcattcatgatggtacctggaagtcagcaatttatggttttggagatcagagtaatttgagaaaactaagaaatgtatcaaatctgaaacctgtcccgctcattggtccaaaattgaagagaaggtggccaatttcttattgtcgggaactcaaaggttattccattccttttatgggatctgatgtgtctgttgtaaggaggactcaacgttacttgtatgatttagaggaatcaccagttcagtatgctgcgtatgtaactgtgggaggcatcacctctgttattaagctgatgtttgcaggacttttctttttgttctttgtgaggtttggaattggaaggccttctcatttcccatggttcttctcctttggcttttttc

SEQ ID NO: 347525 - DNA, 493 bp, Homo Sapiens
  misc_feature (17)..(17): n is a, c, g, or t
  misc_feature (45)..(45): n is a, c, g, or t
  misc_feature (51)..(51): n is a, c, g, or t
  misc_feature (60)..(60): n is a, c, g, or t
  misc_feature (242)..(242): n is a, c, g, or t
tcaagcttttgcttaanccccaaagccaagccaccaagccttatntgcctncacagcctnagctttgttcatttcttcaccccagacccgaagggaaggagctggatccccaatggcaggggttcgtggctgaagacagaatcgctggaggaagcaggtgttgctggcgttccccaccagagggggaatagggtccgaaggtcaggcggaggtcgaggtacttcctcagagacggccagcangaccttgtccagcgcctccaccagctgcttgaaggtaggcctctgggagggcgctgcgtgccagcactcacgcatcagcccgtacagctctggggggcagtgtgggggtcggtccatccgatgtccctcccgcagcagcgagaacagctcctccaccgggatgccaggatacggggagcccccgagggtgaagatctcccatagcaggatcccaaaagaccacacgtcactctggtgtgtgtacacccggt

SEQ ID NO: 347526 - DNA, 626 bp, Homo Sapiens
ccgggctgcaggaattcggcacgagcagaaacctcccgtggagcagaagggcaaaagctcgcttgatcttgattttcagtacgaatacagaccgtgaaagcggggcctcacgatccttctgaccttttgggttttaagcaggaggtgtcagaaaagttaccacagggataactggcttgtggcggccaagcgttcatagcgacgtcgctttttgatccttcgatgtcggctcttcctatcattgtgaagcagaattcaccaagcgttggattgttcactcacttccctagtgttcagcagtggatgacctctagtcaagacctttgcactaggatagttaatgtgaaccatggcaactgatcacaacaatgtctttcagatcagatccattttatcctccttgttttacagcaagggatattaattacctatgttacctttccctgggactatgaatgtgcattatagaaagggatgctggaaacccagagtccttctcttgggactcttaatgtgtatttctaattatccatgactcttaatgtgcatattttcaattgcctaattgatttcaattgtctaagacatttcaaatgtctaattgattagaactgagtcttttatat

SEQ ID NO: 347527 - DNA, 411 bp, Homo Sapiens
agatgagggatgttcttcagtccccccttctcacagtcctcgggacgcacgtggctcagggacacctcctcctgggagctgaagcggcagatcaggtcctgggtggcgtccacgtccacacggccctggtgcagctgggctgccagccagccattgccgcagcagctgagtggattcccctgcaggtagaggcgccggaggctggtctccaggccacccatggcactgcctggcaggaggctgaagctgttgcgcaggtccagcacctccagtgacacagcctgtgtccaggcgggaaggtggctcaggcggttctcggcaagattgagccgcttgaggcagatgaagcagggcaggtccacctgcaggaccatcagcccgttgccctgcagtgccaggacctccaaggag

SEQ ID NO: 347528 - DNA, 624 bp, Homo Sapiens
cagttttcccatctgtaaaagacagccatgcaaagtgggagatccgctaggcttccagatcgaagtcatcgcgctcctcattgtactctagcacgtgccgcttgatcttggacgagtccacccaagtgacaaagtcctccatgctgcgcgtgacaaggaaggcggggtcggtaaccacgtcagggcccacgcgtacgtgcccttgctccacaaaggccactgcagcctgaaggtgctgcgccatgcgcagcttgaggagcacggtggggaggcggcggcggcagaaggacgaggccgtgacgaagtcgcagagctccagcgaaccgcgcgtgggcaccaagccgagagcatacagcttgtccagcagcgcggccgaagcgcgcacgcggaactggtcgcgttcgggcaggtcgcgcaggcgccgcgccagctcacgcacggcacggctcagctggttgtagcgcgtgtagtcctcccgccgctgcagccggtaacgccgcagcacgcgcagctcgtgcaggttgtggtcggtgacctcccagttcaggaagtccacctgcttcagcagcttctgctcgtggaacttaagcttccgcaccatgatggcggcagccgcagccgcag

SEQ ID NO: 347529 - DNA, 639 bp, Homo Sapiens
ggagggagtggagggatgagcatgatgggatgggctgtccctcgggtttggtatatttgctcctagagcagcccatgaggcacggtggctctgaagcatcactcacttctgtcccgttcttgacagcgccattcgcgaacgatttgccaagttactactcctggatggccatgagctacccgcaccaattgcctttgatgttgaagcccccacgacgttaccgccctgcaagggaagctattttggaacagactctggagaccgactagggctcctggatgcctaccatgatggggcctgctgttccctgagcattcctttcattcctcagaaccctgcccgaagcagcttagccgagtatttcaaggatagcacaaatgtgaagaagcttacagaccctaccttgcggttccggctgctgaagcacacgcgtctcaacgttggtgccttcctcaatgagttgcccagaacccagcacgacgtcaattccttcgtggtcgacataagcgcccagacaagcacattgctgagtctttctgtcaatggagtcttcaaggaagtggacgggtcccgggattctttgcgccttcaccccgacattcattggctgtcctgctaccattcagggctatgtattgt

SEQ ID NO: 347530 - DNA, 1153 bp, Homo Sapiens
gacatggcggttaccctgagtctcttgctgggcgggcgcgtttgcgccgccgtcactcgctgtgggttcgcgacccggggggtggcgggcccaggccctattggccgggagccggaccccgattccgactgggagccggaggaacgggagctgcaggaggtggagagcaccctgaaacgacagaaacaagcaatccgattccagaaaattcggaggcaaatggaggcgcctggtgccccgcccaggaccctgacgtgggaagccatggagcagatacggtatttacatgaggaatttccagagtcctggtcagttcccaggttggctgaaggctttgatgtcagcactgatgtgatccgaagagttttaaaaagcaagtttttacccacattggagcagaagctgaagcaggatcaaaaagtccttaagaaagctgggcttgcccactcgctgcagcacctccggggctctggaaatacctcaaagctgctccctgcaggccactctgtatcaggctctttgcttatgccagggcatgaagcctcatctaaagacccaaatcacagcacagctttgaaagtgatagagtcagacactcacaggacaaatacaccaaggagaaggaagggaagaaatcaagaaatccaggacctggaggagagctttgtgcctgttgctgcacccctaggtcattcaagagagctgcagaaagtactccagtgattctgagagccccagaggaactggcagtggtgcgttgccaagtggtcagaagctggaggagttgaaggcagaggagccagataacttcagcagcaaagtagtgcagaggggccgagaggtctttgacagcaacgggaacttcctgtacagagattgagtcgcggcttggcttatggagatgcctcgtgagacacagatgtgcaagtattaatgtatatggaacagactggatttctgcatatggatagattcaaacttcctgtggtagtgctcccagtctgacctctgtagacctttagtactcactcttcttgcttaggctctctgtgtgtttgaagccaatcccgtgtgcatgtggtggtacaactttctgtgatacttgcaaatatggttgggaagaaaggaaagtttggcttctggactattttct

SEQ ID NO: 347531 - DNA, 399 bp, Homo Sapiens
atttcaatattataggcttcttacattttaatagttactcatctttgttccaggacccttgactgatgctagggaaaggataaagcatagaataccagccagtttggctctgattttgagttatttataataaagtttggggattatcataacatctcatatctttgtgtatgttgttttaatgctcggcagagcacaacactgatgataactattaaaaatagaaaataacagccattttactttcaaatctgatgtgatgcaatctgtgaacactaggaggggattaagcattgcagggaaacttatttgtaaatagcttcctcacctctttgacttggcaatcaatactttctactttgtggaggggattaagaatagtgggcaggatgagacctg

SEQ ID NO: 347532 - DNA, 457 bp, Homo Sapiens
caaggagaaacgcgggagggcccctccatccaggcggtgctcctggggtgccgggaccggggcagtgtcacaccctgcctgctcaagtcctggggtccgagatgctagggacgcgagtgatgaagttgttgtgaggtgcaggcctgaaaggctgtagtcagacctccgccctcagccagagcaagcttggggcaccatgcccaggatggtagaagccatccacagccttccctgtcaccggctcctctgtcctgcctaccctggtcctggcgggacttcactatttgacttggtttcctttcagatattcttgcctccagtttgctggctggcttctccgtctacccacagtgacctcacagataggccctcctgccacccatgctcatgtggtgtccccaccgcccacttgtttgatgtcactgactgtctacatgtatttatattcttgatacta

SEQ ID NO: 347533 - DNA, 467 bp, Homo Sapiens
tttcataaagaaaagaggtttatttggctcatgattctggtcgctggaaagtccaagactgggcagttgcatctggtgagggactcacattgctttgactcatggtggacaggggacggggagccagcattaatatagaagagcagggttcccctgcctgaggaggaccaatgcaggaaaggccaaagagcagttagaaatcagcatcccgagagaatgcaagatgttgtgaccaaggtgtctaaatatcaaacgcaagtcaggcggtaatgacttctcggagggagctggcttcggctcaggccattccgggtggggggagaggaaactgaagacaaaactgtgcttctcgtaaaggtctaattccttaagtgttggaattgacaggacctttgctccccaaggcacccctgaactggggcctgccttcctggaaaccccaggctgtttctgcagaaaacattctc

SEQ ID NO: 347534 - DNA, 798 bp, Homo Sapiens
  misc_feature (108)..(108): n is a, c, g, or t
  misc_feature (116)..(116): n is a, c, g, or t
  misc_feature (118)..(119): n is a, c, g, or t
  misc_feature (462)..(500): n is a, c, g, or t
caaattgtccaccttaccttggcggggggccccgcggccgcccaaaaggagaatgggtcttagaaaaggttttttcggaggggccggagggcggcccggacaaaggancccaggcncnnaggttctgttcgggtggggaagatttctactttattgggaaaacttcaggaacttaacaaattcacatccttccccctttcttctttccgaagaaggcagtttgcagagacaaaagggctgtggcgtggggatcatccaccatctccaggttttacacccaggctacccatggcttggcagtcaggcctctaggcctgatgctctcagaggcaatagaagaaaagtaaaaggaaggtctcacttcacagacaatgaaaccctcctaaaccctcttccccactacccacaactccctacactgccaatctaaataaaaagaggacaatgcatgagtgtgagatnnnnnnnnnnnnnnnnnnnnnnnnnnnnnnnnnnnnnnngcttcctttcagccaaagaactgcaaaatccttccccggaaggaggacaactggcaacaccaatcaaggcttggtggtctaaggtgatggctggaatcatgtgagactggtaaaaatccagggagaaaatgtttcaccttcagctcattcccaagtctctatgaagcccgccccacttccacataggggaactgtggctctgggggcagctggcttagggaaaggcctcccatggccaagaagacgatggtggagaggagggggagggcagcagggcaaagcctttggggagggtccc

SEQ ID NO: 347535 - DNA, 787 bp, Homo Sapiens
  misc_feature (328)..(337): n is a, c, g, or t
gtcgaaacctgtgcattccttggtgacctccggagagagaacatgggccggcagtggggacagagggcaccgggactctgctgggtgtagtgcttcacattcagaaccgcctggatgctttgcatagttacctctgatatcacaagatgcgtcaggaagagaaacgacacgcacaccatgagggaggcagccctcaagcagcggattcctttcaaagaaagacccaggggcttctcccctcctcattcagagctgacagctatgagctttaaccggttcaaagtggaagacaagtgagagatatctcataaaaatttcggccagaacnnnnnnnnnngtaaaattaattttccttaaagacaactagaaagaaaagggtccccccaacccacgttttgttttacttgaaatctgccagccagacaggatttctgaggttaatctgcttctgttaatcctcaatttaagcctttatcatttttctctgactagagacatccatgaaaagccacctgttattcacaggggctgcgcttcaggaaaccaaccaaatgcagaagcagagaacttaaatattgtaaataagttaactgggcatgaaaatacaatgccttggtgttcaggtggtgacaactgctctttaagaggggacaagaaattggggggtaggggacacatgggaaaaaaccacacattttttggtcatgagaaattggactttaaatccgcgccctgcacacgcaattcatttagaccttttcgtgaatcttctccactttcacaaaca

SEQ ID NO: 347536 - DNA, 609 bp, Homo Sapiens
cttccaggcaccaagatttttatttacccaccttcctgctttcttttaacattataggccaaattattctctttttgacccagggttgtgaaaggaaccatctggttataaagtggtggcagatttcacgaaatctgcctgcattcatgtttttctggcccctctcaacccctagctgtcacttctctgttctttctcagttgccccttaacagtctattctaacccctgtaaaacagggactaaaagtactaacctcattgtaatgaggtttaagagaaggcccagcactaagccaggctctcaggaaaattcaaacaacagttcctctttgcccttcaatatagccccttctcatctggtcatggggctgaagaaccactggacctgtaaaccaagcacacaggtataagtccacagagcaggtgaaggcctagatggcaaaacacatgggctttgtgactccactactgacttccaggctaaggaaggactgacttagtgagctgttccaagaccactgagctcatggttccctgtggctgaaaccgccacccaggcctcgctgctgagtatggtttgggacgtacctttgttctcggggcgatcg

SEQ ID NO: 347537 - DNA, 982 bp, Homo Sapiens
  misc_feature (46)..(211): n is a, c, g, or t
  misc_feature (824)..(824): n is a, c, g, or t
aaggggggaaaggggaagtatagggtggagtgggcgagagacgacnnnnnnnnnnnnnnnnnnnnnnnnnnnnnnnnnnnnnnnnnnnnnnnnnnnnnnnnnnnnnnnnnnnnnnnnnnnnnnnnnnnnnnnnnnnnnnnnnnnnnnnnnnnnnnnnnnnnnnnnnnnnnnnnnnnnnnnnnnnnnnnnnnnnnnnnnnnnnnnnnnnnnntcgggcgggtggccgaagtggggcgcagtgcacccaccaggatacggacggaagaagggctgtgtggcagggtgaagtccaggattgtccctttgttcataggtccgctggtgcccgtagctgtcttccacatcgttgatccagcggtcatcccagtccactcggaggcccaacaggtgaattgggaggaagccgttctcagccagaatcacaaagtaagtaaagaagcctcccagggcctggatcattccaatctgcccataggccatgctgatcagccgctcattcacaagtttgtctgttttgggatttctgggctgtctcttcatgatgtcactctcagcctgctcataagccagggagatggcaggaaccatgtcagtgcccaagctcaatgcagaggatggtggcagtgcccagtgttagtggaatgtttgcaataatgactttcaggggcggggtgatctggggaatgttattggttaaggtatgagcaatggatttttttaagttatccaacagccggtgaccgtcttctctgcacgttacaatcgaggcacagttgtcattcagaggatcaggtcagcagtttgtttggacacgattgtgagtncagccatcccctatagcgagctagcaatgttcggtctagttaaagagggagagtcactctcaccgtcgccagtagcagccatgatagccacctgtcttgtgtcagcggatacacaatgaggcctcgtgccgaattcgccacccaggcctcgctacctt

SEQ ID NO: 347538 - DNA, 1077 bp, Homo Sapiens
  misc_feature (826)..(834): n is a, c, g, or t
gggattcctagttaaggcggcacagggccgaggcgtagtgtgggtgactcctccgttccttgggtcccgtcgtctgtgatactgcagtgcagccatggcagaaccgcagcccccgtccggcggcctcacggacgaggccgccctcagttgctgctccgacgcggaccccagtaccaaggattttctattgcagcagaccatgctacgagtgaaggatcctaagaagtcactggatttttatactagagttcttggaatgacgctaatccaaaaatgtgattttcccattatgaagttttcactctacttcttggcttatgaggataaaaatgacatccctaaagaaaaagatgaaaaaatagcctgggcgctctccagaaaagctacacttgagctgacacagtaaaatgaaaggcctggcatttattcaagatcctgatggctactggattgaaattttgaatcctaacaaaatggcaaccttaatgtagtgctgtgagaattctcctttgagatttcagaagaaaggaaacaatgtgattcaagatatttacataccagaagcatctaggactgatggatcactgtcccgattcaaattattcttcagtccatttccccttcctatttcagctgttccttttcacctaactgttcagtcatttctggttttcaagcagtgctttatctcatgtccttgaatatagttgtgtaactttattttttaggtaataattagaacagttcccttcagaggctgcatttgccttcttctgccacctaaatattacttcccttcaaatctgcctttgaatcatcatttttnnnnnnnnnttaacatgtttttgttgtagttatcttctggggtttcaattcctcagaaacaacttttttcacaacggaaaggaaagaacactagtgttctttcagtaaagtacaaagtgtttattttacaaaagagtaggtactcttgagagcaattcaaatcatgctgacaaggatactgatagaaaaagtgatttcttcttattataaagtacatttaaagttcaaggactaaccttatttatttgggaa

SEQ ID NO: 347539 - DNA, 810 bp, Homo Sapiens
  misc_feature (11)..(11): n is a, c, g, or t
aggagtctggnactccctgttcctctttccccgggattaagcattccaacttcaaaagacaaaatttaagccaaaagacactagtaaggaagtaattccaattctaaacttcagaagttctgccagttgagaagtggccttccttgggcgctgggattgcagtggtcaggagcaggcgcactggcccttgcctggagtgcggctgggcagtggctgctgggtgagacaggtcagtctcacttgagaagctgcaggggaaaggggcctggggggaggggcggggcagggtccctcagtgctgcccgcctgcacccccactcccaggcattcctttccctgagttgtgtggttgccagtaatacgcagaaatgccacagggcatatggggcacatccaccaccacaagaggcttctggggagatcagggtatgaaaaggataatgggtcccagtcttaggggtgggccagtgagctagttcatagcttgcctccagcccctctggagtccacacttgggaacgggagctaatgctgttcggcactgcagtgtgactccgcacataccagtagggcttggaggggcagccccttctcctggaaaggggtggggtaagaatagggcttgtcagaggctaaaccttctgccttcatggccccagcagatcacagggctgaagagttgtagaggaaggctggatctgacccgagatccccatgactgcctggactggagtcaaatgggatctgcagcctctttccacttggcctaggggatcccgcctctttctcagagctgggctcgtgccgaat

SEQ ID NO: 347540 - DNA, 388 bp, Homo Sapiens
aagatgagctgcttaccaggaactaagaagaattaacatcatcaagtttaaaatcgatcattttaaatatgaaggagatttaaacatctcaaccccatgaatcaattgtgctgataactatccagtctcattggatagtgggctcatcaaattgaggatattcaggagttaaagagatcagcacagaagagtgagaccaaatgctttttcttcatttcatttactgttataatgactgatgagtataaagggatttataagggcttttcatttcaaattacatttttctttaaatatccaaagttcttatgtggaaacaactgcaatttttatgaataggctggtcttgcctttatatgtttttaaagagcttctgcagaattttatt

SEQ ID NO: 347541 - DNA, 419 bp, Homo Sapiens
gctctttccaggatttttatttctttaaaataattcatacaaatggttacagtcacaaacatgattttaaccaaaatattgctagcctaccacatcagcaggacggcactggtgcaggcggggacgctgccaccctccacgtccccaggacagacgtcgatgggcagcgggcacgctgggcaccgcccaagcttttccttttggagctgcttcgtgatgccgtcttcatttggaacaagggggggttcatgccaaaattaggaaaaacagcctttgttttgtttttctaaattattctaaaaataagacaagcaggtagaaaaaacaatgcactgtgtggcataaaaagaaaaacgggaaggattcattgtcctgagaagtttgccaactgcctcattctggggcacgttccaacatac

SEQ ID NO: 347542 - DNA, 559 bp, Homo Sapiens
  misc_feature (414)..(454): n is a, c, g, or t
aaattttaaaagtagcttcaagttaaggaaaggtcatttttccacagttcagttctctgaaaaacttccatctcccactgaaagtcacagtccaggagtgaagtaatcacatgctagaacatcagggccaattggaaagtcattatgaacacttgcattggtcgatcttatttatcaccacaagcctgaaaatgcaatgtcctgaaaaaggtgacctctctgtgcacacgtaatttttaaaaaggagagggtaatatgaaggggactgaggcttgatcaccaaaaatcagcacaatgaaaacaaacaataatgaataatgagcactagaattcaaattaccagatgtttcaaagagatggggtgccagttttcaattccgttttgaacaccacattacaaaagaactatttttnnnnnnnnnnnnnnnnnnnnnnnnnnnnnnnnnnnnnnnnngaatatctaaactgttgaatgaccccccgtttgttcctgataaacttcaatcacatcttcttcctccattcccagttcttttggagtatgattatcagcaattct

SEQ ID NO: 347543 - DNA, 214 bp, Homo Sapiens
gaatttttctggcacttcctgggttgtcttcctttctcatatttctacaactttacacctgttctttcctcctctgtagggttatttcaaatgtcactgtaacagctcttctgctatcaccagggatgctgcattttctgtaggattaaatccctaatcttaatcacaccaccaccacctcactgcctgctgccttgcacaccctacatatcac

SEQ ID NO: 347544 - DNA, 628 bp, Homo Sapiens
  misc_feature (541)..(541): n is a, c, g, or t
  misc_feature (588)..(588): n is a, c, g, or t
caagatttctggcgacgtgatgaacgagaacaatccgcccatgatgctgcccaacggctacgtctacggctacaattctctgctttctatccgtcaagatgataaagtcgtgtgcccgagaaccaaagaagtcttccacttctcacaagccgagaaggtgtacatcatgtaggccccacgtcgtgaagcgcacgcctcggggacgggctgcagtgggcggggaggccacgccttcctcctgtcccacgctccagcctgccgcggcgtttctgtttcttgcgaccaaagatccgtgagcaacgataaatactcttaggaagagagaaaataaggtttcataagtttgtacttgaaaacatttggattggtaggattttgtaacacgtcaaccatttgatgcttctggtactttcaacttgcgaaggaaactcttctttaaagactgacctaaacaccgagggaaacttaagaacgtttcgatgagacttggagaacgggctggtgcttcaccacttcctgttggccctgggcctggccgggngaggtggcagcggcaccggactgacctgcagtgacccgcgatgccgngccacgagggacacttatggcttcattcgaggctgctgcc

SEQ ID NO: 347545 - DNA, 289 bp, Homo Sapiens
cagttcttagttcacaagtttattatgaaaaacactgcagtgctcttgtgcagtcacatcgtcttacaggaaggggaaaaaacagttctgttcaaaacaactcaccaggttctgacaataacaaagaacaacatggggctgagatttgagtagggaataaactgagtgcagacaaatcatataattaaattaaacggtatccctgaaattgttctttttattttcagggataccgtttaatttaattatatgatttgagtaggggataaactgagtgcagactcgtgcc

SEQ ID NO: 347546 - DNA, 1051 bp, Homo Sapiens
  misc_feature (40)..(40): n is a, c, g, or t
  misc_feature (554)..(554): n is a, c, g, or t
  misc_feature (758)..(758): n is a, c, g, or t
  misc_feature (788)..(788): n is a, c, g, or t
  misc_feature (791)..(792): n is a, c, g, or t
  misc_feature (798)..(798): n is a, c, g, or t
  misc_feature (815)..(815): n is a, c, g, or t
  misc_feature (861)..(861): n is a, c, g, or t
  misc_feature (905)..(905): n is a, c, g, or t
  misc_feature (938)..(938): n is a, c, g, or t
  misc_feature (953)..(953): n is a, c, g, or t
  misc_feature (960)..(960): n is a, c, g, or t
  misc_feature (965)..(965): n is a, c, g, or t
  misc_feature (969)..(969): n is a, c, g, or t
  misc_feature (981)..(981): n is a, c, g, or t
  misc_feature (984)..(984): n is a, c, g, or t
  misc_feature (991)..(991): n is a, c, g, or t
  misc_feature (994)..(994): n is a, c, g, or t
  misc_feature (1009)..(1010): n is a, c, g, or t
  misc_feature (1015)..(1015): n is a, c, g, or t
  misc_feature (1018)..(1018): n is a, c, g, or t
  misc_feature (1030)..(1030): n is a, c, g, or t
  misc_feature (1037)..(1037): n is a, c, g, or t
  misc_feature (1043)..(1043): n is a, c, g, or t
gaaaagtgagtgattcgtgttgtttccagtcagccccganccgagtctcagggggactgccccgcacacagactgttcaccagggcctgcagcctctcggacagccccgctctgggtctcaggtgcagggctccgcagccgcctgtgctcagggctgagtcggctcagggacagctgggccaaggctctagactctgccagggatgggagcggctcacacagctgcagggcggaggtgagctcagagacagctgggctggctcccagtcagggctctaggggctctgggggtcagaatgtgagcggttgcacagccagctgtccctgctggaggcagatccgcagtagtggctccacctgggctggcctcacggtgcagggctcctgggcccgtggaggccacaccctcagctcctgcccagcgtgtggcactggctcttctgctaactgcagcatgtccatgagttgagacccgtcagagcccaggagccggtaagcagcttttctcccaggcaacgtctgcttctcggggtcctcggtcagcttcattcgtngctggccccccacggccaccagcttatagacgccacccagggaaggctgttgggggcaggtgaccacactggtgccgaatgccaatgacattcacctcactgccctcctgggccagtcgggccagcgcctcctcgtcaatgttgttgctgactacgatgaggactgactccaaccagggcacctggaactgggctgcagcagcncggaagaccttgcggatctcctgagcctgnggnngcaggncaccactgtccagcctnacgcccactgcccggtagcccagctctcccagggccagggcgactnctaggaagttgggggagaccactcctccacacgctgtaggtgtncaggaggccctgggaagcccggggaaaagccangcataggccacaaangctgccngctcncctngatgcggctccngcnccccagnccnagggggggccacacnngggcnacnaaacttggctgnggccgcnagacancccaaggc

SEQ ID NO: 347547 - DNA, 520 bp, Homo Sapiens
aacagagggataacattccctttgagtttgatgctgattcacttgcctttgacatggaaaatgaccctgttatgggtacacacaaatccaccaaacaagtagaattgactgcacaagatgtgaaagatgcccactggttttatgacacccctggaattacaaaagaaaattgtattttaaatcttctaacagatgaagaagtaaatattgttttgccaacacagtccattgttccaagaacttttgtgcttaaaccagggaatggttctgtttttggggtgctataggccgtatagatttcctgcagggaaatcagtcagcttggtttacagtcgttggcttccaacatcctccctgtgcatatcacctacttggacagggcagacgctttgtatcagaagcatgcaggttatacgatacttcagattctaatgggtacagatggactgggtgcatctgaagcaagtgccgacatgaaggttgcctgtgcatgttgaggttcagtaacacctaattttgg

SEQ ID NO: 347548 - DNA, 628 bp, Homo Sapiens
cgaatggctcccaaagtcattttatttaacaaaggggtcaaggcagaggaaagtttcccttaatatccccacaactgctccacatgtcttctgtggaaacacttcaccaggaactagctcaacactcttgctaacaatttagtgtctatacaggaaggctggtgtctctgttacaggtggcccgttccttaaagcctttagggttaatcgcagctgcactgagtggccaagcagacccacgagcttggactttctgggaaggttgtcggttttctggtcaaaaacattcttgaagtcatcaggaatggaggaatggagactcggcatcccgggaaagtgagttcctggtttcatcgctgggattcaagagccgaacagcactatcatgcagaacatcatgaagatgttccacagggcgatgaagattcgaaagtatctgaggctcagcaagaattcccggatgttgtcacctgtgctgggctccctggactcctccccaaagccctgcgtgtccttctttttcagcttaaagttcagcaccgccccggcattcatcagcaacgtcccgaacagcaggatgtctccgatcatcgttacggccgaagcgtccgtcagaaccggaagcccc

SEQ ID NO: 347549 - DNA, 847 bp, Homo Sapiens
  misc_feature (782)..(782): n is a, c, g, or t
  misc_feature (827)..(827): n is a, c, g, or t
  misc_feature (831)..(831): n is a, c, g, or t
caagcccgggaaacagacgatgggcactaggacactgcgcatgtacaagaccaactactgggggcggcggccccgtgcgtatgtgtcaggctgttcgttctggaatgaggaggggtggtctttacataatattctgtggctggtgggctcggagagggtctactttgtggagaggatgagggcgacgatgagaccgtagaggccgagcacctcggcgaagatgagaatcaggatcatgcccacgaatagtcggggctgctgggcggtgccccgcacgccagcgtcccccacgatgccgatggcaaagccggctgccaggccgctcaggcccacgctcaggccggcgcccagctggaggaagctcttgtagaggctgatgtcgtcattcagggagttggcgatgaggactgccaccaccaggccgtagatggcgatgaagtccatcatcccagtggtcatggctggcatcatcgccatctacggcctggtggtggcagtcctcatcgccaactccctgaatgacgacatcagcctctacaagagcttcctccagctgggcgccggcctgagcgtgggcctgagcggcctggcagccggctttgccatcggcatcgtgggggacgctggcgtgcggggcaccgcccagcagccccgactattcgtgggcatgatcctgattctcatcttcgccgaggtgctcggcctctacggtctcatcgtcgccctcatcctctccacaaagtagaccctctccgagcccaccagccacagaatattatgtnaagaacacccctcctcattccagaacgaacagcctgacacatacncacngggccgccgcccccaa

SEQ ID NO: 347550 - DNA, 479 bp, Homo Sapiens
  misc_feature (24)..(24): n is a, c, g, or t
  misc_feature (36)..(36): n is a, c, g, or t
  misc_feature (90)..(90): n is a, c, g, or t
tgggatctgttgccaaaaccaacnacacatttgccnactcaaattctgtggtttcccgccaaatgaaaaaggctgatttgaaactgcttncaacacaggaatcctgcaggacctcctcctttgccatatgctcctttcagcagttctgtctgcacaatccccggccacagagacacacagctgaccccatggcgccgcagctcgtgggcacagtcagcagccagcttgtcacacgcagctttgcccacaccataggggacattgaacatatactgcaggcttcctggggaggagatgaccacgatgagcccctggccagctggtaccatcagccgtgccccatacactgagcaaaagtagtggcctctgagtccgacgttgttgatatcatcccacatggaggcagtgttcaaggattgattctgtagtaggacccggggcgattctgtgctgaggtagaggggcagagtccccaggcc

SEQ ID NO: 347551 - DNA, 521 bp, Homo Sapiens
  misc_feature (37)..(37): n is a, c, g, or t
  misc_feature (64)..(64): n is a, c, g, or t
  misc_feature (115)..(115): n is a, c, g, or t
  misc_feature (136)..(136): n is a, c, g, or t
aatcccttatactatgtaatgaatgggtttgtaatcnacatatttcacagtgtaccacagttancagcaagtccttcagctattcaaatagatatataccaattgccatataganccgtagagaaaattttaattnaaaaaaattaaaccctatttaaaccctgatatatgaaaatagggccaacagtgagaaaaaagcccttttgtgacaaatatttagctggtttgaaagacagaacaaggaggaatccatttacctcataaagaaggctcaaataaagttaaaacatggatgtatttttaaaatgaccactctagtagtgaatttaaaagtcttttaagggttagagtaatctttttcattagtcttggctatttcctctagttctgacaagtacaggcaagaaaatggctactctcaagtaaggattattctgaaacacggtctggatttagaaaataaatgaacattagggaaatttccttaattaagactctccaaaccaggtgtggtagctcat

SEQ ID NO: 347552 - DNA, 576 bp, Homo Sapiens
  misc_feature (28)..(28): n is a, c, g, or t
  misc_feature (82)..(82): n is a, c, g, or t
  misc_feature (84)..(84): n is a, c, g, or t
  misc_feature (86)..(86): n is a, c, g, or t
  misc_feature (90)..(90): n is a, c, g, or t
  misc_feature (93)..(93): n is a, c, g, or t
  misc_feature (129)..(129): n is a, c, g, or t
  misc_feature (220)..(220): n is a, c, g, or t
  misc_feature (269)..(269): n is a, c, g, or t
ccgccccaatgtgggcaggcacatccgnaccagctggtgcaatctggcctctggctttggggtcgggggaaatgtgaagagnangnagcnccnttctctttccctgctcccctgcctggagtgggttgnaagcgcctgtgaacagggttggcagtggcactggcagcggtggggaatgaagtgggtagtaccaccagcctctgggtaacagtgaacacgngggacctttgagctgtctgatcttgctcctccaagtcatagggccaccntgagttcttggcagaagcccagaggcctggatcctaggagacaagtggctttggggccctcagcctttggggccatccgtggaccctggggcctaagtggatctgcagctgctgcccctctggcagagctccctacagagctggttgctgagggccctagatctcagtagcagtgatctcctccaggcagatgcagggggcctgctcggccacacctgctccttctctgcctgccaggccagccgctccccctcaaagctgtcccgctgctcctcaccccctcgtgccgaattcctgcagctccatt

SEQ ID NO: 347553 - DNA, 516 bp, Homo Sapiens
  misc_feature (72)..(116): n is a, c, g, or t
cctaaccctactttgcttccgccactcagccatttccccctcctcagatggggcaccaataacaaggagctnnnnnnnnnnnnnnnnnnnnnnnnnnnnnnnnnnnnnnnnnnnnnaaggttctggttccatttttcctctgttcacaaactacctctggacagttgtgttgttttttgttcaatgttccattcttcgacatccgtcattgctgctgctaccagcgccaaatgttcatcctcattgcctcctgttctgcccacgatcccctcccccaagatactctttgtggggaagaggggctggggcatggcaggctgggtgaccgactaccccagtcccagggaaggtggggccctgcccctaggatgctgcagcagagtgagcaagggggcccgaatcgaccataaagggtgtaggggccacctcctccccctgttctgttggggaggggtagccatgatttgtcccagcctggggctccctctctggtttcctatttgcagttacttgaat

SEQ ID NO: 347554 - DNA, 347 bp, Homo Sapiens
gccccaaagggcccctcattcaaatcacagatataggcgcagcaggattcagcagggcagggagggaggaagcaggcgtgagctggccacagctttgaatgacctaccagcccctggcgtcaccaagaactggtgtttaatgaggggaatgaccaccgccacacagaactacctagccaagcccctccccagcagctgcctccctccctggatgaggggagttgtgccgggagtcccagaaaggaggcatcgattcaaaaaatactacggcaaaatgataggaaactaacagacgtggcccctcagagtgatgaaacccacgtgtctgcgggccagctcgagccaca

SEQ ID NO: 347555 - DNA, 1210 bp, Homo Sapiens
  misc_feature (1141)..(1141): n is a, c, g, or t
tttcaaagtcccttaagatcctggccaaagttttatgcatagaatagtgatgttcaagacttaaccaaccacctttcaattctgaatgtaggtatgtatgaataaggttaacaattataatgtctgactctcaaatatatcaaattaagaagtgttaatattgaacacaaatcaaaaatctagttagaaacattttatttaaatgtgccaaataaaaacccacattttcagaccatatgatgttaatacattcaacaaaatttatattatcttactgctgtgaatttacatagtaatccagatccattttgattagatggttgaattatctttcctaggttacactttacagacatcacaaatcccttataataatgtaaacaaaataacttttccctaaagggtgaacttgagagcttcagtccattctttcaggacttgcacttctgcgaggacttcctgatggggaacgactgcttcttggtcgtgaaatagacctggatcttgatcttgacctcgacgggggatttggaaatacctcgatccttttatagaaccagacctagatcttctgagtgaagctgatcttgatctacgaagagagatagatcttgatcgtcgaggagatgctgaccttgaccttcgtcccctgctcctgctgcgtgagcgagagtatcgccttcctctggatcgagaatgtgatctagaccgtgacctgcttcttcttcgccggctgtaacgatgacaatcataagcataatgtcccttttcgccacactcatagcatctatcatttggatcaaagggacgtcgggcaggtggtctatcaaaacgtgatctccgaggcatgcctgtcgatagttcaaccctcactcgggagccacaaatcacctttccatccagtcctcgtactgcatcttctgcatctctaggatcttcgaattccacaaaggcaaatcctggaggatttctcgcaatccatacagttcttaaaggaccataataactgaaagccctttctaactctcctttgccagcgccagttcccaggttaccaacatacaccttggtttctcctccgtaccgcccgtaacgcgacatgatgacagacccgcgtgctcggctctttagcaagcagcgncccagggctcgagtgacgcaaaagctgacacacaccttcacccgccaagagtcccggcggcactacccc

SEQ ID NO: 347556 - DNA, 640 bp, Homo Sapiens
  misc_feature (514)..(515): n is a, c, g, or t
  misc_feature (561)..(561): n is a, c, g, or t
  misc_feature (591)..(591): n is a, c, g, or t
  misc_feature (610)..(611): n is a, c, g, or t
  misc_feature (624)..(624): n is a, c, g, or t
gggcagcgaagcttgtgatcagttgctgcctcttcttgccgttgtttcctttacccctctgcttaccgaaaataattgctgttcttttaatgccaagaagttcccatttataaactgaagttagttagataattaggtagcttagaacagtggcttttaaactttttgattggctctactataaaaaattcaatttgtattgaaacccatagacatgtgaatgtttatgctgaaacagaagtatttactttctgataataagtgtatgtagtcagatacagtcttttaagtccactttgtatggtacagaacaaatccctaacaagctaattccaacccactaaattgatttaatgatcactgagggttgtcttaccatggtttcaaaacatttagaaggcactactcatgagttgccccatttcagcatatgatccccacttttgctggtctaagaatcatttatcagtcccactcagttatcatatcaaccagatttgttagtgactttgtnngtgctttcccgtccagggtatctcaatctgatcaaaccgaaatggncatcatactgagaagtgctatggatatatntatattgagaaatgtatgnngttatactttctncccccagatattaggc

SEQ ID NO: 347557 - DNA, 898 bp, Homo Sapiens
ccagttgaaaactatgcagatgtttttagacagagcaaaacacaacacagtacccaaaaacggaggcagcctgcatgctccaggtctacacgagcacctcacagcctgacaaggggcagacagcaactcacacggggcgagcttcagcacacagacagcaaagcaaatacgagacttagactgacctgcaaagagggaaagggccacaccaatggagtacctgagaggataatgacttagagcccaatctgcctgccatctccttgagccgtcacccggtcactgaagatagcgcgagggtgatgcttcaactccacccatcctaagggtttgtgtacaaacaacactcgaggggcacagcacaaacttaatactttcctaacactacagccaatagtaatcatctactttcagcaagagggactcctttaaacaaggaaaaagactcaccattaattagcctatgtacccactggatcaatctgcagcaacaaagtctagtgctagcagacacagggacagagggaccagctaccctcaacacagggccaggagagccgggtcctagactgaaccctctaagaaggcccatgtgtccaaagagaagagctgtcaagaaaaagaaactagtcaaaaactctttaaaggacaacctaaaaaggattaaagatgtatattaagatcagtaccatacatatgcaaagaagtcctactataagctcagttaaacacacaaagctctcattcttcctctaaatagaaggtagtcaagaggacacacagatggcatctatgaaataaggtggctgcatggctgctgtactagaattcacaaactgggaagaacttcatataaacagaacccaggatccctaacctactgtagataaataaactc

SEQ ID NO: 347558 - DNA, 623 bp, Homo Sapiens
  misc_feature (470)..(470): n is a, c, g, or t
  misc_feature (575)..(575): n is a, c, g, or t
aagcggctggcggagcagaacggattgcagggtcagccatgtcatctgagcctcccccaccaccacagccccccacccatcaagcttcagtcgggctgctggacacccctcggagccgtgagcgctcaccatcccctctgcgcggcaacgtggtcccaagcccactgcccactcgccggacgaggaccttctcggcgacggtgcgggcttcacagggccccgtctacaaaggagtctgctgcttctgccggtccaagggccatggcttcattaccccagctgatggcggccccgacatcttcctgcacatctctgatgtggaaggggagtatgtcccagtggaaggcgacgaggtcacctatatcactcacctggcaccaggcaccaagcatgagacctgggtctggacatgtcatcagctcctaggagatggtggaagcaccccttgtcctgtgcttgtgggagacttntgccgggaggaggcagcagacactggagatgacattctttcacacgagacggggcttcagcccggcatgggccctcttaagtatctcctggaggaagggtattgngggccgtgtgggtgttgggtgttcccggccattagcccagctatgccc

SEQ ID NO: 347559 - DNA, 562 bp, Homo Sapiens
  misc_feature (276)..(339): n is a, c, g, or t
attcggcacagtatttcagtgacaaaatccaaatgcccctcttatgtgggtattacaggaatccttctacaggaaacaaagcacattttcaaaattatcaccaaagaagaccgcctgaaagttatccccaagctaaactgcgtgttcactgtggaaaccgatggctttatttcctacatttacgggagcaaattccagcttcggtcaagtgaacggtctgcgaagaagttcaaagcgaagggaacgattgacctgtgaattctttgccgtctaagnnnnnnnnnnnnnnnnnnnnnnnnnnnnnnnnnnnnnnnnnnnnnnnnnnnnnnnnnnnnnnnngttaagccaattccatttatagaccacctccagccagtgacgctccgagttgaggatgttgaacaacatgggaaggtcgcagcgtactaagtgaagaagtcagaggacagaggaatttctctttctaggagattttcattttgtgtgactcccatggggaggaacagactggcaggaagcacaccggggttaacactggttgacttgaataggattattcgaa

SEQ ID NO: 347560 - DNA, 718 bp, Homo Sapiens
cagcccttatccaaggccactcactccctctttcaacccgggtcccccctccatatacccttgcttcttcaggtcctcacttgtcgccccacccatctcctcacctcagccacctttttgattattttggaaccaatcccttgacctgttgtggagagaaagaggcaaaaaatagctattgtttgagctgaaggggatcagaaaatgacaccgtctgggctctggggacaggggataacagtggggtctgtggggtgctttgctcccaccacagcctcagcttctgcccagtaccccgatattgtggcatcacatagatatcctccagataaatggtgcgtcccttccatgtactgtagatgaaatagtatatcccatagcccaccacgcagggccccagtagcttcccgggcgctggaagaatctctgctaccaaacagtgatagaaaggattgtctccatcgaattcggctagctccggcctgcagtcttcacccgaatcagcctcaggatatctccacagtctccctccttggcctctcggatccgcacggaagccatccggatccccgctgtctgggaccaaagtcccagggcctcgcaaacggcaactagaccccttaaagggcctacggacttggatcctgaagagcctgagagagcggggtggcgggagtcgggggggacggcggggtagccgcggcctggtaagtggagc

SEQ ID NO: 347561 - DNA, 491 bp, Homo Sapiens
gaaatatgctgtggaacttcacttggttcactggaacaccaaatatggggattttgggaaagctgtgcagcaacctgatggactggccgttctaggtatttttttgaaggttggcagcgctaaaccgggccttcagaaagttgttgatgtgctggattccattcctgaatccttggattactggacctacccaggctcactgaccaccccttctcttctggaatgtgtgacctggattgtgctcaaggaacccatcagcgtcagcagcgagcaggtgttgaaattccgtaaacttaacttcaatggggagggtgaacccgaagaactgatggtggacaactggcgcccagctcagacactgaagaacaggcaaatcaaagcttccttcaaataagatggtcccatagtctgtatccaaataatgaatcttcgggtgtttccctttagctaagcacagatctaccttggtgatttggaccctggttgctttg

SEQ ID NO: 347562 - DNA, 358 bp, Homo Sapiens
cccatggaatgagatccttttcaatctgccataacatgtgcccacacatcttcaccttggaaatgtagcatttcaagctttagtcagggtagattattccttctttactttcacaatttttacgttgctgccagaagtcttctcagcatttgctttgaattctgtcttcagtgcatctctcactgcttttgcacagatctgggagtatcggatgtagctgagtccagcctgtctccagtaggccaccatgctgtagcgaaagcggagctcgtcgggccgaatcgccaagacgccggcaatgtcggctcagccgggcggttcagccgcaggaagatcagaccacagaagcggaagaccc

SEQ ID NO: 347563 - DNA, 1070 bp, Homo Sapiens
  misc_feature (8)..(8): n is a, c, g, or t
  misc_feature (13)..(13): n is a, c, g, or t
  misc_feature (21)..(21): n is a, c, g, or t
  misc_feature (26)..(26): n is a, c, g, or t
  misc_feature (42)..(42): n is a, c, g, or t
  misc_feature (48)..(48): n is a, c, g, or t
  misc_feature (62)..(62): n is a, c, g, or t
  misc_feature (69)..(69): n is a, c, g, or t
  misc_feature (73)..(73): n is a, c, g, or t
  misc_feature (81)..(81): n is a, c, g, or t
  misc_feature (87)..(87): n is a, c, g, or t
  misc_feature (91)..(91): n is a, c, g, or t
  misc_feature (105)..(105): n is a, c, g, or t
  misc_feature (117)..(117): n is a, c, g, or t
  misc_feature (124)..(125): n is a, c, g, or t
  misc_feature (135)..(135): n is a, c, g, or t
  misc_feature (139)..(139): n is a, c, g, or t
  misc_feature (143)..(143): n is a, c, g, or t
  misc_feature (147)..(147): n is a, c, g, or t
  misc_feature (151)..(151): n is a, c, g, or t
  misc_feature (209)..(209): n is a, c, g, or t
  misc_feature (219)..(219): n is a, c, g, or t
  misc_feature (226)..(226): n is a, c, g, or t
  misc_feature (239)..(239): n is a, c, g, or t
  misc_feature (243)..(243): n is a, c, g, or t
  misc_feature (322)..(322): n is a, c, g, or t
  misc_feature (350)..(350): n is a, c, g, or t
  misc_feature (381)..(381): n is a, c, g, or t
  misc_feature (432)..(432): n is a, c, g, or t
  misc_feature (471)..(472): n is a, c, g, or t
  misc_feature (488)..(489): n is a, c, g, or t
  misc_feature (495)..(495): n is a, c, g, or t
tccatccnccttngcctcaantcatntccaggcagaggagcnggagcngggacaggtaaacnttcccangatntttaaacnctgaantgcnctagagaggagctnggctgaagactnaataatnntacatgtacngggntacnaaancacncaaatgtcaaaattttggctgggagactctccccccatcctctcttttctaaggatcngatccatcanccatttnttcccactaaaanaaanccctggctcagaaagtctgcaagtgcagaggaatggaggatgagtaagtcacaccagcaggctggctcagatgggaganccctgaggttgggtgaatgagtggaaancggaatgactccagtagctggctctactgcncctttttctgcttgtggggaggctttgcattcccagtagaaagagccagcntgggcggcgatgagggccgttgcagagagaggagaccanncaaagggtcccagccnnatcagngggatctccggtttcctgaatggaagtgaagattcgggccagggagcccccaaacagcaggaagactgtgatggctgagagctggcctgtgtgcccgttgtggtagttggtggctgcctggagaagctgagttcccagcagggttcccaggaaccacacagcctgctcttgggtaagtccccagcacctttcacagtctgtcctctgtagtgcatgaccaggaagcagatggtgatcgtctggagcatcaggaataaggcttcaccccaagagctgaatgggaagttgttagtgatgctgtagaccatggtcccagtcaatgccactagctccagcattacagactggagactcaacccttcagcactcttggctcccaggattttaaacacctggggcagctttactagaagtgagccagccacaatgcccagccccaggcctttgctgaggagaatcttgaggcaggggacgtgaagcaagtcccactgaacgaaaagttggtcgtagcatttctcaggtaaaagaatcggcacgagcagccgtttaagcggtccgtccgcctcggccgccat

SEQ ID NO: 347564 - DNA, 755 bp, Homo Sapiens
  misc_feature (413)..(413): n is a, c, g, or t
  misc_feature (617)..(617): n is a, c, g, or t
ggggcagtcatgatcaccgagaccgcggcggagcctacggtccctgcagtgcctgctgctgaggaggccaccgaagctcggggacgcgaggagccggcgtggccctggaaagacgccccgatccggacgctggtgcagcgcatccaccagctgcaggctgagcgcgcgcagggcttccgccgactggaggagtgagtgggggcgcggaggggctcatggttcggtcccccgcccgctccgggcgtgggcgtgttctctgcgggcgtgcctggaggaggagctgggtccttgtgtggctgcagagtcagatggggcggggatttcggggcaccgggtcctcaccttcacgactctcctccccaagagcaggggtgggcctgtctcgcgttcccctgcgggagtcaggaagcgtncttcctacctaccagagctcccctctggtgtctggggacactttctgggggcctctcacgtggttggcgccggtgtatggcctgagagcctgtgggcgcggcctcatggtccccacatgccgcagaggccaccgccagtacctgcgcagcaggcctgactactacttcgcgcgctaccggagcacagtgcacggggtgacccangccttcgtcgccgcctctcgggaggtgctggcggtggaagcagctgggcgggcctctcggcaggcgctgttcgcggccacctgcgcagactgaggagctgtacagacccgctggcacagcggccgctgcagtgatgcc

SEQ ID NO: 347565 - DNA, 1268 bp, Homo Sapiens
  misc_feature (111)..(111): n is a, c, g, or t
  misc_feature (117)..(117): n is a, c, g, or t
  misc_feature (178)..(178): n is a, c, g, or t
  misc_feature (748)..(797): n is a, c, g, or t
aaccttgaaggtgtagaggccaccccggaagggaagggtaaaaagccaggggggcaaagccggtgggccctccccttttctggggggtcacttctggggctgggggccagntgaaancctgtgtccaaagtagtttcaggggctggccacacccttaagcccttgcaaaagggcctcntgcaagggctggcccatggggtccccaccttcccagcccagtgaggttagcatggttaggagtccacatgtgtgcaagtgcttgtgtggaggctcatgtatgcatgtgtgtatatgcaaagctgcacatgacaatgtgcatgccagtccagagttagatgtacctatgcagttgccctcaagcgaagggtcatatttggaaacaaggatggctctaaacatgtaagcgtgcatgtgggcatgtatgtatctggggcctaaggaggtggggaagtgggtgttggggtaagggctggccttcagggcatttgcagaaggaggagtgggtgggagggaaaggctgggcagagcaggggaaggagtgaaagccaggcaggaaagtggaagaacaggagaagctcatgtaatggattaccctccacaggattatgttccttgattcctgagagttttttctcttgattttaccccctcagtctatcactgcaagagaaagaggtagaaaagacaaacagaccacaaaagacaagaacccagacatatagacagacgcacctgttgcatgtgcatnnnnnnnnnnnnnnnnnnnnnnnnnnnnnnnnnnnnnnnnnnnnnnnnnnaggcaggcagcccaccccctgcagcagtgctgggcttcactggagcccctgcaggaagtccagcagccctgtatgccactcctctggtttgtccaggtaacaggggtgccccgcccccttcatgatcagcacccggtggttgggcagctgcttcaggtgctcaaagctggtctgacccatggggtcctggtctccgtcagtgcagatgggggccactggcacaaagcccgggagctgggagccaggggccgtgaggaagggcagggagtacatgccactcagtgatggactgatcacaaccggggggcccagctccaaggcatccaccacagccgccaggaagctgccaggggccagctccccaataggggcaggggctgctgcttccttggagtgccccagacctggcaggtcaatggccacagcccggtagccagcctgggccagcctgtgcagtgtacccaggttctg

SEQ ID NO: 347566 - DNA, 587 bp, Homo Sapiens
ccagcattagctatatgatctaaccaagcagcacaagatgggcagggccatggcaatcctcttcccacccccagccactcagggctcaacagcagggtgaggctcaggtggaggtagggggtggggagcacaagggctacattcccccagtacaacatggcatctgaagcttgatgggagagcagaactggtgagacttgagggaagggtccagggcctgtattcagtcagaatcactgctggaagggtgcttgtgcatctatgagctttcttcattttcttctgcatcttcttgtctactatcactgctggtccaaccatgccaggagccaagggattcacaggagggattccaggggcaggcggtgggtatggaggagggtagggacccaacggttggcatcctggataccctggctgtggcacaggatgagggggcccacctggggggaaagctggattgccatggggagctcctgggggaggaggacaggggcctgggggaaagggtggattaataggtggtgggtgggcaggattggaacctccagggcacccaatattggggggatatggatttggccctg

SEQ ID NO: 347567 - DNA, 779 bp, Homo Sapiens
  misc_feature (561)..(561): n is a, c, g, or t
  misc_feature (691)..(691): n is a, c, g, or t
  misc_feature (700)..(700): n is a, c, g, or t
gaaaagaactgcatttttttcctttgtggatctgctttgtttggctgctgggatagataagcatgggcttaatgtgttcctcccagctttcttgccttttctgttgtactctgaatttctgtccctacctgcctcactttcttcctctctccttcctttccttcctttttctctaccaggccatttttcatatttacatcaaagatacctgaagtgttggtatctgagaatatctgtcactcctcttatctgagaagtgaccttttatttttacgatgactacagacctatttttagatatgtgttcagtacacttttgatcagcaactttttaattaaacatcttccagtgttaggaagttgagaaacgttcataggcaagtctgctgttctatgtcaccatcttttgtgtcccctagtcccccaggagctctttcctttcccctctagttttgggtgtgcatgtttggagtttgtagtgggtgagttgtaatactggaccattctgccttgctatgggttgttgaagatagcacaattctattctgtgacccttgcccnttgcattcaccgtacttaccacctacctgtcctgtggctgttgagcagcataattatcccgggagaatgattcccctcatagacagacacaagcatccataccgtcctaggtaagtagtcacctggtgtnctgggaatntgctgggtggatcttgagccctgaacttttgtattagatcatacccctggtgagagtacaggccatttagacacgatac

SEQ ID NO: 347568 - DNA, 455 bp, Homo Sapiens
tggcatttaatatgtactagctcatttaactcattcagcaattaaactactgagtgcctactatgttaagcagtagggaacaatgaaaaaatattgtctttgccttcaaacagttcaaagaagcatcataacaggaatttttaaaaagagagaaagctagcatttattgtacccctacgtgccaggcattgggtactcagaagagaacacatatagaaagtcatgtccacatggagcttacattctagtggaaggaaacagactagcaacaaggacttaaataaataagcagataattccagaacctgataaatgcaataaagataataaaacagtgatatgagagtgattagggagaggcactaatttagacagagggacaggaaaagcatctttgggatggtgacatttcagctgaggtttgaagagaagggggcgggtgtggtggctcacac

SEQ ID NO: 347569 - DNA, 399 bp, Homo Sapiens
atggcatcttcctgaggagcttgttttctgaccacgggaaatatgttgaatctttccggaggtttctcaaccattccacggaacaccagtgcatgcaggaattcatggacaagaagctgccaggcataataggaaggattggagacacaaaatcagaaattaagattctaagcataggcggaggtgcaggtgaaattgatcttcaaattctctccaaagttcaggctcaatacccaggagtttgtatcaacaatgaagttgttgagccaagtgctgaacaaattgccaaatacaaagagcttgtagccaagacatcgaacctcgagaacgtaaagtttgcttggcataaggagacatcatctgaataccaaagtagaatgttggagaaaaaggagcttc

SEQ ID NO: 347570 - DNA, 704 bp, Homo Sapiens
gagacgaattaagagtccatttattagctggtggccgagagacggctaacgctcgaaattctctcggcctgaagaaggggctagattttcttttatactttggtttagaaaggggaggggagggtctagttaaaacagttttacagaaataaagtaggcaaaaaagttaaaaggattaatggttacaggaactttaatagttccaggtgcaggggctttaagattattacaaggtgatagacggggggctttggggtgttatcaattggatgaattccttggaattgccgatatagcttgccacagtatcttatcagttaattgcattcttggatgtgcttggagtccgcttgcacaagttaagtccttgaggaagcggcttgcagtgaaagagccacgatgagtccatttgcgctcttagcctaaggagagtcatttacgttgaaacaaaggttattatttaaggaatggagagtttaaaacagggttgtaaaaccacggtggccctcctttccccctgtggttttggggatcaaatattgattccccgtattaccagggggtttattaggcttaaaaacataaatttcacaagctttcttttttttaaaaaatataaaaaatttatttattgggttacccacctaagtgcggttttaaggggcgaccaaccttggggaccatgttttattgggctttttggg

SEQ ID NO: 347571 - DNA, 853 bp, Homo Sapiens
  misc_feature (149)..(149): n is a, c, g, or t
cccaccccccctttttcccctccctcttttacacagcgggccaaggtaaaaagcctcccatgtggccctgggagaggttcgcctttttattcttgccaaacccttttgcgcccagtgaaagagggattgcaggagaaaattatttccanccatcaatccagaaaaaaggagggggcgaccaaaggagaataattagggctgtagcttcaaattgtgcattcccgtggcagggtgccctgactcgccacagcggtaacagttgacttcacttgtcttgctgcagttgatggctacatgaccagtttcaccacacctatagcacttcactttggtgcagtctttttgaatgtgtccgaattctccacaagaatagcatttctgctcatctgcatggtcgcagtcacgagccagatggcctggtttgccacagttgtagcagcattgctctcgctctctcttgggctccttgcagtccttggcaatgtggccacctctaccgcagttatagcaggcatcctcctgaagatcacaatccttggcaagatgaccagactcaccacagcgataacaaatatctggaagagacgaggaaacaaactggaaacctctatccgaggtaaaaccacctctgccacggcttctcattccacgaccacggcctccaccagtaggacattcccgggcccagtggccagatcgtccacacttgaagcactcattgctgctcatggctgcagtcagatcttccgcgtcggagcgggcccgcagcggcggagactcggacgcaggcctggggaagacggctcgcaaggtagaggctgtttattttgagggtccttgcctgcgccacccc

SEQ ID NO: 347572 - DNA, 951 bp, Homo Sapiens
  misc_feature (56)..(56): n is a, c, g, or t
  misc_feature (231)..(231): n is a, c, g, or t
  misc_feature (300)..(300): n is a, c, g, or t
  misc_feature (503)..(503): n is a, c, g, or t
ctagagggtctctttcccccaaagatataagtttccaccgggagaagagaatggtntttggcttttgttagatggcaaggagaaacccagggtcgcgccattaagagaggtttggcgcacgcggctttcactgtggtttggttccccccccaacagtaaggagggggtgtgtttttccaaaaactttcttggagggggctgtgggaggaaaaaaaggaaaccggtggtagnagatgggtgccgcaaaagtttccgcggagcgcgcagggcccgccaagggcaagacacattagggtgggngcacgggtcacttgtgctccacccactcccgctggtttgccagggagggggtccagccagtggctttattcccaaatataatcttcttcgcccattccccaaaatgcccccatttcttccgggccaaaatggtcgggcaaatccactggttttggttatttgctcaggccaggatttcttaaactcaagggaagattcgttgnggaagtcctgccagccacgtggcggatccttctcccttgctctcccatgaaccgcccagtctggttggtaaaggaaagagtgaaaggttgtgtaacaggcgggaccttcttttcccacactgatgggtcatgtcatcttccagtgtgtccagagctcggagaaccagataaaatatgcacactgcgttgcgcatttccccatccagcgcctggataacagctgcgaaactgcgactggtctgattgagatacttgtagcaagttttcaggctgctgctgagcgagtcctggtccatcttgggcatcaccttccgcttgcccccgatccggaagcgcaccaggttgtagaactcttcggggtggccaaggcatttcacgaactccatcctggcgcaggcggcggactcccgggcgcgactctcacctctgcggtccccaggcgctcccc

SEQ ID NO: 347573 - DNA, 581 bp, Homo Sapiens
  misc_feature (96)..(271): n is a, c, g, or t
cttaatacctgtgctttcaagttgccatacattttacttctagctatcacttgcattattaagatttagggttaagtcactaaagatatatcattnnnnnnnnnnnnnnnnnnnnnnnnnnnnnnnnnnnnnnnnnnnnnnnnnnnnnnnnnnnnnnnnnnnnnnnnnnnnnnnnnnnnnnnnnnnnnnnnnnnnnnnnnnnnnnnnnnnnnnnnnnnnnnnnnnnnnnnnnnnnnnnnnnnnnnnnnnnnnnnnnnnnnnnnnnnnnnnnccaaatatgcaacatgatgtcagattatgatagctgttttggggaaatgaaaaatcagggtaagaggataaagaatgacatagtggggagatgggacctctttagaaaaggtgaccagagaaagcctctctgagttgatgacatttaaggagagatgtgcaggatgtaaaggaccaagtagagtgctgcaggctgaaagaagaacatttgcaaaggcccttaggtagaaacaagcttggcatattattggaaccagcaaagtccatgtagctggagcctatgaatgggaggaaagggcagagcatagcag

SEQ ID NO: 347574 - DNA, 541 bp, Homo Sapiens
ctaaatacacaggcttttatttgttttcttcagattgctttttcgtgaatataaagatgaggagtccattctgcaacctaaaaatatttacttattaaaactatattaatactttaataaactatacagttccctgcagagggaattcccagcatgacctcattcatctgtgaggacacagagcagtccttgtttagacatacacattcatctactgctcatcatggtcagccttccacttcttgatggtttccttctgctatgaatgcgcatgtccggttgtctgcttcttagagcagacatttaccttcctcatcccccagccattggagggggactagggccacgcagatgattgattctacccattcttcgggaagggtttcctggtggtttcacatcttgctgaagcagagttttgaaaaccaaaaccacaaactcagctattccccagaagaaatctgttatcaaagataatctccatggagactgactgcggctgtccaacacgtgtccgttcgagatgtaaaccatcgtgtcc

SEQ ID NO: 347575 - DNA, 308 bp, Homo Sapiens
gcttctctgccccttttccatttcttttgtatttgttttctgtgagagcactgaaatggcggccctggaatctacaatttggctctccactgagcaccttatcttgccaccttagccttaagaatgaatatgaagaggatggggacaaggaaaggatcagatacctgctccagtagttgtgaggccactgtgtctcaggggactccaggaagagcagaagagggatcccacgaagttatttttatgcagctggggccaggagggtcagagtggtgccaggtgcaagttaggctaaagaagccaccact

SEQ ID NO: 347576 - DNA, 578 bp, Homo Sapiens
ttatcttgcactttcaacataatcatccctgcttctcatctgccctgcagtgctcttggacctggaagatctccctgtggtctggcccctttgccttggttgttaacctccagcttctttgcaggagtgtatttccccaaaacttgtggctttcacagtagactccgtttccatcctctctctcacaaaggatgttaagtatgcctggccctcacacagtccatgggaaaccttatttttaacattactccattgagtcaataaatatttaccatctgctgtgtgcaagttactaggcaaatttctgtatccttgtccctaaaattcttgtctttaaattcattgtggaatttctttagacttcacactgacttttattactaaggtcacctttataccaactgccttcctcaaaatgcttataatgaaataacagaatcttgagttggaaacagcccaaagaaataatccaatgttgtactcagtgcagaattccctagaatttctaacaggttgtcattcagcttctgctaagccatgttcaaacagcttattccatttggaactgcactgatatt

SEQ ID NO: 347577 - DNA, 422 bp, Homo Sapiens
atttttcagtagagaccgggtcttgccatgctgcccaggccagtctcaaactcctggcctcatgtgatctgcccacctcagcctcccaaagtacagggattagagttgtgagccaccgctgccagcccagagttaccctctaaagataagaaaaaggctattaatatcatactaagtgaaggacaggaaagggttttattcataaattaaatgtctacatgtgccagaatggaaaggaaacaaggggagacaacttttatagaaatacaaagccattactttattcaatttcagaccctcagaagcaatttactaatttattcttcgactacatactgcagcagaaccagcaatacacttgattttttgagtcactcagaaatccttcaaacatgattaattatgaagatgaaacactagag

SEQ ID NO: 347578 - DNA, 377 bp, Homo Sapiens
aaagacctataaattttctttttgagagaaagggtaaagaggtgagggttcatgtcacttaacccctacccttttgggcaaattttgtctcaggtagtgtttcattccctaaattaatacctgtgcttccttgcctctcaccttcccagttacttctttggggtattactgtggcacattgtacacccagaaaaggcacatacagtgattattttgtgggaaatacttgattcttttgaaatatatttggagggggtagctagctagccactgtcaaaactaatgctgtatttacaggacaaaaacaagtagagttggacacctcagtaagagacagcattaactaaaagtactgactgccttttaaaggaattttt

SEQ ID NO: 347579 - DNA, 634 bp, Homo Sapiens
  misc_feature (594)..(594): n is a, c, g, or t
  misc_feature (612)..(612): n is a, c, g, or t
caagtacacccgaccttgcctggtaaacttttttgtcaaatgtttatactcatgtaaacaccactcccaatcagtatacagaacatttttgccactctagaaaagttccttcctcatgctgtcttgtctgtgttcaccattcaaaggtactttctattgtgatttttaccaccagaaattttgtcttttctagaactccacattttattttatatctaacttatcttgctcaccatgcttttgagatttatccatgatgtgtgttagaaacatactcctttttcttgctgagtagtattctattgtgtgaatatcacaatttttacaatctattcttatgctgacaggtatgtaggatgtgtccaggttttggctatttacttagtactgtctagcagggcttgtgacgcacgcacttgccctcgagataaggcatgtatacagacgcgtatactgagaccaccacactgtggacacgaggcgacactatagtgagcctcgcaagtgccaggcggacgccttaaggagtcagctcttggtcactagaacggaaggcctgcaaattaaactgaaagactcctttacagaaagganatcaagagctacactagngacgagagcttcggggaacccc

SEQ ID NO: 347580 - DNA, 128 bp, Homo Sapiens
cagtagaaaccattgaagtttattggcggtcacaatgcttacactgtatgcagcaaacacccttacaagtctatccgcaacctgatcacgcaagaaaggattcatcacacagtcgccagaggagaagg

SEQ ID NO: 347581 - DNA, 211 bp, Homo Sapiens
ggagctctttcaaaggatttatttgctacagaattgcttgagtccaccaatgagaagaactcaggatttctgtgtttaaaaggattttgcttactgctttatttttacaagtgctgccatatccaaaaagcacttctttttgccagcatttggcatgtctataagaggttagaaaaagtcagaatctatagaattgatgtctaaaaatagg

SEQ ID NO: 347582 - DNA, 1050 bp, Homo Sapiens
  misc_feature (184)..(184): n is a, c, g, or t
  misc_feature (186)..(186): n is a, c, g, or t
  misc_feature (188)..(188): n is a, c, g, or t
  misc_feature (677)..(677): n is a, c, g, or t
  misc_feature (951)..(951): n is a, c, g, or t
  misc_feature (956)..(956): n is a, c, g, or t
  misc_feature (967)..(967): n is a, c, g, or t
  misc_feature (969)..(969): n is a, c, g, or t
  misc_feature (977)..(978): n is a, c, g, or t
  misc_feature (996)..(996): n is a, c, g, or t
  misc_feature (998)..(999): n is a, c, g, or t
  misc_feature (1019)..(1019): n is a, c, g, or t
  misc_feature (1027)..(1027): n is a, c, g, or t
  misc_feature (1029)..(1029): n is a, c, g, or t
  misc_feature (1036)..(1037): n is a, c, g, or t
  misc_feature (1042)..(1042): n is a, c, g, or t
gcggggcagaacataggttgccttagagaggttccccggtgtcccgacggcggctcaagtcagagttgctgggttttgctcagattggtgtgggaagagcctgcctgtggggagcggccactccatactgctgaggcctcaggactgctgctcagcttgcccgttacctgaagaggcggcggangngncccctgaccggtcaccatgtgggccttctcggaattgcccatgccgctgctgatcaatttgatcgtctcgctgctgggatttgtggccacagtcaccctcatcccggccttccggggccacttcattgctgcgcgcctctgtggtcaggacctcaacaaaaccagccgacagcagatgtgagcagcggcacacgggtccgggcagggggcaagggctaaggaaggagtggctagggcaggggcgggaaccggggtgcttgaccacacgtgaagactcagaactaacccaggcagcctggaactcggagaggtgatgagcagaacttactcgcattggggaaaggatgggtagggacccttgggtatatctgggactctggcagtggtgctttcctccctccgcccccctcaccacttaccagaataaaaaaccgggaatgagaagaccactttgggttactgtaacacctgcactagtgagtgaccacnccccctttcctcttccccctcgcccccttgctgctgggccacagcccagaatcccagggagtgatcagcggtgctgttttccttatcatcctcttctgcttcatccctttccccttcctgaactgctttgtgaaggagcagtgtaaggcattcccccaccatgaatttgtggccctgataggtgccctccttgccatctgctgcatgatcttcctgggctttgcggatgatgtactgaatctgcgctggcgccataagctgctgctacctacanctganaaaataaaaancntaatagannatttaacaactttggcananngacattgtggtgcccagccntccgccgntnattggcnncattngacttggg

SEQ ID NO: 347583 - DNA, 610 bp, Homo Sapiens
tcaagcctcgaccaccagataccaccactttggcacctgttagctctggtcgatcactttttgttaatttctggtcaagccactctgatatttccactggtgaagtacttgatgctttttctgaactggcactaccgccacttgttgctgcagcatcaaaggatgttccacggacagaaaacactttcactttctcatcacacttcactgtacatagagcatttcctgcataaatagttctcacaaatgtgtcaggtgacttgattgcaatgatgtcagaaatcggggcaacctcaagtttggctgctactctgggcaaaaggttctttccgaaggcagatgctccagcacagatgtgtgtgtaattgaactgcttctgagttgccaaaatcaatggtgtcagttcctctggaagtaggcctttgtacacatcatgctgagccaccagaacttttgctatgcctgctactttacagagatcttgtgccaccgcccgccggagctgccccggagccgccgctcggaacatggtctccgcttccgccgcaacctcggccttacagcagccccgtgcccggccaactggcgccgcctcagccagtcacctaat

SEQ ID NO: 347584 - DNA, 627 bp, Homo Sapiens
ggaaatggggtaaatccttgaaaaagccattggctttcaaggttggaaactgcaataaccatcctagcctggtaaggggtaggttattcaacccatgatccccttgttgtacaggatatactcgaaagcttggctggggagaacccccttggcagctgtgattattgaagtcctgggcgcagtccaccagttgctgttcggccaaggacagcatctttcgggtttcgatggcgattgcagacttcacaggtgagacataatttccttttttccgccagtccacgtaaggtgggtagggaccagtacctcgaaggtagttacttttggtggctgagcaattctgaggctctgaccagagatacttgtgttttatttcagcaaagctcatgtctgaaaattggttcagtgccattttaaatgtgtggttcccattgttgtgggcgtttatcttcctccagttgctggcaaacgtctgcagcctgtggtggtactcctccgtactgtaggtctttcggtgcttagacatccatgactttaagtgaaacttctctaaggagttcacgcacagttcggcggcaccgcagacggggactcccaggagccaggccccggcgcagagcagcggca

SEQ ID NO: 347585 - DNA, 601 bp, Homo Sapiens
  misc_feature (373)..(373): n is a, c, g, or t
agtgacttctcacagctgcaaacaccctgggccagatttcttaaaccagctacatgacaaaaccaatgctattgacatccaataatgctaaagcttgggtacccaaccacaaggaaaggaaaatggaatattctttggctcttccagcctagacacaactcctgacctaagacattgagtggagagtcctaaccctttggaagttgaactttctgctttcttcctgtgactttggaactgagtttgcaacagaggacctgccatcatgctgcccatggattttgtgttaacgctgggagaattctgtcctcctcttgctgacaagctcttctggccacctgaatatcttgagatactgcacgtggtgacagcnccgccccccaaaactcttagaaaccagatctgagaaaaagcatataaaagtcacatcagtgttgtgtgacacaaacatcggaagagtacattgcctagttttcttgcacacacaatttctggacataacagcatatttgctagaaagcacaaccctggccgttgcacaacttcactaaatgctgttctcactccacatcccctacgagtgacaatggtagccacggtg

SEQ ID NO: 347586 - DNA, 1009 bp, Homo Sapiens
  misc_feature (52)..(52): n is a, c, g, or t
tttccccaagccaggcaagggaaacctgatggacccactaaaggcgcggtcncccttcttcaaaggccaataaagggcattttttcctccaaagttccaacagaatttttcccaaacctttttctggcccatcagggccccaccgtttttcccccctgagggctccccagggaaggacagcaggtttatttcgttcattctttggcccatgctgtgcccaatatttgctcccccccaagtcaaggaacaaattgcaccaggcagcttgttgtcctccagaacctgggctattatctttgtgacagccacactaatgagggaagtggttggagctcctttccagaggcagacattcccccagatcatggcgatggcgttgttccaaccatacactgccacagggaaattgaatgccgtgatgattccaaccaggcctacgggattccactgctcaatcagtgcatggccagatctttcagaaggcaagataggtcctccaatcatccttgataaaccaacagcatagtcacagatatccacatactcctgaacttcacccacccccttccactaagattttccccatctccaaagacaccaagcttcctagtacttggatcttctcccgcaaggcatcgccaatctgtcttactatttctcctcgttttggagcaggaatatctgcccagattttccatgcttctcttgctttctttacagtttcttcatagtctgccacactggcctgtcggactcttgctattggctcgttgttagcagggcaataggtcgtaataacctctccccggcctccccagcttccattatacacgccctcgttttcctcgcggagccccagctctttcagccacgcatactggggctgattgatgaggagagtggacatgaaggcggcaggcctgctccaaggtccagagagcttgctggtctttgcagcgtgcacacacagcgcgcgaggaaggccctcgtgccgaattcgccacccagc

SEQ ID NO: 347587 - DNA, 592 bp, Homo Sapiens
cccttggggcctaagtttaggaaggcgggcctgaaatccacgagacagaaatgtctccaagccttccaaccggatattaagtcctccactttggaaggagggcaaccgttgggcccaaaacctggtggaggttatggccctctaagcgaggagttcagcaaaggtgatcttgtttccaccaaccatggcgtcttcccaagtactgtaaaaagtccttcttctgtgtaggaagttcctccaagtattctggcggcagtttatcaaagcgagggctgtagcagactctggccagttgattggagacgtacatagtctggttctctaaaatgtccgctcgaatcttctcgtcttgtgtctcgccacacgtgttgtgcttgcgggcaatgtagcccaggatggcgttgctgtgggtgatgttgtgatcattcagccactggtttctgtcatagtcaggagcgtcccccgtcgtgtacttcttttcctcgtagcttgagtctgtgtattccaggagcaggtgtatggcgtgggccaggctgtgtatgtcccagtaccccagtgtcatgtgcatggtgctggttggtgtcgattgagc

SEQ ID NO: 347588 - DNA, 738 bp, Homo Sapiens
  misc_feature (353)..(353): n is a, c, g, or t
  misc_feature (359)..(359): n is a, c, g, or t
  misc_feature (472)..(472): n is a, c, g, or t
  misc_feature (600)..(600): n is a, c, g, or t
ctcactttgccttgtgttttccaccctgaaagaatgttgtggctgctcttttttctggtgactgccattcatgctgaactctgtcaaccaggtgcagaaaatgcttttaaagtgagacttagtatcagaacagctctgggagataaagcatatgcctgggataccaatgaagaatacctcttcaaagcgatggtagctttctccatgagaaaagttcccaacagagaagcaacagaaatttcccatgtcctactttgcaatgtaacccagagggtatcattctggtttgtggttacagacccttcaaaccggatcaacaatgccttctttctaaatgaccaaactctggaatntttaanaatcccttccacacttgcaccacccatggacccatctgtgcccatctggattattatatttggtgtgatattttgcatcatcatagttgcaattgcactactgattttatcanggatctggccacgtagaagaaagaacaaagaaccatctgaagtggatgacgctgaagataagtgtgaaacatgatcacaattgaaatggcatcccctctgatcccctggacatgaagggagggcatanttatgatgccttcatgacagaggatgagaggctcacccctctctgaaagggctgtgttctgcttcctcaagaaataaacatttgtttctgtgtgactgctgaacatcctgaataccaagagcagatatatattttgtt

SEQ ID NO: 347589 - DNA, 784 bp, Homo Sapiens; identical to SEQ ID NO: 162253

SEQ ID NO: 347590 - DNA, 585 bp, Homo Sapiens
  misc_feature (266)..(301): n is a, c, g, or t
  misc_feature (450)..(470): n is a, c, g, or t
tcaatgaagctttgcagatcaccatgtggttgaaggttttagttgtggacacagtggtccctccttaatgatgaagatcactgccttggcttcatggaaaacaggcccagcctggggctgcgctttggatttattgtttttattccacacttcctacttggtctctggaagttttaccacatgtaacagattcctttatatgtagtgaaaatcactatttgtagaaactgtcaggtcaaaatatttaactgactgttgacatgtannnnnnnnnnnnnnnnnnnnnnnnnnnnnnnnnnnnctgctttaagatatataccactatgtatatccagttaactggagagaattttgactctcttaataaaactgcattaagtttttgattttgtagaaattagcttttgtctaggcaactagtggttatactctgcaaatattgtaatgaannnnnnnnnnnnnnnnnnnnntaataaaaattggtgcagataaaatgtcaaatgaacaaaccagtgttctaagagtgttactaacattttgttctaaaactgtccttcacaaattgaataaaaaactctcacactc

SEQ ID NO: 347591 - DNA, 1106 bp, Homo Sapiens
  misc_feature (627)..(683): n is a, c, g, or t
  misc_feature (817)..(817): n is a, c, g, or t
ctttttttcagcgcctgcgcgctgtcacgttacggcggaactaatccagcgacgcctgcgctttgacgcatttggtgccgtggaagggaaaaagggggactgcagtatgcgtcacacccggaagcggcgagccggaagtggggttagccaggttatccccaggggtggagaagcggaggcccaggaggagggggaataaagaaggtggaggatcctggctaccactctgaatccgataccgcttctcttagacctcagcgacagaaaaagggaagggtgtctcatcccccttcctcctctcctccctgtcctgagccttagccatggccgaggcaggggctgggctgagcgagaccgtcactgagacaacggttaccgtgacaaccgagcccgagaaccggagccttaccatcaaacttcggaaacggaagccagagaaaaaggtagaatggacaagtgacactgtggacaatgaacacatgggccgccgctcatccaaatgctgctgtatttatgagaaacctcgggcctttggcgagagctccacggaaagtgatgaggaggaagaagagggctgtggtcatacacactgtgtacgtggccaccgcaaaggacgccgtcgtgcannnnnnnnnnnnnnnnnnnnnnnnnnnnnnnnnnnnnnnnnnnnnnnnnnnnnnnnnccagggccaatgcagcactaaatccctctctcctccagcattcctgtgtctgtctggccctaaatgtatccatgtggctacttctccagccccctccttccctctcttctgcctgatagagggaagaggaagangaggacgaacagagatcctgaaattctgacttgctgctattccagaacccagccctcctgggtttccccagtcctcatttttcctcccaataccccacccttctctctccgagggatctaggcacccttggtccccaggggtcttcctttttgggtctccctgccaaacctgcctggccctgggaatctaacttattcttgggccccgggcacctcttcaaaattgaggtaaccggaccacctctaaatttggcgcgcttttcaacaaagacgccccaaatttttttac

SEQ ID NO: 347592 - DNA, 564 bp, Homo Sapiens
ttgacgggaggcttgtgttttattcaaggcttgtcagcctccctccttccccctgcgggtgaggtaggagggatagggttgggggagggaacaggggctaggaaggggcagactgcagctgccctttgtagacatattccagtgcagtggcaatggtgcgcatgtccagctcgatgctccgagcccagttctccacatccccaatttccttgagtgcctggttgaagttctccaccattccgatccactggcctgtctgcttggcaaattgggcagcctggacctgtagggtcttcacctcatggtccagctttctctggttcatgtaggcctgggccacacccacattgaggtgatccaccaaagcttctgtcaggcaggtcgctgcagtgatagcctctcgcctcctcttttcctgcagctccttgcgttcattctgcttggcctggtgttcttttaggaggcgggacagcatggtcacgtcgggctgggggctgggtacgccgggccccctccggctccggaagctggaacgctcacctcggctccccggggccatgtcac

SEQ ID NO: 347593 - DNA, 1605 bp, Homo Sapiens
  misc_feature (102)..(113): n is a, c, g, or t
  misc_feature (364)..(372): n is a, c, g, or t
  misc_feature (451)..(460): n is a, c, g, or t
  misc_feature (474)..(514): n is a, c, g, or t
  misc_feature (540)..(540): n is a, c, g, or t
  misc_feature (557)..(571): n is a, c, g, or t
  misc_feature (695)..(781): n is a, c, g, or t
aagcacccatacacgggcgcgggggggttccctccttagggtgtttgtggcgggcggtggcgcggcgcccgagtggtagcgcgcggggggtgtgcgttcctnnnnnnnnnnnnttggatggttgcggtcggcctggggtggggagggttgcggacggtgggtggttgccgggggggtcgccgcggtgggcggacattaggctgggcggggggtgactcttggggataccccggaatgtggcggggcaaccacccgggggggcggaggatacacccggccctgttatacgccccgggggggcgtatcttggcggggcggggtatttttttgttgggccgcgttgttccgccccggggcacggtgnnnnnnnnnctttggccccctgcttgttgggcccgacggggggtatttacccgccccttatatgggctgggcggggctgccccccgcnnnnnnnnnnagaggaccccagannnnnnnnnnnnnnnnnnnnnnnnnnnnnnnnnnnnnnnnnccgcgaaaaggagtgtgttcaacggngcatggggccgtgtgcnnnnnnnnnnnnnnntttttgtcctttccctttatggtcaaaaggccgtctttttgttgtccccccagaaccgcccgggggggtgtgtgactggaggggtttatgtggggcgggcgattatctcggtggtaaacgttgnnnnnnnnnnnnnnnnnnnnnnnnnnnnnnnnnnnnnnnnnnnnnnnnnnnnnnnnnnnnnnnnnnnnnnnnnnnnnnnnnnnnnnncaagatggagggcgctttcgtgccgcccgacgcgcgggggaatagccctgccttgcccggggggctggctgcgtaatacgggggggccccggggccgttggtgttttggtatggtgtggcgcgcctcttcggccagacaggcagggatgggtagtcgggagctgcggttgggcggtgaaggggaccttggggagggcggggttcccccagcaggggggacaggttggcccggtcgatgtgcagccagccgataaagttgccgggcgttgtccatggctctccaccctccaccctccacctctggctgcagcacctgttccttggtgaaaagtgtagcttcctcggtgaagggctgtccttcctgcaccaagcctgggaggtttcgggctcctctggggcattcaatgcctgcaagcaagaaggtgataaggcaagtttcctttggcaaatagagtttgagacgaggaaccactgaagacgtattccaccacagcttcagaacgacctgcccgctgaagaaaaggcaggaactgctttgctttttgggtatccccagatatatgtgcaacgcggtggataggcacttccttcttggtatgcaatcctttgccattcttaatagctctggcctctgcagcaagcagttcatcgtagtgtgctgatctctggtcatcatcctgccggtatctgatcactgtggctagacctttgctggcaagagcctcagcaatgtttattcctcgcaatggtgacagtggccctcgtgccgaattcgccacgcgggccggcgggcctccgggcgcgcccgcgcgcggtacttacat

SEQ ID NO: 347594 - DNA, 1527 bp, Homo Sapiens
  misc_feature (1214)..(1214): n is a, c, g, or t
  misc_feature (1430)..(1430): n is a, c, g, or t
aagcaggctcgtacggtccggaattctcgggatatcgtcgaccacgcgtcggcgaagagagcgcgcgctccccacgtcctgcgctcctggctgccgggcattcgtctcagccgtgactctcgccaggccggggctggcgcgcccacgtctgaagagcgatgccccgggagatcatcaccctgcagctgggccagtgcggcaaccagattgggttcgagttctggaaacagctgtgcgccgagcatggtatcagccccgagggcatcgtggaggaattcgccaccgagggcactgaccgcaaggacgtctttttctaccaggcagacgatgagcactacatcccccgggccgtgctgctggacttggaaccccgggtgatccactccatcctcaactccccctatgccaagctctacaacccagagaacatctacctgtcggaacatggaggaggagctggcaacaactgggccagcggattctcccagggtgagaaaattcatgaacgacatctttgacatcatagaccgagaagcagatggaagtgacagtttggaggtacccccagaagctagtgcagacttattcagtgtttccctaccaggacgagatgagcgacgtagtggttcagccctacaattcactcctgacactcaagaggctgacgcagaacgcagattgtgtggtggtgctggacaacacaggcctgaaccggattgccacagaccgcctgcacatccagaacccgtccttctcccagatcaaccagctggtgtccaccatcatgtcggccagcaccaccaccctgcgctaccccggctacatgaacaatgacctcatcggcctcatcgcctcgctcattcccaccccacggctccacttcctcatgaccggctacaccccgctcactacagaccagtcagtggccagcgtgaggaagaccacggtcctggatgtcatgaggcggctgctgcagcccaagaacgtgatggtgtccacaggccgagaccgccagaccaaccactgctacatcgccatcctcaacatcatccagggagaggtggaccccacccaggtccacaagagcctgcagaggatccgggaacggaagttggccaacttcatcccgtggggccccgccagcatccaggtggccctgtcgaggaagtctccctacctgccctcggcccaccgggtcagcgggctcatgatgngccaacacaccagcatctcctcgctctttgaaagttcctgccagcagtttgacaagctgcggaagcgggatgcccttcctcgagcagttccggaaggaggacatggttcaggaccaactttgatgagatggacaggtctagggacagtgttcaggagctccttgatgagtaccatggcgccacccagccagaataaattttcctggggcaccccangagcagggaattcccctcccccactaactccttcctccttttaaaaaggggaaaccacccgccctccgaaccatgggccgggcttccactctccgac

SEQ ID NO: 347595 - DNA, 635 bp, Homo Sapiens
agtttttttcctgaggaaagctttttctttagctaaaatcaattgtgaacgatttttgtggattattttttgtatgtgtttagtgtgagtagaagataaactttttattcataaaccaggaagcaatgttctttatagtgattctcttgtgtacatgcttgtgaattaaatttgtgtaaaatcccttggcaattgggtcttttaatataggaccaaattaaaacattttgctgagtatgtatagtttttcacacatttcattaggtaaataatggtttggtgatcatacatgagaaatgtgcacattaaaagggcttgctgacaacttgcacaatgttgaacatagcctttaagcatcatttaaattttaaagggatggagttttttagcctgtgggccagcactggtcaagagaacaagatggcaacatatatgctttcagggtcaaatttgagcaaactgtgaactgtgagggtgagatgtgaacacatcaatgccagattcctgtgttgcgcattgtcatggggattttaagtgaacctttctaaatgtgggcttggtcacatgctccacgtagctgtgaacttacaatcatcagcttgcaggttgtattgactaaagcatttcagtggcct

SEQ ID NO: 347596 - DNA, 546 bp, Homo Sapiens
  misc_feature (483)..(483): n is a, c, g, or t
ttgtacttaatacagtgtagttttatttatttacgtttttcatcagaaaagtcatcttggagtttattgatttaataagcctgtgcaagcaaaagtactataaagcagtgcatagctctgaggggttattgaaattagtatcgttgggttaacgtttgtagcagggagcccttttgagttgacatttgcatttgtttatttgtttttcttcagaagaaggagccagaagaccatctggaactcactgagcatagctaccatcttagagggggggtaggtgtaggatattctggactcactgaggggatatagttagaatggcaggtgcagcatgagttgccatatgatccaaggaggaatgagtccaaggaagtcttttaaacctgggaattattgaaggtgactgtggcaggaaatatttccccaagatagccacatcaatgtatttcccatctcacaggtttgttttacaataaagaaatngacacatcacctttagggtggcgatggagggatgttcttgttccttcccttgaaatgggcaag

SEQ ID NO: 347597 - DNA, 424 bp, Homo Sapiens
tttttttgcatcagtaagaaagtttattgaaattcattagtaaatgagaacagaaagttgtttttctttccattaaagaacactttctggtaaagtgaaaagaagaaatacagaaaccacaaaacaccttgtagacaccttattttcaaggtctatttccatagaccatcaagacagaagtgttttcttggagactttgttttccatgcatctgtaaataatggtctgtgtgaagggagactctttcctcttgatgcagtttaatagtagtgtttcttggtttctgattcaaccatagatgaaagaactctaccgtcgggcgccacctcttcaataattgtcttgattactctggttttgttagtatcttggtcccttagatgaagactcgcccacggacccggaagaggaggacttgtggcct

SEQ ID NO: 347598 - DNA, 382 bp, Homo Sapiens
tgtttcttcaacagggaactggcctgaacagctcaagtgttgcttcattctctgataataccaatttgtcttgattgggttctgtggcttgcattcctcagctgggagttgtttgcttagctcagaaatctctgagctagtgattcagctagggacacaggtcaagggtaaaagccatctggtgtctcagggagagttaagccttgagaagccctccagaccagcacgaccttcctctgggttgtagttccaagggccatatttaccctgtgtagaggatcctgccctctgtggattatgtagagcctctcaggcagttctgcgtagagctgtctgctgtggttgtgcattgtgtccaccaccacagggctctgggggctcc

SEQ ID NO: 347599 - DNA, 436 bp, Homo Sapiens
  misc_feature (218)..(232): n is a, c, g, or t
  misc_feature (262)..(368): n is a, c, g, or t
ctctttaatctattgatttattagctttgaaaaaggaatcataggaactttagatccttacaatatgtcattactctaatatgttcaggtttttattagcggaatttagaccaggagctatcttttcatctggtcctgtactctgcagaaaatagctcttgctgaagataggccagtaattgatctcttccatcttaatgatgttttccctgtctatnnnnnnnnnnnnnnntttggccgggcacagtggctcacggctcannnnnnnnnnnnnnnnnnnnnnnnnnnnnnnnnnnnnnnnnnnnnnnnnnnnnnnnnnnnnnnnnnnnnnnnnnnnnnnnnnnnnnnnnnnnnnnnnnnnnnnnnnnttagccaggcatggtggtgcatgcctgtaattcctgctactcggtaggctgagccaggagcatcgctt

SEQ ID NO: 347600 - DNA, 1118 bp, Homo Sapiens
  misc_feature (6)..(6): n is a, c, g, or t
  misc_feature (9)..(9): n is a, c, g, or t
  misc_feature (27)..(27): n is a, c, g, or t
  misc_feature (39)..(39): n is a, c, g, or t
  misc_feature (54)..(54): n is a, c, g, or t
  misc_feature (77)..(77): n is a, c, g, or t
  misc_feature (105)..(105): n is a, c, g, or t
  misc_feature (107)..(107): n is a, c, g, or t
  misc_feature (119)..(119): n is a, c, g, or t
cccacnccnacacagcccaacaaagcntgccccgaggtntgccccgggtgtggnggccggaactcccgctccacagncaccaagacctgagctgtccctgtcccncngggtgagcaagngaactagatttatttttttaaaaacaggtaaactgatttctctttaaaaaaataaaatctctggtctgctaaggtcacttcagctgtttttaaagtggcttttctctggaatgatggaagttgtcgccagggggcccggccgtgggggcctgtgcccctagatggtggacttggagaaggagacccgcaggtggtggttctccccgaggtcgtggttgtgcaggtcaatgagggcctggaccgcctcctccacggagcccatctggatcagtgccatcttgcggtccttctggaagaacttgaatcctttgacgacgcccccattgctggaaaacaggaccttgagatcctcctcggagactgagggcgggatgttggagaggtgcagcgtggccgagggcgggaatatgttctggaagttcttggagcccggcttcttgaagcggtgcaggggtgagttgccgtagtccttggtcaggccctgtgtcctcctggcctcgcggggcagctgcacgttctggtgcttcgagagcgtgatgcggatgggcttcccgtgcagcttgtgcccgttcaggtggctcatggccagctgggcctggttgccgtccgccatctgcactagggcgttctccttcttattgaacaggatcttcacgcgctgcacgtcaccgtagacgccgaaaagaataaagaggctttggggtgtgactctctctgggttgaggttgctgaccagcaatacagaatttcctgcccccgccaggcccgggatggcgatccgacctgccgccgcagctgccgccgccgccgaggggatggccaggggggccagggcgccgtggacgttcggaacggaaaggcctgcagcttgaggaatggcaaaggtgggagggaaaccagctcctgcatacggagaggctgagattataccaggtgcaccgaaggccgcggccatggtctggtccagcgagggctggcatcccgggaattccggaccgg

SEQ ID NO: 347601 - DNA, 783 bp, Homo Sapiens
  misc_feature (27)..(27): n is a, c, g, or t
  misc_feature (34)..(34): n is a, c, g, or t
  misc_feature (36)..(36): n is a, c, g, or t
  misc_feature (54)..(54): n is a, c, g, or t
  misc_feature (58)..(58): n is a, c, g, or t
  misc_feature (60)..(60): n is a, c, g, or t
  misc_feature (65)..(65): n is a, c, g, or t
  misc_feature (69)..(69): n is a, c, g, or t
  misc_feature (79)..(79): n is a, c, g, or t
  misc_feature (82)..(82): n is a, c, g, or t
  misc_feature (90)..(90): n is a, c, g, or t
  misc_feature (109)..(109): n is a, c, g, or t
  misc_feature (126)..(126): n is a, c, g, or t
  misc_feature (139)..(140): n is a, c, g, or t
  misc_feature (192)..(192): n is a, c, g, or t
tttttttaaaaaacaaaggcccaaatnaaattgntnaaatacgactcaacttanaagncnaaaantggntaaccgggcnccnccccctcnaaacttaatcttcgtgggnccccaaacaacgccggnaaactaacaggtnngcctaccgctccctggtgcccccacaccttcgaatcggagctcagcgacccntgtggagctccctggtggcagaaagctgatgcagccgcgggcccagggtgctgttggtgtcctcagaagtgccggggctgaggcctgggagggggtccgtccacgtgcagctccaagcgctcgctgggcgcggagcccccgaaaggcggcttcaggtccacgtagacgcagctgtagttggcggagtcagccacggaaatgttgtgcagctcgaagagcgcctcggtcccagcggggctctggaaacggtgcacgcggcgcccgcccctgtcctcgcgcaccagggcgaagcgcgcgccctccaggggcgccaggcaccgcagccgcaaggccctgccggactccggctccggggagaactccggcgcgggcagcgtctcatcgctcagaatcagctcgaccggcgcgctgtccccggaccagccgttttggtggtcctgcaccctggcaacaaggtgaccctcacctgcgtggctcccctgagtggagtggacttccagctacggcgcggggagaaagagctgctggtacccaggagcagcaccagcccagatcgcatcttctttcacctgaacgcggtggccctggggg

SEQ ID NO: 347602 - DNA, 542 bp, Homo Sapiens
attgctgcagacgctcaccccagacactcactgcaccggagtgagcgcgaccatcatgtccatgctcgtggtctttctcttgctgtggggtgtcacctggggcccagtgacagaagcagccatattttatgagacgcagcccagcctgtgggcagagtccgaatcactgctgaaacccttggccaatgtgacgctgacgtgccaggcccacctggagactccagacttccagctgttcaagaatggggtggcccaggagcctgtgcaccttgactcacctgccatcaagcaccagttcctgctgacgggtgacacccagggccgctaccgctgccgctcgggcttgtccacaggatggacccagctgagcaagctcctggagctgacagggccaaagtccttgcctgctccctggctctcgatggcgccagtgtcctggatcacccccggcctgaaaacaacagcagtgtgccgaggtgtgctgcggggtgtgacttttctgctgaggcgggagggcgaccatgagtttctggaggtgcctg

SEQ ID NO: 347603 - DNA, 991 bp, Homo Sapiens
atgtttgggtgtgcgtgccggtcggtgcctggtgtgcggtgggggtagcccgctggtgtggttcgcgttctcccctgtccggcccgtcctgtggtccgactgtgccgggttttcgatctcgggccctcatgttcctttcgttgccgcttccctcctgcttccctggcccatggcctggggtcggccctctctgctcctggcccttgccgtccactttgtaacgtaggcaaggtggaaaatcccaggctttgaaggaatgctggctccgaggggaggaaaagtagccccctgctttccaccctgaaccttgcaccatggtgttgggcccttgacgcaccacaccagcccatctagttgatcatctttgtgccgatcgaaagactgtcttccgctgctcctgcaccttgcagcttccaccgctgctgggcaccttccacacgctccaggactgtgtttggctcggggtcccccgagggatgcagcagctgctgccatagagcgagcatcctcattctcctcctcattgtgcagttgctcagtgtatgccatccggctttcggatcagagggtccaccagcatcaggaagtccatgtagagcaacagggcacccaccacggacaggtagatgacaatgatgaccttgatggtggtggtgctgcgctcctcgtacctgcactcgcacagcaggcagtaggcctccacgtcatggccaggcactggcatgggctccaccacgtgcaggcagttgcagtccttctgggatacattctggttgtaaatgtgcccactgatgtttctataaggtggacagatgcatttgcaccggatatcttcagcactcttgttggcttcagctgggggcaccagccacacccgacccacagccaccaaagataagagccttcatgcttatcaggcttgctgggccagcaagccggaccgacgcgtggtcgacgatatcccgagcattccggaccggaccagcctggc

SEQ ID NO: 347604 - DNA, 880 bp, Homo Sapiens
  misc_feature (47)..(47): n is a, c, g, or t
  misc_feature (53)..(92): n is a, c, g, or t
atcaggacacgtgtaaaataccttacaatacattagattcccaaaangtaccnnnnnnnnnnnnnnnnnnnnnnnnnnnnnnnnnnnnnnnntatgacgcaaataatataaaattaaaagggtgaaaaaaaggtgacactggtttcctaagatacaatttactctttacaaccagggtccacagggtccaggctgcagagcggcagcaggaagcagagcctctcacctgcttctgggggacctggtaataaaaatcagcccatgatggcgctatggcctctcagacaccacacgctgcctaaacacctagagctctggaaatagtcaacaggagagtgatttccatgggggtaattttaaataagatgcacatgggacaggcaatagaaagtttgccaagttaaatttggtacataattgtgttcactccatatccaaacaaagcatgtgtgcgatcagttggtcgctcctgctgccgcctcagtatggcttgtagttattctgatggccaccacgtcgctggctcttgccgtagtttgtactaccctgactgtagtcgtagccggggccgtagccgtaatagccatagggcgagtagtcgtagccgccatagccaggcccgtagccctgctggtagccgtagccctggttccagtagttgccgtagccctgattccaactctgactctgacctccacctccaccaccacctccgctgcctcggttccctcggttgcggtttccacggcccccagagccatactgctgctgctgatagacttctttgggctgggccaccttgatctcacacttgcttccactgacagtatggaactttttctccaagaaccttccctcgtgccgaattcgccacccaggc

SEQ ID NO: 347605 - DNA, 630 bp, Homo Sapiens
agattcttaatttctattttatatttttaaaacatgatattaggtatataagataatatagctagccagtgttagtaaagaagtcatgattgagtcttaaaaaagaacaatccagtgttgcagttcagagaggttagcatgtcaggcgcagccggcaggtgtgcttgattagaccgcccgggccgcagaagtcgcagagcagttggcacctcataccaggcgggtgagagagccgagcaagggccggggggcagtcagggcctgcttcgctgcctgggcccttgtagatggccttctccaggccgtccaccacctccctgtattccaggaacgattggtagtgtgtgcactcaaagcagctgctcccgcgcacgtgtgctaggaagtctggcgcacctgggcagatcacgttgtcagccagtagcactgtccccttccgcagcaggccacattcctccaagagaagcgtgtccggcaggtaccggtcctccagtggttgaggaagaccatgtccagtgtgtccacatcatacttcttcttcagctgggggatgatgtcctggggagctccaaccacaaggtgaccttgttcttcatggaacgaaatccaccatcccctgggtgatggcgg

SEQ ID NO: 347606 - DNA, 1005 bp, Homo Sapiens
ggcctctgcccccgaactccagagagctagaattttgcttgggcgttggaggctccaggacaagtgagacaggggctttccatccttgcgttgcttggatcaaaacctgtggggtttggggaagctttttaggaagatcaaacagggggcaggtcccctttccccaggggccagctgcaaaacccaggggcccgcactggggaccagcgcccagcaaaacagattacttgagggagagctgcagcgaagtcaagggaggggcctgcagcatggagtacaggtggacatgcccgtcagtcccagcgctcaggaagagattcctgtggaagggggaacagctcacagagtagatgggaccgccgtggggggagaaggtaaactgtgctggggcccgcaggggcacggagctgggcatccgcgtgagggctgcctctccagctgccagggaacacttgagcgggaagccgccttccgtgcccagaatgaacagcctagggtcaaagctggagaaggccactgccgtggcgcccacctcggtctccccgcggggatgcttcttgagcttggtgctccgtggcagctgctgcatgaccagggcgaagccctctgtgagctgcagctggcctaccccgatgccctgccagagtagcaccttcccgtcagtggccacactcagcacctggaagcggtggctgtgcccaggctcgggcagccacaccacctgcgacgtgggagggctgcgtggggtggaaggccagacacaggacagcgctggggacctccaccacggccgacggttgctggggacgcaggtctcgccggtccaggttccaggcacacacgaaggacttaagcgtgctccagtccccatggtccagccggccgtaggcacaggccaccacagagccagtggagttccaggagatgctggtcacatgcagaccctgcgcttgggctggcgggtagcccagggtatacagaccctcgtgccgaattcgccaccca

SEQ ID NO: 347607 - DNA, 1075 bp, Homo Sapiens
  misc_feature (19)..(19): n is a, c, g, or t
  misc_feature (21)..(21): n is a, c, g, or t
  misc_feature (25)..(25): n is a, c, g, or t
  misc_feature (32)..(32): n is a, c, g, or t
  misc_feature (34)..(35): n is a, c, g, or t
  misc_feature (46)..(47): n is a, c, g, or t
  misc_feature (60)..(60): n is a, c, g, or t
  misc_feature (67)..(68): n is a, c, g, or t
  misc_feature (70)..(70): n is a, c, g, or t
  misc_feature (98)..(98): n is a, c, g, or t
  misc_feature (161)..(161): n is a, c, g, or t
  misc_feature (185)..(185): n is a, c, g, or t
tttcaaatggcactgtaangnacgnaccaaangnntttctcccctnnaaaaaccctttanaaatgcnntnttgagacccaaccaggcattgaccaacntggattccacaccagtcggtagggttgcagtactccagcctttccatgactttttggacagtngcgcttacctcctgaggatatggntcgcctctgttgaccacagacatgggcagtgagtgagcagaaaacagaatgaccacctcgcttctcttctcaaagtggaaaatggtccagttcctttagaatatgatctgcaaagcactggatgaggaggtgatgtgtgggccacctgtcaatagtgctccacttcatcgtgggcttccgtcccacttgattatagtatctgtaaatggcatttaagctgctgcctgtggtggagcagctgtactgtggatactgtgtgaaagcaatagccctttctaggccatctctctccatctcttcaattgcttcttctgttaaaggatggacgtaccgaaatccaatatagtatttgtgaggggctgtgttgggggacaattcatccagcagcttcaccatgccctctccctgcttggaagtccatatcttgatgggggatccgcctccaatctgcggtactgctcttgaatcttgggggttcggcgtttggcgatgaatggtgccagcttactaaatcatttaacatacaggtaagtggattttattccagcttagcaacctgagaaatgttttttctgaataggaagtgtcatgaggtctcggtccaagaagagtctcagaaggaagtcgtgaacatctccaagagtttcagggcctcccatgtttagcattaatattccagttttcggcttcctcttctgcggttgaacttgaggttttgcaccctgggcatgctgggctgtttctgtggtgacggccgctgcagctgcacctgacttccacctccatggctgacagaccctccagctgctggatgccagcggatcgcggagcaggacgcccgcggcgcgcagggccgcagccatgtttgcgccgagtgaacgcattgcctg

SEQ ID NO: 347608 - DNA, 988 bp, Homo Sapiens
  misc_feature (904)..(904): n is a, c, g, or t
cttagaggagcctttttccggtggggccccaggcagaggctccgacagggagcctggccatagtcgcgcagccggggaggtggagcgcgtcccagacccgagcccccgacctcagccaaacccattccttctgtccttgtttgttctgaggggactctgagcatcggaaaggatgcctggtttgcttttatgtgaaccgacagagctttacaacatcctgaatcaggccacaaaactctccagattaacagaccccaactatctctgtttattggatgtccgttccaaatgggagtatgacgaaagccatgtgatcactgcccttcgagtgaagaagatcttgtgcctcaagcagccattgagtatggcaggatcctgacccgcctcacccaccaccccgtctacatcctgaaagggggctatgagcgcttctcaggcacgtaccactttctccggacccagaagatcatctggatgcctcaggaactggatgcatttcagccataccccattgaaatcgtgccagggaaggtcttcgttggcaatttcagtcaagcctgtgaccccaagattcagaaggacttgaaaatcaaagcccatgtcaatgtctccatggatacagggcccttttttgcaggcgatgctgacaagcttctgcacatccggatagaagattccccggaagcccagattcttcccttcttacgccacatgtgtcacttcattgaggtcctgggcctatgtcaagaagtgcaaaaacaacatgtgtccaaatcggggattggtgagccagctgctggaatgggagaagactatccttggagattccatcacaaacatcatggatccgctctactgatcttctccgaggccccaccgaagggtactgaagagcctcacctgngggcattttgtgggtggagggccagagtgtgtatacccaggcttgtctggaaggagaaagccttttgctgctgaaagtcaaaaa

SEQ ID NO: 347609 - DNA, 460 bp, Homo Sapiens
atttttttcaggacttcgctttcgggttcccttgtcctgtgttgtgtaatgcccccgttatggcactagaaatattttttattagccgaagctaagtatagtgggactttggctgatcccgagctcggaggacagccggggtgatccgtttccccccgaggatcgaggtggtgcgctctggacggggttgtgcattctcgccgcgcccgggcggacgatccagcgaacagccccgcttctaacccgagatgctgctgccggcgcccgcgctccgccgcgccctgctgtcccgcccctggaccggggccggcctgcggtggaagcacacctcctccctgaaggtggccaacgagcccgtcttagccttcacgcagggcagccctgagcgagatgccctgcaaaaggccttgaaggacctgaagggccggatggaagccatcccatgcgtggtgggggatga

SEQ ID NO: 347610 - DNA, 1156 bp, Homo Sapiens
  misc_feature (773)..(773): n is a, c, g, or t
  misc_feature (1053)..(1053): n is a, c, g, or t
  misc_feature (1118)..(1118): n is a, c, g, or t
  misc_feature (1143)..(1144): n is a, c, g, or t
  misc_feature (1150)..(1150): n is a, c, g, or t
aggctggaccggtccggattcccgggatctggcgctcccatcatcgtgtctatcgttccagtgtcttcgagttcctggccttcaagaatgatatccagttctggaacagccggcagtccctggagggcctgtccgtgcgctccgtcttcttcggcgttttccagtcattcgtggtcctcctctacatcctggacaacgagaccaacttcgtggtccaggtcagcgtcttcattggggtcctcatcgacctctggaagatcaccaaggtcatggacgtccggctggaccgagagcacagggtggcaggaatcttcccccgcctatccttcaaggacaagtccacgtatatcgagtcctcgaccaaagtgtatgatgatgcttcatcaccatgacgccccagctcttcatcaactacaagctcaagtctgtggcccaccttccctggcgcatgctcacctacaaggccctcaacacattcatcgacgacctgttcgcctttgtcatcaagatgcccgttatgtaccggatcggctgcctgcgggacgatgtggttttcttcatctacctctaccaacggtgagatctaccgcgtcgaccccacccgagtcaacgagtttggcatgagtggagaagaccccacagctgccgcccccgtggccgaggttcccacagcagcaggggccctcacgcccacacctgcacccaccacgaccaccgccacccagggagggaggcctccacgtccctgcccaccaagccccacccagggggcnccagctctgccagcgagcccccaggaaagcccctccaaagccagcagagggaccagaaaaaggattagtcgagactggtcctcacctgctccggctcctggcgaccactacccctgcgtcccggccccctcgcctcccctccctgtcgccctttccctggacagatcaggccggggcggtgggaggcccgcctcaggtcagggcccagcgtgtgacgtaggggccaggggctagaccagggtttgtttgtggaggcgctgtctgtccctctgtcccactntgtttccagccatctcgccctgccagcccagcaccactgggaatcatggtgaagctgatgcagcnttgccgagggggtgggttgggcggnngtgggnccgggc

SEQ ID NO: 347611 - DNA, 1217 bp, Homo Sapiens
  misc_feature (578)..(640): n is a, c, g, or t
  misc_feature (1094)..(1094): n is a, c, g, or t
ggcgggcgggcggagccgggcggtgaagtggcggatacggtgcgcgggagggaggatcactgagcgatcggacggctgcgggcgagagtatagggactctcgcgcgagggatcaggatagggggtgtgggggcctctctcagacagaggggatatatataacgcgggggcgctctgcgcggcgcgggccgggcgatcgtgcgtaaaggcgacattagagtggcgcagcgcgcacaaatcacagacgccatggttatgcggcggggggggaaaacacaacagcgccgcggcgggacacaactgcatgcacgcagagggaggacagcggggggcggcgggtatcgccgccgcagttacgcccgactcacccgatcgctgctcgcgcaggcggcgcagaaagcgtccgttcgcggcgccgcaccggagcggcgccgcggcgccaagtggcgggctcaaggttaccgcggcggcagaagggcgtacgaggacggcgcggcggggcgcgggggagtaaacacaccttccgccgcggtcacggggggcgcggccatcgcgaggagctcagacggagacaagcannnnnnnnnnnnnnnnnnnnnnnnnnnnnnnnnnnnnnnnnnnnnnnnnnnnnnnnnnnnnnnctgggcgcgggcgccgccatgccagggtcgtagcgccagggtgggggaaggtcatcgttgccactgccgagggcgacgttgcccaccgtgttcccggatgtcctcgtcatcagaggtgtcctcggcatgctcatccccaatccgggcgctcgccatctctgtcctcgggcaaggagtgctggcctgcacctgctcctcagtggtctttttaatcccactgtggccctcgtcatcaaggggctccgtcctctccctcctcgtcgccttcgtcatcatcctcactgctgtcactgccggaatcttccaggcctgagaacacactctcctcgctgtcggagacgccagaatcgctgccggtgctgtggctgagaggagaggtgcagaggagggggggctccggctcgggctcaggctccagttcgggctcagaccgccgcttctccggccgcacgcntcggcgccgccgtgcgccccgcaccccgcgaacccgccatgccccaccgcgcgccggccgccacccgcacagccgcttccgacagcgaccgggccgcgtcctcgtcgcgaattcgccacccag

SEQ ID NO: 347612 - DNA, 324 bp, Homo Sapiens
tttaatcacaattaagtttttattgtatctgctgagatactttccatacacacgtaagcatatacatatatacacacacacacattattgtacacttaatttatgtccttaatacattctgaagcactttccatatcagcacgttgagatctagctcattggtttaaacatctgcatgtttcattttatgattatacaaaaaaatttttcagcagttccctattgatggatatttacatatttttgttttgtctgacatgacaaacattgcaaatgtacatcctttgtctcatgatgaatcatgccttgagtctcactcatatc

SEQ ID NO: 347613 - DNA, 728 bp, Homo Sapiens
  misc_feature (399)..(399): n is a, c, g, or t
  misc_feature (466)..(466): n is a, c, g, or t
cactttaattgctacttaatttacatcataatcactgggttacagctttagctcattggcaattttggaagcaatatttttgaaggctatggatgtccccgatatccgcttaaaccggaccccgttcagagacagtcttggcagcttgcacacttccatttcccactgcacgaggttctccgcgtgcccatctcccgtggacgcagaagagcaagaagcgctccctctgctcatagtcgcagttattggcgtccaacactttgcggatttcccgcatcatgtccccgggatccattgaactagtggttttcatgctccaggtgaagcgtagggatcgaggctttgcttctttgttttcatctttttgttcagcaggatacattgcgactgttttctttngccattctgaatcactgagtgtctatcagctgtagttctctcactgcaaacaataagtatttcgtcngtgtcattccaccagatgctgtgttactactagggacagtggagcttttcttgcgttcaggaatatccgccttattaggattacttgcattcccaagcatgggactggctggagcaattccctttcctccaacagcactgccacttgatttccgggaggaaattccatcttctttgaggtcactatctgcagtgctggtctgactccttttcggatacgccacaacagaaggaatagctggtccagcatggtcactgaagcg

SEQ ID NO: 347614 - DNA, 685 bp, Homo Sapiens; identical to SEQ ID NO: 319607

SEQ ID NO: 347615 - DNA, 437 bp, Homo Sapiens
aggtcactggcttgggccgccttggctgagagcacaggcaccagcttggcgttgtcctgcagcagctctcccaggagcttgggtgagatggtgaggaagtcacagccggccagtgctttgatctcgcccgtgttgcggaaggaggcgcccatgacaatggttttgtagctaaacttcttgtagtagttgtagattttagtgacactctttaccccagggtcttccaggggctcataggatttcttgtcggtgtttgccacatgccaatcaaggatgcgcccaacaaatggggagatgagggtcacacccgcctcggcacaggccacagcctgggcgaaggagaagagtaacgtcatgttgcagtggatgccgtgctgctcctcgagctcctttccagcctgaattccttcccaggttgatgacagctttataagaat

SEQ ID NO: 347616 - DNA, 701 bp, Homo Sapiens
ttggttcattcaaaaaaagggactagaaatgccacaaattattttacaatacatttttcagaaataatctctaggtgaagctttttccttttatacacatatacaaaatttaaacagcaatatacacataatcacagtgaggacgttggcaaattcaccaatctgtagtgtaaatacaaactgcaaagcagcctttccaagagaaccatgccacacagcaagcagagctgggccaattcaatagcaaacaccaacatgtcccctgcggaaggggaaacagtgcaagagaacagcatgcgctttgatacaaacagcaatttatggctaatgggtgacaaaactgtggtaacagtgactctctcgctgctatgcataaagtcctaggacatctgtttgtctttataccactccacaaactcgtccaacaaactggccatgctccatcttcatcatagttgcaggtcaagattaattgttctgctaaactctaggacattgcaccactggtctttattaataactttgtattttgattgccgtgcaaagtcaaacgcatatctgtaaataagtttaaagtttgtagaatcatttaagaatgatcttaagtaatccaagtatttctgagtttttctgttgtatcacattggagagaagtcattccttttaaccactcctgtagagtaaaataacccatgttttgt

SEQ ID NO: 347617 - DNA, 409 bp, Homo Sapiens
  misc_feature (261)..(272): n is a, c, g, or t
ttagaatgcaaagtattttctttttaaacttttaaaatctgaaaacaagctagcctatgttaaataacatagtttccaaagctgaacgtgctcacttggagcccagttttctgcttcaaatacaaacacaacttcctgacactcctaggtgggaacactactgtttgacgatctgtgattagatgaactgatcgatctcagtgggtaacattcctttattttttccttggtaaaggtttaaaaattctaaaatagatgcannnnnnnnnnnncagttttacactgacaatttcattccaattgtctcctcgggagacacagaccatgtacaggaatccatcttcatccttctcactctggctacaatgctgtgtctgttcaccgccaggaggaagggcttgattagcac

SEQ ID NO: 347618 - DNA, 530 bp, Homo Sapiens
  misc_feature (285)..(285): n is a, c, g, or t
  misc_feature (338)..(338): n is a, c, g, or t
  misc_feature (345)..(345): n is a, c, g, or t
  misc_feature (497)..(497): n is a, c, g, or t
  misc_feature (507)..(507): n is a, c, g, or t
ccccacacaccaagggactaagatgatgttatttcacagcacttgcttgcctcagtctttacgaagaacacaattccaaactaatggacaagttcctccctggtgctctaggtcattcaaaggaggcaagctcctttgtcaaatcaggagctccatcagctgatcaggagcccagatgccagggtggattttctcagtgggatctagtattgctagaagagccttccttacatggcagaaacaggcacatgggcctcttcccttagaatgcatctgtctcacatngctttggggactgctgtgcagggaaccacctggttgtggccttggcgaggcangcgtatnacatggcccccaaaaactggtctgcaattcttcccgcttctcgcagcccactcagcagagcaccatgcactgtggctggggtagttacggatcgtaatgttctccccgcaaagaagagtcgtggaatcggctaatttaaggggaaaaagagnaaattggcangctgcacatataccttattcttt

SEQ ID NO: 347619 - DNA, 585 bp, Homo Sapiens
tggagcatgaccagggccacggggtacatctgatcaaagtcgaaattaaattgcacgccagccggagggtcacgaaggaaattcctcttgtcagctgataaggccaaaatttgttgttgaattgtttcttcatcgttagtgtcaacccatgggggcacagctgcttctgacttctttgtatgttgctcttcaacaaattttttctgttccttctgaaaatctcctataattgtcttgtcaatgatgccatctatttttccttcttctacggatttctttattgtttgtgctgtttcagcaactgattcagttatcttttttgtggcagcagatgcaaagttaaataaatagttgccgaagtctttggcctggtggaggagctcctggtctcccgcttgctgcagctcctcctccgcagactcagccaccgtctcggacggctgctcgggtggagcatctccattgggctgcccaccgcctgccaccggctgctgcaagcccaaccaactgctcaagccccggaacatcccgctcgcgggccgccgccgcggtcccgatccccagagaccgcagcgagcactggtt

SEQ ID NO: 347620 - DNA, 296 bp, Homo Sapiens; identical to SEQ ID NO: 162365

SEQ ID NO: 347621 - DNA, 564 bp, Homo Sapiens
catccacattcatactggatttagcactagtttcgaaaaatcggattccatgctctcgagccaacttatcggcctgctccttctgcaccttcctcttggcctccatgtcacatttgttccccagcaagaggcgctccaccccagccgaggcattctccttgatgcttttcatccagttctgaatattctcgaaagatttctcatccgtgatgtcgtatactaggataatgcccatggctccacggtagtaggcagtagttattgtcttgaaccgctcttggccagccgtgtcccagacttgtagtttgatcttcttcccctctatatccacagtgcggatcttgaaatcaattccgatggtggagatgtaagtgttgttgaagttgtcctctgcaaagcgaatgatcagacaagtcttgcccacccccgagtccccgatcagcagcaacttgaagaggtggtcgtaggctttggccatggcggacaccgggggagccgggggaggggtggggagcgcccggcactggtaggcgggactggacggtcggcaaacagagcggcacg

SEQ ID NO: 347622 - DNA, 1214 bp, Homo Sapiens
ggggtggaagccctgttcccttccaccttcccattggaaattgtttgggggcaataaaccttcccttattcttagttcagtgagtagaggggagtgccctccctccccaggaagtccccattttggttgcaatggcccaggtcctgaccatcccactcggtacttccttgctccatcttccccacccatgtaaacagagttttgggctgagtttgatagtaaatgccacacatatctgcaaggctgaggaagcttccccgcctttctcctcaaccaccatagagacgggacatggcacagaccacgatgagggcacctgtttttgccctgcctccccaggaggcttggggctgccccacccaatggcacatacacagatttttggcagtgttgtgggactggggaggagagaaaccccagctccaccagaacaaggaaggcactggggagtacaggggaggagaaggaggtgggaaacaggatcctccctccccgccgccacacacacacaagcacaggttttcgttgctaaggcactgagaacaaatccagagaactcagtgaagggtgggggctctgtatccttcccagagttgtgacctagggggagtagttttgattcccgccctgttggaagaggcagccttggttaagaatggcagaaaacctggagatggaagaagcccaattgtgcttaagaagttggggacagaggacgagattgggaactggtcaagcccagaggcgggcactggtcagcccaggctgaagggacactagggagagacaggtacatgctggactcacagagattggccccatatcctgagctgacgtttcaattctttggggaggtggcggggcagggacgggaggaaagatgaggcagaggtgaaagcacatggaacacaacaggggggactggctaaccttggcacaaaagcagcacagcaggcccggggaaagggtgggggcaggaagcagccggcctccctctgaccctccctgtcgccttggcagggcccagacatccaaatggtcacttcccaacctcttcagaggtcaggaagcggggaggggcaggggagagcggtcatcaccacagagaacttcgggggagggagggcagagcattatgacagaggctgaaatgcaagtctggtggccaacagaacgtagcttcccaacttctcccttcgccgccacgcaggctt

SEQ ID NO: 347623 - DNA, 949 bp, Homo Sapiens
gttaataaagtagaataacatttatttcttaaaatttttattatacatgctgtattcatggaaaaccaagatctttaaaggaactcaaattagatataaattatgttcagctctgagctggttataaatcatgtttagcatggaaacagttaaactgaagctttcttctccttataggttgccatcattttcttgatctctgcaatagctttccctggattcagacccttaggacaggtccttgtgcagttcatgatggtgtggcagcggtatagagagaatgggtcctgcagcttggccaggcgctcctctgtgaagtcatctctggagtcaatcatccagcgataggcctgcataagaactgcaggccccagatatttgtctccgttccaccagtagctggggcagctggtgctacagcaggcacagagaatgcactcgtagagcccgtccagtttctcacgctcttctatggactgcagatactgctgcttgccttcctgagattcatccttcttcttcaaataaggctcaatggatttgtactgtgcatagaagttgctcaaatcgggaacaagatcctttatcacatacatgtgtggaagagggtagatttttgagaccttattgaggttggtgtcaatccttcgggtgcaagctagagtgttgcctccattgatgttcattgcacaagagccacagatgccttctctgcatgatcttcggaaggtcaaagtagagtcaacttcattcttaatcttgattaaagcatccaataccatggggccacaacccttggcggagcctgcctgcaggcctcccgaggagcccagacagctgcagccacagctccccgtatcaagaaatttgccatctatcgatgggacccagacaaggctggagacaaacctcatatgcagacttatgaagttgaccttaataaatgtgg

SEQ ID NO: 347624 - DNA, 508 bp, Homo Sapiens
  misc_feature (90)..(106): n is a, c, g, or t
cccagggccaaaaatttccaggggccccccccttttggggagaaaaggggggcgttttcggaaaaatgggccccttggggcccccccggnnnnnnnnnnnnnnnnngtcggcctttgttaaaaaaaagccaaggctgctttttgtttccaaagaagtggaaagggttttaatgccctttcaagggttactggaatggctgccaccccaaccctgcttttaaaaaggaggacccatcccctgcaggcagggctcaagaaggaaacagaccccctttcggcactgactacaccaagggccatgctggctgtggcctgcacacacacacattaataaactgctgtgaaatttcttcagtctttgtatttactcaaacccttggagtttcttcatcttgtttaaattttttcctggatgaaggcgtgctgtagggcctggttgatgctaattcgtttagctgggtccaacatcagaatctggtccaacaagtcctttagctggtgtacttcc

SEQ ID NO: 347625 - DNA, 739 bp, Homo Sapiens
  misc_feature (396)..(438): n is a, c, g, or t
ttgctcacacacaggggagcccttcttagaagaactgcctgtcccttggaaggttcagagtcttgggtccagcagcagagaggagccccaacctgcgtggacaaccccccttgaggcagcccttggtcacagctgcttctgggtgggcagcaggtttaagtttcatagttcacatgttcccaccacacaagtcaaatcaaggcatgaaaataaaagggaaaaaggggaaggctggaaaagggagcctggaagaggttgcaggtaggggaaggagacacagtgggcttccgagaagctggcaatttcttgacttggatggagttacgtagtattcactttaaaattattctttaaattgtacgtacatgttatatacttttcagtatgcatatcttnnnnnnnnnnnnnnnnnnnnnnnnnnnnnnnnnnnnnnnnnnnggcagatgatggaatagaaaagaaattaaagaggagagacgacgaaggaagaagatggccaaggtggaaaacgagaaagtcctggaggtgataatgctggcctcagtttctcttcttctgtctggatactggttctacttctagataccggagcccgaccagcatacccaggatggagaaacttgccaccatcaggggtgccaggacgccaatcgtgggagctgcagttccatagacaaacaactcagagaggaaatgccccagggcaaggaggaaggtccagagtgtgatgtgatagagc

SEQ ID NO: 347626 - DNA, 466 bp, Homo Sapiens
  misc_feature (159)..(159): n is a, c, g, or t
  misc_feature (172)..(172): n is a, c, g, or t
  misc_feature (195)..(195): n is a, c, g, or t
gcgaacacccagcaggtccagccccatcagcatccgagccagctcttcatagcggccactgtgctctccggctccatgggacgcaaagatgagggccttgggtgtgcctgtgggtttccaagtacctgcaagaagaggtactgtcccgtctgcaattgnaccaggtgagggnaaggtcctggtaagggaatgctnctgcggggtccgcctgggggaactttcctctggcatgctggaagggtcttcaggtcctgtttccattatgtgctggcgtttgcattccacaaccacgacagcctggagaatcagaaccaggcaaatcgggctgttccctcatctgggcggccccaaggcagcaggaaggcagctccgagccctcttcccgcacccagacccttgctttcgggctggggcgctcaagccgggagccttcttccaagctcccaccggcaggctctccggggct

SEQ ID NO: 347627 - DNA, 533 bp, Homo Sapiens
ctgagctggggcccagcggtcagcagaagccagatggggacagagtgtggaagtggcgttactgtacagagaggcggcaggcaggagtcgcagatggtggtggctgctaggacagcatggactgctgcacggccttctgcagcgactgccgcgtcaccagcagacgcaccacctcctccgagcgcttggtgagccgcttgcgggcctggtcgtgtgtgaccatggtcatgtcccagccgttcacctgcatgatcttgtctccaatctgcagcccagcgatttcagcagggcctccttcagacacccgtgtgacataaatacccttgtccgtcttgtcttcagagaagggattctgggaagggtcctggtcgattccacctccaatgctgaaacccaggattaagttctcaccttgacgcagcttgtgaatttcaactctttgcaccacggcggtgaccggctggcccgggatgtaggacatctcgaccctgctctggtcgcccagcgccgctccgagaagccggcagcagagt

SEQ ID NO: 347628 - DNA, 939 bp, Homo Sapiens
gcgtagggccacggggagaattgggaagaaccgtgaatgttagccagcccacaccgtgggaggcttcaggctcctcccggccgtcgcagtcctcaaagcaagagacatctttagggaagaaatggtcctccccccaggagagggtggcccggaaacttggagtggatcaatccgccgtcctggatcaggaggcctctgttcgggcgaccgcccccttcgtcctccatcagcaacaggcggcgccggccagctcaatagtcagcctcatccacactgaccagcaggcgaacagcctcccggcccacagcctctcgcagggcctcagtcaggaacacgccccgcagggcctgcagcagggcgccactcaggtagtcgccccagaaggcgtccagataggagagctctgagaacttgatgtcacaaaccacagagcccaggtcccttgagcgcagcactgcggtggcctgcccaaacacgtccagctgccgcgccagcgcctggggccgccgggatgccacgccctgctccaaggctggcccatgctcgcagtactctgctcgaacccggagccggatgtcacaggtcactttgccttcagaggaaggtctggcgggctctgagtgctgctggggtgcggctggggcccctctccgccgccgtctggcaccaccactgggccggccccgactccgccgctgccgcttggttgggggggagcctgtctcccactgaccctgctgagaatttgcagaactgcttgactgccgacggcgacggcagctaccctctgtcctctttgaagagctggaggtgccatagctatagcgttctggagacacagattctggcgtccgatgactcctgggcgacggccgcagccacttgttttggatctttccggacgcgtgggtcgacgatatcccgaaattccggaccgga

SEQ ID NO: 347629 - DNA, 627 bp, Homo Sapiens
  misc_feature (127)..(127): n is a, c, g, or t
  misc_feature (185)..(204): n is a, c, g, or t
  misc_feature (232)..(232): n is a, c, g, or t
  misc_feature (301)..(335): n is a, c, g, or t
taaagttacaagattcttttaatattttcacaatgttaaaactaaaactgagctctaggctatgtgtgtaagtaaatctagaacacaaaagggttaaataagattttctcttttaaagatacaagantttaagctttccttacatttaacaaacttcacagaacagatactgcaggggaacaagnnnnnnnnnnnnnnnnnnnnagctctaagtcaggaagcgaacatgggncttcgctcccccgggccagctcccctgggctccttcccatgggctgcctccacgcagcaggcagaggannnnnnnnnnnnnnnnnnnnnnnnnnnnnnnnnnntcgcacagcctcttcgggaccagagcttggcggaagcctatggggggctgcctcactgaggatggcccgtatggtggccaagggctgtggcttgacagcagtggtaaacgctgggcagacctggcccctctgccctgggttgccctagagcaagacaccggtctgggtcctgaagcaagaattaaggctggggattttgcagcgggttccactctggtgggtggagggtgggaagagcatgacttcctatttcagtacgtcggatcaaaaaacatttgcagttgcaggtgtt

SEQ ID NO: 347630 - DNA, 1344 bp, Homo Sapiens
  misc_feature (377)..(377): n is a, c, g, or t
gtcgcccagcagcggacacgtttaatggcaggcgcctctacagttacaagacatgcctgaggtcagttcgcccccttagggggcactccccgagctaaacacagatgacagcgacccagggtgctggaggcccggggtcacctgaggactgcagaagtcctgcgctccgctaactgtgtggacacgcggctgccaggggcacaggtaggcaacatggatgggaagagagcccaggccgcccccgtctcacagctgcagagcacgcagaccacggcactgcaggccaaccaggcagagctgctggtgcgacacatcctggggctgggctggtcggggagaagctctcccgctgacgctgcctgggcctgcccctgcanggcccgggaaccgagcccaggcctctgtttctctgagaggctggagcagagcccttggtggccctggaaagcggctgcaaggtggccttagtcaggggaggcacgcgggcgtcgcgtccagaatcttctgggctatggaggtgagtgcagcgaaggccggggctcccgggggaactcctggaatgaagtcgtggccctcctccaggggtcctcatgagcgcagggtccaggggcacggagcctaagaagggcaccccggcgagcctgggccagttcctctcccgccgcccctggagaagacgctggtgcactccgtgcaagtgtgggcaggtgaagccgctcatattctccacgattcccatcacccgcaagcccgtctttcctacagaaggtcagctcgcgcctcacgtcccccacggacaccgcctggggcgtggtgaccacgagggcccccaggggctggtagggacgcagggcttctatggtggccatgtgctcatcggaggtccccgggggcgtgtccaccaccaggtagtccagctccccccaggccacgtcggacacaaactgctttatcagcgcgtttttcttggggcctctccacaccacggcctcgtccggcttctccagcaggaagcccacagacatgagcgagatgctctgctcccggtccaggaagacgggtgcccagccgcggtcgcactggtgcacagccctgccctgcgccccgagcatgcgggggatactggggccacacaggtccacatccaggattcccaccttcttgcctgcatggcgcagtgccagggccagctccgtggagatggtgcttttcccaacgcccccctttcctgagaggaccaggatgatgtgcctgacgccggccaggtttccaggctcggccgccgcctccatcccgccgcctccaggagctcgcggctgcagtccgcttacgcccgcgggccgt

SEQ ID NO: 347631 - DNA, 778 bp, Homo Sapiens
agattgttattacagattccttctacaatcaggtctattcatcaggataaaatcctagcacttagacagcagacacaattcttgtgggaggcttatttttcttcagttgagaagattgtattaactacactagagattattcaggacagaatattcaagcacatatcacgtaacagtttaatatgggaacaaacatcctggaggattgttcgtactaccacagtattcatcttatctggggagattttccttactactatgctaatttaggtttaaagcccccctccaaattcactgcagtcatccatgcggtgacccccctggtctctcagtcccagccagtgttgaagcttctcgtggctgcagccaagtcccagtactgtgcccagatcatagttctatggaattgtgacaagcccctaccagccaaacaccgctggcctgccactgctgtgcctgtcgtcgtcattgaaggagagagcaaggttatgagcagccgttttctgccctacgacaacatcatcacagacgccgtgctcagccttgacgaggacacggtgctttcaacaacagaggtggatttcgccttcacagtgtggcagagcttccctgagaggattgtggggtaccccgcgcgcagccacttctgggataactctaaggagcggtggggatacacatcaaagtggacgaacgactactccatggtgttgacaggagctgctatttaccacaaatattatcactacctatactcccattacctgccagccagcct

SEQ ID NO: 347632 - DNA, 855 bp, Homo Sapiens; identical to SEQ ID NO: 162587
  misc_feature (208)..(211): n is a, c, g, or t
  misc_feature (213)..(232): n is a, c, g, or t
  misc_feature (273)..(310): n is a, c, g, or t
  misc_feature (399)..(399): n is a, c, g, or t

SEQ ID NO: 347633 - DNA, 513 bp, Homo Sapiens
  misc_feature (67)..(76): n is a, c, g, or t
aaaacttccaagaatctttattgaacttgctcagcatcaagcacgtgtctgaaggagccagggtggnnnnnnnnnngtgcccactggcgacagggagggccccagctggcagaccccccaaccacatcagaggagttttcatttcttcctgggctgcttatctgggaagccttcaaagaattcgttacacatcatggcgatgcaggacaggaagacacagtactcttggaagtccacctcgttgtccctgttgctgtccaagttgctcatcagcttctggaaagcagcttcatctgtccttttccccaagaagctgggcagctcccgggtcagcagctcctttagttctgacttgttgagcttgaacttgtcaccctctttgcccgagtacttgtggaaggtggacaccatcacatccagggccttctccagagggcacgccatgacagcagtcaggatcaaaccaagaaagaagaagcgctgaggagagagggttgtagagaggggaagaat

SEQ ID NO: 347634 - DNA, 1053 bp, Homo Sapiens
tgcagtggcctccgagggatgccagtcgtgtccccgccccagcttgctgtgccgtgggctccgtgttctcacgcacctgtttcatgctccttgcttagaactgccacgaaagtccttgtctgtgctccgtcaagctaaggggttggtactgcgctgctgtggcttccttctccagccagccttgaccgtcccagatgtatcagtttccttttcttgggtagcgaacctcccttcattgacggtgggggtccacgatgaccttccaagaccctgcattcaactccttgcttcttttggaaggcctttcagacgtcccgtggtgaattgcacgtcagcgtgagcggcctgcccctgtgttggcgcgcagaccccgttcttgagtttcgttcgtcggtgcggtcgggcgttgcttttcggggccgttttctgggacccaaggtgcggtggaacttccgaggctttcttttccctgtcttgggggatcgcctggcctgccctcctgtccctcgtgtacacctcttgcgggcctttgaagccagttttgtggctctgtgccttcttctggctttcccctaggcccccgccatccgtcctcagttcccttacaatccaagatggtccctcccgtcctcgttgatgctgctgtcctgttcttcttgcttttgcctgcttcttccatcactgcatgctctgctctccgtgctgtgcccgtggttccaccacctaaaacagtttcctcacctctatcttctaggttcaagtcctcctcctcctgttgctgcctcttctttcttcggctgcatgggtcagcatatgccctgctctctacctcctctgtcctgacactgcctgcagcctccttgccttttcctccttcctccaagacccccatcttctcctcttcatggtgccacctcttctttttcttccctttcctgagggactgattggtttgctctctgctattcaattccccaagcccacttgttcctgcagcgtcctccttctcggacgcgtgggtcgacgatatcccgaacttccggaccgtaccag

SEQ ID NO: 347635 - DNA, 716 bp, Homo Sapiens; identical to SEQ ID NO: 162505

SEQ ID NO: 347636 - DNA, 799 bp, Homo Sapiens
gcatcgtccccggggctgggctgcagcaagccgcacctggagaagctgaccctgggcatcacgcgcatcctagaatcttccccaggtgtgactgaggtgaccatcatagaaaagcctcctgctgaacgtcatatgatttcttcctgggaacaaaagaataactgtgtgatgcctgaagatgtgaagaacttttacctgatgaccaatggcttccacatgacatggagtgtgaagctggatgccagtgatgatcagccagagaagcctcactttgactctcgcagtgtgatatttgagctggattcatggcaatggcagtggggaaagtttgccttgttttacaaaagtggggaaaccagcattagcagaagacactgagatctggttcctggacagagcgttatactggcattttctcacagacacctttactgcctattaccgcctgctcatcacccacctgggcctgccccagtggcaatatgccttcaccagctatggcattagcccacaggccaagcaatggttcagcatgtataaacctatcacctacaacacaaacctgctcacagaagagaccgactcctttgtgaataagctagatcccagcaaagtgtttaagagcaagaacaagatcgtaatcccaaaaaagaaagggcctgtgcagcctgcaggtggccagaaagggccctcaggaccccttcggtccctccacttcctccacttctaaatcctcctctggctctggaaaccccaccccggaagtgagcaccccttccttcaacttccctaccagctt

SEQ ID NO: 347637 - DNA, 884 bp, Homo Sapiens
  misc_feature (127)..(140): n is a, c, g, or t
acaaagcctgctgattgtgtggcacacggttttgtccgtagaaaagccaaccgtagcgcacatatagcgtatcgcaagaatgggaccggcgcggccccggaaaaagggttttaaagaaattttcaannnnnnnnnnnnnncaaagccagggatgaatgtgagcgggaattatgggattcaaaagtacgggttggtggcgcacgaggtattgtgtgaatcagtgtcgggcaggggaaaagagagagggatggcttccggtgacaattggggaagagggttacggggttccaaaaggctttattggcaaagtgtgttctccaaaagaatggtccaatcccggtggcctgttaagtcaatggaatgaaggaggctgtgtccaggggacacaccacgccgtggtgaaggagactggctgttgtgtccacttcttattcatagccccagtcatgagcacaaagacttgtagtcaaccagttcttcaggcttaaaccataggctgatttctttttcagcactttttagtgaatcactgccatgaatgatgttccatggccacaacctgcatgctgaagtcctcatgtattttgcctggctttggatctgctggattggtctttcaggtcaatgtagtgctgcttcaggtgttcttcagaggcccggaggaacttcatggccacgaggcggaatcccttctgctcgaagcgcttgatgatctcgcccaccaggccgcgctgcacgccgtccggcttgatggcgatatttgtttcgctccaggttggccatggtccgggaagctggaggggccgggcggcggcgctgcgctgggagagcagagagctggtgcgaccaccacacccgggagccggcggcggaggaggggcccc

SEQ ID NO: 347638 - DNA, 560 bp, Homo Sapiens
tagtttataatcaaaatgaattgtgtttaacttgatacttatatggaataacttcagcattattaaaaacccaaaacaaacaccatttaaatttgagttctgatgaaatgcatttgtaatacaattttgttaaaaatttttaataagagattgtaggctaaagttatatgcttgtaatttctagaaacatatgatgtccttgctttatgaaaatgatcctactgactgtcccgcagtagaatgcatttgagacacttttctatctgggataaggggctgtgttgcttgatacatgtttcttccagaccacgagcccctagtgggagatgaaggggatgaaggtctgcagctggggactggtggcagttgagtctggtctcatttaacatcatgttctatgagtcacagaatcatccaaatgagtatcagccagatacaaagaaagctttgtattttctcatgcttagatagttcacaaacataatatttaaataattgtggcaaaatcctgttttaacaaaaataattttcacattccattctacataatgaggacattt

SEQ ID NO: 347639 - DNA, 687 bp, Homo Sapiens
gccccagacccagccacaacagcccactgtcccccagctgggctagatgacctcaaagtttggagagtcagggacagggtccagggatgggaagaagacgtctccggggcctggaggagacaggggggtgctgggctccgaaagcagatgccgcccagactcagaaggctgccgctgggccacataggacagggggtgcctgactttggcctcgggtatcccctgggcaggtggtgaggcttcaaagccggggttttcaatcccttgaatgttgctgtccatccgcaccagctcctgggcacggcggttggaggctgcctgcctttgcttgtagaccaggagcaggatgagggggaggcagaggattcctacgatgcaggcacccgtagccagggctgcagccgtgatgttttcactctcctgggaggaggatgggtacaccacacagttggatggtgcatctttgcctgtctgcacctgcagctccatggcaccatggaccctgtgctccgagtggtggtgcctgatctccaccaccaggcagcagtagaggccgctatccagcagggtcaggttgcgcatggtgatggagaagttgccatggtggtcggaggccgactccagcccgtggcgctgagccaggtcgtggctggtgttggcagcctggtggcctccatggtgcaggtg

SEQ ID NO: 347640 - DNA, 692 bp, Homo Sapiens
tgaagaaattaaagaacttagaaggaaatgaactccaaagacatgcagatgaatttcttttggatttaggacatcatgaaaggtctataatgacggatctatactacctcagtcagacagatggagcaggtgattggcgggaaaaagaggccaaagatctgacagaactggttcagcggagaataacatatcttcagaatcccaaggactgcagcaaagccaaaaagctggtgtgtaatatcaacaaaggctgtggctatggctgtcagctccatcatgtggtctactgcttcatgattgcatatggcacccagcgaacactcatcttggaatctcagaattggcgctatgctactggtggatgggagactgtatttaggcctgtaagtgagacatgcacagacagatctggcatctccactggacactggtcaggtgaagtgaaggacaaaaatgttcaagtggtcgagcttcccattgtagacagtcttcatccccgtcctccatatttacccttggctgtaccagaagacctcgcagatcgacttgtacgagtgcatggtgaccctgcagtgtggtgggtgtctcagtttgtcaaatacttgatccgcccacagccttggctagaaaaagaaatagaagaagccaccaagaagcttggcttcaaacatccagttattggagtccatgtc

SEQ ID NO: 347641 - DNA, 278 bp, Homo Sapiens; identical to SEQ ID NO: 162196

SEQ ID NO: 347642 - DNA, 407 bp, Homo Sapiens
cagcttctcaaactttattttcattgcccaaggttgagagatgtagcttcttgctactttgcaggtatttcaaccattatttccatgaattcctcctcctccatttggagggggttgattctgttctctcgggcgtggtcattcagcagttcctctggagatgttcttttaaagttcctcctgtagcgaaccactagtatggtcgaggactcagatgttttcatttttttaggagcaggttgcgggtctgagtccccagttggggtctccggcatcatctcgttggcctcgttggaatcacaggggacgctcctcttcaccccgccggcactggattgtttgtccattgtatatattggttcttcaatgtcagtggcaggcttttgtaggttttgaatcttctcagt

SEQ ID NO: 347643 - DNA, 775 bp, Homo Sapiens
  misc_feature (581)..(584): n is a, c, g, or t
  misc_feature (586)..(586): n is a, c, g, or t
  misc_feature (588)..(588): n is a, c, g, or t
  misc_feature (590)..(599): n is a, c, g, or t
  misc_feature (601)..(602): n is a, c, g, or t
  misc_feature (604)..(606): n is a, c, g, or t
gggataggagcctctctccctactgctgctacacaagaccctgagactgacctgcaggacgaaaccatgaagagcctgatccttcttgccatcctggccgccttagcggtagtaactttgtgttatgaatcacatgaaagcatggaatcttatgaacttaatcccttcattaacaggagaaatgcaaataccttcatatcccctcagcagagatggagagctaaagtccaagagaggatccgagaacgctctaagcctgtccacgagctcaatagggaagcctgtgatgactacagactttgcgaacgctacgccatggtttatggatacaatgctgcctataatcgctacttcaggaagcgccgaggggccaaatgagactgattttgtatccccctgtagcagcattactgaaatacataggcttatatacaatgcttctttcctgtatattctcttgtctggctgcacccctttttcccgcccccagattgataagtaatgaaagtgcactgcggtgagggtcaaaggagagtcaacatatgtgattgttccataataaacttctggtgtgatactannnnancnannnnnnnnnnannannnaaacatgtcgggccgccctcgggccctccgaaaaagcttttctagaccctttcgttttgggcgcgcggggccccagtaaggtaaagggaaacatggggccataaacttggtttcccaaggaaaaacctgggccaaggaactaaggggttgggaaattccccaccccaat

SEQ ID NO: 347644 - DNA, 1039 bp, Homo Sapiens
  misc_feature (29)..(29): n is a, c, g, or t
  misc_feature (606)..(606): n is a, c, g, or t
tgagagcgctgggggcgcccccgcgcgcnccccggaccccgggaggtggaggccttcggaagccccacggcccccccttttcccgggcccctgccggttattccagccccaacttttctagggaggtagatggcccaagaggggtacccctgttcccagggggggccttgttcacccagggtacctttcgcagtagaactgccagctgtctggccatctcccccgtggggggatgcttcaggccagctcctgcagctttcagggtctggaagtccccgccatttggcatttgtcgggcatgatgaagtacgggtccaatggggcatttggggggccccagccctgatcttgtgttgcacttcctggggcagggcatagccctcgagggccccgggcgcatggcaatgttggtgagggtgttgcggcagctgcggcactggatagagatgcgggtggccttggcacggaccgcagaggccgcgatgatgatgccagggatcttcacccaggtgtgacatcatgtccgacttcaggctacgaatgctggaagggctggcgtccgacttgagcatgacctggatgtcctggagcacctcctccccaganaggccggggccgggtcacctcatcagctacctccttggcagcttcctccagcagctgcaggtgctcggctggctgcttgtacaagtagtcggccaggtcctcatcaaagctggccagatcctccatctccacctcaatccagtactcccccaggttgtaatgccgcttgagttcatccctgtatttgaaggtgaagcccgtgcggtcggtgcccactcggtactgccgcaggaactccttgaagcgcctctgcagctgcgatttgcgggcctgcccctcgtcggcctgggcgtcgcccccgaagctgtcgctgtagaaaatgccaggatcgtcgaatcccgacatgactgcgcctctggttttccgcacttcacaaaccaggggagacaagaacctccacgctccctcgtgccgaattcgccacccaggcctc

SEQ ID NO: 347645 - DNA, 419 bp, Homo Sapiens; identical to SEQ ID NO: 322515

SEQ ID NO: 347646 - DNA, 606 bp, Homo Sapiens
agactatttcaacgattttgccaaaattaaaaagccgtataagaaggtaagaaggtgggacctagttccctcatcaccttgacgctagggctcacctctcaccctgctcagaattcagcatccagcgagtccctccgtgagtgaacgttcacttgttgtcctatcagcccaagggaggcaataggctctgcggacgccacctccctgggacggggctctggtgagaatggccggggccctgtggcatggccctcgaggtggagggagccatggttcccggagaggcccgcgtgccccgtcttagctccttgccttccactcactccctgaggccccagggatttctttccgcttcagaccctccttcctgcaggacccaggttcctctttcctccaaagtgcctgccgcgttttccagatgctgcggtcgttatcaaaggacagcagcagccactgacacgggcctgtctgtggaccgagtgctcatgcgcggcactgcctcgcccgcgtctgtcctgctgggggccggagctggcctggtgcgggggtccaggtcaccgtcactgttcccccactgagcccccgctcctcctctgcggtgagatg

SEQ ID NO: 347647 - DNA, 205 bp, Homo Sapiens
cgaggacttggctgggaaggtctttgtcacctctgggctcggcggaatgagtggggctcaggccaaggccgcagtcatcgtggggtgcatcggtgtgatagcagaggtggataaagcagcccttgagaaacgccacaggcagggctgtttgacggaagtgactgacagcttggaccgctgcatccagaggctcagggaagcaagg

SEQ ID NO: 347648 - DNA, 929 bp, Homo Sapiens; identical to SEQ ID NO: 162596
  misc_feature (329)..(329): n is a, c, g, or t

SEQ ID NO: 347649 - DNA, 989 bp, Homo Sapiens
  misc_feature (165)..(165): n is a, c, g, or t
  misc_feature (364)..(364): n is a, c, g, or t
  misc_feature (819)..(864): n is a, c, g, or t
ttgaatcctgggtttcttaaattctgcctccgcttctgactgaggaccactggattttgaggaaactttggtcttaattcccgtactgattagtcaacagtggaaaatctgaagagatgcaagcaggaaaaagaaattaaaccaggcctgaggagcgatgcgacnaggcatgatggaggtcgagtcctcctactcggacttcatctcctgtgaccggacaggccgtcggaatgcggtccctgacatccagggagactcagaggctgtgagcgtgaggaagctggctgggagacatggggcgagctggcactcgagggggcagaaggacaggtgggaggggaagcgccccagacaagggaagctnggcaaccagccccagagcagcgatgggaccacctcgtcttgaatctgaccttgtccaagaaggctggacgagagaccttctgtcccctcccagagggggaaccctggcactggcccagcagcctcttctctgagctccatgtcccagataaaccaggccagactgagaaggctccccagagggctctgtggcctccactccgggaaagccctctgcccacacccacaggcttcacattcccaccaccttcgcaccgtgcccaggtacactttcaagacactgtaaccacaagatgttatttattgagctggcgccgggacttgggcggggcctgccctacagtgagcagcccacacaggaacgctcctctcgcgagcggcccgggcagggaccctgtcccaacaccaacacctcctctccagcccaatcttctggggtcagacctgcttgtcccnnnnnnnnnnnnnnnnnnnnnnnnnnnnnnnnnnnnnnnnnnnnnncagcagatatggagagagctgggcatcaaatcacattttttaagccattttaactaaactggcatggggcatctctggaggtccctctgggagctcacagatccctttttttggggggagggggt

SEQ ID NO: 347650 - DNA, 1157 bp, Homo Sapiens
ccacgtctcctgggcgtcacccgaacctagcctggtcccacctctcttagagagcaagttcacaggcctgagggctataacgtggtcgacaggccatgtataccgggagtcagtgacagcagctacactcccaaggatagtgttgacgctggaggactagggaggacctggctgctgtggcagcaggagggtctgggacacagggaggcttgagttgaactaaacaggttgaaagggaccaggggaattgttggcgctacccacacttcatgcaagggcacatgtgctctcctgcgggtctgcagggaaccggcccagagagccccgcggcaggccctggaacacccgcctctgacctgagaaggggcagcaagggagcaagtgccggacattctgctggggtgacaaatggaaaatcggcaacagggttccgattttctttgccacaggggacccgcctgttgaaagctcgcttcaaaatagaaacggcagcatctcaacacacttcttgcacttcagcatcaaactcaccttggggagaagagggcagtgggtttgcagtggggacagaggggcatgggaagaggggtgattccgggggggagtgagcaggcggcggctggcctctcccacggtgatgctctttcctctgtgcctggcagctacttgtcctctgtgcactccggcatgcctgcctctagcagggcagcccggaactgcgtcaggacaccccggatgctcttgatgaaacccttggaaagtgggaagagggggaagccgatgtcagggtagccactcttctcaggtaagaagctccggtagctctttctccgcttctttggtttcacactgggtggcaccgatgcgtctggtgcggtctccgaagtctggtctgtgtggtccttgctagctgaggccaggctctgggcaccgccctctgagtctgagccctgggaggcctctcctggggctggccctccatcctcaggttcttgttggccggagtctgacagctcggctacagctgggggctctggcgagctgctggctttgggcaccccgttgggcagtgcctgggctttctccagcagggcatgggtttccagccaggactcgatacggttcaccagcttcgtgctgaattcgccacctcaggc

SEQ ID NO: 347651 - DNA, 1074 bp, Homo Sapiens
aaagggggttttggcgtggggtcgttcccaggaactttttagggagggttgaaggcccgggtaaaaatgccagattgcgggtttcctcgggtggtctcttcggggagttttcgcgagttccccccactgttacacctgggcgggaaaaacccctttaggacgtaagcggtcggggaaccaggaccttcaggggccccctttggtaagcgttccaggttttcctttatatgcgcttccttgaaggccttggtcaccaaggggggcttcttccaggcggtatccgctcattcttgagctgggccaagcgtcttctcacgtcgtccacggtcagctcaaagaactcatcaggcagctccgctggccaggcttgcagccgttcctccaggtcggggtggcacaccaccggcttcccggtccacgggctcccggtccacgggccgctcccgctcttgctcttgctggggatcccgctcccgctcttgctcttgctcttgctggggatcctggcccgacttggacttctttggcttggaggggcctccagggctggagagggacttcggcaacttagctgaagatgatgtcagaggcttcgtgggcccaggagggcccccctgtcttctgtcccccacccgagaaaggaacaaagggggcagctgcgggtgcctttgtgctctgcttctcttgagtgtgctcgcagcagggccttgaggtgtccgcgtcttccggacggctcaagtcgccgcggctgagctccccagattccaagggaagtggagcgctggcggctgcctggccagccgacgctgacgagcccaggcttcctggggtcttgcccacggggtcgtagcacttcatgacaaacctgatggtggcgctgcccccggtcaggcccagcgactgcagcgtcgtgccccgcagggcagcttcacccgtcacttgtgaggaaggggtggagaagctgcttctagcgagggcacagtcaatggcccagcacaaaagccaaagggtgtaagggtccttgagggccacagcctcaggacagtgcctcgtgccgaattcgccacccaggcc

SEQ ID NO: 347652 - DNA, 878 bp, Homo Sapiens
gaactcttgggataaatttctcaggtagtgccattgaggaaggaatgcttttctcaagagatttatatggctgtatagcttatagatactatatataccatagctccatataaaattgtcttttatttagctactaggaaacaaaactttcagagtctgcctctggtaacagtgaatgaactgaaagcttatatttacatgtacttctataatcagcttcaaattcctgaaatatttttcctgaattttcttttgaaaaaaaatcctgacatatgttcatgtaagctgtttcaaataaagtgggcataagcattcagtggcgtaacaaactatcacacataggcatcaatcgatcgggaaataatctacctcaaacaactgcaatttgttctttgtgtggcttcaacaaaatcccaggatgccactttagcagctgtcgcttcttcgcatagaccacctgatgaagcagaatacttcctcttgttctgtgctctgttcatattgcattcttgccaaactctatccaccacatgatttgctaattttctgggtattttcccaccatggtggctagtactatcggagttgaagccatcagatactgaagaaaatttgacccacttctggacagactgaggatcaactgtttggacttcctcaggagacgtaggtggtgtaagcgtaaccgaagacatagcaggatctcttgtggaagcaggcacttggtggacacccaagcaagaagatgaacagtgagtggatcccacagggctaggagtaggaatgtctgactgagggactagaacaaagcatgctgggtagatcattcggacaccagcaacaagaacttctactgcagctaaagaatcatcttcccc

SEQ ID NO: 347653 - DNA, 442 bp, Homo Sapiens
aaagaagatagaagtttatttctctctcacataacagtacaaaagtaagtggataacctagggtggagagacagctctgctcccagggaacccagactagcccagtcagttctgctgtcttcatcaattggcgtccatctctggatccaaggctgctgctttaattcttgtcatttcccagccaaagagaaaaaaagaaaagagggcatcccaggacaaatggctttttctttaagaagatgacccaaaaagttgcccgcatctcttcctttcacatcccaacggcccaaacttactgggcccaatctaccggcatctacctgggaaatacagttgcacttgtgtagtcatgggctagcttaaacttcaggcaggactagaaattttatttcttttaaatgaagctgcttctgacagcttggtatatgccttttgagttact

SEQ ID NO: 347654 - DNA, 439 bp, Homo Sapiens
  misc_feature (177)..(237): n is a, c, g, or t
ggtatccattcttaggatatttattttcagtgaacattttctgcacaaaggtagtgttgcactgggacacaagccttttaacagataaccagttgaaatcaaacactgcctccacaccgagttctgttgtgtatttgatagtaaattgatttaaaatataaaagtggttttttgttnnnnnnnnnnnnnnnnnnnnnnnnnnnnnnnnnnnnnnnnnnnnnnnnnnnnnnnnnnnnncaacgacgacaacaacaacgaagaggcgcccaccccatagagagcggacaccaaccaaggaggaggcaaccacaacaacagcaacccaccggcggagcccccacaagcgggcgcgccccctgcggacacccacagtaagacggacgagcagcgaaaaccgcacacagaccgatacaagcaacgaggagaacgagagcgccag

SEQ ID NO: 347655 - DNA, 1031 bp, Homo Sapiens
ttcctctcctaccctcattccccctcattctcttatgccctgtttccctctttcttctctcattttattcacatttgccacacccaccgctccattattgatcattacttaccttcaatattgcaataacccacgcactctaccttataccagcatattattagccatttgccgacgtacccatacaacccacttaccggggaacataacataggaaaccttttgccagaaaccacatcttctgtaattctgattgtccaaatcatttacaattattggaatgaattccagtgccattttgccagaaattcgtttggctggattcatagacttaacattttcgagagcaaatccaagccattttcatccaagtttttgacatgtgatgctaggcttcctggtttccatttgggaaatgtattcttatagtcctgtaaagattccacttctggccacacttcattattgggagtgcccaagctctgaaaatcctgaagagttgatcaatttctgaatccccatggaaaagtggtttcttagttgctagttcagcaatatggtgcctatactccaatgtcaactggagttgagtaacgagctgaccccagcaatacttctggagatctgtaccagagtgttactacctcatgtgtatatactctgataggtattccaaagctctggcaaggccaaatcagccagtttaattgttcctttgtcatcatcaagagattttgaggttttaagtctctgtgaagaactcttctagagtgacaaacacaatcccctgtaggatttggtataaataactcttaacaagtgaagaatccatgtactgaccaggagggatagaatccaagtatttcttcagatccatggaaagaaactcaaatatagtcagtcttcaggatgtgcttatgcaggattccaggttatatctcatctttgagtttctttccaagtatttcttcagatccatcggacgcgtgggtcgacgatatcccgaaattccggccgtaccagctcttgcc

SEQ ID NO: 347656 - DNA, 249 bp, Homo Sapiens
caccaggagagtctgcaggtttccttttaatcaaggctctactgaaggtgttttgtggggctaaaagcccccaaaacatgaaatggacatgtaacaccacctggatcccccatagcaggccagaccactctggcgagcactgctggtctgcccaaatctgggtaatcagactgggtattcattggctgcatttcaaagcacagcactgctttcagccaggatgaagtgggagtgaacccagctgctagc

SEQ ID NO: 347657 - DNA, 331 bp, Homo Sapiens
  misc_feature (178)..(178): n is a, c, g, or t
cactttaaattattttattcaagaagtgggggaggacagacaaggggactgagctgagccctgagtccctgaacctcccagctcagcccccacagcaggactggactcaaagtcagagggtggagactccagccccacccagacacggttggggacagacaggacccagggaataccngactgactgtcctccagggggatggcggccgcagcacacagggcccggcccgtggaccgcccgggtggggctatttgggggtgccgccgcccttcttgggagtggtgggtttcttgccctgccagaggtgtccctggatggtgaaggcatccc

SEQ ID NO: 347658 - DNA, 416 bp, Homo Sapiens
  misc_feature (78)..(171): n is a, c, g, or t
gcagtcagtgaggaaaactttgaaccaattattgagttgctttcttgggtctctataatcaataacctgtctgccagnnnnnnnnnnnnnnnnnnnnnnnnnnnnnnnnnnnnnnnnnnnnnnnnnnnnnnnnnnnnnnnnnnnnnnnnnnnnnnnnnnnnnnnnnnnnnncttaaatgtaatatttacaaaataaaactgtgatctcgtctagagaaaatgtattcatattacaaactgctcttccatatttatgtaccatattatacctttttattattgttataattattatgggtatttctaattaatatgatgttgaaacctgtttggcaccttctggaagctaccaaaaaaatgacactccattgaagtgcttaaaagctgttctcataagaattctactggcctattgt

SEQ ID NO: 347659 - DNA, 421 bp, Homo Sapiens
  misc_feature (176)..(176): n is a, c, g, or t
  misc_feature (380)..(380): n is a, c, g, or t
  misc_feature (393)..(393): n is a, c, g, or t
cttgagtataggtcacattttcctattatccagatagacactgcgaataacaggctacagaaactcagacttctgctatgttccaccaaagagaagtgccctccactcctgttttagtgcagttaacttggctatagtcaaactacaaacttctcccatacagtaagcggcatganaatcccagtgcaattctcttcttccaaatgccagcccccacctctctggtctccacctgccctttggttactctctagtgtcttcaggtagttcttgtatttttgtccacagtttacacatgttatcaatggggaggactggggcccacagtaggctactcagttatttaattgttgtaggtgggacagggtggtgtggcaacncacagttcccagntaattaggggggttgaggtggggaggat

SEQ ID NO: 347660 - DNA, 449 bp, Homo Sapiens
ggcagtgcttttattactagggctaagtcaattctggaggcccttactactttttcaagttccagaattttctgactcaagttttctgcaagtgaaggtttcttctaggctccataggagcccggaggggactcagggatgccagccaacacagaggcaacttcagtcacctgtgtagagaaccgtgcttggtactgtcgccaagagatccttggtacattcaagagtgtagagtgcctgacctttggaaggcgatggtacccacttctgaggagaagctccgtaagaggtttgaggcaaattggaggagcctcctaagttaaatgtgtatccagacctattgcttaaaaacaaagttcctagtgcagatgatacacacttggagaaatcaaagtctttaaaaagcagtatgcaaacgagaacatctcttcacaagaaagaaacattta

SEQ ID NO: 347661 - DNA, 684 bp, Homo Sapiens
  misc_feature (343)..(443): n is a, c, g, or t
  misc_feature (472)..(487): n is a, c, g, or t
caaataaagtaagagcctcactatctaagctcacatggtatattggttgcaggattaatacaaggaggcatgattacatgatcacaatccagacacaagtcacctccttcatgacaaaattcatcacaaatgtaggttctttatgtggttcttatatggccctcactagcttttgcatcagggtttgctcagtgtggactttacgaaaatcaggaaggagatgatttagtgagtaaggggattagaaattgtatcctggcaccatttacacaactcgcaacacaatattaaaaaatgactagggagacggaggtggaaggatattttatttatataaatcttnnnnnnnnnnnnnnnnnnnnnnnnnnnnnnnnnnnnnnnnnnnnnnnnnnnnnnnnnnnnnnnnnnnnnnnnnnnnnnnnnnnnnnnnnnnnnnnnnnnnnatctggataacagagcaagaccctgtttnnnnnnnnnnnnnnnntcaagtgattttttaaaaatgaagaaaaggacaagtagagaggtagggtggggaattttcccttgaatcctcaaaataataaaactgtatattccactttttatctccttccttcacaacatttgaaattccacagtaattttcccttcggttatttgcctatttcctttttaatggtttccattgttatacccagt

SEQ ID NO: 347662 - DNA, 526 bp, Homo Sapiens
  misc_feature (416)..(416): n is a, c, g, or t
ccacaaacaaaagcccagaaaagcctaaaagacttttaagaaaaactttccaaaagggaaaatggaaaactccttgtaacaactccgaacctttgaatgaccttgaaatgttcggtccccactgggtccatgaatggcatttctggctccttccccattttccctgggccagtcaagcggaactggtatggtgagcatgggccaaagaagacggtccagagcccagatgtggatccgttaggagcatagagaacaggttgggttttgcattgatataggtcaggagttcatctatgtatgtgatataatctgattgtaaagccttgcagtagcacaagccaaacctttcaggactcgaacagcccaccgagcttgtgtttctcctgtaggtatcatggagcccaagggtttgatgnagccaataatggccagggttggcttttgcagatgtgcagggaagatatacttgtacagtgagcctggccatcttcaactttcactacagactcatcaaggaaggggaaag

SEQ ID NO: 347663 - DNA, 509 bp, Homo Sapiens
  misc_feature (107)..(205): n is a, c, g, or t
  misc_feature (220)..(220): n is a, c, g, or t
  misc_feature (239)..(247): n is a, c, g, or t
  misc_feature (308)..(308): n is a, c, g, or t
  misc_feature (450)..(450): n is a, c, g, or t
  misc_feature (458)..(459): n is a, c, g, or t
  misc_feature (467)..(468): n is a, c, g, or t
  misc_feature (472)..(472): n is a, c, g, or t
atcaagtcatatttaattactaagatattaaagaaaacttgagttttattctattggtaatattacattagggttttgtttttactttttgagacagttactgtcannnnnnnnnnnnnnnnnnnnnnnnnnnnnnnnnnnnnnnnnnnnnnnnnnnnnnnnnnnnnnnnnnnnnnnnnnnnnnnnnnnnnnnnnnnnnnnnnnngcatgggccaccatnctggcttaattaacaaaannnnnnnnngtagagacggggtctcaccatgctgcccaggctgacattagtcattcttaaagcttctcangttaaattacattatgaaacactttgttttcagaccatgtaaaatacctttcaactggagctctgaagttcatcagttaacttctctactctttttaagggagtaagaataggtagagataacttttttgtcataacttttngttttggnntggtttgnnttgnttttgagatggagtctcgctctggtcgcccaggctgg

SEQ ID NO: 347664 - DNA, 620 bp, Homo Sapiens
  misc_feature (358)..(408): n is a, c, g, or t
aatttttcaaatattgacctgccttacacaatatggaagactgatgcaaggatttctgaggaggagttatgtagatgggcctctttagatccagagtgaagatattagtgtcttgtatgaaagttcaccaaagggcattcatggtagacaaggcttccatgtgtcatctcgtgtaagaagaattgtaggtgttttaaccacgtccccagctagggtctcattgccagacgtgagtgagccttctgatgattatagctcccagtctttgagccctcccagctgatgcagaatgggacagagatgagctgtcccctccagctcctaccctaatggcagacttgtgagtcagataaataannnnnnnnnnnnnnnnnnnnnnnnnnnnnnnnnnnnnnnnnnnnnnnnnnnctgaacacttggctacttgccattgcgattgccaaatctgccattccctgatatggtgtatttcctgaggttacaagccagccacttggtgacaggttaattacgttggaccccttccatcatcaaagggatgccagtttttcctcactggaatagacatgcattctggatatctggatttattaatataatattaatactttccctgtctc

SEQ ID NO: 347665 - DNA, 768 bp, Homo Sapiens
  misc_feature (215)..(245): n is a, c, g, or t
ctttttttgagacggaaaagcagacatgtgattcagttagaacatatacatttaaattcatcattgctacaaataaacattttataaacttcctctaggacaatgattttaataaagatgagtcaactactgatttcaacattagcacaattgagaagtaaaaatttaaaatatttccttccactcttcagacacaaactaatttgaataaaaannnnnnnnnnnnnnnnnnnnnnnnnnnnnnngaagcttgctactaaaattctgacagggcaagtccccaaattgccttttacactaaagctcaaacagttgtctgtcactgctattactatgagtaatccttgcagctgtaactgtttgaaatgcagctgtctcgttggcattctctccccacccccagccatgcagcatttctgttcttgctacaataatcttaaagagcattttacaggaggcttagccctggctgagggcactctacggcgtgaccgagagaacatggaaacacgattcattagacacgcctggagtgataacaatggtgctgcttcttactgcctttcatttcgtacatcaggctgagactaatgcattctcgttacacaacaagcacatttatagacaggggaaaactgtaatcacctttgattaagagacagcatatttttcctatatgagctgccagccatactgacatagtaattattttttaactgacaggttaaaatagcaaatgtagcaaaaataacatctgcagagagagag

SEQ ID NO: 347666 - DNA, 478 bp, Homo Sapiens
  misc_feature (20)..(20): n is a, c, g, or t
  misc_feature (35)..(35): n is a, c, g, or t
  misc_feature (60)..(60): n is a, c, g, or t
  misc_feature (69)..(69): n is a, c, g, or t
  misc_feature (80)..(80): n is a, c, g, or t
  misc_feature (151)..(151): n is a, c, g, or t
  misc_feature (161)..(161): n is a, c, g, or t
aacatggaatcgaataattnataatgaaattgtgnatggaaaaccagttgcccctgtaancactcgggnaaagtaaaccnaagcttgactaaaagtctgaagacttctcacccaggaggtagcggcaggtctggcaccccagggatgcccnaccacttttnactgtgtcctcttcctcaggacacgtaaggtttttgtccaccatatctggcactgagatagactcaacagccccatctttcttggaggcatcttcagctccagctccctgcaaggggtctcctccatctcctgctctggtgtctcctcatcctcaggcagcgtcttagcccccaaaggggtctcaaaggtggaagtctcagaccttagatgaagagcagaaactgccccaaatagaagagccagaagtagggggagtttcatcttggctttatcccacccagagaccttcctgggtctttagatcttcccaaagccc

SEQ ID NO: 347667 - DNA, 432 bp, Homo Sapiens
ctgagctactcggactctttattagaacaatcaatcattttcctttggacctacaatttttgcctatgctgcagccactttgtgagtgagaatgaatatgtcctgtgtgaacaccaccaggcatgccgtgtgtatgtgcaccgtacatgggcccagaatgaatggatgtgtgtgtgtgagggatacctcagatttttcttttcttattttgtgtgaaaatctcttttctacagatttctccagggtttaagcattgcttgctgtataaaaaactttactgaattatatacagtttgaatgaaatgttattttaaaaacaaaacaattgttaagtgttccataaaggttatgttgaattttggtcagatgaatatttgtaagtaaaaaatatatgcatttctgaacctcaacttacatagattttctttatat

SEQ ID NO: 347668 - DNA, 101 bp, Homo Sapiens
aaatatatttgatgacataatttttgtgtagtttatttatcttgtacatatgtattttgaaatcttttaaacctgaaaaataaatagtcatttaatgttga

SEQ ID NO: 347669 - DNA, 219 bp, Homo Sapiens; identical to SEQ ID NO: 331357

SEQ ID NO: 347670 - DNA, 347 bp, Homo Sapiens
  misc_feature (168)..(223): n is a, c, g, or t
  misc_feature (309)..(309): n is a, c, g, or t
  misc_feature (319)..(319): n is a, c, g, or t
taaacactaaatgggcttgcttttaaagtaaatcaactgtgatgtatttctcataggaaagaatctcagtgcaaaataaatagaaatcagactggtgattaaagcttttttaattgtggggtaaagagttaccatattttaacaagtatattttatgtttaagtgtannnnnnnnnnnnnnnnnnnnnnnnnnnnnnnnnnnnnnnnnnnnnnnnnnnnnnnnctgtgttaggatttccttaaaatttgattttttccccctgcatatccctcagggtttattaggtttaggccatatataggtagganttttcagggntatatggttttttcataccccactctgg

SEQ ID NO: 347671 - DNA, 3639 bp, Homo Sapiens
  misc_feature (3125)..(3145): n is a, c, g, or t
ggcgcggcggctgtcagctgactgtggcggcggcggcctcgaggtgacaactgtctccgtcgcaggctccggcgggggcgcaggaggtcgcccggcgcgtcactgtcgggtcggcgagccacgggggccgccgcagcaccatggcgaccaccgtcagcactcagcgcgggccggtgtacatcggtgagctcccgcaggacttcctccgcatcacgcccacacagcagcagcggcaggtccagctggacgcccaggcggcccagcagctgcagtacggaggcgcagtgggcaccgtgggccgactgaacatcacggtggtacaggcaaagttggccaagaattacggcatgacccgcatggacccctactgccgactgcgcctgggctacgcggtgtacgagacgcccacggcacacaatggcgccaagaatccccgctggaataaggtcatccactgcacggtgcccccaggcgtggactctttctatctcgagatcttcgatgagagagccttctccatggacgaccgcattgcctggacccacatcaccatcccggagtccctgaggcagggcaaggtggaggacaagtggtacagcctgagcgggaggcagggggacgacaaggagggcatgatcaacctcgtcatgtcctacgcgctgcttccagctgccatggtgatgccaccccagcccgtggtcctgatgccaacagtgtaccagcagggcgttggctatgtgcccatcacagggatgcccgctgtctgtagccccggcatggtgcccgtggccctgcccccggccgccgtgaacgcccagccccgctgtagcgaggaggacctgaaagccatccaggacatgttccccaacatggaccaggaggtgatccgctccgtgctggaagcccagcgagggaacaaggatgccgccatcaactccctgctgcagatgggggaggagccatagagcctctgcctcgatgccgttttgcccccgctctttggacacgccgacccggcgctccccaaggaatgctgtcccaacaagattcccgtgaaagagcacccgtgtcgccccctcccgtggacttctgtgccgccccgtccacacctgttcttgggtgcatgtgggttttcggttcctggcggtccaggacggggcgggggctcccctcccatctcgtgctgggaggtctcagcgcgctctcctgtccctgggacgtgcgtctctccttctcatgccgttctggaaaatgctcttgctgtagagagcagctgcttctgccagggtgttggaggtggtggagcgccttccgattccattcatggcattttgtgatgtgatgtaattggaatagagctgttgatttaaggcacacacaatccctcacactgtgggttttttttagaacttcccagacgaaaactcacgcccttgccctaacgcgctttgctgtgagcctggcccctgcccagggcttgggtctggtgagctgagcagcttcctgtggatggtgtggggccggcctctggcctggctcacctggccactgtccagccagccttgtgacagactccggcctgaaggcagaatgaacccacacctggagtgaggaagggggcctggcacggttggccaggctctgcctgattgccagccagcgggcatctgaagccgggtccttcgcccgccggaggctgccgtccgtctctcctgctgcgctcgtgccagctccgtgggtgtcctcccagggagcttctcttctcaacaggccttgcgaggctggggtgagaggtgatagaggcagcactgtgcatgattccgagagggtgtggtggcactgccagccgactgctgacagcttgggagctgctgtgcccaggacgtgggttcagcgtgggcgaggaaagcctggcgagcgtggccctgtaaaagctttctgaggcgggaggcgctcacttacctctgactgcctgggcgctgcgtgtagcatcttggcctacaggacagattttaggtgacacctggttatgacagtcagaaatttgagaagcttctcacaagtgatgcactttaaataatctgcatgccattgagacacctgcatgtctggtgtttgtggttcaagtgtcttgccgccggccttcggatgtaaacccactgataacggacagaaagagaatgcccacaagtgggtcttctgtggaagatgcagaaggaggaagttagtgcttacattttagtctttttctccctcaaaaaaataggttaagtttcagtgccagctagaaaatactgctttctgccatcgattgggggtggtttttgtcaaatatactgttgataaatatttatttttgtaaacttgaagtgtgtggtggccgtgggggagggacatgctggcagcaggcgccttcttcagctgtgggtcctaaaggcctttgatcctttgaagaagaaagacatggtatttgttcagcagacgccgaccactcagacggaggggcccctgggattccctgtctcagatggcctggtcttacgcctgtgtagatttcttctccattgggaatgaaggtgtcaggtgggactggaacgttctagatggtatgttccgtgatattaacaactctaacccaggaacagaccacaagccacacttcagaggcctcactgtgctgggggcttcggtgtccaggcgcccaggtgtggccaccagcaccggtttctgccttcgcgttgctggggtgcagtgagactgccacacgcgtgcacatgtggctctgtgggtgtctcctagagaggacgtggcccctgctgccagcccttgagcagcccgtgtgggggcccgagggacccacacagtgggggccagcctcgctggagggagagcaaccctttgccgatgaccacgcttgccgccatctcttagttttctttttcacaagcgctttatttttttaatagacaaatcacattttgcaaggcctttaattaaataagattcttctttccttcattttatgctttatttcctgtttgaaggcttactgtagaagtggcttactgtagaagcagcttgctgaagcccctccgagcggtccccagaattagctggttcacaannnnnnnnnnnnnnnnnnnnngcctgtgtcaggtgtggatgaggtcgtcacactcagaaggacaggcttgtctgccagctcacaaggggaggctgcagtgggtttgggagctgggtttaggcccctggtgtctgagggcccaggccttgccagcctctgctgctcctgctcctgggtttgaagatgcaggccgatcgccagctccgtggcagcggtcactaaggacagcctgactgtgccatcttggagcctcaggcggggctccggagatagaagacaggtcgccggaggctccccctcctctcctctcccctctgcagatgctccctgggcgctaccctgcagggtgccaggcaggagtggtctcagaacgtgcgcttctgattattttactggggtccattgtccagatttttctttgattgtaaaatatatttttactttttagtcttctaatttaataaatgatccatataaaaatagagaaataaagtcctttaagggaaggtttacca

SEQ ID NO: 347672 - DNA, 667 bp, Homo Sapiens
ccagctggtacggtccggaattacgggatatcgtcgacccacgcgtcgggcgctaggccccccgtcccggtcatggccatgctcaggatccagcccgaggcccaagccaagggtggtatgtgtttcgtgaagacctctgtaccaagacagagaacctgctcggtgagctatttccccaacgaagatttctgagctggatgcatttttaaaggagccagctctcaatgaagccaacttgagcaatctgaaggccccattggacatcccagtgcctgatccagtcaaggagaaagagaaagaggagcggaagaaacagcaggagaaggaagacaaggatgaaaagaagaagggggaggatgaagacaaaggtcctccctgtggcccagtgaactgcaatgaaaagatcgtggtccttctgcagcgcttgaagcctgagatcaaggatgtcattgagcagctcaacctggtcaccacctggttgcagctgcagatacctcggattgaggatggtaacaattttggagtggctgtccaggagaaggtgtttgagctgatgaccagcctccacaccaagctagaaggcttccacactcaaatctctaagtatttctctgagcgtggtgatgcagtgactaaagcagccaagcagccccatgtgggtgattat

SEQ ID NO: 347673 - DNA, 1250 bp, Homo Sapiens
  misc_feature (48)..(84): n is a, c, g, or t
  misc_feature (1121)..(1124): n is a, c, g, or t
  misc_feature (1126)..(1126): n is a, c, g, or t
  misc_feature (1128)..(1128): n is a, c, g, or t
  misc_feature (1226)..(1226): n is a, c, g, or t
tgtttacgactcactatagggcgactggagctcacgcggtggcggcgnnnnnnnnnnnnnnnnnnnnnnnnnnnnnnnnnnnnnatcaggccaaatcggccgagctcgaattcgtcgagagcgggagctgggtgcgagcgccctaccgctttcgctttcccttcgcggtgcccactccactccttgtgcggcgctaggccccccgtcccggtcatggccatgctcagggtccagcccgaggcccaagccaaggtggatgtgtttcgtgaagacctctgtaccaagacagagaacctgctcgggagctatttccccaagaagatttctgagctggatgcatttttaaaggagccagctctcaatgaagccaacttgagcaatctgaaggccccattggacatcccagtgcctgatccagtcaaggagaaagagaaagaggagcggaagaaacagcaggagaaggaagacaaggatgaaaagaagaagggggaggatgaagacaaaggtcctccctgtggcccagtgaactgcaatgaaaagatcgtggtccttctgcagcgcttgaagcctgagatcaaggatgtcattgagcagctcaacctggtcaccacctggttgcagctgcagatacctcggattgaggatggtaacaattttggagtggctgtccaggagaaggtgtttgagctgatgaccagcctccacaccaagctagaaggcttccacactcaaatctctaagtatttctctgagcgtggtgatgcagtgactaaagcagccaagcagccccatgtgggtgattatcggcagctggtgcacgagctggatgaggcagagtaccgggacatccggctgatggtcatggagatccgcaatgcttatgctgtgttatatgacatcatcctgaagaacttcgagaagctcaagaagcccaggggagaaacaaagggaatgatctattgagagccctctctcccattctgtgatgagtacagcagaagacttccctgctttttactgcgggaactccagattttcccccaaccttgcttctggtgaagatttttcccctcaccttggcctctccaggcacaattaactatcagttatacccccgcctnnnncnanaccccggcgcgtccccacccattcccctgttcgggccggccctcgcgcgccctccaaaaaagccttttttaaacaccattctgcgtttgtgcgggcgnccgcggcccccattaagggtaaaa

SEQ ID NO: 347674 - DNA, 971 bp, Homo Sapiens
agcgggctttcgctttcccttcgcggtgcccactccactccttgtgcggcgctaggccccccgtcccggtcatggccatgctcagggtccagcccgaggcccaagccaaggtggatgtgtttcgtgaagacctctgtaccaagacagagaacctgctcgggagctatttccccaagaagatttctgagctggatgcatttttaaaggagccagctctcaatgaagccaacttgagcaatctgaaggccccattggacatcacagcgcctgatccagtaaagcagaaagagaaacgaggagcggaagaaacagcaggagaaggaagacaaggatgaaaagaagaagggggaggatgaagacaaaggtcctccctgtggcccagtgaactgcaatgaaaagatcgtggtccttctgcagcgcttgaagcctgagatcaaggatgtcattgagcagctcaacctggtcaccacctggttgcagctgcagatacctcggattgaggatggtaacaattttggagtggctgtccaggagaaggtgtttgagctgatgaccagcctccacaccaagctagaaggcttccacactcaaatctctaagtatttctctgagcgtggtgatgcagtgactaaagcagccaagcagccccatgtgggtgattatcggcagctggtgcacgagctggatgaggcagagtaccgggacatccggctgatggtcatggagatccgcaatgcttatgctgtgttatatgacatcatcctgaagaacttcgagaagctcaagaagcccaggggagaaacaaagggaatgatctattgagagccctctctcccattctgtgatgagtacagcagagaccttcctgctttttactggggactccagattttccccaaacttgcttctgttgagatttttccctcaccttgcctctcaggcacaataaatatagttataccactgtcgaa

SEQ ID NO: 347675 - DNA, 752 bp, Homo Sapiens
ggggctttcgctttcccttcgcggtgcccactccactccttgtgcggcgctaggccccccgtcccggtcatggccatgctcagggtccagcccgaggcccaagccaaggtggatgtgtttcgtgaagacctctgtaccaagacagagaacctgctcgggagctatttccccaagaagatttctgagctggatgcatttttaaaggagccagctctcaatgaagccaacttgagcaatctgaaggccccattggacatcccagtgcctgatccagtcaaggagaaagagaaagaggagcggaagaaacagcaggagaaggaagacaaggatgaaaagaagaagggggaggatgaagacaaaggtcctccctgtggcccagtgaactgcaatgaaaagatcgtggtccttctgcagcgcttgaagcctgagatcaaggatgtcattgagcagctcaacctggtcaccacctggttgcagctgcagatacctcggattgaggatggtaacaattttggagtggctgtccaggagaaagtggtttgagctgatgaacagccctccacaccaaagctagaaaggctcccacacttcaaatctctaaagtattttcctctaaacgtgggtgaatgcaattgaactaaaagcagcccaaagcagcccccaaggttggggtggaattatccggccagcctgggttggcacacaagcctgggaatgaaagggcaaaaaataccccgggggaaattcccgga

SEQ ID NO: 347676 - DNA, 488 bp, Homo Sapiens
  misc_feature (21)..(21): n is a, c, g, or t
  misc_feature (33)..(33): n is a, c, g, or t
  misc_feature (73)..(73): n is a, c, g, or t
  misc_feature (146)..(146): n is a, c, g, or t
ggtggtgaacccaggttgaanctgcctcaaaangaacatccttggaatctcaaggctttcaaaacgctgcaanaaaggaaccacgaatcttttcaatgcaagttcaactgggcccaacagggaggacctttgtccttcaatcctcncccccttcttcttttcaatccttgtcttccttctcctgctgtttcttcccgctcctctttctctttctccttgaactggatcaggcactgggatgtcccaatggggccttcagattgctcaagttggcttcattgagagctggctcctttaaaaatgcatccagctcagaaatcttcttggggaaatagctcccgagcaggttctctgtcttggtacagaggtcttcacgaaacacatccaccttggcttgggcctcgggctggaccctgagcatggccatgaccgggacggggggcctagcgccgcacaaggagtggagtgggcaccgcgaagggaaagcg

SEQ ID NO: 347677 - DNA, 569 bp, Homo Sapiens
  misc_feature (26)..(26): n is a, c, g, or t
  misc_feature (38)..(38): n is a, c, g, or t
  misc_feature (62)..(62): n is a, c, g, or t
agggggaaactcaacccctccctccnaaccccccgatncggacctagggcctggagctcctncccaggtgcccctggggccaagcaaggcagtccccaggcctgccgtctcccagcacggcccccaaggtggacactaagccccctgctgctgcaggcgcccatgcctgcttcagccagtgacgattgagcccatttgtgagagagaatccggaagcgttaggtattacagcagactgacctaagacctatgtaaaaggaaagctgttccaacacacggactatttttgtactagaatttgctaacttgtaatattgaatttcctttggccgataatcaggatttccctataagtcacttggacattggtcacttgtaggaaatttaaactctaattatgacagctacactgaaaaataattgtactgaaattaacttgtctatcttcatttggttttaatttttaaatgtttgtaaaaagagactgttttgggggaatggggcaaaggggtgggcgatttcttttgtaagtgtaaaataaatgaacacgcattgaataccaaaaaaaa

SEQ ID NO: 347678 - DNA, 309 bp, Homo Sapiens
tttaatctggaacaagttcaattctttgccttacctgtgtaacaatcccaccatagatagctgcctatgagaatgaatggaaaccatctgtatgtataatgtattcattaactcagtatagtgtaagtagatgcactaatcttttcccaatagatattcttttatttctttgataaggacttgttaagcatttgctatgtactgtgtactcttctgaatgctttagatatgctattaaacaagaataaggatcctgtcgtcatgtagcttatagtctaacagtggaaaaataaattataaagaagtaaa

SEQ ID NO: 347679 - DNA, 1277 bp, Homo Sapiens
  misc_feature (1)..(1): n is a, c, g, or t
natgagccactgcactgggcaggttaatcttctttcaaaagagtctgctctttctacccaattggcgaagaaatccccaggattcaccgaacaaatggattaagcacccactgagtgcctagcatgtgcctgggacaccaggccaccgggaagatgctccccctttgacttgtctatgacatgctatgtctctcaccagatcccttcctgggaggtcgggcttctgtaacatggctctgcccccaaaataaaatttttcaccgcgagtcagggatcggcaaacattttctgttaaagagccagaaagtaggtattttaagtcataaggtccctgtttaacaactacttgactctgccattgtaggcacaaaggcagccacagacaaaacaagcaagtagtcatgtctgtgttccaataagactttatttacaaaaacagcaggcacagacaagatttggcccacaggcatagattcccaactcatggtggtgaagtacagaaaaaaacacctgtctacaagcttttgtaagaaatcaggctaaatgttacctatgttttggttggaagatttctttggtttgaggaatgctttcctcttgcattggcatgccaagaggatagatgactctgaaagacgcctcttcagacatacctgtcatcacacaagatcaacttcttcagtttaaatgacacaaatccatattgtggaaggaaaatatgtagtgccttagcttcactaatagttgtaaaacttctttttaagacatcaaaggctagaggattcattttatgcagtgcgaacatctaataacactctctgtgtcaaatatatattgtacattaccttaaactattgtaatagctaggtaaaaatccttgtataaaagaatgttttcccccacacaaagggcagagtattgagcactaatttcctattaaaagtatatatatgtatctgtgggtcactggtgtccaaacttgtatttgcatttgtgtttacttgagggaaattgaacactaacaactggtaaaatcccattgtaaattcttacagcatgtttgactttattttccatgcaatgaaattgtgttgtgtaaagaattaggcttttaaaatcttaataaccaagcttggttttggcttttaattaattgttgccggttggtaaccaagaaatttaattttaattttttaaattgggaagggttttgaaccctaaaattcttgtggacccaaaattggattttgcccttttttccaaaatcacacaacctt

SEQ ID NO: 347680 - DNA, 499 bp, Homo Sapiens
  misc_feature (21)..(21): n is a, c, g, or t
  misc_feature (26)..(26): n is a, c, g, or t
tggtgaagtccggaaaaaaancccgncctaaaacctttgtaagaaaatccgggcccaaaggttacccctagttttgggtgggaaagatttcctttgggtttgaggaaatgccttccccccttgcatgggcatgcccaagaggatagatgacctctgaaagacgccctcttcagacataccctgtcatccacacaagatcaacttccttcagtttaaatgacacaaatcccatattgtggaaggaaaatatgtagtgccttagcttcactaatagttgtaaaacttctttttaagacatcaaaggctagaggattcattttatgcagtgcgaacatctaataacactctctgtgtcaaatatatattgtacattaccttaaactattgtaatagctaggtaaaaatccttgtataaaagaatgttttcccccacacaaagggcagagtattgagcactaatttcctattaaaagtatatatatgtatctgtgaaaaaaaa

SEQ ID NO: 347681 - DNA, 843 bp, Homo Sapiens
  misc_feature (6)..(6): n is a, c, g, or t
  misc_feature (13)..(13): n is a, c, g, or t
  misc_feature (19)..(19): n is a, c, g, or t
  misc_feature (38)..(39): n is a, c, g, or t
  misc_feature (46)..(46): n is a, c, g, or t
  misc_feature (55)..(55): n is a, c, g, or t
  misc_feature (80)..(80): n is a, c, g, or t
  misc_feature (92)..(92): n is a, c, g, or t
  misc_feature (101)..(101): n is a, c, g, or t
  misc_feature (234)..(234): n is a, c, g, or t
  misc_feature (240)..(240): n is a, c, g, or t
  misc_feature (267)..(268): n is a, c, g, or t
  misc_feature (270)..(270): n is a, c, g, or t
  misc_feature (275)..(275): n is a, c, g, or t
  misc_feature (277)..(278): n is a, c, g, or t
  misc_feature (280)..(281): n is a, c, g, or t
cttgcncccttgncgcgcnccctgtggctgctgtgctnnagctgcncttcgctcngggcgcttgcgtctccccctttgcncgctgcgctctntgacttcgnccgttactcttgcgccgctttgcgctgccgcgttgttcccgccgggccgtgtgccccggccgttttctgttttccccgtgttttgcgtgtttgtgctccccctgccgcgcgccctcgcccgcgccttgctgcngttgcncccgtcgctgtgcatgcattggttgcnncntttcncnngnntgagtcaaaggccaatattcttaatattattgaaatatttgagaatataaattttcagttcaaaacaaaggcaaagctatttaccaaggaaaagttcactaaatctgagcttatttcaatattccaggaagcaaaacagtttggtcagaaacaccaagacttagcagagcacagtgatcccgaagtgagagataaagtcatacgattaatactaaaactctgaatacccctctgttctcataaagcctcaaacagttttttggagttgcaatatgaaaccaatgcatattgtaattataaattcaatacttatgttttccatgttgattgagggaggcaattttatggataccaattaatcttgagatcctgaacatgtgctgatttttattgtgctatatagtatataaattgagatatttttggtatttctgcaacgtgacctgataatgaatctattcatcctgagtaagctatacttctgtgctttatattgatatgtgtattcttttgagattttatttacatgttgttaataaagttgcatgctaaaactgggaaa

SEQ ID NO: 347682 - DNA, 676 bp, Homo Sapiens
  misc_feature (520)..(536): n is a, c, g, or t
  misc_feature (580)..(606): n is a, c, g, or t
aggtggctcagcacctgcccagggtaggcctggcatgaggggttaggtcagccaatgtcagctgcttctcttggggccctctcagagtctatctccccaagacaggaagggaaaagcaaatttctaattcaccagcaataaaaattggaggaggcttggccctcagcccttatatctctctctttttcactctcttcctcccacccccaagactgagttttggggggcaaggtggagagagctggcaactactgtgagcaagtcccctagcccctgaccagcctcctcccatgactggtgactgtttaatgagctgtgcatcccccacaaaaacatgagtgcccctctgtgtggcctctaaccctctgcacagcccttctgggtggtcctcaccaggtctctgagctgggtgggaggccatcctggcgaccactgcccattccattcacccctcactgtacctgccctagaacctgggcctaggccacaggggcagggagaagagaaggcattagtaagnnnnnnnnnnnnnnnnntatgaacagactcagctttgggacgtccaaccacaaaaggaatnnnnnnnnnnnnnnnnnnnnnnnnnnnctctaccatatgtgatggaaagactttttgttttcctttcccaaagaaataaaacggaaaaagcctcttg

SEQ ID NO: 347683 - DNA, 249 bp, Homo Sapiens
  misc_feature (16)..(16): n is a, c, g, or t
actgtactttttttantttttaataggaaagtgatgtgcttcagagaagggttcctccttaatgttgaggttttttaaaaataaaaatactgtttttaagctctttccttattggtttgcatgattattggcatctgcttacgatggctttaatcactcagagctaatggcacctttcctatttagcctcattttagaatgcagtcaacacatgtagacttttcacaaataaatgaacaactttcaaaa

SEQ ID NO: 347684 - DNA, 725 bp, Homo Sapiens
  misc_feature (126)..(126): n is a, c, g, or t
tttcaacaatcacaattgcctcttgcctgtaaaagcccactttaggtctattttattattcacttgaacaatgtattgcatttcaaatcacccccatctcttgctgttatctacagcttgtgacanaatgaacaccttgtagaaatatcctactggttgggtttcccaagtctatgacactatgagagaagcattgctgatggattgacgaggagaccaccagatcattaaaggattagatactctgaaggcaggaaactagaaaatcccattgatgaaaggatattttaatctagcgtaaaatgtttctttgtcgtaacagcagaatttcttgacattttacaacttaatgaaacaaaagaacaatcatctttaaagtcaaacatctatcaaattataaaccaaacacatagcaccgatatcaacctcataaaacgtgcgggcccgcagggtagaaaagaactgtctggggcactggcagcaacgtgccattccaggaactcagagtttcgaagtgaacatttttgtggcagatgcttttcctaaaaaacactgtatcatccaataaatatttgactaaaatccattttgtgcttttgggtgacgttaactgacttctttctgaggcctaataagaaacaagaaagctccttgtgtattttagagcaggattcgtcatcacaagcctcgatactgtcataaaattttaatttaaagcagaaaac

SEQ ID NO: 347685 - DNA, 471 bp, Homo Sapiens
  misc_feature (30)..(30): n is a, c, g, or t
  misc_feature (194)..(244): n is a, c, g, or t
agactaagtgatctgccctcccaggtggcnaatcaccttctgctccctaggtaccccccactgcaaagcccaaaggtctcctccacggttttttctgcaaattaataatgtcatttaaaaaatgagcaaagccttatccgaatcggatatagcaactaaagtcaatacattttgcaggaggctaagtgtaagannnnnnnnnnnnnnnnnnnnnnnnnnnnnnnnnnnnnnnnnnnnnnnnnnnaataagtcgacataaagtctttaattttgagcaccttaccaaacataacaataatccattatccttttggcaacaccacaaagatcgcatctgttaaacaggtacaagttgacatgaggttagtttaattgtacaccatgatattggtggtatttatgctgttaagtccaaacctttatctgtctgttattcttaatgttgaataaactttgaattttttcctttca

SEQ ID NO: 347686 - DNA, 2005 bp, Homo Sapiens
  misc_feature (439)..(439): n is a, c, g, or t
  misc_feature (970)..(970): n is a, c, g, or t
  misc_feature (1349)..(1349): n is a, c, g, or t
  misc_feature (1726)..(1772): n is a, c, g, or t
  misc_feature (1775)..(1776): n is a, c, g, or t
atagtgtcatagacttgggaaacccaaccagtaggatatttctacaaggtgttcattttgtcacaagctgtagataacagcaagagatgggggtgtaattggaattgcaatacattgttcaggtgaataataaaatcaaaaacttttgcaatcttaagcagagataaataaaagatagcaatatgagacacaggtggacgtagagttggcctttttacaggcaaagaggcgaattgtagaattgttagatggcaatagtcattaaaaacatagaaaaatgatgtctttaagtggagaattgtggaaggattgtaacatggaccatccaaatttatggccgtatcaaatggtagctgaaaaaactatatttgagcactggtctctcttggaattagatgtttatatcaaatgagcatctcaaatgttttctgcagaaaanaataaaaagattctaataaaatgtattctcttgtgtgccaggggaggtttcagaaacctacctcgtcttacaaatttaaacactttgggagtctgtacaggtgccttatatgtagggtcattgtcacgatacacacacacgaacactccctctggactggctgcctctccatccagggcagttaactagcaaacaaggcagatctgcttcatggagcgggaggccatggcttgactctgagtgatttgggtcaaccggagtcagacgcatgtctgcacgctgcagctattatgagagtccctttgtcatttttcaccttttcatcctaagcatctttcagagattaattatttggccattaacaatgaatccaaatcatatcatactgacatcatctagacatgatttggaaggaacagcttaggacctcctgatgaggtcacattgttgtttcttttaactagacttggcaaagaaaggcaaaaattgaccagcctatctttctgctggtgctgccttaaggaggtagtntgttgaggggagggctgtagatcattacttctttctcttcaggaagtggccactttgaaccattcaaataccacattaggcaagactgtgataggccttttgtcttcaaatacaacaggcctccactgacccatccctcaaagcagaaggaccctttgaggagagtacagatgggattccacagtggggagtcggtggaatggaaacctgtactagaccacccagaggttccttctaacccactgatatggtggcgaactcacagtaattccaaatgtacaatcagatgtctagggtctgttttcggaagaagcaagaattatcagtggcaccctccccactcgcccccagtgtaaaacaatagacattctgtgaaatngcaaagctattctttggttcgtctagtagtttatctcattttaccctattcttcctttaaggaaaactcaatctttatcacagtcaattagagcgatcccaaggcatgggaccaggcctgcttgcctatgtgtgatggcaattggagatctggatttagcactggggtctcagcaccctgcaggtgtctgagactaagtgatctgccctccaggtggcgatcaccttctgctcctaggtacccccactggcaaggccaaggtctcctccacgttttttctgcaattaataatgtcatttaaaaaatgagcaaagccttatccgaatcggatatagcaactaaagtcaatacattttgcaggaggctaagtgtaagannnnnnnnnnnnnnnnnnnnnnnnnnnnnnnnnnnnnnnnnnnnnnngannaataaggcgacataaaagtcctttaattttgagcaccttaccaaacataacaataatccattatccttttggcaacaccacaaagatcgcatctgttaaacaggtacaagttgacatgaggttagtttaattgtacaccatgatattggtggtatttatgctgttaagtccaaacctttatctgtctgttattcttaatgttgaataaactttgaattttttcctttca

SEQ ID NO: 347687 - DNA, 545 bp, Homo Sapiens
ctggcactatgctgtacaggtttttttcctgttaggagagctgaggccagctgcccactgagtctcctgtccctgagaagggagtatggcagggctgggatgcggctactgagagtgggagagtgggagacagaggaaggaagatggagattggaagtgagcaaatgtgaaaaattcctctttgaacctggcagatgcagctaggctctgcagtgctgtttggagactgtgagagggagtgtgtgtgttgacacatgtggatcaggcccaggaagggcacaggggctgagcactacagaagtcacatgggttctcagggtatgccaggggcagaaacagtaccggctctctgtcactcaccttgagagtagagcagaccctgttctgctctgggctgtgaaggggtggagcaggcagtggccagctttgcccttcctgctgtctctgtttctagctccatggttggcctggtgggggtggagttccctcccaaacaccagaccacacagtcctccaaaaataaacattttatatagaaaaaagaa

SEQ ID NO: 347688 - DNA, 899 bp, Homo Sapiens
cagataaaaattctcttttctcaaaaccatttaaatgtggtaattagaatggcccagaaggggcacagtgccttttagccctcgccattacttgctcttaggagtgcattttttgtagctgtgggtttttgactatctctgctgctttctccagcccctaccctcgtgactacaagggaaaacgtgcggcgctcacgagagagcctttatgggatttttaaaaaatggggattgtgggaaaatggctccagcagtcacagtttttcagtttctcacaatcccataaaaacagagcaaccaggtaacaaaactaaagcatgggcaacatttacagaccactggatggtgaagaattcccatgaacccctggttcacaccgtaaggacacactactcagcatgggcaacatttacagactactggatggtgaagaattccccatgaacccctggttcacactgtaaggacagactactcagcatgggcaacatttacagaccactggatgatgaagaattcccatgaactcctggttccaactgtaaggacacactactcagctgtagcctgaagccgcctccttacatactgtaagtttagcctataggtttctccatacgtagtgaacagtcatctaattggatgtgtggacactgtaacctactcttgaatcagtcacaggcagcagcacttcaaactctgtttcaataagccagacacgagctgtagccaccctgctgtttgcaggcctcacctctgccttctgtgcctcactcccttttctgtccgtaagtctttggcacacagtggcactggagtctctctgagcctattctggtttgaggggttccctgattcctgaatcattctttgctcaattaaactctgtaaaatttaaa

SEQ ID NO: 347689 - DNA, 693 bp, Homo Sapiens
  misc_feature (51)..(51): n is a, c, g, or t
tgtgtgccaaagcttacgacaggaaagggagtaagcacagaggcaaaggtnaggctgcaacaagcagggtgctacaagctcgtgtcgggctaattgaaccagagtttgaagtcctgctgcctgtgactgatcaaagagtaggttacagtgtccacacatccaattagatgactgttcactacgtatggagaaacctataggctaaacttacaagtatgtaaggagcgggctcaaggctacagctgagtagtgtgtccttacagttggaaccaggagttcatgggaattcttcatcatccagtggtctgtaaatgttgcccatgctgagtagtctgtccttacagtgtgaaccaggggttcatgggaattcttcaccatccagtagtctgtaaatgttgcccatgctgagtagtgtgtccttacggtgtgaaccaggggttcgttacctggttgctctgtttttatgggattgtgagaaactgaaaaactgtgactgctggagccattttcccacaatccccattttttaaaaatcccataaaggctctctcgtgagcgccgcacgttttcccttgtagtcacgagggtaggggctggagaaagcagcagagatagtcaaaaacccacagctacaaaaaatgcactcctaagagcaagtaatggcgagggctaaaaggcactgtgaaccttctg

SEQ ID NO: 347690 - DNA, 356 bp, Homo Sapiens
ttggaccaaagagaataagagaattgcgggtagaaatagtctactgtgtgtagacaaatccagaaagttgatttctgttcctcaaacaatttctgaaatatttatgtcagaataaataaaagaattgttattgttggacaatgaaacatacctggaccctttgagtgtgtgaatagtaaaggctgtgataactgaaatgcagctaagcaaaaagggctaattagaagacttttgagacatgatttacctaaatggaaatagtttggttttcaatccttcactgtaataacaattatttgcatctattaagtgtttgtagtcactttgtataataaagttttatggcttgtgattat

SEQ ID NO: 347691 - DNA, 925 bp, Homo Sapiens
  misc_feature (89)..(89): n is a, c, g, or t
  misc_feature (473)..(485): n is a, c, g, or t
ccccaggggctgggataacaggcggtgaggccaaccatggccggggtggcaatcacggtatgagttttttctaaaaaaaccggaaaccncggaaaacatggatgcatcttaaaggacttatggctaagggaaacccagtcccaaaagggacaaatacggtatgatttccacttacatgagaaatatgagtagtgaagttgatgatagagacaaaaggtatggctgttgctagggaaagggggaggtggggagttattgtccaatgggcacagaatttgggaagatggaaaacttctggagatggatgatggtgatggctggacaacaatgagaatgtacttaatccactgaattgcatatttaaaaatgggtaagctggtcagttttatgttataaatattttacctcaataaaaacaaattgaacttaaaaattcactgaagaagccaatatggaaaaaggactaaatgttnnnnnnnnnnnnngccaacttttttttttttaatcaagagataagtacttagctgcaagctcaaggtctcggttgaggacaatcattatgagtcctagtaaaagacaaccagttttaagaacactgtcaggcaagctaccatgtagttctccttgactccatgcttagctctttcagacttcccagtaattacgaagggtcacatttttgttcagctttgcccagtgctgtcattcataatagatgaatgaaaagtcccagaaacctgttctgtttgggaaggttttcttttgttccaggcttcggtggttaatatgcttgacaaatttcagagtctctctgtctctgtagaccaatgccaaagaattgctttctggattcactgttagcagctcttcatcttcacctttggcaatgtaagaagtaaaaccgccatattctgctcccagcctt

SEQ ID NO: 347692 - DNA, 609 bp, Homo Sapiens
  misc_feature (13)..(13): n is a, c, g, or t
  misc_feature (480)..(480): n is a, c, g, or t
  misc_feature (486)..(486): n is a, c, g, or t
  misc_feature (510)..(526): n is a, c, g, or t
  misc_feature (587)..(587): n is a, c, g, or t
atttgggctttcnccttttggggaagaatttagtaacttgtgccaaactttcaaccagatggaaccgcatttaaatgcatgcattttatccttgaaactgggatattcctaatggggatttcttctttgtatttcagcctagcttcctaggttagttggtctatcctacttttatttgaatgaggaaaccctgtgtatcagttagaatcttcgtgctttttctgaggagattgtgtttaatggattattagccagtttaggctcagtgaacaaactgatctagctctgaatgtatgtttcctgacgttttacatttccactttcctattccattcattaagctagccaacaatccaccatcctttaaagattgttctcataactgaacaaaaaccacataatctaaacagagcaaagctacaagaaataaatttatttaaacgaaagaaaaaggagtctgtgtgaaatgtcttcttttgnttttgntttttacctaagttatatttttcnnnnnnnnnnnnnnnnnggactggctagcccttgagttggatttataaaggaggttgccttgcttgaaagaaatggtnagttgtgtgacagtatgtggaa

SEQ ID NO: 347693 - DNA, 2455 bp, Homo Sapiens
  misc_feature (36)..(36): n is a, c, g, or t
  misc_feature (72)..(72): n is a, c, g, or t
  misc_feature (2354)..(2401): n is a, c, g, or t
atgttctttcacccttttctgtttgctaagtgaggntgaaaaaataacactgtactgcaataaggggagagnaaccctgtctaatgaaacctgtgtctctgagagtagagtcactggaacactaatgaggaaactgcactgttttattttaattcagttgttagtgtgtcttagtgtgtgcaattttttttcttactaatatccatggtttgcaggttctgttaggccctttccttctccttacttcttatccccaactccctacccacccctcttcagttttcagattggagattcaagatttgttccactttacaagcaagaggaaaaaaaagcaaccttcaaactaattctccatgggggctctccatgttaccctccactccttggcccaaacctctgatggagatagacattgttggagaagtgggctgccttccccaagtggggcactgcttaagcacttattcagtggagaacacaggtgaaaagcaactcaggatgagggtggtggagagggcaggggcagatgtgcagtcagagaaggactcctgaagttactgctgctcagaaaaacagttcctttaatgtggaagagccatttcataggtcataggtggtatggtatatttcttcagagtcaaccttggccctgagaagtatgtcctcctggtgtgctcaggctcaacggcagtctggtggctgaaggcacttggcctcctaaaccaagcagaattttgggaagagataacagccagggagatattgcccatgattctcactttttctttgcctggcatctaagcaggaacccattgtggagtagactctcttcttctatggagcctctgacatggggagcaatgctaagcaagctaagtgtaaaagaaaagtgacagaataattttggaagaggaagcctcatcaaaagctcacacaaaatagagcttcccatggtgtgccctatcctaggtttaagaaaacacgtatgaagtttatgctgatgcaaagaacttgggtttttatgttaatataaagtgttgttttagcatgtggccagatgatgctctgtcatctttagaaagtgagataaccaaggaaataattgaaggagtatagggagatggattaagttgataatgacatttagggcaacttaagacctttgatcccaggttctaactcaaagaggctgaccttcccccagctaagatagcatgaggacgttgtattccaatatacgtatgattggggctacaaagctgaactaaagcaagattggtgaagtggcagggtttatagagagaagcccaggctgagttcagcttttgttggaagtgagaatccctgacatatagctttcttggagatcccaactctcattcttggtgcaactggcttccagctctccagcagtcactctcctaggtgcatgattcagtgcgtgccatgtgtcattagcttttactgataaccatattctggcttgttcccttaccccctacttctatccaattttctctgctaggggttatcattagcaattgacatgctaaaggttttggagcccacctaggggtaggtgcagctttattggcttttctgtggattctctcagtggacccacaccatctctatgtctctccactctcctgccttcagccatagcaaagaatccttccaaaatcaaactcttcacttttttgactcaagtgttgttgttcagtctctcgcgtgtcaatgtggtcatggttcatgaaaccggaccctcaagatggatgattgcttttaactactgccagctgatgtctctcagcccctgccctcatacaagatttttctcagccttcagcctaccactgcagaatccgatgtgacccaccattagggagtctgcatcttggaagagttggaaataaccctttaacatcaacatgcttcaaagactttttgcctttggcctagtaagatgcctctccagctactgagcccacaagtaacatgagcggataaaaagagacttgtttgtgctagaaatgagggtctatgctatgagggggtccaagactctggcgaaatgtgctttttcatcaatggagaaatgaaaggaaaacacaagcaagaaaaaagttaacttgtattatgtatttttactacacttttcttaaaaatagagcattgggaaaactctgaaagagactgacatttttctcaacaggaatccatacttaacagttctggctttcattaaattttgctctttggtacctgggccttttatttaacatctatatttgttttaactctcttggcagatgtgtgaaaggattcttgcttgatcaaacactaagtannnnnnnnnnnnnnnnnnnnnnnnnnnnnnnnnnnnnnnnnnnnnnnnggtatttgcataaaatgaaaatatcaccgaatattaaatcactgtggatccatt

SEQ ID NO: 347694 - DNA, 400 bp, Homo Sapiens
  misc_feature (61)..(173): n is a, c, g, or t
caaagtgagaccctgtctctacaaaaaattttacaattagctgggcacggtggtgcattcnnnnnnnnnnnnnnnnnnnnnnnnnnnnnnnnnnnnnnnnnnnnnnnnnnnnnnnnnnnnnnnnnnnnnnnnnnnnnnnnnnnnnnnnnnnnnnnnnnnnnnnnnnnnnnnnnagactctgtctcaaaaaacaggtaaagctgagaaaagaggaggcctgttctttcactgggtggttgtaagcagccatgcagaatgcccaaggttttccaaagagtttcttctttctgaaaggatctgagtccccaaaactttggggactagtctcatggttgaaggcatttttcataagggcataatccttttataaaaaaattatttcataaaacctgcaatttaa

SEQ ID NO: 347695 - DNA, 787 bp, Homo Sapiens
attggaatacaacgtcctcatgcaatcttagctggggtaaggtcagcctctttgagttagaacctgggatcaaaggtcttaagttgccctaaatgtcgttatcaacttaatccatctccctatactccttcaatttcagagtgcctgtggctgctcctacaaccaccatcacacctaatggccactgctcatctcccgctgtcagggtcaaagacacccaagttctaattctagacttgacactaacttgctgcatgatctcatgaaagaacttcaccctctctgggccccatgcagctaatggattggctgacctctcaaggtcagctgtaacagccttttgctcagtgccttcctgacatcctttccctttcatcacacactcaaagagtgaggcctttcctcatcatccctgcatccccccatcgccatttccttcctcggagtcaaaggctcaggtgtaccctgcagggttggggccggctgctttcatgctctacttcagacagagaccccaggccagggcagagcaatctggaagcctgtgagtgacagaggctggctcctgggatatctcacaacacaggtaagtcattgcttccaatacagacctggaagccccctgaaaagctgcttaggacgtagtaacattggcagagatgccgagtgacacagggatcgggctgacaggacagctgctaagctctaaatacatcaaagacaatgatcccagagactacatatccatctttccaaatccaccggcacttaaaatgggagcaaggag

SEQ ID NO: 347696 - DNA, 488 bp, Homo Sapiens
  misc_feature (396)..(396): n is a, c, g, or t
  misc_feature (422)..(422): n is a, c, g, or t
  misc_feature (475)..(475): n is a, c, g, or t
gagaagtatgtcctcctggtgtgctcaggctcaacggcagtctggtggctgaaggcacttggcctcctaaaccaagcagaattttgggaagagataacagccagggagatattgcccatgattctcactttttctttgcctggcatctaagcaggaacccattgtggagtagactctcttcttctatggagcctctgacatggggagcaatgctaagcaagctaagtgtaaaagaaaagtgacagaataattttgggaagaggaagcctcatcaaaagcttcacacaaaataggagcttcccatgggtgttgccctattcctagggtttaaggaaaacacgtattgaagttttatggctggatggcaaaggaactttgggtttttttatgtttaantattaaagtgtttgttttttaggccntgttgggccccaggtggatgctcctgttccatctttttaggaaagttgagggntaacccccagggg

SEQ ID NO: 347697 - DNA, 487 bp, Homo Sapiens
  misc_feature (38)..(38): n is a, c, g, or t
cccctgcccccccatacaagattttccctcaagccctncagcccctacctacctgccagaaacccgatgtgaccccccaccccattaggggagtcctgccatcctgggaagagttgggaaaataacccctttaaccatccaacatgccttccaaagaccttttttccctttggccctagtaagatgccctctcccagctactgagccccacaagtaacatgagcggataaaaagagacttgtttgtgcctagaaatgagggtcctatgcctatgagggggtcccaagactctggcgaaatgtgctttttcatcaatggagaaatgaaaggaaaacacaagcaagaaaaaagttaacttgtattatgtatttttactacacttttcttaaaaatagagcattgggaaaactctgaaagagactgacatttttctcaacaggaatccatacttaacagttctggctttcattaaattttgctctttggt

SEQ ID NO: 347698 - DNA, 508 bp, Homo Sapiens
  misc_feature (24)..(24): n is a, c, g, or t
  misc_feature (36)..(36): n is a, c, g, or t
  misc_feature (53)..(53): n is a, c, g, or t
  misc_feature (492)..(492): n is a, c, g, or t
gaaaaaagtgaaaaatcaaggggnaaaaatctcccngggctggtaacctcctnccccaaaaaattctggcttgggtttaaggaaggcccaaagtgcccttcaagccacccaagaatggccgttgaaccctgaagcaacacccaggaggacatacttcctcagggcccaaggttgactctgaaagaaataaaccataccacctatgacctatgaaatggctcttccacattaaaggaactgtttttctgagcagcagtaacttcaggagtccttctctgactgcacatctgcccctgccctctccaccaccctcatcctgagttgcttttcacctgtgttctccactgaataagtgcttaagcagtgccccacttggggaaggcagcccacttctccaacaatgtctatctccatcagaggtttgggccaaggagtggagggtaacatggagagcccccatggagaattagtttgaaggttgcttttttttcntcttgcttgtaaagtg

SEQ ID NO: 347699 - DNA, 416 bp, Homo Sapiens
gcccattcctaaacgctctgcccctattcccatctcagctgagggtactatcatccaccctgtggccacatccaggaatgtgtgtatcacctgggctctgaggatgacatcagctcttctaagtcaacagaatgtcgggtctgttctaaaagtctcatctgacaaggagatctttaaggctttactcccttaaaggctttactcccatcatgatgggataaccatcatgatggatttcagtgtcattctgtctttttcttcggaatgattcctgggactcgccttgtttgcaacatgtgcattgaaatatcttttcaacataactttgttcttaattgtgtttacttcctttctctgtgaatctcagtgattcctggaagctgtggttggtgggggatgaggtgggaggagaggaa

SEQ ID NO: 347700 - DNA, 2879 bp, Homo Sapiens
caggactctacgctctgcagcagctcctctgcccaatggggggcggcagcatctcagtaactcactcgaaagacgggtaggcgggaggagacattcgcgttcaaaatcttttgcctctatccgctcgccgtagcgctttagcccgctcgagtttcaatgcgcgtgttgcttaacgaagcagagtcctacacactgtctgctgctctcctgatcatggcttctccgagttctttcacctactattgccctccatcttcctcccccgtctggtcagagccgctgtacagtctgaggcccgagcacgcgcgagagcggttgcaggacgactcggtggaaacagtcacgtccatagaacaggcaaaagtagaagaaaagatccaagaggtcttcagttcttacaagttcaaccaccttgtaccaaggcttgttttgcagagggagaagcacttccattatctgaaaagaggccttcgacaactgacagatgcctatgagtgtctggatgccagccgcccatggctctgctattggatcctgcacagcttggaactgctagatgaacccatcccccagatagtggctacagatgtgtgtcagttcctggagctgtgtcagagcccagaaggtggctttggaggaggacccggtcagtatccacaccttgcacccacatatgcagcagtcaatgcattgtgcatcattggcaccgaggaggcctatgacatcattaacagagagaagcttcttcagtatttgtactccctgaagcaacctgacggctcctttctcatgcatgtcggaggtgaggtggatgtgagaagcgcatactgtgctgcctccgtagcctcgctgaccaacatcatcactccagacctctttgagggcactgctgaatggatagcaaggtgtcagaactgggaaggtggcattggcggggtaccagggatggaagcccatggtggctataccttctgtggcctggccgcgctggtaatcctcaagagggaacgttccttgaacttgaagagcttattacaatgggtgacaagccggcagatgcgatttgaaggaggatttcagggccgctgcaacaagctggtggatggctgctactccttctggcaggcggggctcctgcccctgctccaccgcgcactgcacgccccaaggtgaccctgcccttagcatgagccactggatgttccatcagcaggccctgcaggagtacatcctgatgtgctgccagtgccctgcgggggggcttctggataaacctggcaagtcgcgtgatttctaccacacctgctactgcctgagcggcctgtccatagcccagcacttcggcagcggagccatgttgcatgatgtggtcctgggtgtgcccgaaaacgctctgcagcccactcacccagtgtacaacattggaccagacaaggtgatccaggccactacatactttctacagaagccagtcccaggttttgaggagcttaaggatgagacatcggcagagcctgcaaccgactagaggacctgggtcccggcagctctttgctcacccatctccccagtcagacaaggtttatacgtttcaatacatactgcattctgtgctacacaagccttagcctcagtggagctgtggttctcttggtactttcttgtcaaacaaaaccaatggctctgggtttggagaacacagtgggctggttttaaaaattctttccacacctgtcaaaccaaaaatctatcagcccacgtggtgtggttggtgaacagtgcatgccaggaggaagcagtccctcctcaccagctctccagccaggacgatcacacagagatgaatggcatctgagtattacggcatccagagccactgctgactcccacttgcacgccaccattcagtcaccagactgggtgccctccgatgggtggaataagtctgcttcatgccaaggctgggctttgggtcccaccaagatgagttctctgtaagactgtggtggagttgcaccaggaggtgcctctgcctctcgacttgcaccctggtcatttgtaagggaaaagagctggaggtggggagagaaagatctccttcagttggggagtccttccactttcaacactgggagaactgagccttgcatctctccagggtccaaggccacgcttggtgcacaggcaagacttgcttcagccccaggtgtggtgacttagacctaggaaaccaattatgagtggaaagtgaccctctagttcaactgtgccagaggaaacagccctccagtgcccacctgcctcactcctccctatcatgtaccgtgaaaaccccctctgatggcctcaaggcagtgcctgcaggccgaggcccttctgggggtttctatctttcttccaccagactccaagcccactctcctccaagactgtgttgtcttttctcaccaagagtattaacactactaagtctttcaccttaacttatgactcaggatttattcacgtcctgcccactctaggctcacaggaataaaatcaagtgctagacacactggctgctactaaggcactagcctctgtagctggtggtggcagcgtggggtgccgcccagcgtgctgggtcctggcagtgcctctgctgtgctgcacattgagccctttctcagtcagtggagtatcaagttgggccatctgtctactgacctggccttcatgtaagcagctgtgggctgcgggcagacaggagctcagagatgcagcatgaggcgcttagaaaaacctggccatttgctgcctctaattcccttttgctttgccatattgggctatgtattacctccttgaaataataaaagaataacattttctaaaaaaaa

SEQ ID NO: 347701 - DNA, 653 bp, Homo Sapiens
atggctaggtacgggccgggtggttgaatcggcacgaggctcttgaggtcgaagcatctgggagtgagagacttctgagccaagtgtgtgtcagttcctggagctgtgtcagagcccagaaggtggcttggaggaggacccggtcagtatccacaccttgcacccacatatgcagcagtcaatgcattgtgcatcattggcaccgaggaggcctatgacatcattaacagagagaagcttcttcagtatttgtactccctgaagcaacctgtacggctcctttctcatgcatgtcgggagattggaccatgtggaggtagggagaatagaatagtcgatagtccgtttcgactgaagccatgccggtgagcaacatctatccaaatagacatgtcactaccctctcagttggagagcccagagaggacgtgaacgtgtgccaagagtgaggacaggagaagcgcatactgtgcttgcctccggtaacctcgacgtgaccaacatcgatcactccagacctctttgagggcactgctgagatggatagcaaggtgtcagaactggagaaggtggcattggccgggggtaccagggcacggaagcccaatggatgcgctatacgttttgtggcctgtgcgtgctggtagatcctc

SEQ ID NO: 347702 - DNA, 390 bp, Homo Sapiens
ctttgggagatctttacctatggaagcaagccatggttccaactctcaaacacggaggtcatagagtgcattacccaaggtcgtgttttggagcggccccgagtctgccccaaagaggtgtacgatgtcatgctggggtgctggcagagggaaccacagcagcggttgaacatcaaggagatctacaaaatcctccatgctttggggaaggccaccccaatctacctggacattcttggctagtggtggctggtggtcatgaattcatactctgttgcctcctctctccctgcctcacatctcccttccacctcacaactccttccatccttgactgaagcgaacatcttcatataaactcaagtgcctgctacacatacaacactgaaa

SEQ ID NO: 347703 - DNA, 910 bp, Homo Sapiens
cttttcttaagggaaaaatcacgctgtgttcttttaaaatccctcaggttttatgttttattgctaccagagtctgcctccctgaggttcttgtatagactagttatttccctctgtaaagaagctgttctattcgttctcgcctggtttggaacaaactgaacacttccaaaggaggcagtccttgcagccttgtctccttccactcccctcctccccacagtcctggctggagcagcgagtctgtcgatcccaggccagagacaaggcagacaaaggttcatttgtaaagaagctccttccagcacctcctctcttctccttttgcccaaactcacccagtgagtgtgagcatttaagaagcatcctctgccaagaccaaaaggaaagaagaaaaagggccaaaagccaaaatgaaactgatggtacttgttttcaccattgggctaactttgctgctaggagttcaagccatgcctgcaaatcgcctctcttgctacagaaagatactaaaagatcacaactgtcacaaccttccggaaggagtagctgacctgacacagattgatgtcaatgtccaggatcatttctgggatgggaagggatgtgagatgatctgttactgcaacttcagcgaattgctctgctgcccaaaagacgttttctttggaccaaagatctctttcgtgattccttgcaacaatcaatgagaatcttcatgtattctggagaacaccattcctgatttcccacaaactgcactacatcagtataactgcatttctagtttctatatagtgcaatagagcatagattctataaattcttacttgtctaagacaagtaaatctgtgttaaacaagtagtaataaaagttaattcaatctaatttttctctgtggaaaaaaaa

SEQ ID NO: 347704 - DNA, 276 bp, Homo Sapiens
  misc_feature (151)..(162): n is a, c, g, or t
agaacttgagacatttgtgatgttggctgtttaaatctttgttaccttcgctgtgaattgaaattgtacatatttagtaaatcatgcagacaaaacaaactttttagacaatatttttattggagagttttcttttcctgtatccatgttnnnnnnnnnnnngacctcctttcccaaaataaaaatgtcaatactaaatttaaagaagtataaaggaatgattgcttcctttagagcaaaatatttaaataaacatggagataattggaaaaaaaa

SEQ ID NO: 347705 - DNA, 542 bp, Homo Sapiens
aacttggagccagcactctgcccagaagtggggctggctgaggtcagggtctatgtgttgctcaggaggtgaatggtgtctcctttgtcctgctggacgttttcaggtgcatctttcagtagctcaatcacagcacttccaaaataaatcagtggatgatgcctgccccaataaatgcctcttcccttccccaggacaccatcacttccagtaactttttcatgttttttggagtaaaaaccttggaaccattttgaaatcctttctcctttctctactaaatctgatcaaatacccagctggtcttttccttcatctctatctgatcattttgatcctcctttggcatgtttgctgataccaccaagctctgcagctggtcccccttatccctcatctgtggattactagcataagtcaccttctggacttggtgtctccagggtagggtgtctgagacaatctatggggtaggggaagcaaatatagaatttctgttatatatatcttcaactaaaaattagaaatccaatgttactaaa

SEQ ID NO: 347706 - DNA, 371 bp, Homo Sapiens
  misc_feature (21)..(21): n is a, c, g, or t
  misc_feature (49)..(49): n is a, c, g, or t
  misc_feature (61)..(61): n is a, c, g, or t
  misc_feature (69)..(69): n is a, c, g, or t
  misc_feature (81)..(81): n is a, c, g, or t
ccctctcccggcccggggggncctttggctcccggcctaactaacctcnggcttgaaacangctccctnaccctacccttncctccaaacccctaccccttgtaaaggtgacttttgttcaacccttcagaattcaactcacatgtcctcttgcatggagaaccctcaccctactgtgttgagaccctgtcccagcccccaggtgggatcctctctcgacttcccatacatttctttcacagcatttacatagtcccatgatagtttacttgtgggattatttggttaatctttgcctttaacaccagggttccttgggtgaaggagcttctttatcttggtaacagcattatttcaagcataacttgtaa

SEQ ID NO: 347707 - DNA, 2662 bp, Homo Sapiens
  misc_feature (69)..(69): n is a, c, g, or t
  misc_feature (75)..(75): n is a, c, g, or t
aatcagttgggtcgtttctcatttaacattttacttttcaagtgtgtatacagaggacttactattatnactttnaggatgagatccatgctcacaaatagaggcgaacatttgaactccgaatccaacccattttcttactgtaagaggaaaagttactggaacgtaactagttgaaatcctgcctactttaatattatttgtttgttaatccagtaatgggaactgccatctctgtagaaatcagtgggtaattgaaaaataggttatgctttttaaagagtctgtggttatgagaggtctcagttaagtgtgtttagaagtgatcagcttgaaccttatgcatgactcgggggctggaatttatgatctgggttacggtatgttctggggacgtgtctgcttgcccatggttactcatgaactgaggggatagcttggcaacttggttaatcatcttgggaaagaaaaacagacttcatatcgcctgacttgattggccttttataggagtatactggagaaatggttgtagaaacagtatttacagcaaaaggaaacaaataatgttcattttaagcaatgtaccattcacactgtcctgccttttcctctagaattttattaatggtagaaatttttatatgaaatgggaccaggaccaggctaatattttcagtccttaaatatcaaactcatatgctgttatcactgtgattttacttgtgaaatcattcctgtaatgtttagtgtttgaaaatgaaatattgaaattaggtttccagagtaacactgtccccggaaaaggatatgagaagtggtggatgttggatgggggtggttgcacagtcctgtgcggttcccatggctttccagcgtttcatttagtgaaggaatgctcacactagatgtagcacagcttcctgtggggcccggcagcaaagccccaggtgctccctgtcacctcacaacaaaatgcactaagaaacgtaaagaataagaggaattaatacccaccattaaaggatgtccggccaacctattgtggaaatttatagaatagtatacaccacagttctgaatagtgatatcacataaaaatacatactagaggacctgccaagccatgagcagtgtttttgctttttgggggccagtccctggggtgtggagccgctagggtttgcacccatgaaacagaaaagccacaccctccaaggtgtggctttcattttgggactgctgcagggagggcagaggcattgctgagactgcctggcaacggctgatgccccaggtaggaccttttccatttcaaagtggtgttctaagtctgcgtccaacactgtgtaggaaaaaggttggtgcaaaaatattcctggtcatccacccattaaaatagttagatgaggctattgccttgatgacagctgtccacactcctcatgaaattaacccgtatgccggggcatttccaaatgtctgactcgtgaaattaacccatacgcaggggcctttccaaatgtctgaaaaggcagtggtgtcttttggggaaaatgttatgcatggaagcctgaccttttgcttagttgacagcaatcccttctgtattgccaatcaaggttcatttgagatgcagaggaatgagcttgagccttcctccttttccttccggttttattcttcctcttgggaacatccctccactccgcactgcttcctgcagctttgtagagctggatttggaacttcgggatttggtttctgagtctgtggaggcaccgacttctcctgtaagaaaatgaatgttgtggaaattctttggctacttaactaaaactcgtgactgtataagtttggctacaaataagtaagaaattaatcatctgctctgtttctgctaatttctggtgtcacttcagtaattctggtagcagccgttgaatctgtcagtctcttaggtaacttcctgtaaacgatttggaaataggatgttttcaacgttcttttgtcttttgctgaagtcaggatagattcaagacataatctcttgtaagatctaaatagagcaaatgtaaacaaaagtgcatttttgtattcttgttaattttagatgctttcctagcttacaaaaagttctatttttgggttaaaaatcaatcaactttctgatatttccccttctgcaatgttattgttcataagaaaacacgagctgaaaatggaaatctgcagttgtttcagttgtcttgaatttctttcagtggccacatcatttccacgttttccacatccgggaggaagcctggactgtgcagccttcgggcacccggcacagacactgtgctggcaggagcttcagacacgccaagtggatggatttggattgaacgcatatgaaacaggagacgggttctcatgtgagatcaaagctcctccaaagcctgttcaagctctaagcgattctcaaatgttaccatttattaaaggtaaactacacctgttgaaggccaagttcagggcagctgttgtgatctgtgtagttaatgtatttattaatgcttgacttttaaaatcctgggcataaatagtgcagagcctcgtatgtttgtcagttcatgccgagatgaaataaatcacgcagaaagtgccagtcctcctg

SEQ ID NO: 347708 - DNA, 543 bp, Homo Sapiens
  misc_feature (32)..(32): n is a, c, g, or t
  misc_feature (60)..(60): n is a, c, g, or t
  misc_feature (69)..(69): n is a, c, g, or t
ccttaaacctttaacgttcccctaagtgccanttggttgttaaggttgaacggggaagcncccccgggnctttgcctgccggggccccccaagggaaagctgtgccctacatcctagtgtgaagcaatccccttcaacctaaaatgaaaacgccgggaaagcccatgggaaacccgcacaggactgtgcaacccaccccccatcccaacatcccacccacttcctcatatccctttcccggggacagtgttactctggaagccctaatttcaatatttcattttcaaacactaaacattacaggaatgatttcacaagtaaaatcacagtgataacagcatatgagtttgatatttaaggactgaaaatattagcctggtcctggtcccatttcatataaaaatttctaccattaataaaattctagaggaaaaggcaggacggtgtgaatggtacattgcttaaaatgaacattatttgtttccttttgctgtaaatactgtttctacaaccatttctccagtatactcctataaaaggcca

SEQ ID NO: 347709 - DNA, 890 bp, Homo Sapiens
  misc_feature (48)..(61): n is a, c, g, or t
cgcatcagaccgcacaggggacggcatcaccattgatattgtttggcnnnnnnnnnnnnnnttgttaaaaagaagaatcaaaagggaacacaagcagctctacaattcgattggtgggcgcagggctcagaactggccggcactgctcgggtcgcactcgcaggaggcgcacaatggacggatcgcttttggctcctcggatgaactcttcccagggagagtttcccgtctctattggagtccatctgacggaagatcttttactgctcgttcctctggggcagactcatcttcagccattcttcattacagacggaaaccatcttatagattgcctgcacgatctctagcatctcagccttgctgatatagccatttccgtccaggtcgtacatgctgaaggcccaattcagcttctgctccagcttccccctcgaagttacactcaaggacgatgactgaattctctaaagtctattgtcccatctccatatgcatcgaaggtgcggaagacatgcctctgcaaatgttggaagcatccccataagggaaaaagttgcccatatattttctctaaactcttccacttgaacaaagtgtccactggggcagtctgctcaagaagccgtgtgtagtaccattatcctggactctcatgctctgtaaagtctgtgctttccagcaagtcctgcatgacctccgggcgcatgcattgctgctctgatttccccatcctggcggcaagaattcagtgttctgactgtcagcaacgagctgcgtcccaggagaccaaagttgagataatctagtggtagatctctcacagcacactgcaggcctcaagtcagaagaaatcacgtcgcctcggccgctcccagcgtctgtccgct

SEQ ID NO: 347710 - DNA, 1313 bp, Homo Sapiens
ggcacgaggggaaagtggccaccattccctcactgttctggatgtccacatcgtaggcgtaaaagtagtcccccttgcgggtgccgcagaagtacaggcctgagtcctcagactgagccctgaaaaccaacaagctgaacatgcggatgctgaagcggatcagcatgtcgctgcccaaaacgtaccctggcctgcctccgtcagcacccgccccatcaaagtccgtcaagcactttggtgtggctgcctacctaggtgcttttggtagaaccagactacagctggcacctcttcgggtttgcagtgacagggaagctcaaagctcatgtcggccaggtaggctgcattttcaaacatcaggaaagcagggcagggggtcctctgaaaaatgttttccttctccacaatttcaaaggcctggagactcccccatgcccacaggagcacagtggtgagggccaggtgcatacctgaaggaggcaggggtcagaggggcagggcaaaaccagggcattaaaggctcatagggctcctagaaagctctgctaagcggaagcctctggatgaggaaaggattatgcagccaggaaaagcagcaacaatctgcagaggaagccgccaagtgcaaggcaatttattcccagtggatgtacaagatgcccttctaacattccagacctgatctcagggtggggggggaaagccattctagaacctggcctttactcccctttctagaacactggcgctcacccaagaatgggtcaaaggaaaccggaatgagaagggcgggccgaggtgctcgggcagggagatctctgcctcagtgctccaggccctgccctgccagcctggtggaaaagtctttcatcaacctgggggatgaaggaaacccaccctcctgcatatctggccatccgggaggctggctggacctgagctgatggcttgggactttcccaggcccaacctgcacaagaactgagtctctaggggaaaattcaacacctcaaatgatgtagtatttgatcatttgttgattacatgtccattcattggtttggggctataaacattcttgttaagagctgtggagatcagtgtttgtttaccataaagattttgctttttcccttttatgagtggaggctgtaactggtatagccagcatttggttgggcacacactcatctctcaaggccagtgggctagaggcttggcagactctaaggctgggaaacaaaacctgttctgtcccaaataaaaccagcctgtgatgttcaagggactggaataaagtggcttacgacctg

SEQ ID NO: 347711 - DNA, 1518 bp, Homo Sapiens
  misc_feature (808)..(818): n is a, c, g, or t
  misc_feature (1077)..(1085): n is a, c, g, or t
  misc_feature (1223)..(1240): n is a, c, g, or t
  misc_feature (1298)..(1329): n is a, c, g, or t
gcatgccctattggcagtgctcaggagctgcatcccacttttccctgctctgaatcgaagtcctagttccttcctttgattctcctttggtaggtggaatcagttaatgttttgagaaacctgcctgggctctgcccttagtcatgacatctcgctgagccagacccactctgttccttggaacctagagctggagtgaggagtagaggtctccggctattccagaaagaaaagtgagccacatgcaggctgatgaatgccgacacttccagaatgtatagaaatagtccctgtcctggcctgccactgaccctgtctgtattttctcggaggttgtttttctccttctccttcccaggaaggtctttgtatgtcgaatccagtgcactcaagtttggccaagggactccacagcacccagaagactgcatgcctcaaggtttatgtcactcctctgctgggctgttcattgtcattgctgtgttcagggacctttggaaataaaacctgttctgtcccaaataaaaccagcctgtgatgttcaagggactggaataaagtggcttacgacctgaaggattctacagagtgctcaactgttcatacatcattcagagtgggagggagctgggggtgctgtcccatcccatctgtatgcccacggtggatttaataatatataatttataaatcatagcctatggagtggcccgtaaatcagttgactgtgtagctcttgcctggcattaaagcatgtttttggtctttcatgaatcacaactatgtcctacgtccgcccaacaaacgnnnnnnnnnnntcttgtcgggccgcctcggccctcaaataagcttttctcaaaaattaattttagagcgcgggcgcccctaaggaaaataaacatggataatgattgattttttaggccaaccctgggccctcaacgaaagttttcaaacccctccccttggcgccacccgcgccccgtgcaacgcaagcgcacctggggaccaatccccttctcgcctaaaaaaaccccgcgtctattggaaataaggccggcggtgtactcccccagnnnnnnnnnccccccgccgggtgtaaacccccaaggcttttcctaaaaaaattccaaagaaaggggttgcgtaggggccccttaggcggggttcttgtccaacatgggaagaccccaccgcccaagcccggaaattgaaatgaaatnnnnnnnnnnnnnnnnnnggggagccttcttcccacaccagtgtgggggcgttaattcttatataaacactttctnnnnnnnnnnnnnnnnnnnnnnnnnnnnnnnnacaaaaaagcggtgtgcgagtaaatcccgggaaaacccctctagcagggcaatatcaccgagccggagatagcccccccttgcgggggatatttatttggggcgccccgtgggtgagatataatacgggggcggaaaaaactcactgttcgcgccaaatattggggcccaccctggttatataactgcc

SEQ ID NO: 347712 - DNA, 3065 bp, Homo Sapiens
  misc_feature (51)..(83): n is a, c, g, or t
  misc_feature (902)..(916): n is a, c, g, or t
  misc_feature (1100)..(1108): n is a, c, g, or t
  misc_feature (1335)..(1335): n is a, c, g, or t
  misc_feature (1375)..(1375): n is a, c, g, or t
  misc_feature (2971)..(2971): n is a, c, g, or t
taactcactatagggtgactcggatgttatacgtcggtggcggacgcatcnnnnnnnnnnnnnnnnnnnnnnnnnnnnnnnnnatcaggccaaatcggccgagctcgaattcgtcgagagcggtgtcaaaggcttgtgagaatctggtggatgctggaccttgctgctgctgctactgctgtttccaggggctgcagagcatggactgttaaatcttgcacttcttctgagtgagctgaattcttgccgccaggatggggaaacagaacagcaagctgcgcccggaggtcatgcaggacttgctggaaagcacagactttacagagcatgagatccaggaatggtataaaggcttcttgagagactgccccagtggacatttgtcaatggaagagtttaagaaaatatatgggaactttttcccttatggggatgcttccaaatttgcagagcatgtcttccgcaccttcgatgcaaatggagatgggacaatagactttagagaattcatcatcgccttgagtgtaacttcgagggggaagctggagcagaagctgaaatgggccttcagcatgtacgacctggacggaaatggctatatcagcaaggcagagatgctagagatcgtgcaggcaatctataagatggtttcctctgtaatgaaaatgcctgaagatgagtcaaccccagagaaaagaacagaaaagatcttccgccagatggacaccaatagagacggaaaactctccctggaagagttcatccgaggagccaaaagcgacccgtccattgtgcgcctcctgcagtgcgacccgagcagtgccggccagttctgagccctgcgcccaccaatcgaattgtagagctgcttgtgttcccttttgattcttctttttaacaannnnnnnnnnnnnnngccaaacaatatcaatggtgatgccgtcccctgtgcggtctgatgcgccttcctccgtgacgccttcagcttctttttgtcgtggatgcttcgtgggaatgcccagagccccagtgtgcttgtggagagcatggacagacttcgtggtgttcattgtttgatgatttttaatcgttactattannnnnnnnnattctaatgtctctgttctaaaacgtaagactcgggggttggggcaaaagaagggaaacccatccagtcctgtgattctattgcaagcttcaaggggcttttgtttgaaagacaaaactccccacctgggtctgttgtcacacgtgccgtaggggtgatggatggcaccggatgctggattccccaagaacaagttaccctctggggtgaggctatttccagcgagnctgggacattttccccatgggggcccactcccctctcttnccccagcaggctgtagtttcctaagctgtgaacatttcaagataaattaacagaggagaggaaaaagatggctcagctattttttcacaggtttacactagttgagctaatatgcgtgtctttggaaattaaacacaaatggtaacatattccaaaaccagacccatcttgttgcctattgtgataaaataaaaagacggctgtatataacatattgggtaatgcagaccaaattaagtgttttgccttgtttaaatgaaatgcatgtttagtgagcactaatacaatcttattccagaagactgtttttagtagcttattgtgaagtaagacaactataatgaatgtctgtcttgtttggaagtcatatctgtctttgcacaaatgtaccaatcgacaagtatattttatatattccataaaaatacaaagtaaccctgactagggcccaactttaattttgaatgcatttccagagtggccatgcctagagggcagatgcagagcaggtggtagtgggacaggacaattggagcacaggaatgttaacatgtatgacaggggaccagtagggtggtttccctctcaggcccagcagcccattgacagcattagactggcggcatggtgcttttctgagcagatcaatactctgcagactcgaaaaaacatcacgtacattcttggaacttcccagtggtttaatctgtgtgcatggttagggagccaggtctggaatattcagtttccctgcccctgttaaagaatcagaggttgggcagtcatcaaattcatcataaagacatgggcaagtgtgtctgtggtttccaaggcccccctatggagaatccaaaagtattttccattgccgtgctctttgaatgcagacttctatttccagaagtgacagcacaagtctgagttgctgtttggtctggtgacctcagacacactaatttgaattgaaagctaagagtaaaaatttgctggttacaggcgagtcatactcttgcaagtagttagcaaagggaggcccaaattctcaaggttgttgatggggaacttgccactaagagaaggcagagaggtccctagtgggtatatttgctgccaagccacttgccaaagaagaggaaccacagaaagagagacatcatgaccaggagaaaaatgtgactagacatgctaacctccaggtttttatatatgacttgagtctgctgtaattggcagcagaaatccaaatttgtatggtagaccaaaaagaaccaaatccatagggtgaaattttgagacctagactctgtaaaaataatcctagtcttcctccaggggtcagttcctcacagtggttctgtaccaaaacttgccaaattcctccatggccaagtgttaaaatctgtgtttggaaaatagcgaattaacctaagacacagaaggcagactgggtgaggagacctagcatgccctattggcagtgctcaggagctgcatcccacttttccctgctctgaatcgaagtcctagttccttcctttgattctcctttggtaggtggaatcagttaaatgttttgagaaacctgcctgggctctngccttagtcatgacatctcgctgaagccagacccactctgtttctttgaaccctaaagcttgagtgagggagtaaaaggtctccggctattccc

SEQ ID NO: 347713 - DNA, 842 bp, Homo Sapiens
gggtggcgttctagaggatcccgccatttactccatggcaagtgttaaatctgtgttggaaaatagcgaattaacctaagacacagaaggcagactgggtgaggagacctagcatgccctattggcagtgctcaggagctgcatcccacttttccctgctctgaatcgaagtcctagttccttcctttgattctcctttggtaggtggaatcagttaatgttttgagaaacctgcctgggctctgcccttagtcatgacatctcgctgagccagacccactctgttccttggaacctagagctggagtgaggagtagaggtctccggctattccagaaagaaaagtgagccacatgcaggctgatgaatgccgacacttccagaatgtatagaaatagtccctgtcctggcctgccactgaccctgtctgtattttctcggaggttgtttttctccttctccttcccaggaaggtctttgtatgtcgaatccagtgcactcaagtttggccaagggactccacagcacccagaagactgcatgcctcaaggtttatgtcactcctctgctgggctgttcattgtcattgctgtgttcagggacctttggaaataaaacctgttctgtcccaaataaaaccagcctgtgatgttcaagggactggaataaagtggcttacgacctgaaggattctacagagtgctcaactgttcatacatcattcagagtgggagggagctgggggtgctgtcccatcccatctgtatgcccacggtggatttaataatatataatttataaatcatagccatggagtaaatggcaaggacctctagaacacc

SEQ ID NO: 347714 - DNA, 812 bp, Homo Sapiens
  misc_feature (122)..(122): n is a, c, g, or t
ctgaaggctcttcttgcgacacaagaataagatcccgtggtcagggctacagcgacaggcaaatgtcaactcctcaagatgcgcaggggtgagaggtgttcagtccctctccaagatcctgnatgtggccagtttgaaggtgctgaacaaggttaaccgaaggtccctgacgcagctggccagccaggccgactccacggagcaggtgtacgacaccatcctgacatgagaggcctgggccagcagcagcattgccgctccacatctttgctcaatgttttcatttttgaaaatacatttgttccaatggggagcttggaagatggcgttcccagaaagtattttaatatcaatagaccacagccaaagccttaaatcaaacccacacacaactgaaaattgcctcctccatctctcaccttttcctgtggagaagagaaggaaaagcacacgcatgcgcctcagcaaatggcagcccaggagctgtttgtccagtttagcatggctaggtctggaactataatagcagggtcagactgtgggttcctcttctcctgtgcttgagctctggtttgagagctggcgctaccaacctttttcctatatcccgagtggggcacagacggtggatctctgcccagtgtggtgtgtctggcttggcttttcaatattgtgaggtctgaatggatctgatccctgtcagatgaaaatgattcacagctctggcagttcccaagtctggggaggggtataggtttgaaaggctgtttgaaagaggaatgtttaataaaggctttgatttaatcttgaaa

SEQ ID NO: 347715 - DNA, 182 bp, Homo Sapiens
  misc_feature (10)..(13): n is a, c, g, or t
  misc_feature (65)..(65): n is a, c, g, or t
  misc_feature (67)..(67): n is a, c, g, or t
acctttagannnnaatcttgttgatgataatgtgattttggggaggtcattaattgctttttctntnttaaatgtgggcttatataaatacctgtttgtatatagcttgagtaattgtgatatgattgtataccactaaaatattgttaactattataataaagtcacagtaatggtttaaa

SEQ ID NO: 347716 - DNA, 3506 bp, Homo Sapiens
  misc_feature (9)..(9): n is a, c, g, or t
  misc_feature (15)..(15): n is a, c, g, or t
  misc_feature (19)..(19): n is a, c, g, or t
  misc_feature (23)..(23): n is a, c, g, or t
  misc_feature (30)..(30): n is a, c, g, or t
  misc_feature (39)..(39): n is a, c, g, or t
  misc_feature (42)..(42): n is a, c, g, or t
  misc_feature (46)..(46): n is a, c, g, or t
  misc_feature (53)..(53): n is a, c, g, or t
  misc_feature (58)..(58): n is a, c, g, or t
  misc_feature (64)..(64): n is a, c, g, or t
  misc_feature (69)..(69): n is a, c, g, or t
  misc_feature (71)..(71): n is a, c, g, or t
  misc_feature (99)..(99): n is a, c, g, or t
  misc_feature (101)..(101): n is a, c, g, or t
  misc_feature (125)..(125): n is a, c, g, or t
  misc_feature (156)..(156): n is a, c, g, or t
  misc_feature (162)..(163): n is a, c, g, or t
  misc_feature (166)..(166): n is a, c, g, or t
  misc_feature (171)..(171): n is a, c, g, or t
  misc_feature (177)..(177): n is a, c, g, or t
  misc_feature (188)..(188): n is a, c, g, or t
  misc_feature (193)..(193): n is a, c, g, or t
  misc_feature (195)..(195): n is a, c, g, or t
  misc_feature (204)..(204): n is a, c, g, or t
  misc_feature (206)..(206): n is a, c, g, or t
  misc_feature (210)..(210): n is a, c, g, or t
  misc_feature (221)..(221): n is a, c, g, or t
  misc_feature (227)..(227): n is a, c, g, or t
  misc_feature (229)..(230): n is a, c, g, or t
  misc_feature (237)..(239): n is a, c, g, or t
  misc_feature (241)..(242): n is a, c, g, or t
  misc_feature (245)..(246): n is a, c, g, or t
  misc_feature (249)..(249): n is a, c, g, or t
  misc_feature (256)..(256): n is a, c, g, or t
  misc_feature (264)..(264): n is a, c, g, or t
  misc_feature (267)..(267): n is a, c, g, or t
  misc_feature (273)..(273): n is a, c, g, or t
  misc_feature (281)..(282): n is a, c, g, or t
  misc_feature (284)..(284): n is a, c, g, or t
  misc_feature (286)..(286): n is a, c, g, or t
  misc_feature (297)..(297): n is a, c, g, or t
  misc_feature (301)..(301): n is a, c, g, or t
  misc_feature (303)..(303): n is a, c, g, or t
  misc_feature (310)..(310): n is a, c, g, or t
  misc_feature (314)..(314): n is a, c, g, or t
  misc_feature (317)..(317): n is a, c, g, or t
  misc_feature (329)..(329): n is a, c, g, or t
  misc_feature (350)..(351): n is a, c, g, or t
  misc_feature (353)..(353): n is a, c, g, or t
  misc_feature (359)..(360): n is a, c, g, or t
  misc_feature (369)..(369): n is a, c, g, or t
  misc_feature (373)..(373): n is a, c, g, or t
  misc_feature (396)..(398): n is a, c, g, or t
  misc_feature (402)..(402): n is a, c, g, or t
  misc_feature (405)..(405): n is a, c, g, or t
ggggggggntgtgtngcanaccncaccttnaaatccatntgntagncctcagngctantatgtngagtntntctggaaaagctgatttgtgctattttncncccagtggcatggcgcagttaagnctttgtgacatatctttgtggctactgttgngcgctnnggncaccngaggangtggttcaggnggggncnccagaaagncngttncccccagaganccatcncnnccatttnnnanncannccngagaaanggcttagnccngagaanccgcaaanncncnaaaagagaacnctcncnccccacnaagnganataacccacttngcccagcattccaaatagacnnanactcanntgccctgancctncacaaagccaggtgcaatgcccnnngacnctncccaaaatgtaaaccccaccctccctgctgtcattggctctccctccaggctgctgctgggcatgtcatagatgggatgaatgaccatctggggtatggtgggctgaactccacaaggtcgttggaatgaattttgaaacttctcagaaattaatctgaaatggcaggcagtaagtgcagcagaatctggcaggactgatatttgtgcagtgggcctgccacacaccctctgcctaggaggctgtatgccagagctcatctctagcaaggaatttatcttcaggtgaagaagagaggaagcaggatcccactgagcacctcttgcagaaggcaaggaccaatgtttgaacgtgtttcagatgtcatgtgtttagtttttatatgtgtgtacataattatatatagagatagacttgtgtatacaccttccacaaacacatcctcacggagatacatgtgctcaatgtatattcttgtttctcctgctctcaagttggaacttgcattgtgataagttttggaaattcaaaagtactgcaacgtgttgaaataagaaatacttaatattgtcaaataacttgtgattgtcttgccatcaataaaataatgcatagttgtgttaaactacaggcaaacatagcccacgggaatatctccaccatttctctatgtactttatatgcacgggtgtgcatgcctgtgtgggccagtgtccccccaccatgggcacacccccaagtggtgcttgttggaagagtgcttacttacctcgagagaatttacaggagtccacatgacagtgtcctgcctggttggcagcgggggccatcacctgtggcctctgagaccgccccatttacaggaatctgcactgggtctcagtgaatgaacgtatggtagatttttattttcttggcactaaagattagcttttttaaaaaaacatcccataaaacagtagaaactcagttcccttctcaggggcacacacatccaaggcaccgtggactgtgtttccatcctggcctagaggagcagtaaaagatagcatttggtttgacatggccttagtgagtcctgcctttcctagcatgcacacaacatcctctctttgagtttgggttctccccagccccttggcctctgaggctgagggtggcttcctcccatcctcccatctcagtggttccatggcgctcccttcggcacgtgcggtttccgcccctcccttcctggggtgtggaaaggcagccagacctctttttcagaagttgttggttccctgatttttgtcttgagcaggcaccatccctgtccccttgcttgcaggtagaattggcacagagttaaggttccataataaactgttaggtgctcttgaagaagatgtcatggcattgcctcagcaccccagcaagagcattgcatctttgctgaatccagatgggttagcagagggcaaattggaggattcctttgaggaaatgttctcaattgagcaattcagtccctctccccaaagactagacgtgacctggcagattagcaggatcctcttggccttcttttttggggatggtgggagtgaagggggtgaatcttaaaagcttatcaacaaagctcctgttctgcaggcatcaggaaagttgagtgtaagatggaaaaagcaaacagcctatttacaagtggaaacacattggttctgatcactcctaacttgctgggtgatcatacatacatcaacatgaaggtgtgacatcagaatcatgagcaccatggctgcagttgtgtgatccaaggctagttggcttggtagctgttggcagcagtttcccttggtcagaggcctccttgctatctatcgctgctctcttcttgtcatccttaaacattcagtcatgttcccaggtctgaggggagcaatggccagaccagtttcagtatctctggcaacagaaacaaggattgaaatggtggtagttaagagtgcagacacatctggggtgcaacgtctgcatcatcctggtggctagccagtgcggggaggccctgccctgggataccagttgtgacaataaagggatggccctcctggcttcagcatcctgcaggtagagcagcctcattccttcacaagatggaaggcaggtgaggatgtcaggatgagatgggaccaggtagccgaggacagtgaggcatgtctgagccacttgaggggcagctgaacagaaggatgtctgtgtgcatcaaccgagcagattgtgcgcacactcgtttccgaactgcctctccccaaagaatgtgaggcattgtcaccttgttacagctatgtgaagcagagctgtcacaacttttcctgtctacaggcaggaaaaccaggatggagaagggcaacttgcttattaagatcacccagcaagttaggagtgatcagaaccagtgaagtttccatttttcatccattgctgccctgtgtgtgaacaaatgtgactccatatttattacacagcaaggactgctgtgtgtgggtgtgttcctcagaccatctctactctttttggttaggacactagggtcctcccaacatatgagtgaaaatattggtggtattttgggctccctctactgcacaagggccagtccccaagtctactctgattgattgtcatgggcacccacacagatcaggacaccctttgaatttttgtttgacatgaactatttaggtgttccaaaaccttgggatctcaatgtgcaaactccttggactccagacccctgtctggttggcactcccagcagtgtgtggtttcatcaggaaatccttgcagcaggggtttagatggttccttcaggaggtgggaagcctccatagcattgaaggccagcctgcatctcgcggtgtgtgtccacttctcccctcactttcccctcacccatccctttaaagtgattggctgtgaggagcacagagggtggcaattccatctgttatgggctcagaagacatagccgccatgttgatttcacattaaactgtgtaaaatgtggaaaagactcagcatgttggtcaaacaataaactgtcctaattctcaaaac

SEQ ID NO: 347717 - DNA, 438 bp, Homo Sapiens
aattttcagcatctcttgaagaatcttgctacagccaaatggcatctcactttttaaagacgtttgcaattattagttgattcacagtacagaacaaggtataaaggaaaaaaccctgctaggtagtgttataattgcctagattaaaaatagactagaacaggttcattttaagatttacttggaagagcaaagaaggaaaaattatatttttaaagaaagagaatattcaggctttatttctggtatgaagtttatattttttaaaaaaatcctatattatcacaccagagattttagattcttttctggttagaaacattgctggtagttggattatatttttattgtattcatttatcttagggggaacattgtaaagaaacaaaaaggtccagatgaatgtatgctagaaataaaagttgaaagattcttaaa

SEQ ID NO: 347718 - DNA, 618 bp, Homo Sapiens
aaaggatatacaggaggggtcctcagaattcgagatggcagcaaggaacccaggtcgagatgggacattgtgcggctcatccacctcagacgtacctgcaagctgagggtgaagacggccagaacttggagaagagacggaatcttctgaactgcctcatcgtccgaatcctcaaggcccatggagatgaggggctgcacattgaccagcttgtctgtctggtgctggaggcttggcagaagggcccgtgtcctcccaggggtttggtcagcagccttggtaaggggtctgcatgcagcagcactgacgtcctctcctgcatcctacacctcctgggcaagggcacgctgagacgccatgacgaccggccccaggtgctgtcctatgcagtccctgtgactgtcatggagcctcacactgagtccctgaacccaggctcctcaggccccaacccacccctcaccttccataccctacagattcgctcccggggtgtgccctatgcctcctgcactgccacccagagcttctctaccttccggtagccctagacttggggtcaggggaaggtagagctggagcttttacagaaataaaacccaagagtttgattataaa

SEQ ID NO: 347719 - DNA, 553 bp, Homo Sapiens
agctggctgcttcccctccctatgcgtctttcccccgccccaataatcctccctctgggatctgaaatggcccaactgtggctgctttgggggtgacacgctccttctccaactcagctgggccccgggcatcccctgccctcccctgaagacccaaagggggttggcacctgctgtgacacccaccgttgaccccagcctgggggccacaaggttgctgagtggggagaacatggaccccaactctatggcaagcaagatcgcagaagggggagcatcatccgcaaggacttcaggtctcccttggctggagatgaggatccacattaaatgtttgtaacacaccaggccacagaaagctcgctacacacagatgcttctccccacccatgctgactctcagaggctgctaaggcagaatttataggaaattgttttcaagccaccagagacctgtctgtacaactggaaaggctgtatttatttaatgtacctcaaggtgttttaataatgatccgtgttttaataaaaagaagtatttctggaaaaaaaa

SEQ ID NO: 347720 - DNA, 871 bp, Homo Sapiens
cactaggctaggtacgaggcggtggtaatcggccgaggcgcgggttccgctcgcccggcgccatggatccgctgtcgccgccgctctgcacgctgccgccgggccccgagccgccccgcttcgtgtgctactgcgaaggggaggaaagcggggagggggaccgcggcggcttcaacctctacgtgaccgacgccgcggagctttggagcacctgcttcacgccggacagcctggcggccctcaaagcccgtttggcctgagtgcggctgaggacatcaccccccggttcagggcagcctgtgagcagcaagctgtggctctgactctgcaggaggacagagcatccctgacgctttcaggggggccctcggcactggcctttgacctctccaaggtaccaggcccagaggcagcccccaggctgcgggcgctgacactgggcctggcaaaacgcgtgtggagcctggagcggcgactggcagctgcagaagagacagctgtcagcccgaggaagagcccccggcctgcagggcctcagctcttcttaccagacccagatccccagagaggtggccctggacctggagtcaggaggcggtgtccaggagagtcgctcatcaaccccgggttcaagagtaagaaaccagctggtggcgtggacttcgatgagacctgaaggtgcagcacaagcgtggcccccggggagtcccctatgaggggagaggcagtctttgaggcccccatcagagacccccggcacacctcacctgcctgtctgggccaggactaacacgggttctcaaaattccttcctgtcaaataaacagtcccttggttggaacacaaatgcaaaaacaataaaaaacagggg

SEQ ID NO: 347721 - DNA, 763 bp, Homo Sapiens
gcgtccggaattcccgggatggatccgctgtcgccgccgctctgcacgctgccgccgggccccgagccgccccgcttcgtgtgctactgcgaaggggaggaaagcggggagggggaccgcggcggcttcaacctctacgtgaccgacgccgcggaactttggagcacctgcttcacgccggacagcctggcggccctcgtggggcagcctgtgagcagcaagctgtggctctgactctgcaggaggacagagcatccctgacgctttcaggggggccctcggcactggcctttgacctctccaaggtaccaggcccagaggcagcccccaggctgcgggcgctgacactgggcctggcaaaacgcgtgtggagcctggagcggcgactggcagctgcagaagagacagctgtcagcccgaggaagagcccccggcctgcagggcctcagctcttcttaccagacccagatccccagagaggtggccctggacctggagtcaggaggcggtgtccaggagagtcgctcatcaaccccgggttcaagagtaagaaaccagctggtggcgtggacttcgatgagacctgaaggtgcagcacaagcgtggccccgcggggagtccgcctatgaggggagaggcagtctttgaggcccccatcagagaccccccgccaccacctccacctgcctgtcctgggccaggactaacacggctcctcaaattccttccctgtcaaataaacagctcccttggttggaaaaaa

SEQ ID NO: 347722 - DNA, 176 bp, Homo Sapiens
tttcaacagaagttcaggttcgggataagatcatcacagataagaccaaggacacaatattcactgatctctaagcaaacagaaaaactccacttacagaaatcgttgcaactttggaacttccaagacaatctggcctctatcaatgggcagacagcgaccctcactgttggcag

SEQ ID NO: 347723 - DNA, 887 bp, Homo Sapiens
  misc_feature (50)..(50): n is a, c, g, or t
  misc_feature (452)..(452): n is a, c, g, or t
  misc_feature (456)..(503): n is a, c, g, or t
cagaaaacctggaatttataaagtgaccagacaatgggaagccagaaagnagttaaaactctggctagatttcaggctgtgctcaggcccataatagtttttgaggttggaaattaactgttattttatgattacaatgtcccaggtggaaaaagggaagcaagcaatccaaataaccacttgcttgcccagagacctttccctcaaacagatgctttcaagagctgcgagagagtagggcatcccttgtggtggtacctctatgtttaaagaaagaagaaaaaaacccagaatttggttgtagaaaacaatgcccacaacagactggccagtgcttagacaaatttggggttggggggaacactttggtttgaaagcacagagcagtttgccatgtttcttctgtgcctaccattctcccttggcctcaacttctgtaagatggggggggnacannnnnnnnnnnnnnnnnnnnnnnnnnnnnnnnnnnnnnnnnnnnnnnngtcaaagtttttacatgcatatatttcagcttatgctgaagacctacctgtatgttgcacattgaatcatactttcagaacccctcagaaaccatccctctctccctaaagaattttaaaaggaaaacaaaacctcgagtatagatcttacagatgagcaagcattcaggccttagccaaagaatgcagtggagccttcccccttcaactgcattgtgaatgaataccaattaacagcataaaaattaatagtcccatatcagatctggaaggggtttctggggctgtctgatgtccctatcctgttgtagtgaacacaatagcagaaaattctttctgggtccatctgctataaagtcttggtaaaacagcattactataaga

SEQ ID NO: 347724 - DNA, 1458 bp, Homo Sapiens
  misc_feature (57)..(57): n is a, c, g, or t
  misc_feature (64)..(64): n is a, c, g, or t
  misc_feature (79)..(79): n is a, c, g, or t
  misc_feature (111)..(119): n is a, c, g, or t
  misc_feature (1097)..(1112): n is a, c, g, or t
  misc_feature (1115)..(1131): n is a, c, g, or t
tgcaacatacaggtaggtcttcagcataagctgaaatatatgcatgtaaaaacttanacatctntttttttaattttcnactttcttcttaactttacttctctttttgtnnnnnnnnnatcttacagaagttgaggccaagggagaatggtaggcacagaagaaacatggcaaactgctctgtgctttcaaaccaaagtgttccccccaaccccaaatttgtctaagcactggccagtctgttgtgggcattgttttctacaaccaaattctgggtttttttcttctttctttaaacatagaggtaccaccacaagggatgccctactctctcgcagctcttgaaagcatctgtttgagggaaaggtctctgggcaagcaagtggttatttggattgcttgcttccctttttccacctgggacattgtaatcataaaataacagtaaattccaaacctcaaaaactattatggcctgagcacagctgaaatctagcagagtttaactcttctgcctccatgtctgtcacttataattcaggttctgctgttggcttcagaacatgagcagaagaatcgttttatgctagttattgcattcatggttgaaactcaacttagggaaagggttccaatgtattaagcaatgggctgcttctccccaatcctccctaacaattcgttgtgtggacttctcatctaaaaggttagtggcttttgcttgggatcagtgctctctattgatgttcttgctggtctccagacacattcctgttgcattaagacttgaaagacttgtagatgtgtgatgttcaggcacaggatgctgaaagctatgttactattcttagtttgtaaattgtccttttgataccatcatcttgttttctttttgtaggtataaataaaaacactgttgacaattcaacataacaaaaacaataagacacaaatccattactttcaccaaccatacttcacatccaataccccactatcaattacaattcaaataacaatcaacgataaatatactcttctctatatttcgcgctcccccctttttatccgctacagcgcgctataaataaaaaaannnnnnnnnnnnnnnnctnnnnnnnnnnnnnnnnntccaaaaaatatatcttatttatacaaaaaattctttctttttgtgggggcgcccgcaccgaccaaaatataaataaaatacacctatcattacataatctgttattttttcttttcacataaatactcctcttaggaacattacatagacttctccctggcgttacctctcccaaaaaaccaacaaaaaagctttcttggggagagtaagatatatcgctcgctctcttttaaaaactaatcaatctggggaggtttttactccgtattatacccctacttgtgtttattcttaatcaacgagagaggtccatctatccgctccaa

SEQ ID NO: 347725 - DNA, 1083 bp, Homo Sapiens
  misc_feature (24)..(24): n is a, c, g, or t
  misc_feature (488)..(488): n is a, c, g, or t
  misc_feature (528)..(536): n is a, c, g, or t
  misc_feature (993)..(993): n is a, c, g, or t
ggaggcaaggaaacccttggaaanttgataagggttgacccaaaaccgggggagaggccaagaaagaaggttaaaactctggctaggaatttccaagctgtggcttcagggcccattaatagtttttggacggtttgggaatttaacctgttatttttaggattaacaatgtccccagggggaaaaaagggaagccaaccaatccaaataacccacttgcttgcccagagacctttccctcaaacagatgctttcaagagctgcgagagagtagggcatcccttgtggtggtacctctatgtttaaagaaagaagaaaaaaacccagaatttggttgtagaaaacaatgcccacaacagactggccagtgcttagacaaatttggggttggggggaacactttggtttgaaagcacagagcagtttgccatgtttcttctgtgcctaccattctcccttggcctcaacttctgtaagatggggggggnacaaaaagagaagtaaagttaagaagaaagtggaaaattnnnnnnnnngatgtcaaagtttttacatgcatatatttcagcttatgctgaagacctacctgtatgttgcacattgaatcatactttcagaacccctcagaaaccatccctctctccctaaagaattttaaaaggaaaacaaaacctcgagtatagatcttacagatgagcaagcattcaggccttagccaaagaatgcagtggagccttcccccttcaactgcattgtgaatgaataccaattaacagcataaaaattaatagtcccatatcagatctggaaggggtttctggggctgtctgatgtccctatcctgttgtagtgaacacaatagcagaaaattctttctgggtccatctgctataaagtcttggtaaaacagcattactatgaagaggatgaactcacctaccttcagatggaggaaaagtgaaaaggacttaggctttagtcctccatgacttntcttaagcactacctacctgtaataagctgagtgcaaaaggatgccgaagaaaatctgcacccagaagctgttagaaagcatcccgggaa

SEQ ID NO: 347726 - DNA, 1887 bp, Homo Sapiens
  misc_feature (6)..(6): n is a, c, g, or t
  misc_feature (485)..(485): n is a, c, g, or t
  misc_feature (1801)..(1837): n is a, c, g, or t
aataantagcataaaacgattcttctgctcatgttctgaagccaacagcagaacctgaattataagtgacagacatggaggcagaagagttaaactctgctagatttcagctgtgctcaggccataatagtttttgaggtttggaatttactgttattttatgattacaatgtcccaggtggaaaaagggaagcaagcaatccaaataaccacttgcttgcccagagacctttccctcaaacagatgctttcaagagctgcgagagagtagggcatcccttgtggtggtacctctatgtttaaagaaagaagaaaaaaacccagaatttggttgtagaaaacaatgcccacaacagactggccagtgcttagacaaatttggggttggggggaacactttggtttgaaagcacagagcagtttgccatgtttcttctgtgcctaccattctcccttggcctcaacttctgtaagatggggggggnacaaaaagagaagtaaagttaagaagaaagtggaaaattacacaaaaagatgtcaaagtttttacatgcatatatttcagcttatgctgaagacctacctgtatgttgcacattgaatcatactttcagaacccctcagaaaccatccctctctccctaaagaattttaaaaggaaaacaaaacctcgagtatagatcttacagatgagcaagcattcaggccttagccaaagaatgcagtggagccttcccccttcaactgcattgtgaatgaataccaattaacagcataaaaattaatagtcccatatcagatctggaaggggtttctggggctgtctgatgtccctatcctgttgtagtgaacacaatagcagaaaattctttctgggtccatctgctataaagtcttggtaaaacagcattactatgaagaggatgaactcacctaccttcagatggaggaaaagtgaaaaggacttaggctttagtcctccatgacttttcttaagcactacctacctgtaataagctgagtgcaaaaggatgccgaagaaaatctgcacccagaagctgttagaaagcactgcagagaacagggtatgaagaaaataaagagttcttaataaacccttaagattctttgttcaaggtaactttgccaaaagggcagagtaggtggcaaagagttgcttttaatctagctctacactgcatttgaaaataaaatttgcccattttgaatatattgtttataattaaatgtgctttttacactgcaggtcaatataaaaactggttagtaaatttccagcgagcatttatgttcatttgctcacagcagctgtctggatggaaaattaatttcacagatggtccccagttaaactgggaagaaatataggcagcttccacccagatgctgagatgctacagtttaaccactacaataaacacttgtggtttttaatttaaaggatacacaaaactcagcaattcaatttctagcctgacactaaaatggttatttttcagtaacggggggagaagtggggaggcagagtgtgaagggaaataaaaccaattagtaatttttaactatcaaatgcactccagcaatcagtcaaaacaggcccgaggaaacctgttccaacttaagaaacatttaaaagcacaaaagaaaatgtgcagggcactccctctttgttttctaacccagtaatgagaaatttaaagcacagatgccatcttcctctgcaaaacaattcagccctcccgctctcgacgaattcgagctcggccgatttggcctgatnnnnnnnnnnnnnnnnnnnnnnnnnnnnnnnnnnnnncgccgccaccgcggtagagctccaattgccctatagtgagtgatcatccc

SEQ ID NO: 347727 - DNA, 858 bp, Homo Sapiens
  misc_feature (672)..(729): n is a, c, g, or t
ggaatgtggtctggagaccagcaagaacatcaatagagaggcactgatcccaaggcaaaagccactaaccttttagatgagaagtccacacaacaaattgttagggaggatttggggagaagcagcccattgcttaaatacattggaaccctttccctaagttgagtttcaaccatgaacgcaataactagcataaaacgattcttcgggctcaatgttcttgaagccaaacagcagaacctgaattataagtgacagacatggaggcagaagagttaaactctgctagatttcagctgtgctcaggccataatagtttttgaggtttggaatttactgttattttatgattgcaatgtcccaggtggaaaaagggaagcaagcaatccaaataaccacttgcttgcccagagacctttccctcaaacagatgctttcaagagctgcgagagagtagggcatcccttgtggtggtacctctatgtttaaagaaagaagaaaaaaacccagatttggttgtagaaaacaatgcccacaacagactggccagtgcttagacaaatttggggttggggggaacactttggtttgaaagcacagagcagtttgccatgtttcttctgtgcctaccattctcccttggcctcaacttctgtaagatggggggggacnnnnnnnnnnnnnnnnnnnnnnnnnnnnnnnnnnnnnnnnnnnnnnnnnnnnnnnnnntttacatgcatatatttcagcttatgctgaagacctacctgtatgttgcacattgaatcatactttcagaacccctcagaaaccatccctctctccctaaagaattttaaaaggaaaacaaacctcgag

SEQ ID NO: 347728 - DNA, 674 bp, Homo Sapiens
  misc_feature (355)..(412): n is a, c, g, or t
ggaagactttatagcagatggacccagaaagaattttctgctattgtgttcactacaacaggatagggacatcagacagccccagaaaccccttccagatctgatatgggactattaatttttatgctgttaattggtatccattcacaatgcagttgaagggggaaggctccactgcattctttggctaaggcctgaatgcttgctcatctgtaagatctatactcgaggttttgttttccttttaaaattctttagggagagagggatggtttctgaggggttctgaaagtatgattcaatgtgcaacatacaggtaggtcttcagcataagctgaaatatatgcatgtaaannnnnnnnnnnnnnnnnnnnnnnnnnnnnnnnnnnnnnnnnnnnnnnnnnnnnnnnnngtccccccccatcttacagaagttgaggccaagggagaatggtaggcacagaagaaacatggcaaactgctctgtgctttcaaaccaaagtgttcccccccaccccaaatttgtctaagcactggccagtctgttgtgggcattgttttctacaacaaatctgggttttttcttctttcttaacataaagtacaccacagggatgcctactctcccactctgaaactctgtttaggaaagtctcgggcagcaatgttattga

SEQ ID NO: 347729 - DNA, 731 bp, Homo Sapiens
  misc_feature (39)..(39): n is a, c, g, or t
  misc_feature (52)..(52): n is a, c, g, or t
  misc_feature (113)..(113): n is a, c, g, or t
  misc_feature (137)..(138): n is a, c, g, or t
  misc_feature (147)..(147): n is a, c, g, or t
  misc_feature (161)..(161): n is a, c, g, or t
  misc_feature (290)..(298): n is a, c, g, or t
  misc_feature (301)..(347): n is a, c, g, or t
agtccagtgaaaaggagcagcatccaataccactgctgnccagagccttccntcaaacagagctttcaagagcgcgagagagtaggcatccctgtgggtgtacctctatgttnaagaaagaagaaaaaaaacccagnnaattggtgntagaaaacaatgcncacaacagactggccagtgcttagacaaatttggggttggggggaacactttggtttgaaagcacagagcagtttgccatgtttcttctgtgcctaccattctcccttggcctcaacttctgtaagatnnnnnnnnnacnnnnnnnnnnnnnnnnnnnnnnnnnnnnnnnnnnnnnnnnnnnnnnnatgtcaaagtttttacatgcatatatttcagcttatgctgaagacctacctgtatgttgcacattgaatcatactttcagaacccctcagaaaccatccctctctccctaaagaattttaaaaggaaaacaaaacctcgagtatagatcttacagatgagcaagcattcaggccttagccaaagaatgcagtggagccttcccccttcaactgcattgtgaatgaataccaattaacagcataaaaattaatagtcccatatcagatctggaaggggtttctggggctgtctgatgtccctatcctgttgtagtgaacacaatagcagaaaattctttctgggtccatctgctataaagtcttggtaaaacagcattactatcc

SEQ ID NO: 347730 - DNA, 318 bp, Homo Sapiens
  misc_feature (43)..(79): n is a, c, g, or t
gggagaagatatatgggcgactggagcttacgcggggcggcgnnnnnnnnnnnnnnnnnnnnnnnnnnnnnnnnnnnnnatcaggccaaatcggccgagctccgaattcgtcgagagcggatcggtgctctctattgatgttcttgctggtctccagacacattcctgttgcattaagacttgaaagacttgtagatgtgtgatgttcaggcacaggatgctgaaagctatgttactattcttagtttgtaaattgtccttttgataccatcatcttgttttctttctgtaggtataaataaaaacactgttgacaat

SEQ ID NO: 347731 - DNA, 1144 bp, Homo Sapiens
  misc_feature (493)..(511): n is a, c, g, or t
  misc_feature (853)..(861): n is a, c, g, or t
  misc_feature (911)..(922): n is a, c, g, or t
  misc_feature (1068)..(1068): n is a, c, g, or t
  misc_feature (1118)..(1118): n is a, c, g, or t
ccctcagtgcgatcttgcttgccttcatcatcacttggaccccatacaacatcatggttctggtgaacaccttttgtgaccagctgcataccccaaaaccttttggaatctgggctactggctgtgctacatcaacagcaccgtgaaccccgtgtgctatgctctgtgcaacaaaacattcagaaccactttcaagatgctgctgctgtgccagtgtgacaaaaaaaagaggcgcaagcagcagtaccagcagagacagtcggtcatttttcacaagcgcgcacccgagcaggccttgtagaatgaggttgtatcaatagcagtgacaaaacgcacacatcaacccacagaccttaggaggaggaaggcgagggcggggtgacttctggtgatgataaaaatggttttatcacccagatgtgaaagaagctgcctgtttactgatccattgaataaacccattttaatagaaaaagtcaataccaattcagcnnnnnnnnnnnnnnnnnnncatactacttgaatataaagaaatttattctgaaatagactttacgtgttttttttcttacagaggaagaaaaatattgcttgacggcaaattatataccccaaagtggatttgcccggggtccctttaatttcccctttagcttttggaatctcaaaaggaagcttagcttgaaccccggtttcccccatttctttcccaaaaggaatccccaaaagggggggaaatcccaaaacccccaaggtgggaaaaccctggcagggcttttacgaaaatcttgggggggtccccaaaaaatttatttttcccttaacggtttggcaaaaaaactctggaaacccnnnnnnnnnggcccccccaaaaaagaaagctttcccccgggccccttttttcccttttnnnnnnnnnnnnttgtttttcaaaaacctttccatatttttgtgggggggcaactttggaaactctctctcggagaattcccttgtgggaaaaaagaaacacattggtggttttgtgtgtgggacaagctgttctaaaggaattttcttgctgcttcnccgcaattattaaacaaaactcatctcttcttgtgggtgccccccgctcntagtaacaacagaggagaacggccgc

SEQ ID NO: 347732 - DNA, 493 bp, Homo Sapiens
  misc_feature (26)..(26): n is a, c, g, or t
  misc_feature (41)..(41): n is a, c, g, or t
  misc_feature (48)..(48): n is a, c, g, or t
aaactgggaactggtccccttggganccctaatttcaacanccttaanttgcccaacctggcttcctccccagcccagaaacttaaccttggggtgccataagaatagccctgccttgaatatgcctaactcctagttcccaggatttactgcctcagatgctgtcctccctcattcccatctccaaccccattcacctgccctggactctcagcttcccagtatgcccaggagataacattttcccctaccagccttgtccaaaccctcatggcttactcctgctgaaagtctttccgctcctggactttgtaaatgtgagagggaaagactctctcagctttgtgtaacaactgtcagggtgaattagctttttttccctgtattttgcccacttaccttttttcctgtatcttgctaatttggcatgaagatttttgttctttaaagtattttcttgagatatttaggcagagcctgttgctaaaaaaaa

SEQ ID NO: 347733 - DNA, 452 bp, Homo Sapiens
gggactatctcccattccccagacttacccatatccgtttagctcctcccctttaagccacctaggaacaggagcccatgcatccttcccttccttagtttgtccctcagttagaaatgccagcctagaatcttgtggtgaagagcaatcgtcgtccctggttttcagggcctctgctgggatactacatgcgtaataccctcaataagattgcagctatgcaaatttcaaaagacaaaagtggagtttctaagcttcctcactctagtggagtattcagatactttgatcacctgctatttcgagccctccagaacatcaaattgtcttctactaaaggaaggtttccatgaacctgctgagaaaaggtagcatcttctataaaggttatcaaaaacagaaatttctctgcaaaaatcttacctcaatcttatgaagaccaagaaaaaaaa

SEQ ID NO: 347734 - DNA, 429 bp, Homo Sapiens
  misc_feature (26)..(26): n is a, c, g, or t
agtaaccccccatggggtagacctanccgaccttgcccaagtgcctttttagaccagcctaaaaaattttccaagattttaaaaagatgtataaggttaagtttgccaaatataatggaaatgctgtatatccttttgaagtgatgaaatccacgttggaattttaaagaaaatatgttgtaataatgctgttgtaagtaatattttaatgtctctttgcctgttttctatttcagcacattcattgtggtgaatgttcatagcattataactgcttagccattgaatgataacatttgttagtggaaattggaaaatttatttgtgaaattctgcagaattcatttttctatttccaatatttgctgaggttaaataaaaattttcaagccattgatgtaataaaatatgaaatgaaagcaaaaaaaa

SEQ ID NO: 347735 - DNA, 133 bp, Homo Sapiens
aaactcagtttaaaaagactaaaacgttctttcaaaagaggcatctaaatgtgttcctaattttgtatatgggcttaggttttgtaaccaataaaaaaagctgctatcaaatatgataaaacattgaaaactt

SEQ ID NO: 347736 - DNA, 506 bp, Homo Sapiens
  misc_feature (53)..(53): n is a, c, g, or t
ctgagattcctgcggattgtcacgggaaatcccaacgtgcccctacgaaaagntcgcaagccccaccgtgggagcaaatggggcttcggcgcttctgcatagaagaaatgggggaaaattacttctcttcccccgggcacacacatgccttcaaccgactggatcttcccaccgtatcccctcgtactcccatgttgtatgaaaagctgttaacagcagtagaggaaaccagcacctttggacttgagtgaggacatggaacctcgcctgacattttcctggccagtgacatcacccttcctgggatgatccccttttccctttcccttaatcaactctcctttgattttggtattccatgatttttattttcaaaccaaatcaggattgacaaaagctgtgcatgaagaactgccttcttctaagatctaaccttcaggcttctctcctctgttttcaatgaactgctagcctgtatgcaatattaaaaaacagctgtctccaaa

SEQ ID NO: 347737 - DNA, 1974 bp, Homo Sapiens
  misc_feature (8)..(8): n is a, c, g, or t
  misc_feature (25)..(25): n is a, c, g, or t
  misc_feature (29)..(29): n is a, c, g, or t
  misc_feature (137)..(139): n is a, c, g, or t
  misc_feature (141)..(141): n is a, c, g, or t
  misc_feature (223)..(223): n is a, c, g, or t
  misc_feature (255)..(255): n is a, c, g, or t
  misc_feature (319)..(320): n is a, c, g, or t
  misc_feature (329)..(329): n is a, c, g, or t
  misc_feature (335)..(336): n is a, c, g, or t
  misc_feature (354)..(354): n is a, c, g, or t
  misc_feature (356)..(356): n is a, c, g, or t
  misc_feature (359)..(359): n is a, c, g, or t
  misc_feature (361)..(361): n is a, c, g, or t
  misc_feature (370)..(370): n is a, c, g, or t
  misc_feature (392)..(393): n is a, c, g, or t
  misc_feature (398)..(398): n is a, c, g, or t
  misc_feature (400)..(400): n is a, c, g, or t
  misc_feature (407)..(407): n is a, c, g, or t
  misc_feature (416)..(416): n is a, c, g, or t
  misc_feature (420)..(420): n is a, c, g, or t
  misc_feature (423)..(423): n is a, c, g, or t
aatattgnataaaggttagtagttnattngaaaaaagaggagagaagctgaaggttagattttagaagaaggcagtttcttcatgcacagcttattgtcaatcctgatttggtttgaaaataaaaatcatggaatannntnattaaaggagagttgattaagggaaagggaaaaggggatcatcccaggaagggtgatgtcactggccaggaaaatgtcaggngaggttccatgtcctcactcaagtccaaaggngctggtttcctctactgctgttaacagcttttcatacaacatggagtacgagggatacggtggnngattcagtnggttgnngcatgtgtgtgccctggngnganangtaattttnccccatttctctatgcagaagnnccgangnccattgntcccacggngggntgngaagcttcgtagggcacgctgaatgttcccgtgacaaactgcaagtaatctcagcctctgctcattattgaagcgctccaccgcagcccagaaccagcggatcacaagatgcccatcgtggtaacctcccccggtactcagtgttattccgccagtcatttaggtcgatttccgcggtgccagctatcaccagctccagctccctggcatcaaacacggacaccagcctcgagtctacaacctcgtagaagccgcgcaccagcgcctcggtctgctgtaccacgccgcgctccacccgccacttcaccatgcgctcgatgtactccttcttgtttttctccgtcacctgtgtgttggctcctccagacttcaactccctttccgtgacctgtccaaaaacctcttcattaacagtgaaagtgaggtctaagatgtctgtgatgttgttgtccttcatccactgcaaactctggtggaattcctcatccaaatattccaggtcactcaaatcacagggcagtctcaggagtgccttgtagaagggcctcgtgaagaaagcgtcaagaaggtactgatggatcagagccagacccaggatgcgaccgctaaacctgaaccactcaagatggttttctacaaatgcggacatggggctgatctgcaccgtgtaagtatcatttgccgagtactcaaagagtccatagtaagggttgaagagctcctgagacagaaggaagaagaactcccgcgaggggccactgtagtccaggccctcctctccaacaaaggtgacgtagagcttgtttcgctggagctctttccgcgaataggccatcacctgattgaaggttccctccaacaaatgatcccggcgaataatgagcttaattttccccggaccctgaccaaatcctttggcttccagttttctgtagaaattgcggagcttggcctcaaagtctcttcggtagggggaaggggctcttgcactggctctctgtaaacctggggagttctgaggtgaagaacagggtgaacatcggggagagaagctatacccagggtggaaggcagcctgcagggggacgtaggacataatctcttctttcaagagactcagcaaaatgaccagatccgcatcacaggacaacttctcaagcccgtgattaccctcagtcccgatgtaatggattttctccctgagtgtgtggtttcttgctaagcttggctgacgctcttgcagcatttcaaaaatgtttggctggcgaagaaatgccacaatcttgtcattatatgccagtggcaatgactcatgttgatgttggcttcgaatagcagctactaagctgggtcctggcctggccagtaaagaggctcctctgtttctagaaacttgctgaggcctctctcagcagctgtaactgtcggagcctcatggaggtgctgtcaggtgagtgtagatgagttgggaagacgaccgttctgaagagggattcgggggtcaatgataagtggtagctcgactgttgtggtccacgatgaaagactttc

SEQ ID NO: 347738 - DNA, 456 bp, Homo Sapiens
cctaagtggaattgtccggtaatctcccagcatcatcagcaaaggtcgcatatgtgtgtggatttgatcgacttctatggtagcaccttctaaaaactttctcatacaggcttctccggcctcttggagctcactattggtggaattcagggctttgaagagtgcagcgatgattttctccctggactgaggaaggtaattgcaggcagcaagtgcatttaatgccgcaattcgtaaaggtacgagtgacggaaggcttttataacagggcagctttgttaaagctgaatcttcagcctcacacaaattcaacagctctgtgtagaacaccttatgctccaccacgttaaggtccattgtgaagagcctgggctgcaacgtggtacagaacgtgttcccctccatcaggccaatctgtgcgttggcaggctggtgtcggagcattccacatgaggc

SEQ ID NO: 347739 - DNA, 1928 bp, Homo Sapiens
  misc_feature (159)..(159): n is a, c, g, or t
  misc_feature (216)..(216): n is a, c, g, or t
  misc_feature (232)..(232): n is a, c, g, or t
  misc_feature (251)..(261): n is a, c, g, or t
  misc_feature (263)..(263): n is a, c, g, or t
  misc_feature (266)..(266): n is a, c, g, or t
  misc_feature (275)..(275): n is a, c, g, or t
  misc_feature (287)..(287): n is a, c, g, or t
  misc_feature (296)..(296): n is a, c, g, or t
  misc_feature (298)..(298): n is a, c, g, or t
  misc_feature (314)..(314): n is a, c, g, or t
  misc_feature (328)..(329): n is a, c, g, or t
  misc_feature (336)..(336): n is a, c, g, or t
  misc_feature (339)..(339): n is a, c, g, or t
  misc_feature (343)..(343): n is a, c, g, or t
  misc_feature (350)..(350): n is a, c, g, or t
  misc_feature (355)..(356): n is a, c, g, or t
  misc_feature (366)..(367): n is a, c, g, or t
  misc_feature (371)..(372): n is a, c, g, or t
  misc_feature (374)..(374): n is a, c, g, or t
  misc_feature (376)..(377): n is a, c, g, or t
  misc_feature (402)..(402): n is a, c, g, or t
  misc_feature (408)..(409): n is a, c, g, or t
  misc_feature (412)..(412): n is a, c, g, or t
  misc_feature (430)..(430): n is a, c, g, or t
  misc_feature (435)..(436): n is a, c, g, or t
  misc_feature (473)..(473): n is a, c, g, or t
  misc_feature (485)..(528): n is a, c, g, or t
  misc_feature (547)..(547): n is a, c, g, or t
  misc_feature (555)..(555): n is a, c, g, or t
  misc_feature (625)..(625): n is a, c, g, or t
  misc_feature (627)..(627): n is a, c, g, or t
  misc_feature (655)..(655): n is a, c, g, or t
  misc_feature (671)..(671): n is a, c, g, or t
  misc_feature (677)..(677): n is a, c, g, or t
  misc_feature (721)..(721): n is a, c, g, or t
  misc_feature (727)..(727): n is a, c, g, or t
  misc_feature (747)..(747): n is a, c, g, or t
  misc_feature (756)..(756): n is a, c, g, or t
  misc_feature (760)..(760): n is a, c, g, or t
  misc_feature (763)..(763): n is a, c, g, or t
  misc_feature (766)..(766): n is a, c, g, or t
  misc_feature (773)..(773): n is a, c, g, or t
  misc_feature (778)..(779): n is a, c, g, or t
  misc_feature (787)..(787): n is a, c, g, or t
  misc_feature (796)..(796): n is a, c, g, or t
  misc_feature (807)..(807): n is a, c, g, or t
  misc_feature (818)..(818): n is a, c, g, or t
  misc_feature (821)..(821): n is a, c, g, or t
  misc_feature (829)..(829): n is a, c, g, or t
gatatctcgcgaggctggagttctccgggagcgccggtcggaggcggtcggcggaggtgtctaccccgccggtgatggcgttgaacgccactggcttcccggccttccgtccgctgcctccgtccgattctgcgtctgcttgctgaggaggcggattangggggcgcggagtctcttcccttgagtgcataggtcccggttggtaaagggtttgantccgcatcgccaaaantgaaagctgcgagggaatnnnnnnnnnnnanatntttaaaaanaaattgcaaaantgaaaaagnanttgccgacgctaaaantcttgttgaaaaannaaaaaanaanaaanatgcagnaaaanntctgattgannaaannananntctcaaaaaacgagtagaagccatnaaaaannatnaggaaaaaattcaaaaanttaannaaatcgcgagacatcggccacggtccacgttagttangggaatccagcnnnnnnnnnnnnnnnnnnnnnnnnnnnnnnnnnnnnnnnnnnnnttacgtacatctctggaanaaaataantcggccttggaacttataatgagcaagtaccgagaacaaatgtttagattgctaatggctagcaaaaaanangatccgggtataataatgaagttaaaanagcagcactccaaggnactgcnagcacatgttgaccagataactgaaatggcagcagtaatgaggnaagccnttgaaattgacgagcaacanggttgcaangaanaanaangaatatntcaanntgaacaanaaaacaaangcttgagaganatccttcaaanaantcgagaancatttttgaacctaaggaaagatgatgcgtcggaaagtacttctttgtcagcattagtgaccaacagtgatttgagtctgaggaagagctgaagagtttctgagtctgtgagcttcttacatggctccaaatggtcaaataagtgaatgaatgaatggacagaaaattcaatcctttatttttttctctgtaaatatgtacagtgcacgggctatgagatagcaacaaaaaatgcatagttaatggtcatagactttattccaaaacataattggaaaatagaaactgagccattgccaaatggtaaagaaatgaaaagttttcacagtgactactgaatataccaagagcttttggcagtactgctggctttccgggtgattaattaggtaaacttgaatattcccagtaaatgtttgaaaatgcataaaaattataccaatttaaaaatataaattttttgccactggttttgggaaacggaggatttgtaccccaaatttcatccttatttgggcgtcaaagttgatgcaaagtttatgtaccatgagacttctagtgattgcctactttcacatttatttaaatttttgtgaaagaaaatacagttttaaaggctataggaatgtgttatatgtaccttaaacagataatttaattttagcaatttatcataactgatacttagctaacaattgtccataacttgtttaagtgtaagaaataccatttcaggaatgaaaaagaaggaatactactttctaagaaagaagatcttataatagacatatttagtaggttaaactactcctttgaaagaataagttttggttcaaagtcaataatgaagacgagatttgtttttctcttctctggctgatttttaaggatattatgtagttcatttagttaacagaattgaaatgtttgatatggcaagataggtatggtaatttcaaagtgaattgggaattcctctggctcatagaaccctttatattatccttgaagtattcttgagatacgaagaacacaccgtcacttcaattttcaaaaaacagttccgatcggtcaaaagctccatcgggaccccataacc

SEQ ID NO: 347740 - DNA, 1674 bp, Homo Sapiens
  misc_feature (52)..(88): n is a, c, g, or t
  misc_feature (1163)..(1163): n is a, c, g, or t
  misc_feature (1376)..(1385): n is a, c, g, or t
cggaatgatcgactcactatagggcgacctggagctaacgcggtggcggcgnnnnnnnnnnnnnnnnnnnnnnnnnnnnnnnnnnnnnatcaggccaaatcggccgagctcgaattcgtcgagagcggctccgggagcgccggtcggaggcggtcggcggaggtgtctaccccgccggtgatggcgttgaacgccactggcttcccggccttccgtccgctgcctccgtccgattctgcgtctgcttgctgaggaggcggattaggggggcgcggagtctcttcccttgagtgcataggtcccggttggtagagggtttgagtccacatcgccacagctgaaggctgcgagggactaagagcagaatatatctttagaaatgagttgcacaattgagaaggcacttgccgacgctaaagctcttgttgaaagattaacgagatcatgacgatgcagcagaatctctgattgagcaaaccacagctctcaacaagcgagtagaagccatgaaacagtatcaggaagaaattcaagaacttaatgaagtcgcgagacatcggccacggtccacgttagttatgggaatccagcaagaaaacagacaaatcagagagttgcaacaagaaaacaaagaattacgtacatctctggaagaacatcagtcggccttggaacttataatgagcaagtaccgagaacaaatgtttagattgctaatggctagcaaaaaagatgatccgggtataataatgaagttaaaagagcagcactccaagattgacatggtacatcgtaacaagtccgaaggattcttccttgatgcatctcgacacatcctttgaagcacctcaacatggactggagagaaggcactgggaagcaaatcagaatgtacactaaataaacagtcaacttttggggtgtggatggaaggggggtccattttaaaagtgcttttacattgaatttccctcccagattagatcagcaaataaatgaaatttattaaaagaatgttgtgtctttaatagccatgctgttcagtgtagaaactttaaatctctcattaattttctgtgtattgtatcatgtacagcctgttagatatttgcaggttttataggttattcagtccaacgctttatttatttgctcttgttagntgttgctgtgaaacagtcatttcctttctggacatcaaagatattttcttggcattaattttaaactgatttcataaggtcaaagtattaaatgttttatttcagattgtgaatagtttgtagtcctttgattttgcaaaagaaataaaatgccttttgtttaaatggtaaggattaagtaaagcaagcgctcccccccatggggccctaaannnnnnnnnnaactcacttgtgggcaggcctttatttgaataaagggaggaaataaaccctaggcaaggggaggttaaaacaaggaaaagacttttttcaagacacggttcaagggggttttatggtgggtgggaacctttctttgtgcctctccccacaaaggttttttaaaaaccaccacaacctcggcgcctcctatgggcgcttgttgtaacaaaacacacgggaggcaacccctccccgtgagaaagcatctttactcatgtctacaatagagtgggccccccttctaagaaat

SEQ ID NO: 347741 - DNA, 1005 bp, Homo Sapiens
ttggtcactaatgctgacaagaaagtactttccgacgcatcatcgtttccttaggttcaaaaatgattctcgagttatttgaaggatctctctcaagcctttgttttcttgttcaagttgaaatattcgttcttgttccttgcaaccctgttgctcgtcaatgttcaatggctttcctcattactgctgccatttcagttatctggtcaacatgtgcttgcagttccttggagtgctgctcttttaacttcattattatacccggatcatcttttttgctagccattagcaatctaaacatttgttctcggtacttgctcattataagttccaaggccgactgatgttcttccagagatgtacgtaattctttgttttcttgttgcaactctctgatttgtctgttttcttgctggattcccataactaacgtggaccgtggccgatgtctcgcgacttcattaagttcttgaatttcgttcctgatactgtttcatggcttctactcgcttgttgagagctgtggtttgctcaatcagagattctgctgcatcgtcatgatctcttaatctttcaacaagagctttagcgtcggcaagtgccttctcaattgtgcaactcatttctaaagatatattctgctcttagtccctcgcagccttcagctgtggcgatgcggactcaaaccctctaccaaccgggacctatgcactcaagggaagagactccgcgcccccctaatccgcctcctcagcaagcagacgcagaatcggacggaggcagcggacggaaggccgggaagccagtggcgttcaacgccatcaccggcggggtagacacctccgccgaccgcctccgaccggcgctcccggagaactccagcctcgcgagatttcatttcctcagcgttacagttaccgctcatcagacgaattaagacgctcggccgatgttgccctgatccataacttcgtataatgtataaatacgaagttatctggccga

SEQ ID NO: 347742 - DNA, 686 bp, Homo Sapiens
ggatagattccttgagtggaatagtgggctatataccgaaatatttccattgtttcccttttttgcagagcatgtggaagttaaacctgcttgattctactatacatcttgggcaactagttaccaaatgaattgtgccaccataactgattttaatttcccattatttatgattttaaaatatttgttgcccaggtgttatgaaagaataaagcttttaagtatagactaccttagcatgaagatgctcatgcctaagaatgaaaattgttgaggttatctcccattcaatcatgtagcaagaacttaaagaaattcactactgcagtttttatttttaaaaaacagtaattgagatattgaagacattacaatttagtttgtgtggtctttttttaaattgctgtatcgttcagtctcttgtggcaatagcactttgaagaaaatagagaatttaatatatggtgattgggatatgtagcattcaaaaaaagtgaattgccaagatactggtgtcatgtaaattcccactttacataaaaacccatcaggacagaatgatgctcaatattttaaaattctaaaaatagggtgggatttttcattgtctctactttataattatcaaaacttattttgtattgctactaccttaaattgaaataaaatgtttatacttacggaaa

SEQ ID NO: 347743 - DNA, 339 bp, Homo Sapiens
  misc_feature (28)..(28): n is a, c, g, or t
  misc_feature (82)..(82): n is a, c, g, or t
  misc_feature (238)..(238): n is a, c, g, or t
  misc_feature (270)..(270): n is a, c, g, or t
caaaaaatgtgaagcccccatttcaaancttgccgaccttagttcaaagccccctgagagatcacttttagaattgaggatntgttaaaatggcaagtcatttcatttgtgttaaaaagaaaatacccaaaaggaaggagggagccctgtttgccttgagataaacggccttggcattttctggcattaatgtagaaataatgtccctatgatgacaaattttcaaagaaacactttncttaatttacttgtgtggtgtaaaatgttgcntaaatgtgttgttacattatgtcactgctgaaagtaattttcaccataataaagggattttccaccaaa

SEQ ID NO: 347744 - DNA, 1542 bp, Homo Sapiens
  misc_feature (85)..(105): n is a, c, g, or t
  misc_feature (1323)..(1409): n is a, c, g, or t
atggatcaggccaaatcggccgagctcgaattcgtcgagagcggatttgtacacataacatgggttatttagtttaactctggcnnnnnnnnnnnnnnnnnnnnntttggtttgtggatgtttgtataccgttcagtataaaagtgtcctaagcatattagccaatcttttcacagtagagcatacttaaggctgcttggtactgagtatacttaaatataactccagaatccagggacttggtgttaaaacaggattagagcatgtaaaggtacatctagattcatatttgaatcttaaactgtatttttctcttagtattgctaatgagtaaagaaaagtctcataaggtagccaaatgaaaaagaatgaaagggaaagtgaaaaattaaggggacaaaagatgggatgtgaaaagaagaattctagtttgatggtgactcatattcacgataggatacaaagtgtgatttgttggaaacatgtcccaaatttctaaaattctgcttctctgccaaaagcaatgtctttcttggttgatatttgagttttaaaagggtcaaatctttctaattttttgtatctttagagggcagcactagaagaaatcagcaggtctaatcccaccagtaagaaaactaccacttcttgatttttacagatttaaaaaaatcttttcagtgacctttctttttaatgtaaatacaaatttaaacctaggcttaatataggcgtttcccctttcacccaagtgatgtcacagttcgatgcaaaatcaatgatccagaatgatcgtgggtaaaaataactcaaagtgtttcttaagggtgagttggcatgcaaaaaattacattgattacagtgtgttttggagctggctctgtttgtgtgcatatgataatgcagagttgagccagagcctggaaatgtcattctagatctcactaactactggaatcagtgttttaatctcttggtggaaactttcagttgcttaactctctattggaagatttttttaatgttctacatcatttatgttgtattacaatgtatgtagaaatagtaacctgtgaactatgcttttccataactttttaaaaatatatatatctaaatgaatgcaatgtgcataaatattttttaaacataacagtgaactattgcaccttttgctaatgcctctatttacttgctttggcataaagaatgagccaatgaacctctgtgtcctgtggaaaaatgtataaatgttatctgatattgctcttagatgtaatgctaattaatgttaaatcacaaataaacagtattttaaatatnnnnnnnnnnnnnnnnnnnnnnnnnnnnnnnnnnnnnnnnnnnnnnnnnnnnnnnnnnnnnnnnnnnnnnnnnnnnnnnnnnnnnnncctttgcccccccccccgcccccaaaaattttttaaaaccatttttttgggcccggggccccaagggaaaagaaaacggggcaaaactttttccaaggaaaaccgggccaaaaaaaggggttggattcccccc

SEQ ID NO: 347745 - DNA, 286 bp, Homo Sapiens
  misc_feature (67)..(67): n is a, c, g, or t
  misc_feature (242)..(242): n is a, c, g, or t
aaatgtgaccgagtgcaacaagcatttaagaaaaattttagacagtgttttgtttagaaatcagggntcatgcaatcctttaatggtgctgtttgttttttatttcttttctacaaagaaaacaagtgttgcctacaaaagtgactgctcacaataccataagttaaatggaaatgaaatgtttgtctcttcatgtttctctgtctttccctttctcaaagtaacaacttgggtttccatantaagatattctggagaaaataaagaaattaaacatgaaaaaaaa

SEQ ID NO: 347746 - DNA, 462 bp, Homo Sapiens
  misc_feature (11)..(11): n is a, c, g, or t
  misc_feature (41)..(41): n is a, c, g, or t
  misc_feature (72)..(72): n is a, c, g, or t
  misc_feature (251)..(285): n is a, c, g, or t
catttatatcngcataccggaaaggtaaaaccctccctcgnaccctctaccaaagaatatattatccccacnggaaaaactcagaaaaggtgtgtaaaacccctcagaagggggagcaggtggattcagtaagactgcgacaatttaatactgttacgcttgctttgatacctgactaaatgtgactgagtgcaacaagcatttaagaaaatttttagacagtgttttgtttagaattccagggatcatgnnnnnnnnnnnnnnnnnnnnnnnnnnnnnnnnnnnttctacaaagaaaacaagtgttgcctacaaaagtgactgctcacaataccataagttaaatgaaatgaaatgtttgtctcttcatgtttctctgtctttccctttctcaaagtaacaacttgggtttcaatattaagatattctggagaaaataaagaaattaaacatgaaaaaaaa

SEQ ID NO: 347747 - DNA, 529 bp, Homo Sapiens
tttatttgtaacaaggaaacaaatttattgattttaaaagacaagacaccattttgttttgaaaaacacaagaaagctagcctgagttcaagtctgaaatattcagaaaaatcctactaatatctttagtatgttccagtcatttgtttaaacaacacactaaaagttaatatatatttttataattataaaagttccccagttattgtacagtacacaatacaaatcgcccacaaactattatttagctcctgccaattttgagaggacatgatatactaaaagatttagcatttctcacaaaaatcacatcaggaaatacgtatttacaaaatcaaatacattatacaaaaaaccatcacatgttattcggtaaagatgtttttaaataattaaaaagtttattcaactgtagtccaaaaactggaaaagaacattacattatctcacacatacaatctctacaaaagttgcttacctcatatacataatatattcagtcgattgtaaaataaatgttcaaatatct

SEQ ID NO: 347748 - DNA, 414 bp, Homo Sapiens
aaaattccttccagttcgaaggcagataaatctgtaaattattttatcctatctaccatttcttaagaagacattactccaaaataattaaatttaaggctttatcaggtctgcatatagaatcttaaattctaataaagtttcatgttaatgtcataggatttttaaaagagctataggtaatttctgtataatatgtgtatattaaaatgtaattgatttcagttggaaagtattttaaagctgataaatagcattagggttctttgcaatgtggtatctagctgtattattggttttatttactttaaacagtttgaaaagcttatactggcagcctagaaaaacaaacaattaatgtatctttatgtccctggcacatgaataaactttgctgtggtttactaatctaaa

SEQ ID NO: 347749 - DNA, 909 bp, Homo Sapiens
  misc_feature (812)..(812): n is a, c, g, or t
  misc_feature (846)..(846): n is a, c, g, or t
ggagcgaggcctgggtggcgaattcggcacgaggcgagataaagaaatcaaaaagctaaatgaagaaatcgaacgcttgaagaataaaatagcagattcaaacaggctcgagcgacagcttgaggacacagtggcgcttcgccaagagcgtgaggactccacgcagcggctgcgggggctggagaagcagcaccgcgtggtccggcaggagaaggaggagctgcacaagcaactggttgaagcctcagagcggttgaaatcccaggccaaggaactcaaagatgcccatcagcagcgaaagctggccctgcaggagttctcggagctgaacgagcgcatggcagagctccgtgcccagaagcagaaggtgtcccggcagctgcgagacaaggaggaggagatggaggtggccacgcagaaggtggacgccatgcggcaggaaatgcggagagctgagaagctcaggaaagagctggaagctcagcttgatgatgctgttgctgaggcctccaaggagcgcaagcttcgtgagcacagcgagaacttctgcaagcaaatggaaagcgagctggaggccctcaaggtgaagcaaggaggccggggagcgggtgccaccttagagcaccagcaagagatttccaaaatcaaatccgagctggagaagaaagtcttattttatgaagaggaattggtcagacgtgaggcctcccatgtgctagaagtgaaaaatgtgaagaaggaggtgcatgattcagaaagccaccagctggccctgcagaaagaaatcttgatgttaaaagataagttagaanagtcaaagcgagaacggcataacgagatggaggnaggcagtaggtacaataaaagataaatacgaacgagaaagagcgatgcttgtttgatgaaaac

SEQ ID NO: 347750 - DNA, 833 bp, Homo Sapiens
  misc_feature (706)..(706): n is a, c, g, or t
  misc_feature (780)..(780): n is a, c, g, or t
  misc_feature (797)..(797): n is a, c, g, or t
gggggaatgccccatgcgcaccccacagctcgcgctcctgcaagtgttctttctggtgttccccgatggcgtccggcctcagccctcttcctccccatcaggggcagtgcccacgtctttggagctgcagcgagggacggatggcggaaccctccagtccccttcagaggcgactgcaactcgcccggccgtgcctggactccctacagtggtccctactctcgtggctccctcggcccctgggaataggactgtggacctcttcccagtcttaccgatctgtgtctgtgacttgactcctggagcctgcgatataaattgctgctgcgacagggactgctatcttctccatccgaggacagttttctccttctgccttccaggcagcgtaaggtcttcaagctgggtttgtgtagacaactctgttatcttcaggagtaattccccgtttccttcaagagttttcatggattctaatggaatcaggcagttttgtgtccatgtgaacaactcaaacttaaactatttccagaagcttcaaaaggtcaatgcaaccaacttccagggccctggctggcagagtttgggagggcgaatcattcacttcaacattccaaacatcaattcaccaccatcttttttacagggctgggggaccccattcttacttactttcccaaagtgggtctgttaataaggcttgctngaagacaaccctgcaggaagtttggaagcttggggggaacttttgttggcttgaaaggaaattcctggcagggntttccccgggggggttnaaagttaccaactttgcactcgttttttttcaagaa

SEQ ID NO: 347751 - DNA, 1622 bp, Homo Sapiens
  misc_feature (1606)..(1606): n is a, c, g, or t
aggctggaccggtccggaatcccgggatgaaaacttgtcagaatgtagtttctcaggtcacctatgagatagagaccaatgggacttttggaatccagaaagtttctgtcagtttgggacaaaccaacctgactgttgagccaggcgcttccttacagcaacacttcatccttcgcttcagggcttttcaacagagcacagctgcttctctcaccagtcctagaagtgggaatcctggctatatagttgggaagccactcttggctctgactgatgatataagttactcaatgaccctcttacagagccagggtaatggaagttgctctgttaaaagacatgaagtgcagtttggagtgaatgcaatatctggatgcaagctcaggttgaagaaggcagactgcagccacttgcagcaggagatttatcagactcttcatggaaggcccagaccagagtatgttgccatctttggtaatgctgacccagcccagaaaggagggtggaccaggatcctcaacaggcactgcagcatttcagctataaactgtacttcctgctgtctcataccagtttccctggagatccaggtattgtgggcatatgtaggtctcctgtccaacccgcaagctcatgtatcaggagttcgattcctataccagtgccagtctatacaggattctcagcaagttacagaagtatctttgacaactcttgtgaactttgtggacattacccagaagccacagcctccaaggggccaacccaaaatggactggaaatggccattcgacttctttcccttcaaagtggcattcagcagaggagtattctctcaaaaatgctcagtctctcccatccttatcctgtgcctcttactacttggagttctcaacctagagactatgtgaagaaaagaaaataatcagatttcagttttccctatgagaaactctgaggcagccacttatcttggctaaatagaacctcacctgctcatgaccagagagcatttaggataatagaggacctaactgaaggaatccttgtatatgaaaggagttattttagaaaagcaataaaaatattttattcatcatagctctctgctttgggctctgcaggccaccagatacacatgaggcccctacttctcaagctgggaaggccaagagccttccttcagcctttctggttatgttacacctagctgaatgtttacaaggtctggatccatcagccctcaggcacagttgggccaagcagaaagagagaaacacttctgctgtcaccttgaatgaactcaggaatagcttccctctggactgtagaggagctaactgtttggaacagaaaactgctggctgttgattttgtctggttcctttgccaacatctgggcacaccctttgcccagacacgagtggggaaagcagttctttctcctcagtttccaaagtaaatggggaatcccagctttcttttctactagcaaatgaccctaccatttatttctgcctttttcttccgttcattgtgaggaaaaataaaactggttgagagctttgttgtactaattccagcagcatggtagaaggcagctganctgtggtctggctctg

SEQ ID NO: 347752 - DNA, 1191 bp, Homo Sapiens
tgcgattggagaccgcggaggcctacgtcggacccggaggccctgaatgccccatgcgcaccccacagctcgcgctcctgcaagtgttctttctggtgttccccgatggcgtccggcctcagccctcttcctccccatcaggggcagtgcccacgtctttggagctgcagcgagggacggatggcggaaccctccagtccccttcagaggcgactgcaactcgcccggccgtgcctggactccctacagtggtccctactctcgtgactccctcggcccctgggaataggactgtggacctcttcccagtcttaccgatctgtgtctgtgacttgactcctggagcctgcgatataaattgctgctgcgacagggactgctatcttctccatccgaggacagttttctccttctgccttccaggcagcgtaaggtcttcaagctgggtttgtgtagacaactctgttatcttcaggagtaattccccgtttccttcaagagttttcatggattctaatggaatcaggcagttttgtgtccatgtgaacaactcaaacttaaactatttccagaagcttcaaaaggtcaatgcaaccaacttccaggccctggctgcagagtttggaggcgaatcattcacttcaacattccaaactcaatcaccaccatctttttacagggctggggaccccattcttacttacttccccaagtggtctgtaataagcttgctgagacaacctgcaggagttggagctgggggactctgtgctgaaagcaatcctgcaggtttcctagagagtaaaagtacaacttgcactcgttttttcaagaacctggctagtagctgtaccttggattcagccctcaatgctgcctcttactataacttcacagtcttaaaggttccaagaagcatgactgatccacagaatatggaggtccagggttcctgtaatacttaactcacaggctaatgctcctctggtggctggaaacacttgtcagaatgtagtttctcaagtcagctgtgagatagagaccagtgagaacttttgggatccagaaagttttctgtcagtttggggacaaaccaaacctggactgtttgagcccaggcccgttcctttacaagcaacactttcaagtccttcgacttagaggggctttttcaaacaaaaaacagcaggc

SEQ ID NO: 347753 - DNA, 472 bp, Homo Sapiens
cttttggaatccagaaagtttctgtcagtttgggacaaaccaacctgactgttgagccaggcgcttccttacagcaacacttcatccttcgcttcagggcttttcaacagagcacagctgcttctctcaccagtcctagaagtgggaatcctggctatatagttgggaagccactcttggctctgactgatgatataagttacctcagtatccctttttaagagcctgggtggccctgttgcagccctaatgagaaaagtctgcaaaggctttcaaacttatgttagactagtccaaaggtgaggaattttttgttcattataatgaggtacttatatactaatatatggttaatcatttttggaatctagttgtctctctgtggttttctgaggaaaaaaatcacaaatttgtgactcgaacattatgatagtaatacaaaataaatagcattaaaggagaatgagaacat

SEQ ID NO: 347754 - DNA, 1408 bp, Homo Sapiens
ttagtgtggcacagacgatcagcagcgcgtctatgtctctctgcgtgcgtcatggactagagcaactgctttaggtgatataatgtggggcatatgtgctgtgtcattggtaatagtgcgattgtgcatacaatgggccccttagggcccttctccgtgtacgtgcttccctacatccctctaatcttatctgtgcccctctacggtggctcctctatctttcgcgcatgttggaggaaatggtaaatgcctcataccgcagattatatgtgaacccttttggtaccctcaaggatctgttcttctatggacaacttgagtcgcgcgaacatctcatgtggtttgtgtcacggggaaaaaaggatcctaggataaaatgacggcggatcgtgcagttttccatgacgtcgccgtaatagcaatttaggggccccctagggggcgccatacgttctgtgagcccgtatggttgccctctccaatggctccctcatcctggtaggagctcttgtggcgtggaacacacaggtggtcaaatccggcccccgttgtcggtttaacgtgcgagtgtaatattggtaacactggtccaactcttgttgctgttcccggggaaggtgtgtacagatcaaggtacacaacggaattccaagcgaaacggctggacaaaggaagatgcttctttcctgctggatggacctggccggatcgtgtggtcctggacgtcagaaggtctgtaatgcgaggacacaaagtggccatgctcgtgtttccgagagatgcccccacccactgcaagccactgaccatcaggtgccaatagcttgggcaccaactctcagtgccagcagtgccggtgcgcattttcgcactgccaattactggaccccatggatcaagagacaagaaggacatcagttgctccagtcatcgtgattccccgtgccatcttgcacataggaacagcctgtcccccaccagcagccatggctggctggggctttagccaagccacctactgccaggaattggagcctcagttccctcctgtgtcaagtagctaactgcagcagctggactgagggcagagtctgtgggtgcagagaccctgcatgtaggtcacaggttgaggcccagccactctccctggggcctggtgggtaggcaagtagctctggggccacctcaagtgaccaaatgctattaatttccatcctttagcaggctgggccctaggcaggaagctggcttctgggagaggagtgagaacgtgcagggcctgcctagcttgcgtgcttgaggaaggtggcattccgtgcttgcctccttgaggagggtggcattctgtgtcttctgcttatgaagcgcctttcttaaagtttggcaataaatccatttttatggaaaa

SEQ ID NO: 347755 - DNA, 1358 bp, Homo Sapiens
  misc_feature (1147)..(1147): n is a, c, g, or t
  misc_feature (1300)..(1300): n is a, c, g, or t
  misc_feature (1309)..(1309): n is a, c, g, or t
  misc_feature (1347)..(1347): n is a, c, g, or t
tgacacaggagggaactgaggctccaattcctggcagtaggtggcttggctaaagccccagccagccatggctgctggtgggggaaggctgttcctaaggcaagatggcaggggatcacatgactgggcaactgatgtccttcttgctcttgtcctggggcagatggagggaaagccagactgtggcatgggggcccagtttgcacaaggaggctgatgggggctcccgaaccagtgcattgctgctcacctctgctccggccccacgcagcccagagaagacatctgcccctcctgatccttgactactacctcaagaacaaagtgacagtacaataacgataacgaaggcattgacctgtgcagcaggcctcagtggggttggggaacagggcagaaaggccagggcatgttgctgtgacccccccctttctctctttcagtaaacaaaagtgcacatgcagaaatctgggcaggtcctatcggaagctgctctcaccccagaggccccagggagagtggctggacctcgggagccagggcctctgcaccctaacaggctctgcccctcagtcccagctgctgcagcacgatggagactggatgtgcccctagagtcagggacaatgtgggggagaggctgggagaggaccagggtgcagggatggaccaggaaagggaaagaagaaaatgtctcttctcctagaaagttacaggagagcagcccatctggggcttgaaggcggggaagtggcttcggattccaacatacccctatcagcatttgaagaaatgactgggatactggacctgtttcggctgagaaggaaccacagagatccagataaatccccatctgaggaggcacagaagttggtggggattctcttctgaaggctgacatgatcattacaagtaagtttttctaatgtggacatcagagccactctgggatccacctcttcagaaatatacaaggctggacactatccaggggcagagactagactaggggaccccttaaattcctcttccactcttgaatcctccagacctaagccctccaatcatagctcactgagaggaaggggctgcagaaaatgtccttgttttgcaaaaaaggaaacagggccaaagagagagaggnccacacagctaatgtcctcctcacaaagaggcctctcatctccctcaagaggctccagctgggtcctacgttccccccaactgagggatgaacctagagccctggacccaaggcctctgcagctactcagaataggtgggaggaggggctggnctttgaggnctgccttagccatgaaggctctttgtcctaggaatagnctggagaatgg

SEQ ID NO: 347756 - DNA, 1334 bp, Homo Sapiens
  misc_feature (634)..(701): n is a, c, g, or t
  misc_feature (873)..(903): n is a, c, g, or t
tggatggtgggaaagcggtagagggcaggaaggcattgagggataacaaaaaggttttgaggaaatcagggcataggactgtaaacttaacatcggatcgtttcaaaaatatcccgctactttggatttcctagctccataccacacacctaaacctgtattatgaattacatattacaaagtcataaatgtgccatatggatatacagtacattctagttggaatcgtttactctgctagaatttaggtgtgagattttttgtttcccaggtatagcaggcttatgtttggtggcattaaattggtttctttaaaatgctttggtggcacttttgtaaacagattgcttctagattgttacaaaccaagcctaagacacatctgtgaatacttagatttgtagcttaatcacattctagacttgtgagttgaatgacaaagcagttgaacaaaaattatggcatttaagaatttaacatgtcttagctgtaaaaatgagaaagtgttggttggttttaaaatctggtaactccatgatgaaaagaaatttattttatacgtgttatgtctctaataaagtattcatttgataaaaaacacacaacaaaccctaaacacacaaaccaccttaannnnnnnnnnnnnnnnnnnnnnnnnnnnnnnnnnnnnnnnnnnnnnnnnnnnnnnnnnnnnnnnnnnntcaatccactcatgtcactcgtccaccctttccccctttccctttccctcaatcggattgcccatccctcacctccttttacactttccctatcccttatacagccttttcgctttggcgtcacccgcgaccctcccccatgtaaaatacttttccgattctgaactcacannnnnnnnnnnnnnnnnnnnnnnnnnnnnnntacccttcatttgctccacatcccacattcccccacccccttccccttgccgctcctctcccgtctacaccctcctatcactcttgtgtgccccgccaatagcgcgtccgctcctcgtaccgcctcccccctccccgcatatatatatttccccgcccctcccgcacacagcacagtatgtcttacaccccccacaacaccactttcttcaccgccgcgcgtatacacacacgcgtgttttcacagtccgtgtaccccttttttacacctgccacccttcatacatagcgcctccccctcccgccatatccttacatctttcattctcgcaattatcaccaaatcagccatacctttatctgcacccgcgcctattgaaactcctactactcacccagccacatgcgaccctcttatccgcttccaccgtt

SEQ ID NO: 347757 - DNA, 430 bp, Homo Sapiens
  misc_feature (36)..(36): n is a, c, g, or t
tccataaagtgccccatatggataatacagtaccanccctagttggaaaccgtttaccccgcccagaatttaggtgtgaagaattttttgttcccccccggtatagcaggcctatgtttggtggccattaaattggtttcctttaaaatgcctttggtggcacttttgtaaacagattgccttcctagattgttacaaacccaagccctaagacacattctgtgaatacttagatttgtagcttaatcacattcctagacttgtgagttgaatgacaaagcagttgaacaaaaattatggcatttaagaatttaacatgtcttagctgtaaaaatgagaaagtgttggttggttttaaaatctggtaactccatgatgaaaagaaatttattttatacgtgttatgtctctaataaagtattcatttgtt

SEQ ID NO: 347758 - DNA, 249 bp, Homo Sapiens
tttggtttaggaagatgtctttattctgagaaaatgcatgctgacacatttggggtgaactattatgatgcttgcaatcagtttcaaaaggtttagaaatgtatgtgtctatacacacacaaacacacatgtttaaatacaggttgaacatccctatttccaaaaatctgaaacctgaaattcgtgctccataattcaaaaatttctgagcaccaaaatgatgctacaggtagaaaattccacatctga

SEQ ID NO: 347759 - DNA, 535 bp, Homo Sapiens
gtctcatccaaccacggggcagccatggactacgttctgcacgtcttcagagccccatctaaccgggtgaagggcattcccttccggccggtcaaggctgtggcagtggacctgttcccgcagaccccgcactgtgagatgctcatcctgtttgagagggtggagcaccccaatggcacaggggtcttggggccccacagccctccagctcaacccacaccaggacccccagataacaccctacaagaaactgggaccttcccctcatcctaggcccaggacccattatggggacaggagctgaagggctcccagggccccaggggcggggaaggcatggcttgctggccaggatattcagaggtaggcagccaaagggcacagaaccctgtgccccaccaggattggcctgctgctaggggccaggggccctgaccaggaagacaggtgggttcctgtagcctgttgcccatccccagggcctttgtggactagccaaggctgtgagggccagaataaacaactgctcaacaaa

SEQ ID NO: 347760 - DNA, 571 bp, Homo Sapiens
  misc_feature (162)..(162): n is a, c, g, or t
gagtttttcttacataattgcaattccaggaattatttaataggcaggtcgttaaatacagtcagcctacggtggactagtataatgaaggccacactttgaagggtaataaatacacagcatgcagactgggaggtgctagcaaacaaatggcttactacnaaaagcagcttttagttcagacttagtttttataaaatgggaattctgacttacttaaccaggtttgggatggagatggtctgcatcagctttttgtattaacaaagttactggctctttgtgtgtctccaggtaactttgcttgattaaacagcaaagccatattctaaattcactgttgaatgcctgtcccagtccaaattgtctgtctgctcttatttttgtaccatattgctcttaaaaatcttggtttggtacagttcataattcaccaaaagttcatataatttaaaaaaacactaaattagtttaaaatgaagcaatttatatctttatgcaaaaacatatgtctgtctttgcaaaggactgtaagcagattacaataaatcctttactttaatcacccaaa

SEQ ID NO: 347761 - DNA, 518 bp, Homo Sapiens
  misc_feature (119)..(119): n is a, c, g, or t
  misc_feature (217)..(217): n is a, c, g, or t
ggctgggggacttcacgttttcaccacttaaggatctttgtcccagaatctgcttccaactggtcccccagagtgcttcccctacccagagggggttgaccccctgccgcttgccacanccaggaagttcgacgccccccaccagttgctccagggccttggccacccagctgcttcccggtcctcagccttcccccacgtgggcacacaatgcccngccacacttcagcccctccccctgacagcttggccatggcccggtccacgttctgctgcttccggctgctgatgaccacgtgggccccgtcccgggccagacgtcgggcgatggcaaagccgatcccactggtggaccccgtgaccacggctacccggttagccaggacgcccttcctgtctatcccggtgctgctcatcctcacagaaagcctagcacagggatgaaaccagccctggtagccccgggcaactgctgacagcatagtggttggtgtctgagatgcttcctgctgaatcag

SEQ ID NO: 347762 - DNA, 1145 bp, Homo Sapiens
aggcatgagccacagctccttgcccagaaggaagtttttatcaacatgggtaaatgcacctcccttacttactccagccctggcccagaacttacccctctctctaggctgtgaagcttcatcgagggatcgatatcctagtctccaatgctgctgtcaaccctttctttggaagcataatggatgtcactgaggaggtgtgggacaagactctggacattaatgtgaaggccccagccctgatgacaaaggcagtggtgccagaaatggagaaacgagggtacagagagtgagagagagcctgggtgagaggggacaccacacgggctgagggcactggtccacaatgggaagatggtcagctctcttctttttccagaggcggctcagtggtgatcgtgtcttccatagcagccttcagtccatctcctggcttcagtccttacaatgtcagtaaaacagccttgctgggcctgaccaagaccctggcctatagagctggccccaaggaacattagggtgaactgcctagcacctggacttatcaagactagcttcagcaggatgctctggatggacaaggaaaaagaggaaagcatgaaagaaaccctgcggataagaaggttaggcgagccagaggattgtgctggcatcgtgtctttcctgtgctctgaagatgccagctacatcactggggaaacagtggtggtgggtggaggaaccccgtcccgcctctgaggaccgggagacagcccacaggccagagttgggctctagctcctggtgctgttcctgcattcacccactggcctttcccacctctgctcaccttactgttcacctcatcaaatcagttctgccctgtgaaaagatccagccttccctgccgtcaaggtggcgtcttactcgggattcctgctgttgttgtggccttgggtaaaggcctcccctgagaacacaggacaggcctgctgacaaggctgagtctaccttggcaaagaccaagatattttttcctgggccactggggaatctgaggggtgatgggagagaaggaacctggagtggaaggagcagagttgcaaattaacaacttgcaaatgaggtgcaaataaaatgcagatgattgcgcggctttgaaaaaa

SEQ ID NO: 347763 - DNA, 747 bp, Homo Sapiens
atgacccactgcccccagtccccattttctttaaaaggcctgaacatttccttcctcgtgtcagtcctgaacaattcacattttcagggctctgctcacaggcctgtgacttagcctgcctgcctatgaaaccattagcaaattggaaatacctcttgcaccagtcagaagggggattggtttctcttatatgcacatacattgggtctactgcacaaattacagggctccaagtgtcttatgagagcaggacttgggctgaccatgtctctctgccctcacccatgctctgctctgatttcagatcctaagtgtgaacgtgaagtccccagccctgctgctgagccagttgctgccctacatggagaacaggaggggtgctgtcatcctggtctcttccattgcagcttataatccagtagtggcgctgggtgtctacaatgtcagcaagacagcgctgctgggtctcactagaacactggcattggagctggcccccaaggacatccgggtaaactgcgtggttccagaaattatcaaaactgacttcagcaaagtgtttcatgggaatgagtctctctggaagaactcaaggaacatcatcagctgcaaaggattggggagtcagaggactggtgcaagaatcgtgtccttccttgtgctctccagatgccagctacggtcaacggggaagaacattgcgggtggcaaggctactcccactcgggttctgtaaaaggattgggg

SEQ ID NO: 347764 - DNA, 1598 bp, Homo Sapiens; identical to SEQ ID NO: 97882
  misc_feature (293)..(293): n is a, c, g, or t
  misc_feature (1268)..(1346): n is a, c, g, or t
  misc_feature (1353)..(1412): n is a, c, g, or t
  misc_feature (1465)..(1484): n is a, c, g, or t

SEQ ID NO: 347765 - DNA, 838 bp, Homo Sapiens
aattcccgggatccgagggcgggaagggggcaggcagggaagcggcccgcccttcgtcctgccccttcgccctactctgtcacctccgctggaaggagtggaacccatacttgctggtctgatccatgcacaaggcggggctgctaggcctctgtgcccgggcttggaattcggtgcggatggccagctccgggatgacccgccgggacccgctcgcaaataaggtggccctggtaacggcctccaccgacgggatcggcttcgccatcgcccggcgtttggcccaggacggggcccatgtggtcgtcagcagccggaagcagcagaatgtggaccaggcggtggccacgctgcagggggaggggctgagcgtgacgggcaccgtgtgccatgtggggaaggcggaggaccgggagcggctggtggccacggctgtgaagcttcatggaggtatcgatatcctagtctccaatgctgctgtcaaccctttctttggaagcataatggatgtcactgaggaggtgtgggacaagactctggacattaatgtgaaggccccagccctgatgacaaaggcagtggtgccagaaatggagaaacgaggaggcggctcagtggtgatcgtgtcttccatagcagccttcagtccatctcctggcttcagtccttacaatgtcagtaaaaccagccttgctgggcctgaccaagaccctggccatagagctggccccaaggaacattagggtgaactgcctagcacctggacttatcaagactagcttcagcaggatgctctgggatggacaaggaaaaagaggaaagcatgaaagaaaccctg

SEQ ID NO: 347766 - DNA, 551 bp, Homo Sapiens
taaggtagcgaggcctgggtggcgaattcggcacgaggatccatgcacaaggcggggctgctaggcctctgtgcccgggcttggaattcggtgcggatggccagctccgggatgacccgccgggacccgctcgcaaataaggtggccctggtaacggcctccaccgacgggatcggcttcgcaatcgcccggcgtttggcccaggacggggcccatgtggtcgtcagcagccggaagcagcagaatgtggaccaggcggtggccacgctgcagggggaggggctgagcgtgacgggcaccgtgtgccatgtggggaaggcggaggaccgggagcggctggtggccacggctgtgaagcttcatggaggtatcgatatcctagtctccaatgctgctgtcaaccctttctttggaagcataatggatgtcactgaggaggtgtgggacaagggcttcagtccttacaatgtcagtaaaacagccttgctgggcctgaccaagaccctggccatagagctggccccaaggaacattaagggtgaactgcctag

SEQ ID NO: 347767 - DNA, 400 bp, Homo Sapiens
  misc_feature (35)..(35): n is a, c, g, or t
ccctttgctttaataacatttatccacaatctgcnagttactttaagtccagcatttggttaatttcacctgcagggactacccaaagaggcaacatacagaatcctaccttcagtaccctctctccattttcatttaatcattctgtagcctatctcctaaataaacatagaagttaaataaatacattgtgcttcaggtaaagtctcatagctttcttgccaaggaactcgttgttcctaagttctgagacagagcaagtatgaatggtctactcatttattgccactaaagtgtaaccctcaaggggatactctgtcttgttcctagttgtattccttatacctagcagagtaactgaaacaaccagaggatcaataaagatttgcagaaaaataaa

SEQ ID NO: 347768 - DNA, 479 bp, Homo Sapiens
  misc_feature (16)..(16): n is a, c, g, or t
  misc_feature (42)..(42): n is a, c, g, or t
  misc_feature (56)..(56): n is a, c, g, or t
  misc_feature (75)..(75): n is a, c, g, or t
  misc_feature (129)..(129): n is a, c, g, or t
cccgacccaaaccccngggaatttccccaggtgaagggaaantacccttggttaancccaaagtgaagccccganagttaccgcccaacccagatgaccccaaataggggcctagcccacaccagaagncccaacccatggattaagagggttggagttttgaagtccatatgatattagccccaaccctctgaggtggagagaggggttagagatggagttccagcctttatatagagattgagtcaattaatcatgccctgtcatgaaaccccgagagaaactctggtcagtgatgctcaagtgaacttccctggttggcaatactctggtgtgttctaggagggtgacatgtccctgagggcacagaaactttgtgtttgggatcctcttacaccttgctctatgtatgtcttcttttggctgttctgatttgtatccttttgctataataaactgtaatagtacgcatagccaaa

SEQ ID NO: 347769 - DNA, 409 bp, Homo Sapiens
tgcctgctcagagaacagagatgacttacaggggattcaattgtgtaatttcaaatacaagcttagtagaaccccattcctgatacagatgaaaaatgactcttctccaccacagagtagggatattttcatccgccgtggtaatggcttacctcggcaggtcctacctcttcaggtcctttctgtgtcctcaggcctccctgagtggttgagagctgaatggggctgagagcttcaagttttcatagactgattcctctgctcaccttcacccgctgcatctcccaccagcaggttgctgttcagcctatatgtgtttccttgatgattagagggttagggtctcctccactgtagagaaaatgcaaatggtttctactaggtgtcttagaactgactgctgaagaaa

SEQ ID NO: 347770 - DNA, 291 bp, Homo Sapiens
cctgaaaaataattgcctttattttctctcgttgcctccttggtttcagaagagagtagttttattataaatattgtatggactttgtatattaagagaggagctcatttcagattcctaaagaaatagacattttactgttattttgaaagggcatcttttgatttttttgttgttgttgttcacttttggcatatgtatataagtaatattgacggtgatatgaaaacttttgttatgtgaagatatttaagtcagaaaattgttaaataatattacttcttttccaaa

SEQ ID NO: 347771 - DNA, 2089 bp, Homo Sapiens
  misc_feature (50)..(87): n is a, c, g, or t
  misc_feature (1533)..(1556): n is a, c, g, or t
ggatgtatcgactcactatagggcgaatcggcctcatcgcggtggcggcnnnnnnnnnnnnnnnnnnnnnnnnnnnnnnnnnnnnnnatcaggccaaatcggccgagctcgaattcgtcgagagcggactttttagagatcaatcgagatagtgcagatatacacagatctagagactccaggagacgatgcgacactcagcctgaaaagatttggaagacccaaaatgaaaactgattattgaatgaaattaaaacctaaggtaatttaagattagagaaccatgttaacactaccgtttgatgagtctgttgtaatgccagaatcccagatgtgcagaaagttttctagagaatgcgaggaccagaagcaaattaagaagccagaaagcttttccaaacagattgtccttcgaggaaagagcatcaaaagggcccctggagaagaaaccgagaaagaagaagaggaggaagacagggaagaggaagatgaaaatgggttgcctagaaggaggggtcttaggaaaaaaaagacaacaaagctgcgattggaaagggtcaagttcaggagacaggaagcgaacgcgcgcgagaggaacaggatgcacggcctcaacgacgctctggacaacttaagaaaagtggtcccctgttattctaaaacccagaaactgtccaaaatagagactttacgactggccaaaaactacatctgggcactttctgaaattctgagaatcggcaagagaccagatctgctcacattcgtccaaaacttatgcaaaggtctttcccagccaactacaaacttggtggcaggctgcttgcagctcaacgccaggagtttcctgatgggtcagggtggggaggctgcacaccacacaaggtcaccctactctaccttctacccaccctaccacagccctgagctcaccactcccccagggcatgggactcttgataattccaagtccatgaaaccctacaattattgcagtgcgtatgaatccttctatgaaagtacttcccctgagtgtgccagccctcagtttgaaggtcccttaagtcctcccccaattaactataatgggatattttccctgaagcaagaagaaaccttggactatggtaaaaattacaattacggcatgcattactgtgcagtgccacccaggggtccccttgggcagggtgccatgttcaggttgcccaccgacagccacttcccttacgacttacatctgcgcagccaatctctcacaatgcaagatgaattaaatgcagtttttcataattaatgaggaaaatgaaaataaacagtggtcattcacctcccctgtctaattaagacaaagcagatgcttgtgggctgagtaattggcacaactctatctaaggtgtttactagtttctgaagtgtgtttcaactattgtgagaattttctatgtaataataaatctcttttcgtatgagaacttctttcccttcccttttgtctgtgaagcactgtgattctgtttctactggaaagannnnnnnnnnnnnnnnnnnnnnnnaaacttatttaatttgtttgaacaaggtgtctaagaatatactgttgaataaagacatgcacacagcataattcaatgtctattttggttgtacagtaattataaaatgcatgttattaaaaccagatgagtaaaatgatgtgtttataattattaggaattatatattatgtatcttttaaaaattgaaattttaaaatatggagaatatcactaagctgacaatgatattgggagatgaatttgcaacaatataaaaagctatgcaattttctttttattaaggatgaatctaaatgcattcaattggtaactattcctcttcaagtatttgcagatggggcaacatgatatttgggtagctgatgtcataattcggggacaattatctcaatcatcaagaaaaaaatttcagcacttgttttgtattattcagaaattaactgtacaggtttgttatcacaatgtataattgtgtttttccaccccacatttttaaggcaattaaatatagatatttccacctcgtaaag

SEQ ID NO: 347772 - DNA, 1594 bp, Homo Sapiens
cctgaattacaagggtcttgtcagagctgcgactgtaagagaacaattgaaaaagcttcttgtcaagtttcaagtgcccaggaagtctagtgaaggtgacccggatctggttctgaggtgcattgtctccggcttcttcgccaatgcagcgaggtttcattctactggagcttataggaccatccgtgatgaccatgagctgcacatacaccctgcgtcagtcctctatgcagagaagccgcctcgctgggtcatctataacgaagttatacagacctccaagtactacatgagagatgtgactgccattgaatcggcctgggctgttgggagctggctccacacttttatcaacaaggaacgcacctgtctctgaaagccaaaagggccaaggtccaggacccgtgagagggagcccacagttacagttgcagggactgctggcgtcctctcctccatgctgctgcccctggtcccaggtggggtgagctggcaccagctcctgtggaatgtttggttgctctgaagtgggctgcggcctgttcattagtcctttcttcccgctgcccacagcatttgcatccttgctgggatcctggaggactttgtgcatgggcaggcatccttctgtgctgcagcgggcagagtgggagttggctcactcagcacgctcactaacccagcatgccacttccagcaggcatgcagtcctggcccagctctatgggaaacaaggaggaaagttagccactgaaggccaaaacaccatgtggggtggacagagggtttgctgggctggctttgctttccctgctggggccacagctgtgttaaccaatgaggtctgctgccaggtgtgaacaagcatgtctctacgaatgaacgaaacattggggatctctgccgaaaccaccaaagggcatgtctgatgggcacagggtctcccaaacccagtggcttctgtctgtcctcagcccttgtccctgtttatctgcagccaggagacttgcaaggggattggtgattgacagagaggactcgtgcgctgttttgtgttaaccagaggatttgtgtttcacaggtaagcttaacgtcctctcagagtgtagtgccaggtcctgggtgccaccctaactgagcaacttcaggagagttcatcagctcagatcccacagggcctcctctttagcaggaattcacaacagtttggatgccctaaacttctgtagctcaggaacatcactggtgtatttgtttttttgtttgtttgcttgggttcttgcaagagcgcgtggggacagttcttccagcaggcactggttttgttgccccagggctgctttgctgtgatgatgattgcatttcaacacatgccagatgcagattttttcccccttactgtttcaatgacctttattttaaaaacacatagcttgaaaatttatttttatactgatattagtttggatgtgccacttttggcaccaaacgtgtatgtcatttttatttccattttataaacatgtaaataatagtgataacttgttaataatagtaaacctttatacctaaagtaaatgtcttccctcccaaa

SEQ ID NO: 347773 - DNA, 454 bp, Homo Sapiens
  misc_feature (20)..(20): n is a, c, g, or t
ccacgggcccccctctttanacaggaaattccacaacagtttggatgcccctaaacttctgtaacccccaggaaacatccactggtgtaaattgtttttttgtttgtttgccttgggttccttgccaaagaagccgccgtggggacagttccttcccagcaggccactggttttgtttgcccccagggcctgctttgcctgtgatgatgattgcatttcaacacatgcccagatgcagattttttcccccttactgtttcaatgacctttattttaaaaacacatagcttgaaaatttatttttatactgatattagtttggatgtgccacttttggcaccaaacgtgtatgtcgtttttatttccattttataaacatgtaaataatagtgataacttgttaataatagtaaacctttatacctaaagtaaatgtcttccctcccaaaaaaaa

SEQ ID NO: 347774 - DNA, 497 bp, Homo Sapiens
gcttcaaggttcttgatgagtgagtgacttgggccagtaactcacttcccccttggaagtccagagggcaacacggcctgccctgatcttgggaggcactagaggaatgaaagcagctgtgcacccaggacatgtgtgtacacagtgaggggggacacacccgtgccttcccttctcctcgggctgttttcttctctcacgtggccactgtcatcccggaactactgtggcccaactccctccctgaagccctgaacccgaagggtagggattccggagcccctgccacagagactacactacttagagagtcattccaaaagacaaaggggaacctccaaaatgccttccttttcattctgaggagtctgtcccttctgtgcatatttatagtctacacgggagtgtctgatgcaactttgaattatgcaaatgggaaatagtgcacttgtgtacaatctttatattaaaaaatgtgaaataatgcaatcaccaaa

SEQ ID NO: 347775 - DNA, 2019 bp, Homo Sapiens
ccaggctggtaccggtccggaattaccgggatatcgtcgaccacgcgtcggaactagtcctgtactggctgtggaagcctatcactgggacaggaagccagtggctgcaggagacaggcctcagcgcatctcgtctgtcaggatgggctcacggacaccttttcttggtagcagggagtgtctctgcactatggaaactttccctcttctagagcggattgggagttgcctgtattatgcctgaaccctccttgaactcatggtcctggggaaggcgtcttggaaccagaaacagcaacaggaaaggagcctccctctgaagggtaggatgccggcctgaggccctccctcttggctctcccagggcctgggctaccccgaggccccagcagctgctgctgtggctgtacttgcttttaatatttcccatacatggctgttgtccaagttaagtcaccaaatggtgctagaggggatggcagagagcagcttgtccagctcctctccatgacccggttaacacacgagttaaacaggcctagagcttgtctgctgtttgacctcttttaagacccggctgtgctgcatctacaaaatgaagatgacagagctagccgaggtcttcagcaaggaagaaaggggtcagtgtatatgaaagggttacctgggcagtgtcattccctccatctctgtacgcagccctttgggaaccatcacaataaggaagaggtgagggcagaggtgaaggatccactgcccaggcaaggtgctaccatgtggtgggagagtgtgaaccctcaagtgcactgggaagctttggggaaccacagtctcttccacccttgggtcgtgtgtcgtcctcttctcttgatgtcagggaagcccctatgcctccttcccgtggtggggctatctctgcagagaatcgggtgcccagcttaatgctgggcaaggactggaggaagctccagatctggaggtggcagagatactggatggaaacctggagcaagggttttggaggggaagtgaggaaacaggttgagactatcttccatcagagatggcaaaggccacaggtgatctgagaactatttttgtctgaaaagaaggcatgcacaggctctctgcttttgacaggtggcgttgcagtgggaggaaggcagcttcctggcggggagatagaaatactagaacagctggtaccaagttattgaaaatttaaaagcaaacaagacacagcagcccccaggtggtgtgttctactgaggaaggctacggcagaggaagggcaagaccgtttcccccaatggtcttgaaacggaagaggaaacagggagggctctttggatggtttggggacctggggctgtttgtatcccagtattagctcctgttactaagggtctgctctgcgccaggtcctcagcatgcgttgtctttattccgcgtgacaatcctatgggaaggggcctccacctacgtaacagaaatgcggctcagaaagaccaagtgacagctagtgagtagtgctgggcctgaaccccaaagtccacactcttgctatagccgctgaggcaggcagaagagctccttgggaggaaagtaaggggcattcaaagccttctctgaatcactccccaagccagagtagacctggttccagttgtcccccccttgtttccgggcagagtcaggcaggtgtcataccatccctccccgcccaaccagtgctggccagactcccattcaccgaccttgactagacagcgaaaagccaccttttagtattcatcccaaaaggtccaggcggtcagtgtgatagccacgcagttcctaagggactgtaggtctaggaatcattaggaaactcactcagccaccctcgatgcccccatcttccccacactgcccttggcctccccgctctgcacgcctggagtatttgcactggtctagcctactccaggtcagactcattaggaactcaagattctcgtaaagaaagttgtttccaaa

SEQ ID NO: 347776 - DNA, 1842 bp, Homo Sapiens
  misc_feature (34)..(34): n is a, c, g, or t
  misc_feature (56)..(56): n is a, c, g, or t
  misc_feature (89)..(89): n is a, c, g, or t
  misc_feature (93)..(93): n is a, c, g, or t
  misc_feature (98)..(98): n is a, c, g, or t
  misc_feature (100)..(100): n is a, c, g, or t
  misc_feature (102)..(102): n is a, c, g, or t
  misc_feature (104)..(104): n is a, c, g, or t
  misc_feature (106)..(106): n is a, c, g, or t
  misc_feature (129)..(183): n is a, c, g, or t
  misc_feature (199)..(199): n is a, c, g, or t
  misc_feature (208)..(208): n is a, c, g, or t
  misc_feature (216)..(216): n is a, c, g, or t
  misc_feature (265)..(266): n is a, c, g, or t
  misc_feature (273)..(273): n is a, c, g, or t
atcccaccccaagccaacccgaggagtgtttgcngctatgagatcacctgctcccncagctcaacaacaaaattaaataacaccacggnagangaganangnangnggaggagggaggaagggacaagnnnnnnnnnnnnnnnnnnnnnnnnnnnnnnnnnnnnnnnnnnnnnnnnnnnnnnncacgaagctggaggcngacactganggagggcnggaggaggtgaagaaggagagaggggagaagaggcaggatctggaaacnncacacgnaggaggaggaggagatgcgggatggagacctggagtcaggtggcttgggagagcttaatgaaaagagaacggagaggaggtgtgggttaggaaccaagaggtagccctgggggcagcagaaggctgagaggagtaggaagatcaggagctagagggagactggagggttccgggaaaagagcagaggaaagaggaaagacacagagagacgggagagagaagaagagtgggtttgaagggcggatctcagtccctggctgctttggcatttggggaactgggactccctgtggggaggagaggaaagctggaagtcctggagggacagggtcccagaaggaggggacagaggagctgagagaggggggcagggcgttgggcaggggtccctcggaggcctcctggggatgggggctgcagctcgtctgagcgcccctcgagcgctggtactctgggctgcactgggggcagcagctcacatcggaccagcacctgaccccgaggactggtggagctacaaggataatctccagggaaacttcgtgccagggcctcctttctggggcctggtgaatgcagcgtggagtctgtgtgctgtggggaagcggcagagccccgtggatgtggagctgaagagggttctttatgacccctttctgcccccattaaggctcagcactggaggagagaagctccggggaaccttgtacaacaccggccgacatgtctccttcctgcctgcaccccgacctgtggtcaatgtgtctggaggtcccctcctttacagccaccgactcagtgaactgcggctgctgtttggagctcgcgacggagccggctcggaacatcagatcaaccaccagggcttctctgctgaggtgcagctcattcacttcaaccaggaactctacgggaatttcagcgctgcctcccgcggccccaatggcctggccattctcagcctctttgtcaacgttgccagtacctctaacccattcctcagtcgcctccttaaccgcgacaccatcactcgcatctcctacaagaatgatgcctactttcttcaagacctgagcctggagctcctgttccctgaatccttcggcttcatcacctatcagggctctctcagcaccccgccctgctccgagactgtcacctggatcctcattgaccgggccctcaatatcacctcccttcagatgcactccctgagactcctgagccagaatcctccatctcagatcttccagagcctcagcggtaacagccggcccctgcagcccttggcccacagggcactgaggggcaacagggacccccggcaccccgagaggcgctgccgaggccccaactaccgcctgcatgtggatggtgtcccccatggtcgctgagactccccttcgaggattgcacccgcccgtcctaagcctccccacaaggcgaggggagttacccctaaaacaaagctattaaagggacagaatacttcctgttttctcagtggtctgattctaggcgcggtggggaaacatttaggtattaaagaacagacttcttccggaaacc

SEQ ID NO: 347777 - DNA, 349 bp, Homo Sapiens
ctgactacggggaaaggcctgaggggaagcggcagagccccgtggatgtggagctgaagagggttctttatgacccctttctgcccccattaaggctcagcactggaggagagaagctccggggaaccttgtacaacaccggccgacatgtctccttcctgcctgcaccccgacctgtggtcaatgtgtctggaggtcccctcctttacagccaccttttagtattcatcccaacaggtccaggcggtcagtgtgatagccacgcagttcctaagggactgtaggtctaggaatcattagaacactcactcagccaccctcgatgcccccatcttcccccgtagtcaca

SEQ ID NO: 347778 - DNA, 2045 bp, Homo Sapiens
  misc_feature (881)..(894): n is a, c, g, or t
  misc_feature (1322)..(1322): n is a, c, g, or t
  misc_feature (1397)..(1397): n is a, c, g, or t
  misc_feature (1401)..(1401): n is a, c, g, or t
  misc_feature (1405)..(1405): n is a, c, g, or t
  misc_feature (1412)..(1412): n is a, c, g, or t
  misc_feature (1426)..(1427): n is a, c, g, or t
  misc_feature (1431)..(1431): n is a, c, g, or t
  misc_feature (1806)..(1809): n is a, c, g, or t
  misc_feature (1812)..(1963): n is a, c, g, or t
  misc_feature (1966)..(1968): n is a, c, g, or t
  misc_feature (1970)..(1976): n is a, c, g, or t
  misc_feature (1981)..(2000): n is a, c, g, or t
gatgactagccaagaacagacacaatggttcatgcccaaaaggaacagaagttccaactattgcctgggatcttgcgaaaagcgaggttccctgatccctgggagcctcacgtattttagaagccaagagaagccacatggagactcaaattcgcatcttctctatccacatcatgaccaaaggaacccctccctggtgtctgatcagggctgtggcatcacgaaacattggatcatgacatgtcgggcgatgcttggaagagcccagcatgtatgtatgcacacattgtgtgtgtgggaaggacaaaaccactctcacaaaaaagggcaccaggactgctctccaaggaactggacctgtccagacagttacactccaaggtcattggagagaacttctgtatgggcaagcctgagagggagaggaaacaaaagctgtgtcctggcagaaggtctgggtttgcagatgggtgccctgaatggaactactttaactaatccatagggacttctggtatgctttcctctctttttaaaggaacttcgtgacactaaacattagcccaaaggacttcttagccttcaattgggagatacctttggtctgctcctgcaccaaagccatatgggtggaagtcagttggcctccctggttctgcagagggccagaagaatgagagagaggaagactgctggcagggaaatcgaggaggcgagactagaactgcaccagcttccctgatgtctgcagccatggctttgcagcgcagacagagcttctctgggatgctgggattcttgcctgtatgaatgcatcaagtattcatttattgcccgaataggcattgcattaagtcctctgtaaggtgtcaggcaagccnnnnnnnnnnnnnngatgcgtaagtcctaaccccccaacagaggtgttcacagtgtagacagggaaaaaatgtataaacaaatgtgtaaaaagagaaatcagctcatggcttaggatggaattagagacaggtgagggacactcaggagctcattttccagctgctcttcagagtggaagggctggctggatcgggtaggtaagaatagctggattttttagaaaagaaatggatacagtctaaagaattaactcacccggtactttattctaagaagggtctggcatccatatgaggaaaaatgctcagctccaggaaagatggggagtccaagtggattaatgatgtcatgcataattttaagagacaagggagaaaacacaatgtatagccagagaaggagaagctcccaaccaaatcctactaggaagagagtggacngcagatgaatctgtaactcatgtttccctgtatcaaagggaacctggggaaggaggggaacaagctagcagtatntccncctntctctcngctcacataagcannccgnccatctgagcccatcgtgctactggtatgtgtatgtgcagttacacagttttctgtatcatagattctagtgtgtttatacaaggagacatctgtggtttccccaaccgttccaaaaggctatttcaaaggaaccagccaacgtatgagaaatgaatgtaacactgtggacattgacttcccgcataaggcagggtgaccccctgaactccagatgtctgcacagtatcttatgtgttgttttccgttgtgacgaatgtgattggaacatttggggagcacccagagggatttctcagtgggaagcattacactttgctaaatcatgtatttattcctgattaaaacaaacctaataaatattaaacccttggcnnnnaannnnnnnnnnnnnnnnnnnnnnnnnnnnnnnnnnnnnnnnnnnnnnnnnnnnnnnnnnnnnnnnnnnnnnnnnnnnnnnnnnnnnnnnnnnnnnnnnnnnnnnnnnnnnnnnnnnnnnnnnnnnnnnnnnnnnnnnnnnnnnnnnnnnnnnnaannnannnnnnnttttnnnnnnnnnnnnnnnnnnnnaaaaaaatttttataaaaatttttttttgggggggggcgcccccc

SEQ ID NO: 347779 - DNA, 486 bp, Homo Sapiens
  misc_feature (21)..(21): n is a, c, g, or t
  misc_feature (29)..(29): n is a, c, g, or t
acaaaacctgtgaccctggcnaaaaggtnctgggtttgccaaaaagggtgccccctgaaatggaaactacttttaaactaaatcccatagggaacttcctggtaatgcctttccctctctttttaaaaggaacttcgtgacacctaaacattcagccccaaaggaccttccttagcccttcaattgggagatacctttggtctgctcctgcacccaaagcccatatgggtggaagtcagttggcctccctggttctgcagagggccagaagaatgagagagaggaagactgctggcagggaaatcgaggaggcgagactagaactgcaccagcttccctgatgtctgcagccatggctttgcagcgcagacagagcttctctgggatgctgggattcttgcctgtatgaatgcatcaagtattcatttattgcccgaataggcattgcattaagtcctctgtaaggtgtccagcaagccaaaaaaa

SEQ ID NO: 347780 - DNA, 1661 bp, Homo Sapiens
  misc_feature (21)..(21): n is a, c, g, or t
ttgcacaggaggaggcggtanggaacctttctcctccgcctggttctcgcttccacccgggcccagttggggacggacgcactagaggcgacctaaacatggagacagcgggcgctgcaactgggcagccggcctctgggctggaggctccggggtccacgaatgaccggcttttcctggttaaaggtggaattttccttggtaccgttgctgcagcgggaatgctagctggatttattacaacattatcattggctaaaaagaaaagccctgaatggttcaataagggaagtatggccacggctgcattaccggaaagcgggtcttcccttgccttgcgagctctgggctggggctccctgtatgcatggtgtggggttggtgtgattagcttcgcagtctggaaagctttaggagttcacagtatgaacgactttcgaagtaaaatgcaatcaatatttccaacaattcccaagaactccgaatcggctgttgagtgggaggaaacattgaaatccaaatgagatgagcatggatgaatttcaaaatgcttgttacagaaaggggtggctctggagacaccatgacagcaaaaggactgggactgatttctcccaggaacatgggcagattgctgactgaaccagtgcactggatagcattcagcctcatcacaggagagtatgtgtgtgcgtgctgggggagggtaaagttttcccacagttaagaagactatttaaaaatagtaattacaggaataacttccttatgtggaggggaccccataggaaatgattctgtttgtaacagttgaagcaaatttcatactaaaaaagtttataataaaagtatgataagaaaatatttataaaacagaccccctaatagcaatagtactgcaatgtgtctaattaaaggagtttcaagagcctttcttgtcaatatatgacagaacttggaagtcttattctgattagccagactacaaagtgacagtcacctggtaagtcctgtatggtaggaagtgggtgtggctctcgggtcctaaatgtggtctgtgctttacagccatcacacacatgctagttatttacctgatgcccttgcttgaaggccctataaattcttatacttaaaacaaaaagccagtaatgagttgtggatcaccccaaaaggcacagttgggctaaaataatgatgatatcaggggtaaacatatttttttgagaagttggtctggatctctgaacactgacaatttgtcattttgtctcagttgtcaaagtaaaaaaagcccagttgtcatccgtcttcaatatttttaaccagaaagtcacctgagtacggagtcccaatataaagtatttgggaccacctccctaacaaagctgttagggtaaattctgtgtgcacgcccaactccctcctgtcttccacagtctcctacaaaaaaaacagatggagaataatgtctacatgcaattgtttttactgcaattgtattttaaaatattttcaagaagagaaatactttaatatgtcaatatgtccagagaaaaaacctgtagttaaatatcagttgtgcaatttcttcctacttgcctaggctctaattagtcagcaatcaggtttaataaaggacatttgaaatttcaaaaaaa

SEQ ID NO: 347781 - DNA, 570 bp, Homo Sapiens
  misc_feature (43)..(43): n is a, c, g, or t
  misc_feature (49)..(49): n is a, c, g, or t
tcaatcatctgtgggtcatttgacttgattttttaagctaccntgaatntccagaatgcaggttctaaagaaatctagatgagagaaagtatttgaaaatgatttttaaatgttttttaaaagacacatctgacatttttaacaacttagtaaaagttgaaatgaccattctgtgtagtcataaaagaaacacaatgaagtgtatggcctctggagttagtcttagtaaaacttattgctctgtgtcaatgttaacctgtctcagatcaagtaattctttcactaggttgggtttggggaggggggaaaagaggggcttttcctaggagaacgataagaaatggaaagactccttgaagtgttgcaagggaacctcctagcactgtgaaagtcagaatcgcctcagcatttccatgacgcacattatgcaaatctctttagcactattttaagtttgaaaactttaacaatgaaggggaaggggaagatttccaccaactgaatcatttgtgcacgtgtatagctcaaagagcttagacttcaaatatatctggtgaatgactctttgaa

SEQ ID NO: 347782 - DNA, 1174 bp, Homo Sapiens
gcttgtcctcaggtaataaattatgccagaagatgaatacggtgatcaaagacagacattttactgcctttggtttcctaaaaagatacatggttaaaagatgaagaaaaaagaatgtagggtattataaatgttcaccagccatttaagggacttgttcgcgtccttattcgtttcctcccaactttgtctagctcctgcagtgtgatagtcctcggacagaatcacaaagcctccttcagcagagttcctcccccttcagaggacatcctacacagtctccaggatacagttatcgaactactgcactgagacctggaaaccccccctctcacggttcttcagaatcatccctctcttccacgtcctattccagccccgcccaccctgtgtccatagactcgttggccccatttacggggacaccagggtattttagcagccagccacattctggaaacagcactggcagcaatcttccaaggaggagctgcccttctagtgctgctagccctaccctgcagggaccctcagactcgccaacctcagattcagtttctcagtccagcacaggaactctgagttccacctcctttcctcagaactctaggtcgtcattgccatcagacttacggactatcagtctgcccagtgctgggcagtcagctgtctaccaggcctccagggtatctgcggtttccaattcacagcactacccacaccgtgggagtgggggtgtgcaccagtaccgactccagccactgcaagggtcaggagtcaagactcagacgggactttcctagggcttctggatttgggcaaacagaactgaatgagcccatagctgcttccttccagctgcctctggaacctaggccgagcatattgctgaggaacggggggtacaaggtgccagaggattgggtctggtggacaagaaacaagacttgtggtcacaattggcctctggccttggagaaagctgtaaatcttgtctgaagcagagactataaagaagtttctccctgctgtcaagggtacattgttgacaagcaaatggtgtttcggttagtaacggttctaagtgcaatgagttgtgttgaagcctccgtctcccatccttgcctgtagcccgtagtcacttgtgcagtgaggacatctttttaaatttaaa

SEQ ID NO: 347783 - DNA, 1415 bp, Homo Sapiens
tatcgagctcggcacccgacacctctagaggctgtaataggacgtgcaagagagggatgattctgaagaaccgtgagagggggggaatccaggtctcagtgcagtagttcgataactgtatcctggagactgagtaggatgtcctctgaagggggaggaactctgctgaaggaggctttgtgattctgtccgaggactatcacactgcaggagctggtagctgtatctggaagggctgtaaactgttgctcctttagagagtgctgagcttaatgtctctgggccttctccatctgcagggtctgagtctttctctgtgatgttactctcccatgtgggagagggctctcccttttgggccaccctcacgctgcttcggaggaccttggggatgctccctccttctcggagtcgttctactgatgtgggaaccatccacctactgctgatattctcttgaggtctgcagtgagatgaagaagtgcctctggaatctgatgggcttaccgcctccaaatgggacatagaggaatgagatggggagaattttttgtgaggggaagatggagttcgggctgaggatccctgcacaccatggggcaccagtgtcggaaacggagttactgctgccttgcccagcttcctgcagacttgcttttgctctgtgcagagtcacctccccccaccagcagaattttccttagcttcttgtttccgttttcggtactccagcagggatacttttttcctctgtggtgggttctggggggcagatgggactccttcacaggccctttcaccaccaggtgacaaggatccacgagagaggtctttcattaagccatgttcatatctgctggaaaatccttctgcaggggaacaatatcccccatccaaatgtaaaggcttcctatcccccactagaggagatcctcgatacagtccatctgctcgaggcatagcattcaaaggggagtaggcatacatcaagttgaactctgtccgaaatgcctggtctgagtttctcacgagggtctgatgtccatctccacttctgcttgggaaaccagtctcagaagtgggtccgagggagggatgaggagccaggtcagaatgacctgagttgagtagggaaggtctatcagcacagctgttagtgttggagtcaaggtatcctacttttgccaaatccaggtcttttcggtgacaaagctcaaactgtagaggagtgttgcagcgactagcagtagtaagagatgtgactggtgaaaacatgaggctgtatccatttcgacactcctcttctcctgggtgagatgagccaggtgtggccagctggggactctttgagcctgaattgggagggggtggtgtgactggagacagagcctcgtgccgaattcgccacccaggcc

SEQ ID NO: 347784 - DNA, 462 bp, Homo Sapiens
gtccccacccacccccacatttgcacaccttccacagggtcaggatggagtagctgccttgcgaggtggtgagactcctgtctctggaggtctgcaagcactggtagtgatattgcagcagacaaggtctgggttgggcgtctgcaggaggacaccttgtgggacatctgaggacatccgcagattcttgtcagcctgtgaactaggccctgcctctgtcacctcattggtccatgaaggagcagccaggggtggtggaaggagcactgggctaggggtcaggggtcagagattctgtcctgctcctgggatgcactggctactcccttagtctactcccttcccctctctggtcctcagcttcctccatcatggaggagatgggatcatggattttctgggcataagtggctgttctgggagtcattccaaagagagaataaaactcctgatccaaaaaaa

SEQ ID NO: 347785 - DNA, 901 bp, Homo Sapiens
ttttacagtgctgaatttcactttactggaggatccaggtgacacagggcacagggagagaagcctaggactgctacgggagaagcacacctggggccctccccacccacaggcaacaccacaggctgctgtgcccagctcaaggtacacccagcctggtcctcagtgggtgggtcactgtccagggacagcctccaagcagaggggagcacccacgccctgcagcaggtctcagtcagcttctacatctgggtgtccctgacataggactgggacagtctggtctggactgtgaggtcacacccaaaccctcctattccttcccagggacaagtggggcagggccccctggcacgatgggctcctcactgccagggaatggaaattgggacgaggaagcacacacattgccccagggacaagaaggcatgaatgaaggtggggtcccgtggagactgatatttaggtaaaaatcgagctcagccggggttgcaggagctgaagcatacggcacggcacggcacagactcacatacaactcaagcgtgcttgggacagcaggttgtgaagcctcacagcaccggcccgcctactctggaacctccagggcagggctggggtttcctccccaggtcatttcatcccctgtaaggagggacacgcggccggcttctgcactgcccaggtgagcctctgtccctcacagtgcccttcgggcccctctggcctttaattcactcagggggtgaacccagggactttcaagtcttttagtaagggctgcaaggccaagcgctgagcggtgggtcagctccactggagagggggcacccaggggagccacagcctatgggaagggccagggcccactcagcccagaagaaccaaaactggattttaa

SEQ ID NO: 347786 - DNA, 2216 bp, Homo Sapiens
  misc_feature (1619)..(1678): n is a, c, g, or t
gtctactttgatctgagcagaagaatgggatactttaccatccagacctatatcccctgcacactcattgtcgtcctatcctgggtgtctttctggatcaataaggatgctgttccagccagaacatctttaggtatcaccactgtcctgacaatgaccaccctcagcaccattgcccggaaatcgctccccaaggtctcctatgtcacagcgatggatctctttgtatctgtttgtttcatctttgtcttctctgctctggtggagtatggcaccttgcattattttgtcagcaaccggaaaccaagcaaggacaaagataaaaagaagaaaaaccctgcccctaccattgatatccgcccaagatcagcaaccattcaaatgaataatgctacacaccttcaagagagagatgaagagtacggctatgagtgtctggacggcaaggactgtgccagttttttctgctgttttgaagattgtcgaacaggagcttggagacatgggaggatacatatccgcattgccaaaatggactcctatgctcggatcttcttccccactgccttctgcctgtttaatctggtctattgggtctcctacctctacctgtgaggaggtatgggttttactgatatggttcttattcactgagtctcatggagagatgtctgttctaagtccacttaaataatcctctatgtggttgataatgatctgaatctgtttctatgtccaaacctggtaaattttataatgtcatattgtttgtgcccagccctcctttggttagtgtactttgaacttcgatgtttgctgtgtttcaaacctgcaaggcaaagtaaaattagagcaagaacattcaaaccaaataagatatttttcagctacagcaaataaaacagtgaaagccctgactatttacagtagtggtatccttactagattcataatgcaattagatagaaaaggtccaaaactgtaccctatgttcactccgggtcaagttgtgataaatttgatcccaatagaatacctccctcatttaagaaaaatcataactcactttaaatatgaaagcctagtccagaaatctattacacctttatctcaagataggaagaaaatttcctccacattcatgtacaatgatgtaaatatttcaataacttagaatgcttcaagtttagtgcatgcatctctttagatccaaaataaatggactgaagttatcatcctattgtcttttattttgtgtccttgggctataaaagattcctgaatgtaattataaggatttgggtttggaaatggagggaggaattttcattgccttctccctcatgcatgaagattcgaacagcttattttttccttgtatgacatattacaacactttaagtaaaatatagactggataatcaacatttgccacctctaaatatgcccaatttcataactagagtataaagtaattgtatgtgcttgccgctatttttttctgtccttttaggatgatagatcataaccaaaacttattctccttctcaagatctgcttctagtgattgtgagtgccttgtgggcagaatcccttgtcatttcctctttgggtctgtnnnnnnnnnnnnnnnnnnnnnnnnnnnnnnnnnnnnnnnnnnnnnnnnnnnnnnnnnnnntgccctcacatgcatttccttggcaaatctctgtgctggcctgaaaccagtgaaccttcattcttctcacattaggaggtggtcgaggtgaatattttgaatctttgtaaaaaataaccaataaggaattcccaagaacctttaacctatttatggctcaatctttccaaaaaatttattttcttggccacaaagcccattacctccctttttaaaaaccaatattttatgctgcctaatggcctggtgcgaaataaaacaaatgtacctcctaactaagggtgcaccaaatttaacacgtctggggagaaattatatattatttcccaccgcatctggagagaaatacaaacacaaatcccccttagacccccattccaaccaaattttaatgactttgggtgaacccttttcttcacccaggcggcatatataaccaaaaacatttcccataaccccgtgcattcaagagggtttccacaaaaatgtggccaataaatttaccttgggcgccgcgaaaaaacaacgcgtactttgc

SEQ ID NO: 347787 - DNA, 489 bp, Homo Sapiens
gtggtttagaccatttataatgtcaaaactgtaatgacaaattcctgttcacttttatgctaccagtatgactttataggggagaaggaaagccttttaattagccacctgggaattactcttttaaaaaatgccttttctcaaaagaacatgataccactccaagtaaatcattgccactaggggttttcctccttccttctgttgcccatgcccctgcctgaaagtgtagggtaagaggaaaaacaagtaaaaccttagtgttgatggtaaactgagaactctgtagcttaccttggattccagagcagaagactggtttacattcagtactcatccttattgacgttaacaccaggaatctccatgtttattatttttcgtggaaactccatgtttattatttttggtggtctctattgaccaatgtatttcaaacttttttgactgcaagtcataataaaaataactttttacatcacgacccag

SEQ ID NO: 347788 - DNA, 1557 bp, Homo Sapiens
  misc_feature (878)..(878): n is a, c, g, or t
  misc_feature (1259)..(1294): n is a, c, g, or t
cggagctggagctcccaccgccgccgcccgtgcctccggctgccggcgcccctgcctttggctcttcctccccactcgcccgctccccctggcggagccggcgcgcccggggtgccgctccctgcctggcgcgctccgcacctggaggtgccttgcccctctcctgcccacctcggaatttccctgtggctcctttgatccttcgagtctccagctcctctcccttccacctgtttcccccaagaaaggcaggatcctggtccctgctacgtttctggggccatggctggtctgggccccggcgtaggcgattcagaggggggaccccggcccctgttttgcagaaagggggctctgaggcagaaggtggtccacgaagtcaagagccacaagttcaccgctcgcttcttcaagcagcccaccttctgcagccactgcaccgacttcatctggggtatcggaaagcagggcctgcaatgtcaagtctgcagctttgtggttcatcgacgatgccacgaatttgtgaccttcgagtgtccaggcgctgggaagggcccccagacggacgacccccggaacaaacacaagttccgcctgcatagctacagcagccccaccttctgcgaccactgtggctccctcctctacgggcttgtgcaccagggcatgaaatgctcctgctgcgagatgaacgtgcaccggcgctgtgtgcgtagcgtgccctccctgtgcggtgtggaccacaccgagcgccgcgggcgcctgcagctggagatccgggctccccacagcagatgagatccacgtaactgttggcgaggcccgcaacctaattcctagggaccccaacggtctctctgatccctatgtgaaactgnaagctcatcccagaccctcggaacctgacgaaacagaagacccgaacggtgaaagccacgctaaaccctgtgtggaatgagacctttgtgttcaacctgaagccaggggatgtggagcgccggctcagcgtggaggtgtgggactgggaccggacctcccgcaacgacttcatgggggccatgtcctttggcgtctcggagctgctcaaggcgcccgtggatggctggtacaagttactgaaccaggaggagggcgagtattacaatgtgccggtggccgatgctgacaactgcagcctcctccagaagtttgaggcttgtaactaccccctggaattgtatgagcgggtgcggatgggcccctcttcctctcccatcccnnnnnnnnnnnnnnnnnnnnnnnnnnnnnnnnnnnncttcttcggggcgagtccaggacgcctgcacatctccgacttcagcttcctcatggttctaggaaaaggcagttttgggaaggtgatgctggccgagcgcaggggctctgatgagctctacgccatcaagatcttgaaaaaggacgtgatcgtccaggacgacgatgtggactgcacgctggtggagaaacgtgtgctggcgctggggggccggggtcctggcggccggccccacttcctcacccagctccactccaccttcc

SEQ ID NO: 347789 - DNA, 1557 bp, Homo Sapiens
  misc_feature (1458)..(1458): n is a, c, g, or t
  misc_feature (1498)..(1498): n is a, c, g, or t
  misc_feature (1528)..(1528): n is a, c, g, or t
ccgggcaacgactccacggcgtctcaggacgtggccaaccgcttcgcccgcaaaggggcgctgaggcagaagaacgtgcacgaggtgaaggaccacaaattcatcgcgcgcttcttcaagcagcccaccttctgcagccactgcaccgacttcatctgggggtttgggaaacaaggcttccagtgccaagtttgctgttttgtggtccacaagaggtgccatgaatttgttactttttcttgtccgggtgcggataagggacccgacactgatgaccccaggagcaagcacaagttcaaaatccacacttacggaagccccaccttctgcgatcactgtgggtcactgctctatggacttatccatcaagggatgaaatgtgacacctgcgatatgaacgttcacaagcaatgcgtcatcaatgtccccagcctctgcggaatggatcacactgagaagagggggcggatttacctaaaggctgaggttgctgatgaaaagctccatgtcacagtacgagatgcaaaaaatctaatccctatggatccaaacgggctttcagatccttatgtgaagctgaaacttattcctgatcccaagaatgaaagcaagcaaaaaaccaaaaccatccgctccacactaaatccgcagtggaatgagtcctttacattcaaattgaaaccttcagacaaagaccgacgactgtctgtagaaatctgggactgggatcgaacaacaaggaatgacttcatgggatccctttcctttggagtttcggagctgatgaagatgccggccagtggatggtacaagttacttaaccaagaagaaggtgagtactacaacgtacccattccggaaggggacgaggaaggaaacatggaactcaggcagaaattcgagaaagccaaacttggccctgctggcaacaaagtcatcagtccctctgaagacaggaaacaaccttccaacaaccttgaccgagtgaaactcacggacttcaatttcctcatggtgttgggaaaggggagttttggaaaggtgatgcttgccgacaggaagggcacagaagaactgtatgcaatcaaaatcctgaagaaggatgtggtgattcaggatgatgacgtggagtgcaccatggtagaaaagcgagtcttggccctgcttgacaaacccccgttcttgacgcagctgcactcctgcttccagacagtggatcggctgtacttcgtcatggaatatgtcaacggtggggacctcatgtaccacattcagcaagtaggaaaatttaaggaaccacaagcagtattctatgcggcagagatttccatcggattgttctttcttcataaaagaggaatcatttatagggatctgaagttagataacgtcatgttgggattcagaaaggacatatcaaaattgctggactttggggatgtgcaagggaacacatgnatgggatgggagtcacggaccagggaccttctgtggggantccaggatttattattcgcccccaggaggntaattcgctttattcaggccgtattggga

SEQ ID NO: 347790 - DNA, 658 bp, Homo Sapiens
ggcgctccgtgtggtccgtgccacacaggctgggaacattcatcacgcagcgcttgtgcacattcagtcatgcaggtgtcacatttcatccccctggtggatgagtccatacagcagtgacccacagtggtcacaaaacgtggggctggagtacgtgtggatcttaaacttgtgtttgctccggggctcatcggaggctggacccttggtcagcgccagggcaggagaatgtgacaaatttcatggcaccgctttgtgcaccacaaagcagcaaacttggcactggaatccctgcttcccgaagccccagatgaagtcggtgcagtggctgcagaaggtgggctgcttgaagaagcgggcggtgaatttgtggttcttgacctcatgcacgttcttctgccggagggcgcctttgcgggcgaagcgcacggtgctctcctcgccctcgctcggcggcggccccgcagccgggtcagccatcttgcgcgcggggagccggagcccgagaggtgccggccccgggccgcgggaccgcgggctgcgggccggggaggcgcgggaggcggcggccgctgctgcacccgggccgcgggcgcttcccctgcgccggctctggcggccgcggcgcgcggagccggggctgtcactcgcccccgct

SEQ ID NO: 347791 - DNA, 961 bp, Homo Sapiens
  misc_feature (555)..(555): n is a, c, g, or t
cggacgcgtgggcgtgttcgccccaactgggagaggtgagctttttcccagtgtttcagaactgattttctttactttctacaagggagggcagcacagggactacggttgaggcccgtgaaggctgggtttgatgccaccctatacagagcagggacctctctggctaatccccagtcctcagccaggctgtgtgaatcaagtgcctgccccagggctcttgagctattgaagctgcttgggtacaggacacagtaggtggggagggttaagacccttctgtgagttccctgtgcggggctgtacttgcctcttccaattcgtggcctttccctgcttggtccctactagacagacaaaccagccacagtccagcctgcagccagaccaccttgttcactcattctcctttgcctcagagctaagacaaaaatgagacagaaggcagggctccctgggagtccactgtgctccagggttctggggaatcaggcttagccagcagctcctggctgcttccctcagagactagggctctcatcctcccccaagagnaagcagcaaacccagcctggaccacactgtccatattgctggacagtggcctgacagaaagtgactcctccaagtcccagggaggccagggcttttctcatccttgcctttcagcccttaacccatgggactgcccacggattgggagaatttcaagggctgaggtctgggagctgcataaagggcattgcttcagcccaagttagaaatctgcctgggcaagctcttcctgccccagacctacaaagcagcagaccgggggctctggtggactagcccctgacattggtggggggccccacaccactccaccccaccctgccttccagctctcctgggcatttttctccctgtactcaaacagcctacccacccaaggtttcctccctgggcagcctagcaatga

SEQ ID NO: 347792 - DNA, 1266 bp, Homo Sapiens
  misc_feature (1082)..(1082): n is a, c, g, or t
  misc_feature (1182)..(1182): n is a, c, g, or t
  misc_feature (1184)..(1184): n is a, c, g, or t
  misc_feature (1217)..(1217): n is a, c, g, or t
gcagtactactacggtttaaggtagcgaggcctgggtggcgaattcggcacgaggagattgtgaagcgtctgagcggtatctgcgctcagattatccccttcctgacccaggagcatcagcagcaggtgctccaggccgtagaacgcgccaagcaggtcaccgtgggggagctgaacagcctcatcgggcagcagcagctccagccgctgtcccaccacgcaccccctgtgcccctcaccccccgcccagccgggctggtgggcggcagtgctacggggctgcttgctctgtctggagccctggctgcccaggctcagctggcggcggctgtcaaggaggaccgtgcgggcgtggaggccgaggggtccagagtggagagagccccgagcaggagtgcatctccctcgccccctgagagtctcgtggaggaggagcgaccgagtggccctggtggtggcgggaagcagagagcagatgagaaggagccatcaggaccttatgaaagcgacgaagacaagagtgattacaatctggtggtggacgaggaccaaccctcagagccccccagcccggctaccaccccctgcggaaaggtacccatctgcattcctgcccgtcgggacctggtggacagtccagcctccttggcctctagccttggctcaccgctgcctagagccaaggagctcatcctgaatgaccttcccgccagcactcctgcctccaaatcctgtgactcctccccgccccaggacgcttccacccccgggcccagctcggccagtcacctctgccagcttgctgccaagccagcaccttccacggacagcgtcgccctgaggagccccctgactctgtccagtcccttcaccacgtccttcagcctgggctcccacagcactctcaacgggagaacctctccgtgcccagctcctacgtcagcctccacctgtccccccaggtcagcagctctgtggtgtacggacgctcccccgtgatggcatttgagtctcatccccatctccgagggtcatccgtctcttcctccctacccagcatccctgggggaaagccggcctantccttccacgtgtctgcggacgggcagatgcagccggttcccttcccctcggatgcactggtaggcgcgggcatcccgcggcacgcccggcagctgcaanangctggcccatggcgaggtggtctgcgcggtcancatcagcggctccacacagcatgtgtacacgggcggcaagggctgtgtg

SEQ ID NO: 347793 - DNA, 1891 bp, Homo Sapiens
accccaacccggggaggggctcccacgaccccgggcgcgcgcgcttgggggcgcgccagggactccagggtcccttgccccgcgccgcttctccctcctccctctttcttcgggcagcctccccaccaccccacttcagcctcccccactcttgccgcctccatatcatcaagctctggtggcgcctggggggcttttcggatcggcaggatgtacccccagggaaggcacccgaccccgctccagtccggccagcccttcaagttctcgatcttggagatctgcgaccgcatcaaagaagaattccagtttcttcaggctcaataccacagcctcaagctagaatgtgagaagctggccagcgagaagacggaaatgcagcgacattatgtcatgtattatgagatgtcgtacaggctcaacattgaaatgcataagcaggcggagattggtgaagcgtctgagcgggatctgcgctcagattatccacttcctgacccaggagcatcagcagcaggtgctccaggccgtagaacgcgccaagcaggtcaccgtgggggagctgaacagcctcatcggggtcagcagctctgtggtgtacggacgctcccccgtgatggcatttgagtctcatccccatctccgagggtcatccgtctcttcctccctacccagcatccctgggggaaagccggcctactccttccacgtgtctgcggacgggcagatgcagccggttcccttcccctcggatgcactggtaggcgcgggcatcccgcggcacgcccggcagctgcacacgctggcccatggcgaggtggtctgcgcggtcaccatcagcggctccacacagcatgtgtacacgggcggcaagggctgtgtgaaggtgtgggacgtgggccagcctggggccaagacgcccgtggcccagctcgactgcctgaaccgagacaactacattcgttcctgcaagttgctgccggatggccggagtctgatcgtgggcggtgaggccagcaccttgtccatttgggacctggcggcgcccaccccccgtatcaaggccgagctgacttcctcagccccagcctgctacgccctggccgtcagccccagacgctcaaggtttgcttctcctgctgcagcgatggcatacattgtggtctggggacctgcagaatcagactatggtacaggcagttccagggccacacggacggcgccagcctgcattgatatttccgattacaggcactcggctctggacagggggcctggacaacacggtgcgctgctgggacctgcgggagggccgccagctgcagcagcatgacttcagctcccagattttctccctgggccactgccctaaccaggactggctggcggtcggaatggagagtagcaacgtggagatcctgcacgtccgcaagccggagaaataccagctgcacctccacgagagctgcgtgctgtccctgaagtttgcctcctgcggacggtggtttgtgagcaccgggaaggacaacctgctcaacgcctggaggacgccgtacggggccagcattttccagtccaaggagtcgtcctcagtcctgagttgtgacatctccagaaataacaaatacatcgtgacaggctcgggggacaagaaggccaccgtgtatgaggtggtctactgagacatgaccccccttcctgtacccgaagtccagactcccaggggaatcagcagccaggacagacatcctagcagccgcctcccagccctgcctaggaaccgtacatcccatctgctctctggccaacggcttcacaccttcccctgctgcatgtgggggccgatgggcaggggacctcggtggaaataaaatgtatctatcacatccgc

SEQ ID NO: 347794 - DNA, 705 bp, Homo Sapiens
  misc_feature (642)..(642): n is a, c, g, or t
  misc_feature (671)..(671): n is a, c, g, or t
  misc_feature (675)..(675): n is a, c, g, or t
ttgacaggcaggtgcacagctgttatagcgccactcacactcatacccgttctcccggagattcctctcctcgcagctctgggggcacaatgtggccgtcctccaggtcaccaccttgccatgctgggcacacacgtgggcataggcagcaatggtgtcgcagaagcaggcgcagtccccaatggactcacaggagcaggtgtcgtaaatgcagacatccagatatggctcggggtccaccagcttgttgcagtcctggaagacgtcactggtaaggattctacaggaggaatccaccatcgtctgcttcatgatgttgttatggcaggtggcaggggatgagtccagaggcacttttctggtgtcagcacactgcgagctcactttccaggagttcccaaagtccacagggtcttcctccacttggaggttgctgctggtgaggtcattgttctggatgccatcaaaattcccacacaggccacacactttctcctggtatgtctgcttcaggaccacggagatgctcaggtggcggtcccagaccacggagagggctttgcccagcagcagaatgatgtaccggccagactccaccacctcaaagtgagtctcatccttcatgggcctcttcacattcanctccccgtcaaacagcctcatctctcctncctncaccaggatggtgacccgtttcttgaattt

SEQ ID NO: 347795 - DNA, 1004 bp, Homo Sapiens
tgtgcactaatgaaccgtggttaaaaaagcggctggtacggtcggaatttcccgggatatcgtcgacccacgcgtccgggatcagattccagaaatgtttgcagacacaagggaaacagagacagtattgtaccagttgatccaggctggaatggaggctctgaaggctgctgagtgtgcaaggaagctctttctattccatacatccctgcccattgcagaggccccagggaaactgaagaacagagatgacaggaagctgatcaatacagacaaggagaagactctgttccagcctcagacaggtgcctatcagaccctggccaaagagtgtgtggcccaaggctgctgtgtagatctctttctcttccctaaccagtatgtggatgtggcacgctctctgttgtgccccagctcactggtggctctgtctacaaatatgcttcctttcaggtggagaacgaccaggagcggttcctgagtgacctgcgtcgtgatgtccagaaggttgttggctttgatgctgtgatgcgggtccggacaagcactggtatccgtgctgtagatttctttggagctttctacatgagcaacacgacagatgtggagctggctgggctagatggggacaaaacagtgactgtggagttccaagcatgacgatcggctcaatgaagagagcggagctctctagcaaggtgccctgcttttacaccagctgtgcagggcagcgtcgggctccgcatccataatcctggccctgaactgatgcacccagatggctgatctatatcgaaactgtgagactgacacgctcatcaaatacatggcaagtggatatcggggaggccgaatagcctgggaagctgtccggaaggccataccaggggcccaaaccgggcgggagaaaaaggggtagccctccctgagaaggaccacgagggagaacaacccaccgaaggggtggcaaggaccaacggggacaaacaaacacaaagaaaaca

SEQ ID NO: 347796 - DNA, 756 bp, Homo Sapiens
cgtgagccaccgcacccagccgacaaacctttattaccaggtgatatcaaatattattagagctgactgtggtagtgacagtttttcatataaatgaaattgcatcctcccaaaggaatcctgagtatgtatgcactttaaaagaacccagaatcatctaaatattgtcacatggctcttgcaagtgatgataatagtgatgcttataataatgaggattagctgcactcatcagcctgtagaaagtaaaaagtttccttttcgaaatttcctttcttgttaaagaataaatcataagtgttagaaataatagtttcttttaaagactaacttccttcaagcctcctctgctctgtgctaatgactcttcattaagccctatcctatgtagctgttagatataagggaataagtatattctatgtccttgtactttaaccaagatatttgtgctggacatgctcacaggcacgttccagcttgcagcctatgccccttccttatttggaaatagttattacttttctaagtctttatgcaagcaacttcttcttttcctttgttctctattgcctttcccgtatataggaaagttttaagttattagccagtcgcggtttaatttacaattgtgaggtccagctacagccaatggagacaggacacaagctgcataagggataaaaactgcttccctcctttgttcgggtgtgctgtcaccattgtttcatctgtgaggagcacctttctgcgaaa

SEQ ID NO: 347797 - DNA, 1913 bp, Homo Sapiens
  misc_feature (239)..(239): n is a, c, g, or t
  misc_feature (1893)..(1893): n is a, c, g, or t
gatgaaaagggtaacctttcttactagtaaagacgaccccaaggatttactgtttaaacatgaggtggtgggtgggtgggaagtttggtgtttggaaaatgttaaactttgaaagggagcattttgtttcaaatgctttttgtttttcaaacaagtattgttgcctggttcaaaaccttttgaactgggggttggtggaattttcaattttttattaaagggtctttcgctggtctatnttcaaaaccttgagtttggccccaaattttgggctttcaaatgtttaaaagctatttatctgggttaaaacaagtttcctttctcttctttttgtcatggtattctatttggtctgcagtttgaatgtagagaaagtggactgatcccccaagcgttgtctgcccccactctttcctccttgggtcccgccattcttttactgggcagtcgagggcattggaggggaagtgactgccctcagcctcactccctggggccatgaagaaaagctaaacagtctcatggcatctcagaataatgttgggtctcccaagaagaaaggtgtaagaataacgacatggctgattaggcgaggccaggatagggctaaggccaggattcctggctggcatccagtcaccccttctcccatccttccccctcttcttccacaagtccgcagccgagacactgtagtctcccagccacagtgatgagtgccctggagactccactgacctctagatgaaggcccctggccctggttcctgttaattaacctctgggtctttgagtcccccagcacaaacttctttcctgtaccctgcggcttggggtcacagggcatgccgggaagccacagctgaggggcgcagactgaagcagtgctccacctctccttctttagctcaggggttgctggtctgtggcaggcgccacgagtggcccctgtggctgttctcagtggcagtctcttaagttcccaccacaggcagctctttatcccctctccctacttgactctttctcttgcctgtgcttttggcctcaaacaggcctgctggtagcgctcagggcgtgaggctacactcctgccctgcctttcctgtcttcatggtctgccagggcataccttggggaggtggaccaaagacccaggactttttgcagtagccagtcctaccccccagttgtctttttaccaattcagggtgggagagaaaactgcagcaccccagcatgtgagttactcaggtgttgggggctagaagggacagtgcgtttaaacaacactcagagctctggccttaaacctgtggccccccaagtctaggagcctcatctctttctggcagtcatgcgggcaggaggtcctgaaagggaaaacccattcagacaactgttccccaatctaccagccatctgcaggggtcagtgaccgtggccctctccctcctctagaatgtgccacttatgaagagtgccccatggggaaaaggagactcagctgtcccttggcagcttgtgccagtatcccagggcagaagtttccacaggagcctcttgcccttgcgcagagccactgtgagaggcggtgggagccaacacccttgggggagggggcagtactgctcggcacatcccagcatcaggtcagatcactgaaattaaaaaatgtgaattaagttcatatccaccttttggggaagcaggacaaaccaccaccccaccaagtgtgtgacttctccatatcccactgcagtttccattttttaaatgggaattttcaatcccctgtgcttgtctaacgtctgctttaaaaagtttgagaccctgttactgtttgaaaatgcatgcatgttacgatgaatctccaacctgaggaaaaaaatnaaactcaaaaagctttgtgt

SEQ ID NO: 347798 - DNA, 318 bp, Homo Sapiens
  misc_feature (22)..(22): n is a, c, g, or t
  misc_feature (27)..(27): n is a, c, g, or t
  misc_feature (187)..(220): n is a, c, g, or t
  misc_feature (260)..(260): n is a, c, g, or t
  misc_feature (295)..(295): n is a, c, g, or t
ctcctcgtcaggcgcagatctnctgangcttggaaagctgtcttccagcagcctccgtggcctcgggttcctaccggcttctctgcatttggtctgctgatcatgttgccataatgtgtatggaaagtgtaacacatacttactggttaaagacgactaccacgtatctaacttgtttaacattgannnnnnnnnnnnnnnnnnnnnnnnnnnnnnnnnnatattgtttacattttgagaggtagcattctgtttcaaangctttttgtttttctgacagtattgttgactgggncataacattttgagctgtggttt

SEQ ID NO: 347799 - DNA, 2680 bp, Homo Sapiens
  misc_feature (1982)..(2016): n is a, c, g, or t
  misc_feature (2128)..(2138): n is a, c, g, or t
ggcacgagggggggatgtgctgtgtgtgcacctgctcacaggatgtaaccccaccttctgcttacccttgattttttctccccatttgacacccaggttaaaaaggggttccctttttggtaccttgtaaccttttaagataccttggggctagagatgacttcgtgggtttatttgggttttgtttctgaaatttcattgctccaggtttgctatttataatcatatttcatcagcctacccaccctccccatctttgctgagctctcagttcccttcaattaaagagatacccagtagacccagcacaagggtccttccagaaccaagtgctatggatgccagattggagaggtcagacacctcgccctgctgcatttgctcttgtctggattaactttgtaatttatggagtattgtgcacaacttcctccacctttcccttggattcaagtgaaaactgttgcattattcctccatcctgtctggaatacaccaggtcaacaccagagatctcagatcagaatcagagatctcagaggggaataagttcatcctcatgggatggtgaggggcaggaaagcggctgggctcttggacacctggttctcagagaaccctgtgatgatcacccaagccccaggctgtcttagcccctggagttcagaagtcctctctgtaaagcctgcctcccactaggtcaagaggaactagagtacctttggatttatcaggaccctcatgtttaaatggttatttccctttgggaaaacttcagaaactgatgtatcaaatgaggccctgtgccctcgatctatttccttcttccttctgacctcctcccaggcactcttacttctagccgaactcttagctctgggcagatctccaagcgcctggagtgctttttagcagagacacctcgttaagctccgggatgaccttgtaggagatctgtctccctgtgcctggagagttacagccagcaaggtgcccccatcttagagtgtggtgtccaaacgtgaggtggcttcctagttacatgaggatgtgatccaggaaatccagtttggaggcttgatgtgggttttgacctggcctcagccttggggctgtttttccttgttgccccgctctagacttttagcagatctgcagcccacaggcttttttggaaggagtggcttcctgcaggtgttccacctgccttcggagcctgccacccaggccctcagaactgagccacaggctgctctggccaggagagaaacagctctgttgttctgcattgggggaggtacattcctgcatcttctcaccccctcaaccaggaactggggatttgggatgagatatggtcagacttgtagataaccccaaagatgtgaagatcgcttgtgaaaccattttgaatgaatagattggtttcctgtggctccctccaaacctggccaagcccagcttccgaagcaggaaccagcactgtctctgtgcctgactcacagcatataggtcaggaaagaatggagacggcattcttggacttcactggggctgctggattggatgggaaaccttctggaagaggcagatgggggtcaaaccactgccttggccccaggaaggggccataggtaggtctgaacaactgccgcaagaccactacatgacttagggaacttgaaaccaactggctcatggagaaaacaaatttgacttgggaaagggattatgtaggaataatgtttggacttgatttccccacgtcataatgaagaatggaagtttggatctgctcctcgtcaggcgcagcatctctgaagcttggaaagctgtcttccagcagcctccgtggcctcgggttcctaccggcttctctgcatttggtctgctgatcatgttgccataatgtgtatggaaagtgtaacacattcttactggttaaagacgactaccaggtatctaacttgtttaacattgannnnnnnnnnnnnnnnnnnnnnnnnnnnnnnnnnnatattgtttacattttgagaggtagcattctgtttcaaatgctttttgtttttctgacagtattgttgactgggtcataacattttgagctgtggtttggtggattttcaannnnnnnnnnnaaaggtcattcgctgtgctatcttcaaaaccttgagtttggcccccaatttttggcattcaaatgtttaaaagctatttatcttggtttatacaagtttcctttctcttctttttgtcatggtattctatttggtctgcagtttgaatgtagagaaagtggactgatcccccaagcgttgtctgcccccactctttcctccttgggtcccgccattcttttactgggcagtcgagggcattggagggggagtgactgccctcagcctcactccctggggccatgaagaaaagctaaacagtctcatggcatctcagaataattggtgggtctcccaagagaaaaggggaagaaataacgacttggttgattaagccgaggccaggataggggctaaggccagaatccctgggctgggatcccagtacccccttctccaatccctttccccttcttttttcccaaagtccgcagccgaaaaacctgttatctccccgacccacaggggattaaagggccccggaaaaatcccctggaaccctt

SEQ ID NO: 347800 - DNA, 1116 bp, Homo Sapiens
  misc_feature (371)..(402): n is a, c, g, or t
  misc_feature (514)..(524): n is a, c, g, or t
ctgaggtggcgaaattcggcacgaggggaacaactggccgcaagaccactacatgacttagggaacttgaaaccaactggctcatggagaaaacaaatttgacttgggaaagggattatgtaggaataatgtttggacttgatttccccacgtcataatgaagaatggaagtttggatctgctcctcgtcaggcgcagcatctctgaagcttggaaagctgtcttccagcagcctccgtggcctcgggttcctaccggcttctctgcatttggtctgctgatcatgttgccataatgtgtatggaaagtgtaacacattcttactggttaaagacgactaccaggtatctaacttgtttaacattgagttnnnnnnnnnnnnnnnnnnnnnnnnnnnnnnnnatattgtttacattttgagaggtagcattctgtttcaaatgctttttgtttttctgacagtattgttgactgggtcataacattttgagctgtggtttggtggattttcaannnnnnnnnnnaaaggtcattcgctgtgctatcttcaaaaccttgagtttggcccccaatttttggcattcaaatgtttaaaagctatttatcttggtttatacaagtttcctttctcttctttttgtcatggtattctatttggtctgcagtttgaatgtagagaaagtggactgatcccccaagcgttgtctgcccccactctttcctccttgggtcccgccattcttttactgggcagtcgagggcattggaggggaagtgactgccctcagcctcactcccctggggccatgaagaaaagctaaacagtctcatggcatctcagaataatgttggggtctcccaagaagaaaggggtaagaataacgacatggctgattaggcgagggcaggattagggctaagccaggattcctggctgggcatcagtcacccctttctccatcccttccccctcttcttccacaagtccgcagcccgagaaactgtaatccccccacccacagtggatgaattggccctgggaaactccacctggaacctcttaaaagtgaaggcccccctgggccccggggttccctggttaaattaaaaccccca

SEQ ID NO: 347801 - DNA, 391 bp, Homo Sapiens
  misc_feature (14)..(14): n is a, c, g, or t
ttgtgcccagtaanccccagggccagaaagtttcccacaggagccctccttgccccttgccgcagagcccactgtgaagaggcggtgggagcccaacaccccttgggggagggggcagtacctgctcggcacatccccagcatcaggtcagatcactgaaattaaaaaatgtgaattaagttcatatcccaccttttggggaagcaggacaaaccaccaccccaccaagtgtgtgacttctccatatcccactgcagtttccattttttaaatgggaattttcaatcccctgtgcttgtctaacgtctgctttaaaaagtttgagaccctgttactgtttgaaaatgcatgcatgttacgatgaatctccaacctgaggaaaaaaataaaa

SEQ ID NO: 347802 - DNA, 2366 bp, Homo Sapiens
  misc_feature (34)..(34): n is a, c, g, or t
  misc_feature (62)..(62): n is a, c, g, or t
  misc_feature (1337)..(1352): n is a, c, g, or t
taagtaaccaccctgtgtaggggccgttataatngttatataatataacctatctgataccncatatcatctgaaagcctgtatttctaacaagttgactatgtggaagaatagactagttcgcaggccagaagattatcccgtagattccactggtaaagagcagaaattgttgacgctttagtacctagctgtcttaaagcatttttaaacatttgcacattactaataaaaagtttgaagttaacaagaaatttgacataaaactgagtaagctgtaaatatttcatatagaagatgtctgacacctgataaatgttacttaccaaatagaactgaaagtgagatgatcagaaaaagattgtccttgcctcaagcaagcttctgaagcctaggcaagttagctaggtccttaatatgggattctggcatcctgattttaatgtgctctgaaaacaaagtgtgtgactcatgaaataaaggacactaaaccccaaatttgaaattatgaaaactttaggccaaagaggtaaaataaaaacagctgttgggagtgaaaaatggctgtaggaatttagttacaagtacttcacaaaaacattttcatcacatttacataatatagcattacaatacaaagctggctgctgtcctgaccaagcaagttctcttatcatctaacaaaaataatttagatacatttctttgcatggaattgtcatatttttccatttttggtacaaaacatagaaaaaaacattggcacattatgtagtgataagtcattttttccccatgtacaagttccaagtattctgcattccaatttgtattggaaaaaagtaattactgattcaattaattcagtctctgtttgtttataccttttaaaaatgcagcatgaagtacagagaaagaaaaatgaagtttgtttacggagtctaatatttataatacataggaaggatcagctggtaaaagagaaaggaaaatctcgagtctgactttatgtagatcacagggagttgtgaaaagagcagtataaaaatatgcacttgtgctttagaagcttttagcatacaattaatagcttaaaatagtatttactgcctccccatatgcctattttctgatatatttacaccacacaattttaacattgttaaagctaatggcatgatttcaaatatagactggttaaaaatatctgaaccttgaaacttcccctatcccctcccaaaatattacgtatagatggtgcatggcacaacatactgcatgggcttacacccagaaaatttggattttaataaaaattttaaacatgtatataaacnnnnnnnnnnnnnnnnaagaaaagcttgtccaagggcattcaaatttaatggcttttatataatacttggtgtagtgcctcgtggctgcctctgtgagccagaaataaaggaagctcatggattccccaaaaatgaaatgccactttttccctcatcatggatgactttgttaagatgaaccccttttacaggaaaggggttacacaggctgctgataccagtctagagagggcacccaccagccaaggctgtgttctaacttaggtgtcataccatcggccagaagaaccatgtagccatagaggctgtgaagctaactagagataaatctgttcagataagctccttatgaatccttcagatcgatgttcttgaggaaaacagtcaagctaaacagcaatgatgacttttatggtaaaggatgagctgatcactagctaagctacttagtcaccatcctgggagatgagctcacaggcaccaaggctttgcttcctgtggcctgctagttacagtgaaccagctccatggattgacaagggtacacaggatgacagcagagcaaaggagtttgccaagtatttgttctgtcattaagtattcaaaagaacatatatttttcttcatggaacataactttctaagaatgaaatttggggacttgaatgattcaaggtcaaatattaaacattagctccttcaccaatacctgtcattgtcattagaaaggaaggcctcttgtttacgctactgtgattcacagtgtcctttgtcggtcaagaggccccctctgtggcttggctttagcctgtcagatggaagcctcaaacttttgcactttaggtcatctagtgtcttccagtgtttgtagttgtcagccaaatgttgcatcagggctggcagatgtgcaaaggcatcccaagcatcaaacatgtctgttatgaagtagtcaatgaaagagatctgagacttggggatgctacaggtattcaggtcaaacactggcatcaccacaggttgtccctgtct

SEQ ID NO: 347803 - DNA, 442 bp, Homo Sapiens
ctccccttccctaatgaccaatgaacggggtatgggtgaaaggagccaaaggtttaaaaatttggacccttgaatccattccaagtcccccaaatttccattccttagaaagttatgttcccatgaagaaaaatatatgttccttttgaatacttaatgacagaacaaatacttggcaaactccctttgctctgctgtcatccctgtgtacccttgtcaatcccatggagctggttcactgtaactagcaggccacaggaagcaaagccttggtgcctgtgagctcatctcccaggatggtgactaagtagcttagctagtgatcagctcatcctttaccataaaagtcatcattgctgtttagcttgactgttttcctcaagaacatcgatctgaaggattcataaggagcttatctgaacagatttatctaagaaaaaaa

SEQ ID NO: 347804 - DNA, 924 bp, Homo Sapiens
  misc_feature (349)..(446): n is a, c, g, or t
  misc_feature (837)..(853): n is a, c, g, or t
tttaagggggcccgcaatatattttgttgggttatttaccaccccaaaaaataaaaggggggaaagaccaataaaaggggtttccacgagaaaaaggacattaaatagcccaaaaaaggattttttgtaatttccaccccaattttgacccaattttgtaataaggcaaaatcgattttaaacccccacaagggccagacatggaggctactgctaaaatcctacaccttttaagggccaaacggggtgagcaacttagccccagaattttagggcagcttaggcaacacggcaaaacccccatctctacaaaaaattacaaacttagctggctgtgaaagcacatgcnnnnnnnnnnnnnnnnnnnnnnnnnnnnnnnnnnnnnnnnnnnnnnnnnnnnnnnnnnnnnnnnnnnnnnnnnnnnnnnnnnnnnnnnnnnnnnnnnntgacagagtgagaccctgtctcaaaaacaaacaaataaataaaaccacaacaaggtacatttaggcaaaaatataaagtctcacaatgccaattattggtcaagatatggaataacagaaactcatatactccttggaaggctaaattgatagaatcatcttgtggaaagtttgttattacctatcagcgtatggatccaatactctaagaagacctcataattttacacctaggtaaatattaatattttacaaacttcacatatgtccataaagaaacacaagtaaaaatacttatagcaaaaaactggaaataactaggtccactgataggaaaaataataaaaatggaatgacagtcctgttagaaaataacaacagcatgtttatnnnnnnnnnnnnnnnnntttccttttaataaaatctcagctgggcacagtggctcacacctgtatcccagcacttgggaggccgaggt

SEQ ID NO: 347805 - DNA, 1471 bp, Homo Sapiens
gccgagacacagtgctggaaggaggcggagcccgacctgctggccgtgttgcggggcctcagtgaggatttccagaaagctgaggatgccagcaagtttgagctctgccagctgctgcccctctttttgcccccgacaaccgtgccccctgaatgctaccgggatctgcaggccgggctggcacgcatcctgggaagcaagctgagctcctggcagcgcaaccctgcactgaagctggcagcccgcctggcacacgcctgcggctccgactggatcccggcgggcagctccgggagcaagttcctggccctgctggtgaatctggcgtgcgtggaagtgcggctggcactggaggagacgggcacggaggtgaaagaggatgtggtgaccgcctgctatgccctcatggagttggggatccaggaatgcactcgctgtgagcagtcactgcttaaggagccacagaaggtgcagctcgtgagcgtcatgaaggaggccataggggctgttatccactacctgctgcaggtggggtcagagaagcagaaggagccctttgtgtttgctcggtgcggatcctgggtgcctggctggccgaggagacctcatccttgcgtaaggaggtgtgccagctgctgcccttcctcgtccgctatgccaagaccctctacgaggaggccgaggaggccaatgacctttcccagcaggtggccaacctggccatctcccccaccaccccagggcccacctggccaggagacgctctccggctcctcctgcctggctggtgccacctgaccgttgaagatgggccccgggagatcctgatcaaggaaggggccccctcgcttctgtgcaagtatttcctgcagcagtgggaactcacatcccctggccacgacacctcgagtgctagcctgacagcgtggagattggcctgcagacctgctgccacactcttcctcaacctcgctggtcaccgcaccgggcgctgatcaacgcgtgacgcctgcttcacatctctaactgaacaccctcatgaccgctcgctaccagcactagctgcagcaaccagggcaaggcctgcttctggctcgctaatgtggcccaccctggggctcctcatggcccccggctccttacgcacctctccagctcttcagggaacaccagcatcccgagggttcttcgcagctgccatcctcttcctatcacagtcccacgtggccgcgggccaccccgggctcagaccaggcagtgctagaccctgtcccctgaagtatgagcggcatctgggcacgaccctgcaggagctcctggctacctgggcgcctccaagccttccacggactgtgatgcctctgcctgcactgcgctggacccccgctgccctgcgactcacgctggcccgccacgagctggtccagcttgctaagacactgacaacacccacatctgccaagccccgcca

SEQ ID NO: 347806 - DNA, 1074 bp, Homo Sapiens
  misc_feature (10)..(10): n is a, c, g, or t
  misc_feature (25)..(26): n is a, c, g, or t
  misc_feature (37)..(37): n is a, c, g, or t
  misc_feature (39)..(39): n is a, c, g, or t
  misc_feature (42)..(42): n is a, c, g, or t
  misc_feature (71)..(72): n is a, c, g, or t
  misc_feature (86)..(86): n is a, c, g, or t
  misc_feature (106)..(107): n is a, c, g, or t
  misc_feature (134)..(134): n is a, c, g, or t
  misc_feature (139)..(140): n is a, c, g, or t
  misc_feature (149)..(149): n is a, c, g, or t
  misc_feature (209)..(209): n is a, c, g, or t
  misc_feature (229)..(229): n is a, c, g, or t
  misc_feature (242)..(242): n is a, c, g, or t
  misc_feature (942)..(998): n is a, c, g, or t
  misc_feature (1018)..(1018): n is a, c, g, or t
  misc_feature (1022)..(1022): n is a, c, g, or t
  misc_feature (1042)..(1042): n is a, c, g, or t
ggaaaaaccnagggcggaaaagagnnaggagggaggngnatntccctgagcccccaatttgcccccccctnnccagattcctcccnaaaacaccccagctttctgnnttttctgagggaaagggcatgtgcccnccccnnaagtgtaangaactcgttccgcccctcaggcccccatgggggcagggatcggcttggaaatcaacgtgnttgtccccgccaggccgggnaaggttggagcancccccagggagggggcactaggtgtcattgtgcccgatgtctggctcccctgcaggagggaggctccagggtaagacagggctggcaggagcagactgcctcagcccatgtgccctgccggccagggcgtgggctcccctcggctgtggtgcctcctctggccccccaggtccacgtcctttaaattggccctttggctcttgcccttggctcccttgggcagacagcaggcttaggccattgatatcgcagttcttcctatcagcttcagtgacccagggtctgaactgcctccatcctagggcaacctggggcagacaggcctggtggggggtggggaaacctccttccacctgagcttgcttgaagggacccagagtctttgggcccagatctttaaacctttgtgtcgtgttgcagcagagtgacgatgggggttggggggttatttattttgcctgtccttatccctgcttggacacctgagcatctgattcctgtccccctggtgccatctggcctggctggagccaggaacaggagggacacttccccagaatccgcatgtttccccagtgattacactccactgccaccgtggtgcctggctttaactcccacccctgctatgactcctctctgcagagacgcgactggcggctccagcagggactacctttcttataaacccagggggacnnnnnnnnnnnnnnnnnnnnnnnnnnnnnnnnnnnnnnnnnnnnnnnnnnnnnnnnntcttgatcccttgcttcccncccncagtgcgttctgtgatcgcnaagttcaaagctgtgcacatgtgacactcaat

SEQ ID NO: 347807 - DNA, 1997 bp, Homo Sapiens
  misc_feature (30)..(30): n is a, c, g, or t
  misc_feature (65)..(107): n is a, c, g, or t
  misc_feature (360)..(360): n is a, c, g, or t
  misc_feature (979)..(991): n is a, c, g, or t
atgtgcacagctttgaacttggcgatcacngaacgcactgggggagggaagcaagggatcaagannnnnnnnnnnnnnnnnnnnnnnnnnnnnnnnnnnnnnnnnnngtccccctgggtttataagaaaggtagtccctgctggagccgccagtcgcgtctctgcagagaggagtcatagcaggggtgggagttaaagccaggcaccacggtggcagtggagtgtaatcactggggaaacatgcggattctggggaagtgtccctcctgttcctggctccagccaggccaaatggcaccagggggacaggaatcagatgctcaggtgtccaagcagggataaggacaggcaaaataaatnacccccccaacccccatcgtcactctgctgcaacacaacacaaaggtttaaagatctgggcccaaagactctgggtcccttcaagcaagctcaggtggaaggaggtttccccacccccaaccaggcctgtctgccccaggttgccctaggatggaggcagttcagaccctgggtcactgaagctgataggaagaactgcgatatcaatggcctaagcctgctgtctgcccaagggagccaagggcaagagccaaagggccaatttaaaggacgtggacctggggggccagaggaggcaccacagccgaggggagcccacgccctggccggcagggcacatgggctgaggcagtctgctcctgccagccctgtcttaccctggagcctccctcctgcaggggagccagacatcgggcacaatgacacctagtgccccctccctgggggctgctccaaccttccccggcctggcggggacaaccacgttgatttccaagccgatccctgcccccatgggggcctgaggggcggaacgcagttccttacacttgaggggtgggcaccatgcccttgccctcagaaaagccagaaagctggggtgttttggggaggaagtctnnnnnnnnnnnnnccagattgggggcttcagggaagatgcctcctccctccttccctctctgcccgcccctgggtctgtccccggtggacacccctcagggctctgacaggcactgctccaaggcagccatgcggtagtggctggccgtctcctcggcccgcctgcagcctcatggcctcccggccacagccggttggcccgcgccagttccaccaggacaccctgataggcggccaccatctcgggcttgacagagttggggctgacactgcctagcagctggagcagctcctgcggccagcgggagcgcagggcagcgggggccagccagggcagcagaggcacacagccggtgaaggcctgcatgcccaggaaccagagctcctgcaggtcggcccagatgccctcatactcaggggacagggctagcactgcctggtctgagcccggggtggcccgcgccacgtgggactgtgataggaagaggatggcagctgcgaagaaccctcgggatgctggtgttccctgaagagctggagaggtgctaaggagccgggccatgaggagccccagggtggccacattagcagccagaagcagccttccctgttgctgcactagtgctggtagcgacgtcatgagggtgttcattagagatgtgaagcaggcgtcacgcttgatcagccccggtgcggtgaccacgaggttgaggaagatgtggcagcaggtctgcaggccaatctccacgctgtcaggcagcaccgaggtgtcgtggccaggggatgtgagttcccactgctgcaggaaatacttgcacagaagcgagggggccccttccttgatcaggatctcccggggcccatcttcaacggtcaggtggcaccagccaggcaggaggagccggagagcgtctcctggccaggtgggccctggggtggtgggggagatggccaggttggccacctgctgggaaaggtcattggcccctcgtgccgaattcgccacccaggcctcgctc

SEQ ID NO: 347808 - DNA, 1393 bp, Homo Sapiens
  misc_feature (1336)..(1336): n is a, c, g, or t
caccgcaagaggaggcgttacagcgattggtcaatctctatggacttctacatggcctacaggcagctgtggcccagcaggacactctgatggaagcccggttccctgagggccctgagcggcgggagaagctgtgccgagccaactctcgggatggggaggctggcagggctggggctgcccctgtggcccctgaaaagcaggccacggaactggcattactgcagcggcaacatgcgctgctgcaggaggagctacggcgctgccggcggctaggtgaagaacgggcaaccgaagctggcagcctggaggcccggctccgggagagtgagcaggcccgggcactgctggagcgtgaggccgaagaggctcgaaggcagctggcctgccctgggccagaccgagccactcccagctgaggccccctgggccgcagacctgtggatcctcggcggcgcagctccccgcaggcgatgccctgtacttgagtttcaaccccccacagcccagccgaggcactgaccgcctggatctacctgtcactactcgctctgtccatcgaaactttgaggaccgagagaggcaggaactggggagccccgaagagcggctgcaagacagcagtgaccctgacactggcagcgaggaggaaggtagcagccgtctgtctccgccccacagtccacgagactttaccagaatgcaggacatcccggaggagacggagagccgcgacggggaggctgtagcctccgagagctaagggggcccctcccccctgccccgtgccccgactgaagaacattacgtgagggggctaaccttggggactccaatttgccaatgatgagggaacatttgaaagaactgcaaattgtccttgccagctcttgggatccttggatacctggggccatttaagaagctaggggaattaggccacaacaccccctgggacatccgaaagctacaccacagatgccagtggttcatgccttcttcccgcaactttaggaaaatttatttatttattgtttattagttatggggggagaggggagatttaaaggaccagggacatgggaaccaagccatagggatcagagggccttgtccttgaacactactggggtatattcaggctcatccacgcagctgctgggttcttgccctaacggccctcccctgcaacatccgtcttggaggagaggctgcagccacagcaccctactgccctttaaataaaggagggctgtgggcagggccatgtccctttctcctctcccctcaacctcttactgcatgttctcccttttctccgtccttcatggaagcnctgggagaataacctggcttcctggagttgatggaataaaggttgggggtggccata

SEQ ID NO: 347809 - DNA, 895 bp, Homo Sapiens
ctgaggtgtatatccttcatcccgtttgggacaggcagaccgtgctcactaattttatacttcgaagtcatgccatagtcaggtaaccattgacatatatgtacggaattaatgtattgttctgtttaaggaaggtcgtatatctatggattgtcacgtatattaaataagtatagatccctctaacttgagcttgacaagggtattaaagcatactttggtttttcttggtgtccccaatgttaatgaaatcagggtcgtctctgtggctcaatgagcagcattttattacaattacgttcatagtcactaggttcctgtgtctatagaaatagaactgaagtttctgtgcatacatgggatattgaggagatgaatataaatcccatattccaaaggacaagaagcttgtccaaagtttcaacatatccatgctacttttacaactttgttctgtgtttatatttcattatggaacaaagtaaagtcttctggcctccatgaagttggggaacagtggggcctaagttgagttatcgaatattttgccttcaccgcaaagcagtagaaagcttttgaggttaatgacagaattcaaaatgaaatactttcaaaaaatagccttattcattataaaatgtagagcaaaaatctcaaattcagaaaggtattctgatataattgggtttgattaggaataggttatacaattttcaggtaaattgttacatgaatttttttccattaatctgctttaaaatcaactatataactgattttttgactgaaaatacagaacaataacaactatttgaatccgacgcgtgggtcgacaatatcccggaattccgggccgtaccagcctgcttttaccgaggttatattctaatgcctc

SEQ ID NO: 347810 - DNA, 611 bp, Homo Sapiens
catctgagatgatggataccctaattaacctgatgtgatcattacacactgtatgaatctatcaaaatattacatgtacccttataaatatgtacactctaccttaaggaaacagtgaaaaaagaaggtgtggaacaacgaccacaacaaaatcaaagaggaaactctttgtgaacttgggtttgtcaggccaggaatcagcaaaccatggccaatccactacctgtttttgtaataatcaaaacaatataattgataatttgtaaattatgtgaaattcaaactgcagtattcataaagttttattggaacagctattattcatttacatattgtctatggctgctttcattgctacaatggcagagctgcaacagggacagcaaggctgaaatatttactatctgaccttttacagaaaaagtctggcaaggtctgggttaggtaaagttgttagatgaacaccaaatgtgtaaaagaaaaaatgtggtaaatcagacttcatcaaaatttaaaacttatgctctgggaaaaagacaccgctaagacaatgaaacacaaggcacagatggggaaaatgtatgaacatcacacagcctaacaaagcactt

SEQ ID NO: 347811 - DNA, 537 bp, Homo Sapiens
  misc_feature (58)..(58): n is a, c, g, or t
  misc_feature (126)..(126): n is a, c, g, or t
agcaggggccaaggcccttccatggcccccaagtgtctggccccttaaccggcaaagncaagatccagggttttggccaagaacccttggggcacccagccaagagtatatccctgtttggcctgncaacattccctcctttggaggcaagtcccttcctagatatgtggaaagagaaaaatccatgtaaccctctccctataaaagatttccccaaaatcattttcctagcatgaatgtgaacccaggcttcacagtatatatctaccagtattagcaccattatttaagcctgcactgaggtaaagataaactctcagacagctttgggtagaaattccagcagcaatcttgagtggggtgtttacagcagcattctttctgatcattaagttgtatgaagaaccatttgaatccaggtatatatatacaagtatatactgaagctgatgataaaatacaaagctaggctagcaggagaaatacagcaaaacagaactctcattttaaaatttaaactatgtcattactgggttg

SEQ ID NO: 347812 - DNA, 814 bp, Homo Sapiens
  misc_feature (657)..(657): n is a, c, g, or t
  misc_feature (741)..(741): n is a, c, g, or t
  misc_feature (781)..(781): n is a, c, g, or t
tatatacctggattcaaatggttcttcatacagcttaatgatcagaaagaatgctgctgtaaacaccccactcaagagtgctgctggaatttctacccaaagctgtctgagagtttatctttacctcagtgcaggcttaaataatggtgctaatactggtagatatatactgtgaagcctggttcacattcatgctagaaaatgattttgggaaatcttttataggagaggttacatgattttcctctttcacatatctagaaggacttgcctcaaagaagaatgttgcagcaaacaggatatactctagctggtgcccaaaggttcttgcaaaaccatgaatcttgcttttagcagtaaagggccagacactttggagcattgaaaggccttagcccctgctccccaactacgtgccatgctgggtagtgtgtatcctgtacatctgtgtgccaggctggggcagactgtgccaatgctcaccaaacactagaatctgctcttacacctctagcatgtatctcgttgtagcagagttgtgcactttctcagcattgtgtagtgttttctaattgcatctaaaaacttatcaaaagtgattgtgaaaacagtgtcttaggaagtataaacagaaatggccaatatttatgtcctgtngattcaagcccaaaggttattaaattccaacttttcacaggggaattaggcactgcttaattcttactttatgggttttaaatnttaaaggggagattcaccggcagcccttaatttcccgttnggtcgggtccatttgccggccggtcttggttcc

SEQ ID NO: 347813 - DNA, 912 bp, Homo Sapiens
  misc_feature (374)..(386): n is a, c, g, or t
ggatgtttgatttgagagagagtcttgctctgtctccctggctagggtgtggcggtgtgatcttggctcacggcagccttgccctccctggctcaagcagtcttcatctcagcctccagagtagctgggactacaggcatgtgatatgatgctcggctgatttttgtttacttctttagagagatggggtcttgccatatttgccaggctggtttgaactcctacaactcaagcattcctcccaccttggtctcccaaaatgttgggaccacgggtgtgagccaccgcgcccagctagctcctgtgttttgtttttgttttgtaactttggttgatgttaaggccctccattttggaaagcaggaaaacaggannnnnnnnnnnnnatcttgttccctggaggatccagggatgaggatagagtggcctgagagcagtgcttggattcagcctcctgctgggtccttctgctggatacaggcaccaagaggcgggggtggagcagggagctgcgccttcctggggtgcccggtggtgtgtagagaaaagctgcttgtttactccttaagtcaatgtattggtgactgttgatttgttggacaattcaggaatcaagggctgtggagaaactccctcatgttgttggcaacaggtgaatgaacctagagcggtgacatgaaaataaagctcactgttactcaaaatagatttttaaaaatggaaaaaaataacatgttcggcccgcctccggcccctcgagaaagcttttcctaaaacaattcccttttgggccgcccgcggccccaggtagggtaaggtggaaacatggggccataaccctgtttttccctagggaaaatccctgggccacaagaaccaaagtgcgccttgggaattccccccaccccaaat

SEQ ID NO: 347814 - DNA, 894 bp, Homo Sapiens
tctgaggagccttttttcggagtgcgtgggggttctaagattattaagagagctccagtaatctgggataacattcatgctaatggattatgatcagaagagactgtttctgggcccgtacaaaggaagatccacagaactcatcccacggttaaaaggagtcctcactaatccaaattgtgaatttgaagccaactacgttgctatccacacccttgccacctggtacaaatcaaacatgaatggagtgagaaaagatgtagtgatgactgacagtgaagatagtactgtgtccatccagataaaattagaaaatgaaggcagtgatgaagatattgaaactgatgtactctatagtccacagatggctctaaagctagcattaacagaatggttgcaagagtttggtgtgcctcatcaatacagcagtaggcaagttgcacacagtggagctaaagcaagtgtagttgatgggactcctttagttgcagcaccctctttaaatgccacaaccgtagtaacaacagtttatcaggagcccattatgagccagggagcagccttgagtggtgagcctactactctgaccaaggaagaagaaaagaaacagcctgatgaagaacccatggacatggtggtggaaaaacaagaagaaacggaccacaagaatgacaatcaaatactgagtgaaattgttgaagcgaaaatggcagaggaattgaaaccaatggacactgataaagagagcatagctgaatcaaaatccccagagatgtccatgcaagaagattgtattagtgacattgcccccatgcaaactgatgaacagacaaacaaggagcagtttgtgccaggtccaaatgaaaagcctttgtacactgcggaaccagtgac

SEQ ID NO: 347815 - DNA, 1153 bp, Homo Sapiens
  misc_feature (940)..(940): n is a, c, g, or t
  misc_feature (1077)..(1077): n is a, c, g, or t
gaggctggaccggtccggaattcccgggatcgtggctcgtggaacatgtcggcagctgggtttgaagcagcccacgcccgtgcagctcggctgcatccccgccatcctggaggaagctgtctgaggatccctatggcatcttctgcctcgtcctgacacccaccagggagctggcctaccagatcgcagagcagttccgggtcctggggaagcctctagggctgaaagactgcatcatcgtcggtggcatggacatggtggcccaggcgctggagctctctcggaaaccacacgtggtcatcgccacgccggggcgcctggcagatcacctgcgcagctccaacacttttagtataaagaagatccgcttcctggtgatggatgaggcagaccggctgctggaacagggctgcactgacttcaccgtggacctggaggccatcctggcggctgtgccggcccgcaggcagacactgctgttcagcgccacgctgaccgacacactccgggagctgcagggtctggccaccaaccagcccttcttctgggaagcacaggccccggtgagcaccgtggagcagctggaccagcgctacctgctggtgcctgagaaggtcaaggacgcctacctggtccacctgatccagcgcttccaggatgagcacgaggactggtccattatcatcttcaccaacacgtgcaagacctgccagattctgtgcatgatgctgcgcaaattcagcttccccaccgtggctctgcactccatgatgaagcagaaagaacgctttgccgccctagccaagttcaagtccagcatctaccgggatcctgatcgcaacagacgtggccctccccgggcctggacatccctaccggtacagggtggtcatcaaccacaacaccccccgggctccccaagatctacatccaaccgaantcggcccgaacggcccgttgcaagggcggcagggtcaggcccatcacgcctggtgaacccagtacgacattccacctggtggcacgccttcgaagggacagatcaagaaagaagctgggaggaagtttctccctggnaaaaaggccgagggtgctacaaattccttcccacgggtccaccgggggggccaaaagaaaaggggggaaatccaat

SEQ ID NO: 347816 - DNA, 1088 bp, Homo Sapiens
tggaccggtccggaattcccgggatctacaaggggcccctacaagcggccacaaggatggcaggcttcgcggagctcgggctgtcatcgtggctcgtggaacaatgtcggcagctgggtttgaagcagcccacgcccgtgcagctcggctgcatccccgccatcctggagggtcgagactgcttgggctgtgctaagacaggcagtgggaagacagcagcgtttgtccttcccatcttgcagaagctgtctgaggatccctatggcatcttctgcctcgtcctgacacccaccagggagctggcctaccagatcgcagagcagttccgggtcctggggaagcctctagggctgaaagactgcatcatcgtcggtggcatggacatggtggcccaggcgctggagctctctcggaaaccacacgtggtcatcgccacgccggggcgcctggcagatcacctgcgcagctccaacacttttagtataaagaagatccgcttcctggtgatggatgaggcagaccggctgctggaacagggctgcactgacttcaccgtggacctggaggccatcctggcggctgtgccggcccgcaggcagacactgctgttcagcgccacgctgaccgacacactccgggagctgcagggtctggccaccaaccagcccttcttctgggaagcacaggccccggtgagcaccgtggagcagctggaccagcgctacctgctggtgcctgagaaggtcaaggacgcctacctggtccacctgatccagcgcttacaggatgagcacgaggactggtcccattatcatcttcaccaacacgtgcaagacctgccagaattctgtgcatgatgctgcgcaaattcaccttccccaacgtgggctctgcactccatgatggagccaaaaagaaagctttgccccccctaacccaagttcaagttccagcaatctacccgaatcctgaaaccccaacaaacgtggccctccccggggcgctgaaattcccatacgggaaagggggggtctttaaaccacgaacccccccgggggttccccagaattaactttccccgcagagcg

SEQ ID NO: 347817 - DNA, 2415 bp, Homo Sapiens
  misc_feature (2398)..(2398): n is a, c, g, or t
aattcttcgatagcggccacaggatggcaggcttcgcggagctcgggctgtcatcgtggctcgtggaacaatgtcggcagctgggtttgaagcagcccacgcccgtgcagctcggctgcatccccgccatcctggagggtcgagactgcttgggctgtgctaagacaggcagtgggaagacagcagcgtttgtccttcccatcttgcagaagctgtctgaggatccctatggcatcttctgcctcgtcctgacacccaccagggagctggcctaccagatcgcagagcagttccgggtcctggggaagcctctagggctgaaagactgcatcatcgtcggtggcatggacatggtggcccaggcgctggagctctctcggaaaccacacgtggtcatcgccacgccggggcgcctggcagatcacctgcgcagctccaacacttttagtataaagaagatccgcttcctggtgatggatgaggcagaccggctgctggaacagggctgcactgacttcaccgtggacctggaggccatcctggcggctgtgccggcccgcaggcagacactgctgttcagcgccacgctgaccgacacactccgggagctgcagggtctggccaccaaccagcccttcttctgggaagcacaggccccggtgagcaccgtggagcagctggaccagcgctacctgctggtgcctgagaaggtcaaggacgcctacctggtccacctgatccagcgcttccaggatgagcacgaggactggtccattatcatcttcaccaacacgtgcaagacctgccagattctgtgcatgatgctgcgcaaattcagcttccccaccgtggctctgcactccatgatgaagcagaaagaacgctttgccgccctagccaagttcaagtccagcatctaccggatcctgatcgcaacagacgtggcctcccggggcctggacatccctacggtacaggtggtcatcaaccacaacacccccgggctccccaagatctacatccaccgagtcggccggacggcccgtgcagggcggcagggtcaggccatcacgctggtgacacagtacgacatccacctggtgcacgccatcgaggagcagatcaagaagaagctggaggagttctccgtggaagaggccgaggtgctacagatcctcacacaggtcaacgtggtgcgaagagagtgtgagatcaaactggaggcggcccactttgacgaaaagaaggagatcaacaaacggaagcagctgatcctggaggggaaggaccctgacctggaggccaagcgcaaggctgagctggccaagatcaagcagaagaaccggcgcttcaaggagaaggtggaggagacgctgaagcgacagaaggctggcagggctggccacaaggggcgtccacccaggacaccgtctgggtcccactcaggcccagtcccctcccagggcctggtctgagccccacacggccatctgcccagtccttgactcgtccatggagctgagggtcggaggaaccttccttgggggcagcagcccttcccgggggcctacccagtgccccacagcagaacccgtgggcgctcgtgttgtgcgggccctgctcctctgccccgaaaccactggctggccccttccctgagccctggccaagattcaggctgcaggggaagaaagaacatgaccgggaggttgtgaccccaacccaaggtcaccccccaggggtgccgcatacaggaggtgcttaataaacgggtcttttgaccttcctcgggcgggcgcgccggggaaaaacgatcgccgggggcgtggtcggggcccgcctcgggcccctgcgagaaaggcttttctacaacccatttcccttttgggcccgctccggccccccccgtatagggtaaaaattggaaaccagtgggccccactaagaaatgggctctttcccccaaccggaaagaacccccccctggggtctcccattgtgaccctcacacgggcttttgttgggaaatcctctctccgacccccacatgtagaaaccagacgtgtgctgcccggggggccggatccaaacacccgaaaggcgggttctcttgcacacacacaacattccccgtaagaggggggaaacttcccccctgaaggagtcgccatctaagcctgggggtacccgcattggcacccccggggggggtgtgcaaacaagagtgaagaggctctcgcgaacaaatccccagaaatttgtaggggacccgccggctctctctggggcaaacctttcatgtcgggatagggaagcgcggggaagagaacatatgttcattttcagaactatgtgtccctctgctgccaatatgtggggtgcggcatacccccccggnaagtgcgcgcgcccgct

SEQ ID NO: 347818 - DNA, 401 bp, Homo Sapiens
  misc_feature (25)..(25): n is a, c, g, or t
  misc_feature (367)..(367): n is a, c, g, or t
cggccacaaggatggcaggcttcgnggacttcgggctgtcatcgtggctcgtggaacaatgtcggcagctgggtttgaagcagcccacgcccgtgcagctcggctattcgcccgccatcctggagggtcgagactgcttgggctgtgctaagacaggcagtgggaagacagcagcgtttgtccttcccatcttgcagaagctgtctgaggatccctatggcatcttctgcctcgtcctgacacccaccagggagctggcctaccagatcgcagagcagtttccgggtcctgggggaagcctcttagggcttgaaagactgcattcatcgttcggtgggcatgggacatgggtgggcccagggcgctnggaacttcttttcgggaaacccacacgttggttc

SEQ ID NO: 347819 - DNA, 795 bp, Homo Sapiens
actgagtaaggagtttgaccaagagaagaaagctaatgataggttggatactgtactagaaaagagtgaagaacatgctgattcaaaagaacatgccaagaaaactgaagaggctggtgatgaaatagaaacattcggattaggagtaacctatgagcaagctttggccaaagatttgtcaataccaacagatgcatcctctgagaaagcagagaagggtcttagttcagtgccagagatagctgaggtagaaccatccaaaaaggtggaacaaggtctggattttgctgtccagggtcaactagatgttaaaattagtgactttggacagatggcttcagggctaaacatagatgatagaagggcaacagagctaaaacttgaggctacacaggacatgaccccctcatccaaagcaccgcaggaggcagatgcatttatgggtgttgagtctggccacatgaaagaaggcactaaagttagtgagacagaagtcaaagagaaggtggccaagcctgacttggtgcaccaggaggctgtagacaaggaggagtcctatgaatctagtggtgagcatgaaagtctcaccatggagtccttgaaagctgatgagggcaagaaggaaacatctccagaatcatctctaattcaagatgagattgccgtcaaattgtcagtggaaataccttgcccacctgctgtttcagaggctgatttagacacagatgagagagctgatgtacagatggaatttattcaggggtcaaaagaagaaagcaaagagaccccagatat

SEQ ID NO: 347820 - DNA, 2584 bp, Homo Sapiens
  misc_feature (331)..(357): n is a, c, g, or t
  misc_feature (1146)..(1194): n is a, c, g, or t
  misc_feature (2246)..(2271): n is a, c, g, or t
  misc_feature (2289)..(2399): n is a, c, g, or t
  misc_feature (2401)..(2401): n is a, c, g, or t
  misc_feature (2408)..(2409): n is a, c, g, or t
  misc_feature (2417)..(2420): n is a, c, g, or t
  misc_feature (2423)..(2449): n is a, c, g, or t
  misc_feature (2478)..(2493): n is a, c, g, or t
gggatgggacagggattagaagagttgttggaggagctaggcctagggatatgggaggtgtggggttgaatatctagggctgggagaatcggaaggtattggagctatttggagtggcagagatggtgcaggaggcaggtcaaggaactggtaatagggaggtacagttaggatataggtgttgctgcttggggtggttatgtgtgtaagtaataaacgaaagggaaattgaggattaaggagccaggaagatgttgggaggaaatcaaaggtagtgtaagaaagcatggttggaggccaacttatcaatattatcaatattgatattcgnnnnnnnnnnnnnnnnnnnnnnnnnnntaaaaggaagtggcaggaatgaggaaacaagaaaaggagatgaaaagaggtattttgagaaatcagagagcaaagatgtaaatggagaaacaagaagtatttatccaaaaacatgttaagttgccttcaaagggagaaggttgcattgggcttaatactcttggattaaaggaagtttagtaattaatagattagtaatacttgctactagagatgccaggatgccagagaataggtggataagaggtagggagggctggagcttgagaatgagagaggttttgtttgtttttttaagagaaaaagaataggggatctggaaaaaggaagggagatcaaagattaggtgctggggactgaaaaataattttcatgtattaatactaccaaggatgatttggggaggaagacggagaaacagcaaggattatattttcctttgaagagttgctgggacctttcctaggttaggaattgtgtcttctcttatactggtggtataagaacaggaaataatacttattcctcaagggactatctgaggagaaccggagccttaccatcaaacttcggaaacggaagccagagaaaaaggtagaatggacaagtgacactgtggacaatgaacacatgggccgccgctcatcaaaatgctgctgtatttatgagaaacctcgggcctttggcgagagctccacggaaagtgatgaggaggaagaagagggctgtggtcatacacactgtgtacgtggccaccgcaaaggacggcgtcgtgcaaccctaggaccnnnnnnnnnnnnnnnnnnnnnnnnnnnnnnnnnnnnnnnnnnnnnnnnngggccaatgcagcactaaatccctctctcctccagcattcctgtgtctgtctggccctaaatgtatccatgtggctacttctccagccccctccttccctctcttctgcctgatagagggaagaggaagaggaggacgaacagagatcctgaaattctgacttgctgctattccagaacccagcctcctgggtttccccagtcctcatttttcctcccaatacccacccttctctctcgagggatctaggcaccttggtcccagtgtcttccttttgttctcactgccaaactgcctgtcctgggatctagttatcttggccctgcactctcaacatgagtagcgaacacttaaattgggttttcaacagtcccagctttcactgccagggtcccagtcagattccaggaatttgcgccctaactttgcttgctaatcctggtttagagctatcccactaaaatatttaatcctaattcttagtccttgcctgtgagatatgaggtcttacaggagacctcagagctcccagcccttctcctcctgctaacccttctcacaccctcaagaggagttagaaaagaggtccttgtcattctcacctcttatggaaaatggaataagaaataatcatatcctttcttcccacccttctcctgttatttaggatttctgacaaagctggcttgagattggtcacttagagccgactgtctcctctgccttttgtttttcagcttcagagacagatccaatatagtcccagggacctgggtctctgggagaggaaggaagagggagggagcaaagagattggggtatgtcccctgtagtacactcttacctcttacttcctagactttgatttctccggcagcccagatgttcagttctcttggcccctctctaccccttactgggatctggttttcattttccggtccttttgccatacacagttacagagatcagtcaaatccataccaccactgagatctcatttattgccacagatgcacaaaataaataacccaaaatcacaaaatgtgttnnnnnnnnnnnnnnnnnnnnnnnnnncacacaacacacaaaaannnnnnnnnnnnnnnnnnnnnnnnnnnnnnnnnnnnnnnnnnnnnnnnnnnnnnnnnnnnnnnnnnnnnnnnnnnnnnnnnnnnnnnnnnnnnnnnnnnnnnnnnnnnnnncncacaaannccaaaaannnnccnnnnnnnnnnnnnnnnnnnnnnnnnnnataaaaaaactttctaaaaacccctcgcnnnnnnnnnnnnnnnncccacaagattaagggaaaagacagtgctcatcttgttcccgcagaggagaactatgtggtggaccacaccacttgttttttgttcacaac

SEQ ID NO: 347821 - DNA, 903 bp, Homo Sapiens
cacccggaagcggcgagccggaagtggggttagccaggttatccccaggggtggagaagcggaggcccaggaggagggggaataaagaaggtggaggatcctggctaccactctgaatccgataccgcttctcttagacctcagcgacagaaaaagggaagggtgtctcatcccccttcctcctctcctccctgtcctgagccttagccatggccgaggcaggggctgggctgagcgagaccgtcactgagacaacggttaccgtgacaaccgagcccgagaaccggagccttaccatcaaacttcggaaacggaagccagagaaaaaggtagaatggacaagtgacactgtggacaatgaacacatgggccgccgctcatccaaatgctgctgtatttatgagaaacctcgggcctttggcgagagctccacggaaagtgatgaggaggaagaagagggctgtggtcatacacactgtgtacgtggccaccgcaaaggacggcgtcgtgcaaccctaggaccgacccccaccacccctccccagcctcctgacccttcccagccccctccagggccaatgcagcactaaatccctctctcctccagcattcctgtgtctgtctggccctaaatgtatccatgtggctacttctccagccccctccttccctctcttctgcctgatagagggaagaggaagaggaggacgaacagagatcctgaaattctgacttgctgctattccagaacccagcctcctggggtttccccagccctcatttttcctcccaatacccacccctcctctctcgaagggatctaggcacccttggtcccagtgtcttcccttttggtctcactggccaaaactgccttggtcccgggggatcctaagttaatct

SEQ ID NO: 347822 - DNA, 1177 bp, Homo Sapiens
  misc_feature (531)..(576): n is a, c, g, or t
gctgggtggcgaattcggcacgaggcggaagtggggttagccaggttatccccaggggtggagaagcggaggcccaggaggagggggaataaagaaggtggaggatcctggctaccactctgaatccgataccgcttctcttagacctcagcgacagaaaaagggaagggtgtctcatcccccttcctcctctcctccctgtcctgagccttagccatggccgaggcaggggctgggctgagcgagaccgtcactgagacaacggttaccgtgacaaccgagcccgagaaccggagccttaccatcaaacttcggaaacggaagccagagaaaaaggtagaatggacaagtgacactgtggacaatgaacacatgggccgccgctcatccaaatgctgctgtatttatgagaaacctcgggcctttggcgagagctccacggaaagtgatgaggaggaagaagagggctgtggtcatacacactgtgtacgtggccaccgcaaaggacggcgtcgtgcaaccctaggaccnnnnnnnnnnnnnnnnnnnnnnnnnnnnnnnnnnnnnnnnnnnnnnccagggccaatgcagcactaaatccctctctcctccagcattcctgtgtctgtctggccctaaatgtatccatgtggctacttctccagccccctccttccctctcttctgcctgatagagggaagaggaagaggaggacgaacagagatcctgaaattctgacttgctgctattccagaacccagccccctgggtttccccagtcctcatttttcctcccaatacccacccttctctctcgagggatctaggcaccttgggtcccagtggccttcctttttgttctcactgcccaactgcctgtcctggggatctagttatccttgggccctgcactctcaacatgagtagccaacactttaaaatggggttttcaacagtcccaagctttcactgccaggggtcccagtcaaaatttccggaaatttgcgcccctaacttggcttggctaaatccctgggtttagagctatcccccctaaaatattttattcctaattcttaagccctggcccgggggaagaatattgaaggcctttacggggaaaccctcagaaacttcccaagccctttctccctcctgggctaaccccttctccac

SEQ ID NO: 347823 - DNA, 708 bp, Homo Sapiens
  misc_feature (434)..(490): n is a, c, g, or t
caggattagaagagttgttggaggagctaggcctagggatatgggaggtgtggggttgaatatctagggctgggagaatcggaaggtattggagctatttggagtggcagagatggtgcaggaggatgatttggggaggaagacggagaaacagcaaggattatattttcctttgaagagttgctgggacctttcctaggagaaccggagccttaccatcaaacttcggaaacggaagccagagaaaaaggtagaatggacaagtgacactgtggacaatgaacacatgggccgccgctcatcaaaatgctgctgtatttatgagaaacctcgggcctttggcgagagctccacggaaagtgatgaggaggaagaagagggctgtggtcatacacactgtgtacgtggccaccgcaaaggacggcgtcgtgcannnnnnnnnnnnnnnnnnnnnnnnnnnnnnnnnnnnnnnnnnnnnnnnnnnnnnnnnccaggccaatgcagcactaaatccctctctcctccagcattcctgtgtctgtctggccctaaatgtatccatgtggctacttctccagccccctccttccctctcttctgcctgatagagggaagaggaagaggaggacgaacagagatcctgaaattctgacttgctgctattccagaacccagcctcctgggtttccccagttcctcatttttcct

SEQ ID NO: 347824 - DNA, 458 bp, Homo Sapiens
tacagggcatgctgttgtctcaaaattgaaatgtgcatcttaggtatcagttcccagcctcagactcttctcaggcaggtggaccggatctcagctgcagaacatagtgagtggccaaacctacacagcccagccagtagtgtgctttggggtgattgcaaggcagcaaacagtggggacaagttttgtctggcatttgaaaaggtgttatcccttactttccacatttctgaattggattcttgttccctggtaaacaccagatattataaacagagcatgctgttatgacattgtgcttctatatacctttttgtataatgtatctatctcattatattacctatggtttcagtatgatctgttgtgtatgttccaccgtatatttaatgtctctgtaaaggcacttccaaacattttgaaaacgaagaaataaaacatgttggatgattccttgt

SEQ ID NO: 347825 - DNA, 514 bp, Homo Sapiens
cggcacgaggacatttgcaaaagatattccagtctttcgatgttcagaattgaaaatgtggagatagaaaagctcaaacagactcctaaaaagagggtttctttcctgaagactccaagaaaatgagtgtgcagatgagttagcttgacaacctcaactctggggagcaggcaggcggtctgaggaagataagggcccacgccccactcacctggcacctgttcggtggtcccggggcatcatggtctgcagctctgggcccccagccccactgtgaagtcagtcctgcatgctggccgaggcccggccacctcccgatgcctccagagtcagtgggaaggagtcagcccttcccagacttccccgccacctccagcaagagcagctcagtttgtggctctgggagctccgcttttgcaaacccaaaaaggctgtgcatttggaaaccaaacgctcagcatgcggctgcccgagtctggttttgtggcaaggaaactgtggatggctctcggtg

SEQ ID NO: 347826 - DNA, 1260 bp, Homo Sapiens
  misc_feature (19)..(19): n is a, c, g, or t
  misc_feature (27)..(27): n is a, c, g, or t
ccaaagcccgggccaaccntccccgangccctcccaaagtccagtgggaaaggaagtcaagccccttccccagacttcccggcccaccccccagcaggagcagcctcagtttgtggccctgggaaccccgcttttgcaaacccaaaaaggctgtgcatttggaagccaaacgctcagcatgcggctgccgagtctggttttgtggacaaagcaaactgtggaatggcttctcggtgtctgtataaagggacaaacggttgcattcaccctttgtactataacaccgcttctgcattcgccatatccgttttttaacctttttgtctccggggaacttctcattcgattattatgtcttctgatgatttgccatgttattttaaaggtgattttattttcttatggacaggaaaaaagaaaatgaggaggagttggttttactcttagagataagacttcagcaggggctcagaaaccccaaactctagttaaattgcttctcggaggaaaatcttaatctagacagattcagattcccaggctctcctggaagccctgcacttcagggcacaggggccctgggacgtggttggcagccaggctgcgagagagctaaaaaggaacaagaacatcagctcggatgtttgtctctcagccctgacacctgccactctccttcccggggcacttggccctatcagagggacatgaaatgctgtccgaatggtggcagaaatgcagcgacattgcatgcagcagagtctttgcttcgaaagatggggcgccatgtttcagagaacatttatcttagtcccacgttcaggtgagaagacctcaaaggtaccctctgtccagaataaacattggaacaatctctcaattggcttttgtcactacacataatgtaatctcccttctttcagctcccccaacagtgagcatgcttcccaaaaaattacaacatcaaaaccaggaatgtccccgcatctactattaccaggcttgcaattggttcaattttcccataaaaacatgtttgtccaaaagaagggaaactgtgaatttattccatgcatgtaataaactctgcaagaagtttaacccacataggtttgcggcactgcaaaattgttcatgggtctatgtagcaaatgattctctgccttgacaatcatgtatacatatcaagatttctatcataatgataatgagattgatgacttcttgttttcctccaataaagacaattaatcaccttca

SEQ ID NO: 347827 - DNA, 604 bp, Homo Sapiens
  misc_feature (27)..(27): n is a, c, g, or t
  misc_feature (425)..(425): n is a, c, g, or t
  misc_feature (454)..(454): n is a, c, g, or t
  misc_feature (504)..(504): n is a, c, g, or t
  misc_feature (523)..(523): n is a, c, g, or t
  misc_feature (539)..(539): n is a, c, g, or t
  misc_feature (545)..(545): n is a, c, g, or t
  misc_feature (594)..(594): n is a, c, g, or t
accacccttttgaaggggacacctggntcctgcggttggggctgcaggtgtgcctgacatttgcaaaagatattccagtctttcgatgttcagaattgaaaatgtggagatagaaaagcttcaaacagactcctaaaaggagggtttctttcctgaagactccaagaaaatgagtgtgcagatgagttaggcttgacaacctcaactctggggagcaggcaggcggtctgaggaagataagggcccacgccccactcacctgggcacctgttcggtggtcccggggcatcacggtctgcagctctgggcccccagccccactgtgaagtcagtcctgcatgctggccgaggcccggccacctcccgatgcctccagagtcagtggggaaggagttcagccctttcccagacttccccgccacctncagcaggagcagctcagtttgttgctctnggagcttcgttttgcaaacccaaaaaggctgtgattttgaagccaaacgnttagatgcggctgcgagtntgttttgtggcaaagnaaactntggaatgcttttggtgtctgtataagggcaaacggttcattacctttgntctttacacg

SEQ ID NO: 347828 - DNA, 3074 bp, Homo Sapiens
  misc_feature (167)..(167): n is a, c, g, or t
  misc_feature (219)..(219): n is a, c, g, or t
  misc_feature (410)..(428): n is a, c, g, or t
  misc_feature (3007)..(3007): n is a, c, g, or t
acgtggggtgcctaccaagtgctttagaaactggaatgtgattgggcttcttagtcactggcccagaccagagttgaccccctttccatgctctgggtcactggggcatgtggcccagagaaaaagctttcccttagtgctagccgaatttctgtaacctgttattnttctttccaaggttcccaaaaatagtggtagcagaaaagtaccagcagaganaatgcccagtcccaccctacaccagggctgagctgtcaggaacaggcccgatgcgtgaatatcccccactccaggagatctcgccattgtctgggttgcagccaggggcccagacagatatcctgggcaaattcaaactaagtggtaggagaaagtagcattcagataagagcttgaaataaggaaaattnnnnnnnnnnnnnnnnnnntaggaattttatttcactgtaaatagaggaggggtaaaaagggactgtggtgacagtcctgaagttctggcatcaaaactgttctgccttttagggccacacatctgtctgtcttcactctgctggtctgaagggaacatgctttcaggatcactagagccagctaccagttctcagtcctgcttgaagtttctcttggctctggggtgggcctggctggcctggggccttgccaggcagcttctgctgaccttccctcttggcttttgggcttcctggcaccactctgactgaagctgtgaaacctgcaatggccgaggttgtgctttgggctatgagtcctgggtataaccttggggctcactcccccaaggaggtgtcctcttcccaggcagtttaatgctgtgtttttcataatggtgacaggaataaggggaccctaagacttggccacttaagcaaggtcagggtgacatcccatagggagcagcaggaccagaaaggctggtatctgccctgctagccccaggtacttgggctgagggcagaaagaggcaatgtcctcatggtttctactgtaggtgtcctcaaatgaagaggagcacttgaaggttagatcagtacctagagtgaggggactgctccatccctgggatactctaggggcccttgctcaagtgttctgttggggaaggctgggctcaggagaggaagccaaggagcagacttggagtggttttcttgccagggccactgctcagctgaccctcggtccctgcagctccaccacatcctccagctgccccttcattcacatctgaacatgaggaagaggaatgctaggtgaaaaatgcttagggcaagtgggcttcagaggagcctgtctataacccaggccttccttggttagaaacactgatctcaattttgggtagccacaaagaaaagactgaaacattttctcatacccttattagagccaaacgctaatatttgtacttggcagaatttcagagtcacagtgatgggagggcttgaaaacgaaatgggcttcactgggtttctgaacgtttttaacaactctatacataccgcagaggggctctggggattagaacactgcaaagggagattctggacgggggttggggcagggcgtctgcaactctggacttggggagcaacggcacttcccctttggtaaaaagctagatgactgcctgtggagaagaggctggctgctccttcgtgctttcctgcttcctaggactcttgtgggatgggaactctactctttgctgagggaagtgtcccctgggatctctgtagcaggccctcacccaggaagtttgctgttctggaatagggagaagcgtgatccaaatgggcctgttcctgttgtggaagaactctggggctgctttgccaggccctggaatacggcaggcctgacctggcccaccaactctcctcactcacccgtggagagctagaggcagcagctccaaagaggtaggcatcaccttgatctgtgaaggatcagggaacaagatggacttccagtccctgtgactgatgaggcaggagaaaaatgctattcagctctcaaagcccagagctttgtctctactcaaaatgccccgtctgtgagatcgagcagcccaaggccagtggcacaggagatgatttgccaggagagtaggtaagagcccctgtgcttaatgtgctttcatctcagtgcaaaaccccaggcctggctgcttcagatgcagttcttaggcccaggagtcctgcgctttcttgttttgactagactgaataatggcccctcctatggatcaatcctgggggacggctgaagagcatttctaaaagctgtgggccatacacctgagcccagatttgtctcctgtctgcttcatttcagtcccaaataatccaaccccagcagctcaccaccctgcttccagctaaggtggttcctacaggaggagactacacagggctctcaagaagcccctggccgcagctccttgctttcctcgaaacattcagcaccgagcggtgtgtgttcttctgtacgcacccgatttagcacaagggcctcgagcaatgaagacgtgtttgcttctgcatgactgcactccactcccttttgaataactcttggtagtcagatctcgctatgcctaagtcattaagttggaaacagaagcctagaacatggaccccacggccggccaagatgagccataacacacgaactgaagaatttgaatttgatgagtacttaggaaggagggctggggcttggaggccaggcttggtgctcttgtggcagcctctgattgccccaaaaggccttccatgccaggcccaagccctagcctgctggggaaggacatgtgatgagcagtgaggagaagcagccactcaagccgagtctcactgatagggagaagcggaaaacttctgtaaggctttcccaggaccttctctgcagagcctcttcttaagccccagcctcttatcctgtttgtcaggatggctgaaagagtccctgctcagggctctgcagntctttcttgggctgtggaaggtgtctacagttgagttgagctggaatgatgaggaagcagagccccg

SEQ ID NO: 347829 - DNA, 323 bp, Homo Sapiens
cgggcccagcactcttggttttgcaaacggttcccagaggctccttcctgcagtgtcagcatcagcccatgtgggtcccatcgcagatagcagcccagccagcagcagcagcaagagtcaggacaagaccctgctgcccacagagcaggagtccagaaggtaacttgacagcaagctgaggggaacgtccccaagccctgtctccctgtctctacagctgcatgctcctctgcgtggcccagccttcacagcgctccagaagaagctgatgccctgaggctgggcacagtggaaatcataataaagcgattgcgatgctcaac

SEQ ID NO: 347830 - DNA, 1501 bp, Homo Sapiens
  misc_feature (662)..(662): n is a, c, g, or t
  misc_feature (727)..(727): n is a, c, g, or t
cagaaaacggcgcatagggtaggctgggccagccaagagattatgtgaaggttcgttgggaccctccggaggccagtggggtactgcaaagagccatgggggtgttgatgtccaagcggcagacagtggagcaggtgcagaaggtgagtctggctgtgtctgctttcaaggatgggctgcgggacaggccttccatccgacgcacaggtgagctgccagggtcccgccgtggcactgtagagggctccgtccaggaggtacaggaggagaaggaagcagaagcaggaacctcggtggtccaggaagagagtagtgccggccgcgcacctgggagcggctccgagatgggcgcggcgtggagcctgaggagtttgacaggacaagtcgattcacaccccctgcgttcatccgccccacccggaagctggatgatgacaaacctccagaaatctgcctggagcccagagagcctgttgtcaacgatgagatgtgtgatgtttgtgaggtctggacagctgagagcctcttcccgtgcagggtctgcaccagggttttccatgatggctgcctgcgccgcatgggctacatccaaggagacagtgcagcggaggtgacggagatggcccacacagaaacaggctggagctgccactactgtgaanaacatcaacttggctgcttactgagggagggaaatgtatagcctcacggagacctttcagcgggngtaaagtcatccctgattgctccctgacactggaggactttctgcgttaccgccaccaagcagccaagcggggggaccgtgacaggcccctgagtgaggaccaagaagagcaggcggccccccagtttcctgccctggaccctgaacatcgaggccacatagagtggcctgacttcttgtcccatgagtccctcctgcttctgcagcagttgcgtccccagaactctctgttgaggcttctgacagtgaaggagcgggagcgagcccgagccgccttcctggctcggggcagtgggagcaccgtcagtgaggcagagtgccgccgggcccagcactcttggttttgcaaacggttcccagaggctccttcctgcagtgtcagcatcagccatgtgggtcccatcgcagatagcagcccagccagcagcagcagcaagagtcaggacaagaccctgctgcccacagagcaggagtccagatttgtggactggcctaccttcctgcaagagaatgtcctctacatcctggctgctcgccccaacagcgcagccattcacctgaagcccccaggatagcatggagcaaagaagctcggtttgaggacaatgaaatcccctccctcctttcctttctcccttcaccccaccaacatgtgccacagagagtacatggggttgggacaccttccagcctcgtaaccttgtcattgacctttaacgtcgtctagatcatcactactccctcacgttagagctgccgacgtaggggatcctc

SEQ ID NO: 347831 - DNA, 453 bp, Homo Sapiens
  misc_feature (11)..(11): n is a, c, g, or t
  misc_feature (39)..(39): n is a, c, g, or t
ggaaaaaaaangaagggtaaaaaaggaatgtggttaaanaacccctaaaatcctggcaatcaaaaatgttcctgcccttttaagggccaaaacatctgtctgtccttcaactctgctggtcctgaaagggaacatgctttcaggatcactagagccagctaccagttctcagtcctgcttgaaagtttctcttggctctggggtgggcctggtctgcctggggccttgcccaggcagcttctgctgaccttccctcttggcttttgggcttcctggcaccactctgactgaagctgtgaaacctgcaatggccgaggttgtgctttgggctatgagtcctgggtataaccttggggctcactcccccaaggaggtgtcctcttccccaggcagtttaatgctgtgtttttcataatggtgacaggaataaggggaccctaagacttggccact

SEQ ID NO: 347832 - DNA, 1242 bp, Homo Sapiens
  misc_feature (36)..(36): n is a, c, g, or t
  misc_feature (425)..(441): n is a, c, g, or t
tcccctgggaaaaaggaacaccctcccttgggggantgagccccccaaggtttataccccaggactcatagccccaaagcacaaccctcggcccattgcaggtttccacagccttcagtcagagtggtgccccaggaagccccaaaagcccaagagggaaggtccagcagaagccttccctggcaaagcccccaggccagcccaggcccaccccagagcccaagagaaacttcaagccaggactgagaactggtagctggctctagtgatcctgaaagcatgttcccttcagaccagcagagtgaagacagacagatgtgtggccctaaaaggcagaacagttttgatgccagaacttcaggactgtcaccacagtccctttttacccctcctctatttacagtgaaataaaattcctattttcnnnnnnnnnnnnnnnnnaattttccttatttcaagctcttatctgaaaaaatgctactttctcctaccacttagtttgaatttgcccaggatatctgtctgggcccctggctgcaacccagacaatggcgagatctcctggagtgggggatattcacgcatcgtgcctgttcctgacagctcagccctggtgtagggtgggactgggcattttctctgctgttacttttctgctaccactatttttgggcaaccttggaaagaaaataaacaggttacagaatttcggctagcactaagggaaagctttttcctctgggccacatgccccagtgacccagagcatggaaagggggtcagctctggtctgggccagtgactaagaagcccaatcacattccagtttctatagcactgggtaggcacaacccacagttaagaacatcaagttataagtagccaggcctttccatagccatggtgacacaaaggccctcaagattagcctcctgccatcatgggttggcctgtgatctgtcccccagccaaacccaagtttgtgagagggactctgagaacacttgagtaacacttgggaatccaatgcgctctggtccctcatgcccttcccatgtgcttttctgcagaaggtaacttgacagcaagctgaggggaacgtccccaagccctgtctccctgtctctacagctgcatgctcctctgcgtggcccagccttcacagcgctccagaagaagctgatgccctgaggctgggcacagtggaaatcataataaagcgattgcgatgctcaaaaaaaa

SEQ ID NO: 347833 - DNA, 1196 bp, Homo Sapiens
cggctgtctgcagctcaactctcgcaacttcctcacggagcaaggcgccgacggtgccggccgcttccacggctcgggcggcccgttcgccatgcacccctacccgtacccgtgctcgcgcctggcgggcgcacagtgccaggcggccggcggcctgggcggcggcgcggcgcacgccctgcggacccacggctactgcgccgcctacgagacgctgtatgcggcggcaggcggtggcggcgcgagcccggactacaacagctccgagtacgagggcccgctcagccccccgctctgtctcaatggcaacttctcactcaagcaggactcctcgcccgaccacgagaaaagctaccactactctatgcactactcggcgctgcccggttcgcggcccacgggccacgggctagtcttcggctcgtcggctgtgcgcgggggcgtccactcggagaatctcttgtcttacgatatgcaccttcaccacgaccggggccccatgtacgaggagctcaatgcgttttttcataactgagacttcgcgccggctcccttctttttcttttgcctttgcccgcccccctgtccccagcccccagagcgcagggacacccccatcctaccccggcgccgggcgcggggagcgggccaccggtcctgccgctctcctggggcagcgcagtcctgttacctgtgggtggcctgtcccaggggcctcgcttcccccaggggactcgccttctctctccccaaggggttccctcctcctctctcccaaggagtgcttctccagggacctctctccgggggctccctggaggcacccctcccccattcccaatatcttcgctgaggtttcctcctccccctcctccctgcaggcccaaggcgttggtaagggggcagctgagcaatggaacgcgtttccccctctcattattattttaaaaacagacacccagctgccgaggcaaaaaggagccaggcgctccctctttcttgaagagggtagaagttagggcgccggagcccgggcctggaacgccctcacccgcaacctccagtctccgcgttttgcgattttaattttggcgggaggggaagtggattgagaggaaagagagaggccaagacaatttgtaactagaaaccgtttttgccctttaccttttttaaagcaaaccaaaccataaaaa

SEQ ID NO: 347834 - DNA, 375 bp, Homo Sapiens
  misc_feature (265)..(291): n is a, c, g, or t
  misc_feature (296)..(296): n is a, c, g, or t
  misc_feature (352)..(352): n is a, c, g, or t
  misc_feature (365)..(365): n is a, c, g, or t
cttgactcctctccgaggcaccatgctgacccgcctgttcagcgagcccggccttctctcggactgtgcccaagtttcgccagctggggcgacggcgaagacgacgagccgaggagcgacaagggcgacgcgccgccaccgccaccgcctgcgcccgggccaggggctccggggccagcccgggcggccaagccagtccctctccgtggagaagaggggacggaggccacgttggccgaggtcaaggaggaaggcgagctggggnnnnnnnnnnnnnnnnnnnnnnnnnnngatgnaggactggacaatgcggatggttagctgtcgaagaatggcggggcatagaaatgtnggatgaccgggtngtcgcttgaa

SEQ ID NO: 347835 - DNA, 186 bp, Homo Sapiens
  misc_feature (25)..(25): n is a, c, g, or t
caaaaaggagaggggcaaagaaagncgagaagagggatcttctcgcttatttcattgttcccccatcttcagggagcgggggcagcggctcctcaaggcggcgggcgccggcgtcttcagagcgccatgcgaaccgcggagcgagtgtggcatctctaccaggcggggtaccagcctctatccgct

SEQ ID NO: 347836 - DNA, 916 bp, Homo Sapiens
  misc_feature (867)..(867): n is a, c, g, or t
gccttctctaggttctcaagggtgagctggacccgggcaatgtgcaggaatgtggggagcaaaagtagctgattccagccccgttctggggtcactggggaggcagaggctgagggcctgttctctggtcaccagggactgggggcacggtccacagcggatgagaacagcaggtcacagtagtggctttgggaagggcccctcctgctttgccctgttcggaaaggggctccctcagagcccctgggcccagtaacccgcttctgtctcctgactcctgctggataaattgccaggtttatcaaatacaagaaaacacctgctttggctaggaggtaagtcccaaaaagaacgtcttaagtagagcaaaggcatccaccgaggccatttggtggcccctgggaagtggggaagcagggcctgagcgtccccaggctgctagggcagcagctggctcagggcacactctctcgtgccagcttctgccaccagcccagtgtccacggagccgcggggccagaggagctcagggagacctggctgtctagggcatggtacccagtatcccggtgtgtgcccatcctcagccacttgtgtctttctttccatgtgggagttctcccggtgacacctgccctccgttgagggtggaatctgtcactcatgcctttgagggacccagatggaccatccctcttctgcttgctttctacattcctaaaaacctcaacgttaatccctcaccagtcgggccgagtgtggcctcatggttctgccgcggcccagtcttctcccactggcttcacgctagagggcgccatgcgctctgggtgaaatgagacgctggtgtgggggtccccatgtagnagaccctcaaggtccctatcccagagaccctccaggccagtggctggga

SEQ ID NO: 347837 - DNA, 583 bp, Homo Sapiens
  misc_feature (16)..(16): n is a, c, g, or t
  misc_feature (40)..(40): n is a, c, g, or t
  misc_feature (46)..(46): n is a, c, g, or t
agccagccttcacccnaactcccctgccaaagtgacctgnaagaangagggacaaaccgctgctcccagtccacaccgcagaagcctggactggccccacacaggcccgaagcatgagaaaactcatcgcaggactcattttcccttaaaatttggacttgtacagtaaggacttcaactgaccttcctcagactgaggactgttcccagtgtatacatcaagtcactgagataggacaaaaggttgctacagtcctattattttatggttattataagtatactggaactctaaaaagaacttgtttgtataatgttattctatacaaggtatgtagcccaggaaatgaccaacctgatgtgtttatgacccatctgagcctcccatgaccacagtttttaaaataagactaaggactgaggactggtgggggctcataaacgatatgagtaaagtgttagccaaaacagaagaaaaaggggtgcccaaacaagtcaccttaaaatttgatgcctgtgctgtcattaatagtaataagttaggaataaaatgtggttctcttaattaggaaaaaggctatat

SEQ ID NO: 347838 - DNA, 1311 bp, Homo Sapiens
  misc_feature (1173)..(1244): n is a, c, g, or t
  misc_feature (1248)..(1248): n is a, c, g, or t
  misc_feature (1275)..(1275): n is a, c, g, or t
  misc_feature (1277)..(1277): n is a, c, g, or t
  misc_feature (1280)..(1280): n is a, c, g, or t
cagacctaaccccacagacaaaactgtcacgtacaaacacatggacccacctccagctcccgtgcaagaccgcagccccttcgccacgccaccctgatgtgtccatggtggacccagaggccttggacattgagcagaacctgggcaaagctctaaagaaagatctgaaagagaagaccaaaaccaaaaagccaggtacaaagaccaagtcatcttcacctgtcaaaaagagtgatgggaagtctaagcccttggcagcttcaccaaaaccagcgggcttgaaagaatcctcggataaagtgtccagggtggcttctcctaagaagaaagaatctgtggaaaaggcagcaaaacccaccaccactcctgaggtcaaagctgcacgtggggaagagaaagacaaggagaccaagaatgctgccaatgcctctgcatccaagtcggccaagaccgccactgcaggaccaggaactaccaagacgaccaagtcatctgctgtgcccccaggcctccctgtgtatttggacctgtgctacattcctaaccacagcaatagtaagaatgttgatgtggaatttttcaagagagtgcggtcttcctactacgtggtgagtgggaatgaccctgctgctgaggagcccagccgggctgtcctgggacgctttgttggaaggaaaggctcagtggggcagcaacatgcaggtgacactgatcccaactcatgactcagaagtgatgagggaatggtaccaggagacccatgagaaacagcaagatctcaacatcatggttttagcaagcagcagcacagtggttatgcaagatgaatccttccctgcatgcaagattgaactgtaaaaaccaaggccagccacaccacaggatctgaactttgtttccagaaattcttcaatttgaaatcaccttttctaaaaagtcaattcatctagttaagtcgctgaacaattacctgccaaatgctatactgtgtcatggtgatgcaagtcactaaatttctcagtttttgctgattgctaagggaaataacagtatttccacaatagggttcaaattcctgcaaaattacctaccccagttcatctctgctgaacatttggaaaccatgcactagccaacccaactgacttctgctaggtagaggcatttgtcttnnnnnnnnnnnnnnnnnnnnnnnnnnnnnnnnnnnnnnnnnnnnnnnnnnnnnnnnnnnnnnnnnnnnnnnnaagnttgagaaagaaaaggaattcaaagtgnanggngatgtattgacagagagttctggtgagatac

SEQ ID NO: 347839 - DNA, 384 bp, Homo Sapiens
  misc_feature (137)..(151): n is a, c, g, or t
  misc_feature (232)..(323): n is a, c, g, or t
  misc_feature (333)..(333): n is a, c, g, or t
  misc_feature (370)..(370): n is a, c, g, or t
ctttctaatcgaggtgtgaaaaagttctaggttcagttgaagttctgatgaagaaacacaattgagattttttcagtgataaaatctgcatatttgtatttcaacaatgtagctaaaacttgatgtaaattcctccnnnnnnnnnnnnnnnggcttaatgaatatcatttattcagtatgaaatctttatactatatgttccacgtgttaagaataaatgtacattaaatgnnnnnnnnnnnnnnnnnnnnnnnnnnnnnnnnnnnnnnnnnnnnnnnnnnnnnnnnnnnnnnnnnnnnnnnnnnnnnnnnnnnnnnnnnnnntttggcccangggcatgggtggggcaccatgccctgtaaaatccccngcttacttcagggg

SEQ ID NO: 347840 - DNA, 465 bp, Homo Sapiens
  misc_feature (396)..(410): n is a, c, g, or t
tgcgaatatatatgacgttgtacattgcacatacccttggatccccacagtttggtcctcctcccagctacccctttatagtatgacgagttaacaagttggtgacctgcacaaagcgagacacagctatttaatctcttgccagatatcgcccctcttggtgcgatgctgtacaggtctctgtaaaaagtccttgctgtctcagcagccaatcaacttatagtttatttttttctggggttatgtatagttaagttttctttctaatcgaggtgtgaaaaagttctaggttcagttgaagttctgatgaagaaacacaattgagatttattcagtgataaaatctgcatatttgtatttcaacaatgtagctaaaacttgatgtaaattcctccnnnnnnnnnnnnnnnggcttaatgaatatcatttattcagtatgaaatctttatactatatattcgcacg

SEQ ID NO: 347841 - DNA, 755 bp, Homo Sapiens
cagaatattgccaagagagcaaggagacttcgcaggcgcaaaaagaacaggatgttatagaaaaaggctaggaagaggcgcattcaaatatcggaattaagaaggttttcgattggaggtgatatagtatggttacagtatgggaagcctacaggtagacaccagatgcctattaaacaaaagtatgaactcaaacaagggataaccatcggattccacacaatggtttcgaccacataatatcagagagatgagggtcagcagattgaatattcagcaaggacgtgtggatggagttttcttggtacgggaaaggcagagtaaccccaaaactttcgaactgacaatgagtcagggacaaaaaataaagcactttcaaattataccagtagaagatgacggtgaaatgttccacacaatggatgatggccacacaagatttacagatctaatacagactggtggagttctatcaactcaataagggcgttcttccttgcaagttgaaacattattgtgctaggattgctctctagacaagccagaagtgacttattaaactattaaaggaaaaggactcaagaaaaataataaaagaccataaataagggcgaaaacattatcatgtgaaaagaatgtatttcacctgcaagttacaaaaaaatagtttgtgcattgcaaataagcaaagacttggattgactttacattcatcatttaaaatttcaatagttaaggattaaacctaaaaaaaa

SEQ ID NO: 347842 - DNA, 727 bp, Homo Sapiens
  misc_feature (454)..(498): n is a, c, g, or t
  misc_feature (518)..(541): n is a, c, g, or t
gggtccggaattcccgggatgggagaggttcaggagtcaggtcttctgccttctgagttggctcatcctgggcagtcacagactgtcctgcctgcacggctcctatccacctgggggtgtcgcagttgaggggctaattcccacgggactgacgttagttccctactccatccttccctggtgattcttgatcttcaaagcctcggggatcccaggtttccccatgtaactgagacaccctgcctgttagccctgggagacccctaaccttggcccaagacccctttgattctctaaggagcacgaaagggggaatgcccctcccaggagtttatgggagaagggactgggccggctgcctcccagcgatgcacttgacctgacactccccatgtcctggtgcgcacagcccttgtcggtgccccggcccctcccgcagcgttactgcctgtgnnnnnnnnnnnnnnnnnnnnnnnnnnnnnnnnnnnnnnnnnnnnnaaggctccacaaatatatcnnnnnnnnnnnnnnnnnnnnnnnncggtgaagggcggtccccatcctgggcctccactctagacccccccaccacctggttaagtctcgagtgaatccagtggccccgtggcaccctcctttatgacatccatccatctgtggtgaaccaagtgaaggtggtgacttctggtgacatagtaataaagtgaagactcagaacccaccagtg

SEQ ID NO: 347843 - DNA, 2740 bp, Homo Sapiens
  misc_feature (2458)..(2503): n is a, c, g, or t
  misc_feature (2523)..(2546): n is a, c, g, or t
caggctggtacggtccggaattctcgggatatcgtcgaccacgcgtcgcactgtccttgcctctaggaggggtcactaagcccttacctagggctgggtggacaacaaggcacagatgagggtgtgactggcccgaggtcacggtgagtgagtggcaaagctggccctgacgcctggttttcttggccccagctgcccagcaggtgcctcgattccctgcccttgtgacctcccaggaaacagaactgatctgggacactatgtcacctctcctctcatctggggtcagtcagggttcgggggctgcagcagccaagcgcatgagaggtgtttccttggccttccagaaggcccactgtggagccagcctccctatgggaggcagagcggcaaggacagggctttggaatcagccaggtcggctcctgggctgtggccgtggagaaacactgcccccaggatgacacaggcaagagcccctgaggcatgggaggcccagggaagaccatgggctgtaggggagagtgtggcaggtgacccaaaggcccaaagagggccgtggggcctgaggaggtcataatctcttctgagtgggggcaggtcgattcttgcacaaggtgggctcttcactgagccataagggacagggaggtatgggagagcgctgggggcccatccccctgtccacccagtgtccactggcctgtccttcagggagcagagcagagcaggtggtggacgggcccagtgctgggtgttttcaccaccatccccccatcccccatctaagaatcctaagaggcaggcgatccctcacctgcttactcactcagcagttacccggcccctgtgctggagataccaagggcatgggtggtccctgcttcgatggccccaaagctgggccagagttaagggaaagaggaggaagtcctaagcagagaagtagcaccattatccccatttaacagaagggaaactgaggctcggcaagcataggcgagttggcagtggaacacggatctaaactcaggtgtgtccaagtcctcccaaaggacagcagtgatggagaggaccccagccagctgtgtgacagctggttgttgctgacttcattttccaatccggagaaggggctctgtccacagtcccccgccgccaggtggcccacatgggaccagcatgggggcaggttatctgttggcctgaagagtgaaacctgtaccaggccaaaggtgagggcgtgagtgagggcaggagtgtttatggcagagtgaagttctgtgcccaccacaagaggctgtgagatgttctgaccctcacccactgtccaccaaaagcctctcctgctgatgggcactaggagacctcagggtactgcccatctgtttctcctcgggtgccagccagctgctggtgatcctcagccggaggcagggtaccaggtaagcttaactccatcttgggtgtttgtgacaggccctgcctgccaccctaggcagggaaagctgtcaagactcctgccaggaatggggggtgctgagtcatctcacgaagaatccctcactcttcccgggttcagcccagaagcccttccaggcatgatcttccccatcaggctgggctctggcagggacctgcccaggatggagatgagagagggtgagagatggagggcgagatttggatgggacccagggctcctgactctgccctggaaggttcatggggaaactcgctccttctgttggcagaggacagcccctggggaaccccaggcccaactctgtccggtatcccttttcctcccagctgccctcccctacttctcccttgctcccaaagctttccttggagaagggccctcctgcagctggaccctgcagggtggctccctcctccccatcaagcacaagagagggcccaggaaaaaaggtttcacataagtgtagagtcgcaaggacgcttagagtcggcagagtctggggtagggagacagcgacttgtccaaggtcaagcacagagggagaggttcaggagtcaggtcttctgccttctgagttggctcatcctgggcagtcacagactgtcctgcctgcacggctcctatccacctgggggtgtcgcagttgaggggctaattcccaggggactgacgttagttccctactccatccttccctggtgattcttgatcttcaaagcctcggggatcccaggtttccccatgtaactgagacaccctgcctgttagccctgggagacccctaaccttggcccaagacccctttgattctctaaggagcacgaaagggggaatgcccctcccaggagtttatgggagaagggactgggccggctgcctcccagcgatgcacttgacctgacactccccatgtcctggtgcgcacagcccttgtcggtgccccggcccctcccgcagcgttactgcctgtgnnnnnnnnnnnnnnnnnnnnnnnnnnnnnnnnnnnnnnnnnnnnnnaggctccacaaaatatatcnnnnnnnnnnnnnnnnnnnnnnnncggtgaagggcggtcccatcctgggcccccactcttagaaccccccaccaactggttaagtctcgagtgaatccagtggccccgtggcaccctcctttatgacatccatccatctgtggtgaaccaagtgaaaggtggtgactcctggtgacatagtaataaagtgaagactcagaacccgaccagcgattgca

SEQ ID NO: 347844 - DNA, 445 bp, Homo Sapiens
  misc_feature (172)..(218): n is a, c, g, or t
  misc_feature (236)..(259): n is a, c, g, or t
cctttgattctctaaggagcacgaaagggggaatgcccctcccaggagtttatgggagaagggactgggccggctgcctcccagcgatgcacttgacctgacactcccaatgtcccggtgcgcacagcccttgtcggtgccccggcccctcccgcagcgttactgcctgtgnnnnnnnnnnnnnnnnnnnnnnnnnnnnnnnnnnnnnnnnnnnnnnnggctccacaaatatatcnnnnnnnnnnnnnnnnnnnnnnnncggtgaagggcggtccccatcctgggcctccactctagacccccccaccacctggttaagtctcgagtgaatccagtggccccgtggcaccctcctttatgacatccatccatctgtggtgaaccaagtgaaggtggtgacttctggtgacatagtaataaagtgaagactcagaacccaaaaaaa

SEQ ID NO: 347845 - DNA, 483 bp, Homo Sapiens
  misc_feature (252)..(298): n is a, c, g, or t
  misc_feature (316)..(339): n is a, c, g, or t
tcggggatcccaggtttccccatgtaactgagacaccctgcctgttagccctgggagacccctaaccttggcccaagacccctttgattctctaaggagcacgaaagggggaatgcccctcccaggagtttatgggagaagggactgggccggctgcctcccagcgatgcacttgacctgacactccccatgtcctggtgcgcacagcccttgtcggtgccccggcccctcccgcagcgttactgcctgtgnnnnnnnnnnnnnnnnnnnnnnnnnnnnnnnnnnnnnnnnnnnnnnnggctccacaaatatatcnnnnnnnnnnnnnnnnnnnnnnnncggtgaagggcggtccccatcctgggcccccactctagacccccccaccacctggttaagtctcgagtgaatccagtggccccgtggcaccctcctttatgacatccatccatcctgtggtgaaccaagtgaaggtggtgactt

SEQ ID NO: 347846 - DNA, 390 bp, Homo Sapiens
  misc_feature (46)..(46): n is a, c, g, or t
  misc_feature (69)..(69): n is a, c, g, or t
  misc_feature (117)..(163): n is a, c, g, or t
  misc_feature (181)..(204): n is a, c, g, or t
agggactgggccggctgcctccccagcgatgcacttgacctgaaantcccccatgtccctggtgcgcanagcccttgtcggtgccccggcccctcccgcagcgttactgccctgtgnnnnnnnnnnnnnnnnnnnnnnnnnnnnnnnnnnnnnnnnnnnnnnnggctccacaaatatatcnnnnnnnnnnnnnnnnnnnnnnnncggtgaagggcggtccccatcctgggcccccactctagacccccccaccacctggttaagtctcgagtgaatccagtggccccgtggcaccctcctttatgacatccatccatctgtggtgaaccaagtgaaggtggtgacttctggtgacatagtaataaagtgaagactcagaacccaccagcg

SEQ ID NO: 347847 - DNA, 1352 bp, Homo Sapiens
  misc_feature (387)..(387): n is a, c, g, or t
  misc_feature (529)..(529): n is a, c, g, or t
  misc_feature (799)..(812): n is a, c, g, or t
  misc_feature (918)..(959): n is a, c, g, or t
  misc_feature (1300)..(1300): n is a, c, g, or t
ctatcctccaggattgaacattttccaattatctggtcttttcctgttgtgcaaaaatgactcattgctccgaatgtcaaaaacaaatgcgacaaacaatggcacttcatcatttaaagtaatgttgccaagagaaaaaatttcctgggagggaggtttcccacaagccaaatctcctaagcctcaaatgctagcactttttggcagttggataggaaatgagacattctttggcagccaaaataagagaggccgatggtgaaactttttgagacaccctatggccttcttgtcaaaaccttcactggagctcaagaaaagcatttctgttgtgttatttgcagtgcagatgatgtctgtgtaacaacataatggttattcaccttnttttgattttgatttttgctgtgttatcaaaaacttgaatactgtgagaagaagtgaattttcagttgacgaatcagcatcttgttcccatggtgataacactaattgaatatatctatgagggcatgtattagttaatggnaaaaaaaatacaacactaacaatacatagctgcaatgtgtacaatggctgatttaattaaataaaatgtacaagtgctgctcacacaggctatggggatgttgcgctccaggttagttctgcaaggggctttgcctctgtgggacccacagtcctggcctggctggaaggctctgggtgctctgaacaccatggggggccctcttaaccttggtcccttctctaccaggaaaaggcccctgctcaagggactcgcgatgaaacgggtttnnnnnnnnnnnnnngaaaccgcaaagcccggggccccatccccgtggggcccggccttttctaagcacaaaatgtctcttcgccaggcagcatgctccgtgaatagaatcactttctgcnnnnnnnnnnnnnnnnnnnnnnnnnnnnnnnnnnnnnnnnnntcacattctacaccgcttttgggggagccccgcgtccgcgggccgcccaccgttttgtttggcacccgggccgcctctgtgtagggccgctggtcacgtctagctacttatatagggcgtgcgcgccttactatcacgccgtgtcaccgctctttagcgcaccccgtatgccccgctcatgaaccccgctcccggattcctccttcggcctcagcgccggacgacggccctcggacttgtctccagaacaccccccctgatgtgcactgtgcgccgcactagtcttgtgtgtggtcaggcacacgcgccgttaccattctgctccgtggtctatgtacacngagcaccgctgagcgctgccgcacactcacaaagttgtttcgcgcacgccat

SEQ ID NO: 347848 - DNA, 1350 bp, Homo Sapiens
  misc_feature (271)..(304): n is a, c, g, or t
  misc_feature (1058)..(1058): n is a, c, g, or t
  misc_feature (1062)..(1062): n is a, c, g, or t
  misc_feature (1066)..(1067): n is a, c, g, or t
  misc_feature (1159)..(1179): n is a, c, g, or t
  misc_feature (1187)..(1187): n is a, c, g, or t
  misc_feature (1193)..(1193): n is a, c, g, or t
  misc_feature (1256)..(1256): n is a, c, g, or t
  misc_feature (1260)..(1260): n is a, c, g, or t
  misc_feature (1262)..(1262): n is a, c, g, or t
  misc_feature (1275)..(1275): n is a, c, g, or t
  misc_feature (1284)..(1284): n is a, c, g, or t
  misc_feature (1296)..(1296): n is a, c, g, or t
  misc_feature (1303)..(1305): n is a, c, g, or t
  misc_feature (1307)..(1308): n is a, c, g, or t
  misc_feature (1317)..(1317): n is a, c, g, or t
ggccacgcagaatgaaccgatggggtattcagttgctggcagctacattgtgtggcattctagcatcttcaggtctttagatcttggacaagttggcagggtattttaaaagctataactactgtagttttccagttttcattgctgctttagcaaaccacgctgtcttacagtggtactttcttctggccactgcactgtagataattcattggaaacaagatttacccactacataaaaggttaaactccttcagtatgttggagtggnnnnnnnnnnnnnnnnnnnnnnnnnnnnnnnnnncctctcaggtttatatcttctctaatacctgcatgtggcgtttaaaaatcaagaccacggtcaaacccctcttctaatcacattaattgtttccattctttttaccctgagtgagcacttttcactttccagctaggtctgtttttcagcttgcagacaagattgagaaatccttgaaaatttggttttggttaaaatttttggtttatttatttgaaatccacactcccttggaaactcttaagtgcatttgtgcacttctgtttgtttgtctcaaagaagggactgtaacaatctgagtaatttccatgtcctcttccttattcctctagtggttgaagctgtgtagcattttaacatatatatattcacaaatatattcatataaacagtatacattttgaatcagtcatttgttaaagaaaagtatattcaatgaagatgaaatttaaataaaaaaggacagagtctatcctccagggattgaacattttccaattatctggtcttttcctgttgtgcaaaaatgactcattgctccgaatgtcaaaaacaaatgcgacaaacaatggcacttcatcatttaaagtaatgttgccaagagaaaaaatttcctgggagggaggtttcccacaagccaaatctcctaagcctcaaatgctagcactttttggcagttggataggaaatgagacattctttggcagccaaaataagagaggccgatggtgaaactttttgagacaccctatgnccancttnncaaaaccatcactggagctcaagaaaagcatttctgttgtgttatttgcagtgcagatgatgtctgtgtaacaacataatggttattcaccnnnnnnnnnnnnnnnnnnnnnctgtgttntcaaanacttgaatactgtgagaagaagtgaattttcagttgacgaatcagcatcttgctcccatggtnatancnccaattgaatatncctatgagngcatgtattagntaatggnnnannaaatacaanactaacaatacatagtgcaatgtgtacaatggc

SEQ ID NO: 347849 - DNA, 4213 bp, Homo Sapiens
  misc_feature (3978)..(4003): n is a, c, g, or t
tcgttttttgataggcaacaacagtggttgggtgaacaaataagcaaagtcatcatcacaaaaactgatgtggattctgattctggagtgaaattcgggaagacgatgaagcctttgaggctcgtgtgaaagaggaagaacaaaagatatttggtttgatggtagacagacaatcacaggctaccacccctgacaccactcctgctaggaccccaactgaagaggggaccccaacaagtgagcaaaacccatttctgtttcaggaaggaaaattgtttgaaatgacccgaagtggtgccattgatatgaccaaaaggtcctatgcagatgaaagttttcactttttccaaattggtcaagaatccagggaagagactctctctgaagatgtgaaagaaggggctactggggctgatcccctaccgctggagacatcagctgaatcactagcactttcagaatcagaagaaacagtggatgatgagccagacttacttccagatgacgtgagtgaggaagtagaggaaatacctgcttcggatgctcaacttaactcccaaatggggatttcagcctccactgaaacacctacaaaagaagctgttagtgtagggaccaaggacctccccaccgtgcaaacgggtgatatacctcctctctctggtgtacaagcagatatcctgccccgactcttctgaaccagctgtacaagtccagttagatttttccacactcaccaggtctgtttattcagataggggtgatgattctcccgattcttccccagaagaacagaaatcagtaatcgagattcctactgcacccatggagaatgtgcctttcactgaaagcaaatccaaaactcctgtaaggactatgcccacttccaccccagcacctccatctgcagagtatgagagttcagtttctgaagattttctatccagtgtagatgaggaaaataaggcggatgaagcaaaaccaaagtccaaactccctgtcaaagtacccctccaaagagttgaacagcagctctcagatctagacacctctgtccagaagacagtggctcctcagggacaggacatggcaagcatcgcaccagataatagaagcaaatctgaatctgatgctagttctttggattcaaagaccaaatgcccagtaaaaacccgaagttacactgagacagaaacagagagcagagagagggccgaggaacttgagttagaatcagaagaaggggccacaagaccaaagatacttacatcccgattgccagttaagagcagaagcactacatcttcctgcagggggggcacgagccccacaaaagaaagtaaggagcatttctttgacctttacagaaattccatagaattctttgaggagattagtgatgaggcttccaaattagtggataggctgacacagtcagagagggagcaggaaatagtttcagacgatgaaagtagtagtgccctggaagtatcagtaattgaaaatctgccacctgttgagaccgagcactcagttcctgaggacatctttgacacaaggcccatttgggatgagtctattgagactctgattgaacgcatccctgatgaaaatggccatgaccatgctgaagatccacaggatgagcaggaacggatcgaggaaaggctggcttatattgctgatcaccttggcttcagctggacagaattagcaagagaactggatttcactgaggagcaaattcatcaaattcgaattgaaaatcccaactctcttcaagaccagagtcatgcactgttgaagtactggctagagagggatgggaaacatgctacagataccaacctcgttgaatgtctcaccaagatcaaccgaatggatattgttcatctcatggagaccaacacagaacctctccaggagcgcatcagtcatagttatgcagaaattgaacagaccattacactggatcatagtgaagggttctcggtacttcaagaggagttatgcactgcacagcacaagcagaaagaggagcaagctgtttctaaagaaagtgagacctgcgatcaccctcctatcgtctcagaggaagacatttctgttggttattccacttttcaggatggcgtccccaaaactgagggggacagctcagcaacagcactctttccccaaactcacaaggagcaagttcaacaggatttctcagggaaaatgcaagacctgcctgaagagtcatctctggaatatcagcaggaatattttgtgacaactccaggaacagaaacatcagagactcagaaggctatgatagtacccagctctcccagcaagacacctgaggaagttagcacccctgcagaggaggagaagctgtacctccagaccccaacatccagcgagcggggaggctctcccatcatacaagaacccgaagagccctcagagcacagagaggagagctctccgcggaaaaccagcctcgtaatagtggagtctgccgataaccagcctgagacctgtgaaagactcgatgaagatgcagcttttgaaaagggagacgatatgcctgaaatacccccagaaacagtcacagaagaagaatacattgatgagcatggacacaccgtggtaaagaaggttactaggaaaatcattaggcggtatgtatcctctgaaggcacagagaaagaagagattatggtgcagggaatgccacaggaacctgtcaacatcgaggaaggggatggctattccaaagttataaagcgtgttgtattgaagagtgacaccgagcagtcagaggacaacaatgagtaaagccatcacacagaagagggctgtggtgaaggaccagcatggaaaacgcattgacttggagcacctggaggatgtaccagaagcactagaccaggacgacctccagcgcgatctccagcagctccttcggcatttctgcaaggaggacttgaagcaagaggccaagtgaggggctgcccagttctcacaccagaaaccacacattcactcaatatgcagcttcctgtttcagtaggggagtgacctaactggcctaattaatgggataccccgacatttccactgttagcaaatatacggcattttgctttagttttcccccatcctctttaactataaagctaatttgtgaccaaagatggcatccttcatactggatgctgtatccaatactttgttgtgtctgtgctaacctgggaactggccacctccattgttctttgcttctgcacaagatccatgaaaatccattgatcagaagaacttcacctgcagacctcttcaagtgacactatgtaggaatccttccaaggaatatctatgtacaatgtatatagctgaaatgctcagatgaacaacatattaaaattaaaaccactgcctattgtaactacactgggcatcagaataaaaggcctctagaaattgctgaacaatggttaattaagatattgctaacacaatcgagtgataatacagttttactgcaaaagaagcacttcaaacctattatgtccttagaacttccagagtagccactgctcccagttaaaggtgggtcagtagccttgcagaactgtcctgagaagttattgctggtgctggccagccatggcttaggactccaacagccactctgagggaggggagaagggagcagaggccacgcagaatgaaccgatggggtattcagttgctggcagctacattgtgtggcattctagcatcttcaggtctttagatcttggacaagttggcagggtattttaaaagctataactactgtagttttccagttttcattgctgctttagcaaaccacgctgtcttacagtggtactttcttctggccactgcactgtagataattcattggaaacaagatttacccactacataaaaggttaaactccttcagtatgttggagtggnnnnnnnnnnnnnnnnnnnnnnnnnnggttcttcaggttaatatcttctctaatacctgcatgtggcgtttaaagaatcaagaccagggtcaaacccctcttctaatcacattattgtccattcttttttaccctgagtgagcacttttcactttcccagctaggtctgtttacagcttgcagacagattgagaaatccttgaaaatgggtcggctaaaatttgggtaatgattca

SEQ ID NO: 347850 - DNA, 527 bp, Homo Sapiens
  misc_feature (16)..(16): n is a, c, g, or t
  misc_feature (37)..(37): n is a, c, g, or t
  misc_feature (49)..(49): n is a, c, g, or t
  misc_feature (121)..(121): n is a, c, g, or t
  misc_feature (127)..(127): n is a, c, g, or t
  misc_feature (298)..(318): n is a, c, g, or t
  misc_feature (442)..(450): n is a, c, g, or t
caccatttaaagtaangttgcccaagagaaaaaaaanccccgggagggnggtttcccccacaagcccaaacccccctaagccctcaaaagcctagcactttttgggccagttggaataggnaaatgnagacattcctttggcagcccaaaataagagaggcccgatggtgaaactttttgagacacccctatggccttccttgtcaaaaccttcactggagcctcaagaaaagcatttcctgttgtgttatttgcagtgcagatgatgtctgtgtaacaacataatggttattcaccnnnnnnnnnnnnnnnnnnnnnctgtgttatcaaaaacttgaatactgtgagaagaagtgaattttcagttgacgaatcagcatcttgttcccatggtgataacactaattgaatatatctatgagggcatgtattagttaatggnnnnnnnnntacaacactaacaatacatagctgcaatgtgtacaatggctgatttaattaaataaaatgtacaagtgttaaatgtg

SEQ ID NO: 347851 - DNA, 499 bp, Homo Sapiens
cagtatcactgaaatgtgaggaaacacaataaatgggattgtgtctcctgaaccttagtttcacacttcctcctccacttctgtcagagggtgtttgtgatggccgtctgttatcagccgtgatcaaaataatataacagtgaaactttttatacttatgaaggccctttcatcaaaaatctcacagccatttctaaatatagagcaactgatctttaaaacacttttatgttttaagcaattaatatggtaacttagctgttagactttccatcctgcgtatttgccatttggagcgtggatggaacatttcgtaatctactcagcattaaaactttgctggtattgagtttagaattccaacttttcgatggttcatgtaggtcttttcactgtcatctatcaaaacaaaacattgctttataatggaataaccacattcatttccacatatcaaaacccagattaaggattatagaccaaatggtatgtctagttt

SEQ ID NO: 347852 - DNA, 2315 bp, Homo Sapiens
  misc_feature (432)..(446): n is a, c, g, or t
  misc_feature (1515)..(1515): n is a, c, g, or t
  misc_feature (1553)..(1553): n is a, c, g, or t
  misc_feature (1557)..(1557): n is a, c, g, or t
  misc_feature (1562)..(1562): n is a, c, g, or t
  misc_feature (1582)..(1582): n is a, c, g, or t
  misc_feature (1585)..(1586): n is a, c, g, or t
  misc_feature (1591)..(1591): n is a, c, g, or t
  misc_feature (1593)..(1593): n is a, c, g, or t
  misc_feature (1595)..(1595): n is a, c, g, or t
  misc_feature (1602)..(1602): n is a, c, g, or t
  misc_feature (1604)..(1604): n is a, c, g, or t
  misc_feature (1606)..(1606): n is a, c, g, or t
  misc_feature (1623)..(1623): n is a, c, g, or t
  misc_feature (1629)..(1630): n is a, c, g, or t
  misc_feature (1638)..(1639): n is a, c, g, or t
  misc_feature (1650)..(1650): n is a, c, g, or t
  misc_feature (1652)..(1656): n is a, c, g, or t
  misc_feature (1658)..(1661): n is a, c, g, or t
  misc_feature (1663)..(1666): n is a, c, g, or t
  misc_feature (1668)..(1669): n is a, c, g, or t
  misc_feature (1671)..(1671): n is a, c, g, or t
  misc_feature (1676)..(1676): n is a, c, g, or t
  misc_feature (1678)..(1678): n is a, c, g, or t
  misc_feature (1685)..(1686): n is a, c, g, or t
  misc_feature (1688)..(1689): n is a, c, g, or t
  misc_feature (1702)..(1703): n is a, c, g, or t
  misc_feature (1710)..(1710): n is a, c, g, or t
  misc_feature (1715)..(1715): n is a, c, g, or t
  misc_feature (1717)..(1717): n is a, c, g, or t
  misc_feature (1720)..(1720): n is a, c, g, or t
  misc_feature (1722)..(1722): n is a, c, g, or t
  misc_feature (1725)..(1725): n is a, c, g, or t
  misc_feature (1735)..(1735): n is a, c, g, or t
  misc_feature (1737)..(1738): n is a, c, g, or t
  misc_feature (1741)..(1741): n is a, c, g, or t
  misc_feature (1756)..(1756): n is a, c, g, or t
  misc_feature (1758)..(1758): n is a, c, g, or t
  misc_feature (1761)..(1761): n is a, c, g, or t
  misc_feature (1782)..(1782): n is a, c, g, or t
  misc_feature (1806)..(1806): n is a, c, g, or t
  misc_feature (1860)..(1860): n is a, c, g, or t
ttttcccgggtggaaccacgcgtccgcggacgcgtggacatcctcaccttccctcttttttaaagtcacatttccatgtttcaacattagtttgcattcacctttacaaaggcctttctttagatctgtgcagcctttgcgtgccaaacttgtgaaattccttttaccttttttggagtacttgctataaagccacctgtcaacaaacccccattacgtacagaataggacctatccagtagccaggccagtaggcagttggggaaggtgggaaggatccagcgaggcccctgagcctgcacctggacaggtgtacgtctgcacccatcaccctcagcaccaggccaccctgcagtccacttactgtactgtgttgtggaaggatatgctaagtgatgaaagttgcgagcagtctcactggtcgtgtaaacnnnnnnnnnnnnnnnggaaattgaagctgtagagtgctgcccgaaatctctaggaagttggtggcaagggacagcactcacactcttctggtcatgatctctgatctccacctcaaatgacaataaaaaactggtccaacgaagacactgctcagcacttcagccatcaggactaatccatcgatgactggaaaagaggctagctttgaggaaaacagcctgggctcttgggagcagagtccagcgggtgtgagtgaggtgacttgccgacggtcggcaggtaatggctctcagccggcgaggcggtcccacagctctcctcccagggcagcctgaggaggaggaggccgggtgcctgtttggtggcagcttcagcctagggatacctgaagctgttgagcaacacctttatgaaatgttgccagagcagcaacacttccctgtgggcacagccccgggaaatccggtaccaagtgagcaaggtggcaggacccacccaagcctgatacgcatctgggcccgccgggctcagcaggggaggctgctacggctgcccacttcccagcaccgtctgtcacgcttgaacccctctgtgctgttcccttcctggctaatagggagacccttcgcaggcacccactgtttcaacttgaccctcccaccccctgctactctcctccacacacccctccgttccgctagcctaccctgtcagcctttcaataaaagttatgcacaaatgtgaacacctgagatggagctgaacatttcttcactttgttctttttctgaagtcaaactcttatcaaatgccctaaaattattaccacccaagagaaacaggaaaaaggttacatgtttttgtttactgagagtaagatcacctgcatctggaagacgggctggtaaattggtttggctacagaacagaaagaaaacaaaaacaaacctcgtaagggaagtatcacactcagacaccaccgcttcctagaaccaaatgagcaataccaaactgcaagtgccataagtgggcctgtgaggtcacaccgcccggcccgaggtatcgcatgtgcgggggaggtcnacactacagctgtcctctcatctagaaggcaccacctngctntcatntcccgtgtgttttggaaaancannatggngngncatatcnancngcgaacacttcccaccnaggccnngaggttgnnatatgaaaacngnnnnncnnnncnnnngnntnggaangntctgacnntnntcgttcaataggnncgggtangcgcngnggncnganctggcgttcncnnctncgtgtctacatggtntngcntgtgttaaacctttggggganatttgtatgtaaatgtacagaaanaaaaacgttgccccattaacagatttcctctggaatgtcatccctacctcgcgngatggtatccaccgaagggcatttcactaccattaatggtgagtaataaaatcctccgtgttcattcagacctcactgcgtcactactttgaacgcctctgtaagctgtgtcttcactcgccccgaggtgggtggagggaggcctctcactctgcttcgagtcctggtcttaaaggtagtcagaggcagaggctggattaaacacacactgtttaccaagtgccactctcagaccacctgagagacggggggccatcagtaaaattaagaggaatttttttcccttgttcgtgtatgttctgctgatccgtggcctgaaggttcctagagacgtcaagaaatgaatatcttacactgtgattctgtgaggaaagactggtaacccaaaactctcttctctaatgtattttttaacgaaaatgacaatatttctttaataaagtatttataccaaa

SEQ ID NO: 347853 - DNA, 422 bp, Homo Sapiens
  misc_feature (11)..(11): n is a, c, g, or t
  misc_feature (77)..(77): n is a, c, g, or t
  misc_feature (99)..(99): n is a, c, g, or t
  misc_feature (109)..(109): n is a, c, g, or t
  misc_feature (118)..(118): n is a, c, g, or t
gccttccctanaacccaaaatgaagcaaatccccaaactgcaaagtgcccataaagtgggcctgtgaggtcacaccngcccggcccgaggtaatcccanttgccggggnaggtcccanactacagctgtcctctcgtctagaaggcaccacctcgctttcatgtcccgtgtgttttggaaaagcagtatggtgtgtcatgtctagcggcgaaaacttccctccctgtccttgaggttgtaatataaaaactgtgtttctgtacgtgtgggtgggaattctctgacggtgctcgttcatagcaccaacttacgctgagttctgaactgtcgttcacagctgcgtgtctgcatggtgtcgcatctgttgtacctttggggaaaatttgtatgtaaatgtacagaaataaaaacgttgccccatt

SEQ ID NO: 347854 - DNA, 657 bp, Homo Sapiens
  misc_feature (41)..(41): n is a, c, g, or t
  misc_feature (65)..(65): n is a, c, g, or t
  misc_feature (439)..(448): n is a, c, g, or t
tgccaaaataaaccaaagtacttgaaaggaaaagaaggtgnttaaccatatttaaatgctgctgnataagcccagtaaaaatgaagactggaaaatgatgcttgattttaaaaaagacgaggtaatttgcaaccttgatcactgcagtttccttggagtaatgggggcaaaagcctttctagagcaggttcaagtcgataataggagtcaacaaactggggacaatctgtataatacgcaagcactttacaagccaaagaagccaaagatagagactatgtttccttacaaactagagattccagtttctctggaatcaccaggaatttcctatctttgtgacatactctgttattatatttatgtttcaggttatttgtgagggataggtataactctaaggaccaaaatatctgtaagcattttataaccaggaagnnnnnnnnnngacaaaacagtatttaaataaaaattcatcttctcaagagactcttaacaagaggaaggaacagtaagtgttaatagtcacatttttatcaagcaagtttctcaagattgaactcatacacagcctcccatagagcacatcacatcacaaaagcactcaaaggtttatagcttcccggacgcgtgggtagacccgggattcgggaccgt

SEQ ID NO: 347855 - DNA, 660 bp, Homo Sapiens
gaactgagccagggaagcagcagggggagcgcccctgtgttaggtgtgcacaggggctgcggctctcagcacaggcctgacgaccgcccagcttcagacgccaaccatagtgaggcctcagtgacaggcactcatcctcccctccaaacactggccagcaagagctccttccaaggaggacaagtgggagaatccagagagccacgctgtgggacggctcctgcggaactgggcgcagcctgtgtgtgcttggcctgggagatgcctgtgtgtcacactaagccactctaaaaggacaggagtaggactgccctttattcaacagtgccgcagtttgggtccagggctttttcaactctagaaatggcattgcctcaaaaaggctaactgagggggccaatatgaagtaggcttgttacaactgtaactgtcactctctaaaagagggtggcatgccaagcctattccacagcacctttgccaggcagacagagaacactccttctcagagccaatccccgctccacaggaagtgaggatacagcaagagccaggcaagccgcgcagatgccactggctctcacgctgcaggtccctcgacagaggccataaatctttccctccgagcacgtccaacttgggggtcctcacagtgctgca

SEQ ID NO: 347856 - DNA, 1573 bp, Homo Sapiens
ggagcgtgatcggtttccggtcagtggtgtggtaccgggtacccggagacgtgtatcggacggtgggccgcagccatggccgagagaaaacctaacggtggcagcggcggcgcctccacttcctcatcgggcactaacttacttttctcctcctcggccacggagttcagctatcaatgtgcccttcatcccagtcacccaggcctccacttctccggcctcccatgctcttaccgggagagtgattccacagatgttggtagagagaggacagcttccattggacagaacgttctatacacacagtctgccccacagacatataagttacttctctcaggtatcaaagcagcagatgatcccttttgggaatattgaacaagtcaccattaacaactgcagcaaccatcagttggacaagtcaggattccccaagcccctgactgctctcccttttacaagctggatcccaagatgtctcgaatgcattttcaccatccatttcgaaggctcaacctggtgctccaccttcctcactgatgggaataaattcttatctaccttatcagccaagtagtctccctccttcatattttgggaaccaaccccaaggaattccccaaccaggatacaatccatatcgccatacccctggcagcagcagggctaatccttacattgcaccaccccagctgcagcagtgccaaacaccaggccctcctgctcatcctccaccttctggaccccctgttcagatgtaccagatgcctccaggatctttgccaccggttccttcttcagtgcagtcaccggcacagcagcaggtacctgccagacctggggctccctctgttcaagtgccatctccttttctacttcaaaaccaatatgagcctgttcagccccactggttttactgcaaggaggtagaatacaaacaactgtggatgccttttagtgtgttcgactctttgaatcttgaagaaatctataattcagttcagccagatccggagagcgtggttcttggcacggatggagggcgctacgatgtttacctctatgaccgaataaggaaggctgcctactgggaagaggagccagccgaagtgagacgctgtacttggttttacaagggggacacagatagtcgatttattccctatactgaggagttcagtgaaaaactagaggtacgggtgctttatttctttatgagtttctttaaaaaatgtaggtcctatatacattggtgagtaacatcattcacagtggagcggcctttacttacaagacagcttgttttgatgctgttcacagagaagaccactcttttaagtggtgtcatcactcatgaggtgctaatcgtggcatctgtgtctaaagatagaatatgatttgcagagacacatcacagatctaataaggtgcttgtgtcaagccttcaatagaacctagcccgctgggatttgttgttgatcgaacatcgccaaccataatggacattttcaaattagtattcagtaaaaggccttaaatctacacctcgatttggtaaaatgaataatagaat

SEQ ID NO: 347857 - DNA, 457 bp, Homo Sapiens
  misc_feature (18)..(18): n is a, c, g, or t
  misc_feature (392)..(392): n is a, c, g, or t
  misc_feature (394)..(394): n is a, c, g, or t
gagaagtttaacccaccnggactatacagaaatttattgacttacaagatagtcacatagacagagaccagaaaaaaatggatcaaatgcctcattccttagtaacacaactgagacagtgaaacacggtacaccatacatgtcatctactgatccaactatgctatctgataagctatacttacaaagaatggttccaacaaacacctttgtagaacaaatattcacactgtgttatcaaatttgctgctcctccagtggcggttcaagagcttccattagctttttatttgcctcttcattatgccggctttgacaatgagttaaatgtttcttaaaacctcttgggaaatttgattcaaaattacaacgtggacatttaagtaaacttntnccatgggctgctacatgatttttaaggagagattccaaaagaaaagcctttccacagattgtg

SEQ ID NO: 347858 - DNA, 2580 bp, Homo Sapiens
ggcaagaaaattgagaggcattccattcactggccctgccgactgaccattggctccaatttgtctataaggattgcagcctataaatcgattctacaggagagagttaaaaagacttggacagttgtggatgcaaaaaccctaaaaaaagaagatatacaaaaagaaacagtttattgcttaaatgatgatgatgaaactgaagttttaaaagaggatattattcaagggttccgctatggaagtgatatagttcctttctctaaagtggatgaggaacaaatgaaatataaatcggaggggaagtgcttctctgttttgggattttgtaaatcttctcaggttcagagaagattcttcatgggaaatcaagttctaaaggtctttgcagcaagagatgatgaggcagctgcagttgcactttcctccctgattcatgctttggatgacttagacatggtggccatagttcgatatgcttatgacaaaagagctaatcctcaagtcggcgtggcttttcctcatatcaagcataactatgagtgtttagtgtatgtgcagctgcctttcatggaagacttgcggcaatacatgttttcatccttgaaaaacagtaagaaatatgctcccaccgaggcacagttgaatgctgttgatgctttgattgactccatgagcttggcaaagaaagatgagaagacagacacccttgaagacttgtttccaaccaccaaaatcccaaatcctcgatttcagagattatttcagtgtctgctgcacagagctttacatccccgggagcctctacccccaattcagcagcatatttggaatatgctgaatcctcccgctgaggtgacaacgaaaagtcagattcctctctctaaaataaagaccctttttcctctgattgaagccaagaaaaaggatcaagtgactgctcaggaaattttccaagacaaccatgaagatggacctacagctaaaaaattaaagactgagcaagggggagcccacttcagcgtctccagtctggctgaaggcagtgtcacctctgttggaagtgtgaatcctgctgaaaacttccgtgttctagtgaaacagaagaaggccagctttgaggaagcgagtaaccagctcataaatcacatcgaacagtttttggatactaatgaaacaccgtattttatgaagagcatagactgcatccgagccttccgggaagaagccattaagttttcagaagagcagcgctttaacaacttcctgaaagcccttcaagagaaagtggaaattaaacaattaaatcatttctgggaaattgttgtccaggatggaattactctgatcaccaaagaggaagcctctggaagttctgtcacagctgaggaagccaaaaagtttctggcccccaaagacaaaccaagtggagacacagcagctgtatttgaagaaggtggtgatgtggacgatttattggacatgatataggtcgtggatgtatggggaatctaagagagctgccatcgctgtgatgctgggagttctaacaaaacaagttggatgcggccattcaaggggagccaaaatctcaagaaattcccagcaggttacctggaggcggatcatctaattctctgtggaatgaatacacacatatatattacaagggataatttagaccccatacaagtttataaagagtcattgttattttctggttggtgtattattttttctgtggtcttactgatctttgtatattacatacatgctttgaagtttctggaaagtagatcttttcttgacctagtatatcagtgacagttgcagcccttgtgatgtgattagtgtctcatgtggaaccatggcatggttattgatgagtttcttaaccctttccagagtcctcctttgcctgatcctccaacagctgtcacaacttgtgttgagcaagcagtagcatttgcttcctcccaacaagcagctgggttaggaaaaccatgggtaaggacggactcacttctctttttagttgaggccttctagttaccacattactctgcctctgtatataggtggttttctttaagtggggtgggaaggggagcacaatttcccttcatactccttttaagcagtgagttatggtggtggtctcatgaagaaaagaccttttggcccaatctctgccatatcagtgaacctttagaaactcaaaaactgagaaatttactacagtagttagaattatatcacttcactgttctctacttgcaagcctcaaagagagaaagtttcgttatattaaaacacttaggtaacttttcggtctttcccatttctacctaagtcagctttcatctttgtggatggtgtctcctttactaaataagaaaataacaaagcccttattctctttttttcttgtcctcattcttgccttgagttccagttcctctttggtgtacagacttcttggtacccagtcacctctgtcttcagcaccctcataagtcgtcactaatacacagttttgtacatgtaacattaaaggcataaatgactcatctctctgtg

SEQ ID NO: 347859 - DNA, 1589 bp, Homo Sapiens
  misc_feature (1525)..(1525): n is a, c, g, or t
cttacagtgcctagcaggaaacgaagcggctctttccgctatctgccgacttgtccaccggaagcgagttgcgacacggcaggttcccgcccggaagaagcgaccaaagcgcctgaggaccggcaacatggtgcggtcggggaataaggcagctgttgtgctgtgtatggacgtgggctttaccatgagtaactccattcctggtatagaatccccatttgaacaagcaaagaaggtgataaccatgtttgtacagcgacaggtgtttgctgagaacaaggatgagattgctttagtcctgtttggtacagatggcactgacaatcccctttctggtggggatcagtatcagaacatcacagtgcacagacatctgatgctaccagattttgatttgctggaggacattgaaagcaaaatccaaccaggttctcaacaggctgacttcctggatgcactaatcgtgagcatggatgtgattcaacatgaaacaataggaaagaagtttgagaagaggcatattgaaatattcactgacctcagcagccgattcagcaaaagtcagctggatattataattcatagcttgaagaaatgtgacatctccctgcaattcttcttgcctttctcacttggcaaggaagatggaagtggggacagaggagatggcccctttcgcttaggtggccatgggccttcctttccactaaaaggaattaccgaacagcaaaaagaaggtcttgagatagtgaaaatggtgatgatatctttagaaggtgaagatgggttggatgaaatttattcattcagtgagagtctgagaaaactgtgcgtcttcaagaaaattgagaggcattccattcactggccctgccgactgaccattggctccaatttgtctataaggattgcagcctataaatcgattctacaggagagagttaaaaagacttggacagttgtggatgcaaaaaccctaaaaaaagaagatatacaaaaagaaacagtttattgcttaaatgatgatgatgaaactgaagttttaaaagaggatattattcaagggttccgctatggaagtgatatagttcctttctctaaagtggatgaggaacaaatgaaatataaatcggaggggaagtgcttctctgttttgggattttgtaaatcttctcaggttcagagaagattcttcatgggaaatcaagttctaaaggtctttgcagcaagagatgatgaggcagctgcagttgcactttcctccctgattcatgctttggatgacttagacatggtggccatagttcgatatgcttatgacaaaagagctaatcctcaagtcggcgtggcttttccctcatatccaagcataactatgagtgttttagtgtatgtggcagctgccttttcatgggaagacttgcgggcaatacatgtttttcatccctggaaaaaccgtaaggaaatatggctccccacccaagggcacagttggaatgctgtttggatgcttttgattggactnccatggaggctttgggccaaaggaaaggatggagggaggacaggacacccctttgaaggacttt

SEQ ID NO: 347860 - DNA, 823 bp, Homo Sapiens
  misc_feature (710)..(710): n is a, c, g, or t
  misc_feature (788)..(788): n is a, c, g, or t
ccccggcgacacggcaggttcccgcccggaagaagcgaccaaagcgcctgaggaccggcaacatggtgcggtcggggaataaggcagctgttgtgctgtgtatggacgtgggctttaccatgagtaactccattcctggtatagaatccccatttgaacaagcaaagaaggtgataaccatgtttgtacagcgacaggtgtttgctgagaacaaggatgagattgctttagtcctgtttggtacagatggcactgacaatcccctttctggtggggatcagtatcagaacatcacagtgcacagacatctgatgctaccagattttgatttgctggaggacattgaaagcaaaatccaaccaggttctcaacaggctgacttcctggatgcactaatcgtgagcatggatgtgattcaacatgaaacaataggaaagaagtttgagaagaggcatattgaaatattcactgacctcagcagccgattcagcaaaagtcagctggatattataattcatagcttgaagaaatgtgacatctccctgcaattcttcttgcctttctcacttggcaaggaagatggaagtggggacagaagagatggcccctttcgcttaagtggccatgggcccttcctttccactaaaaggaattaccgaacaggaaaaagaaggtcttgagatagtgaaaattggtgatgatatctttanaacggggcagaatgggttgggatgaaaatttattccattcagtggagagtctgaagaaaactgtggcgtctcttcaanaaaatttgaggaaggcactcccattcccctggccc

SEQ ID NO: 347861 - DNA, 1094 bp, Homo Sapiens
aaaatccccaaaaccgggggaaggcatttcccctttccgaatttattatttcattggttccttcatccacctttagggaaaagggaactaaatcacttcccatagcggaacccctggaattaaatccttctttaaaaatttcagtttcattcatcatcatttaaagcaataaaacggtttctttttggaatatcttctttttttaagggtttttgcatccaacaactgtccaagtctttttaaactctctcctgtagaatcgatttataggctgcaatccttatagacaaattggagccaatggtcagtcggcagggccagtgaatggaatgcctctcaattttcttgaagacgcacagttttctcagactctcactgaatgaataaatttcatccaacccatcttcaccttctaaagatatcatcaccattttcactatctcaagaccttctttttgctgttcggtaattccttttagtggaaaggaaggcccatggccacctaagcgaaaggggccatctcctctgtccccacttccatcttccttgccaagtgagaaaggcaagaagaattgcagggagatgtcacatttcttcaagctatgaattataatatccagctgacttttgctgaatcggctgctgaggtcagtgaatatttcaatatgcctcttctcaaacttctttcctattgtttcatgttgaatcacatccatgctcacgattagtgcatccaggaagtcagcctgttgagaacctggttggattttgctttcaatgtcctccagcaaatcaaaatctggtagcatcagatgtctgtgcactgtgatgttctgatactgatccccaccagaaaggggattgtcagtgccatctgtaccaaacaggactaaagcaatctcatccttgttctcagcaaacacctgtcgctgtacaaacatggttatcaccttctttgcttgttcaaatggggattctataccaggaatggagttactcatggtaaagcccacgtccatacacagcacaacagctgccttattccccgaccgcaccatgttgcctcgtccgaattcgccacccaggcctcgctt

SEQ ID NO: 347862 - DNA, 483 bp, Homo Sapiens
  misc_feature (37)..(37): n is a, c, g, or t
  misc_feature (50)..(50): n is a, c, g, or t
  misc_feature (58)..(58): n is a, c, g, or t
  misc_feature (65)..(65): n is a, c, g, or t
  misc_feature (131)..(131): n is a, c, g, or t
tcaaaaactggcccctccctccctgtttccaacctangaaacacggaaanttttccanccaggantccaacaactccccaaacagaggtgaacaactgccctcaagcccaagactggaacacgcctgaaantgggcctcccccccttgcctcaagtcctttaaattttttagctgtaggtcccatccttccatggttgtccttggaaaatttccctgagcagtcacttgatcctttttcttggcttcaatcagaggaaaaagggtctttattttagagagaggaatctgacttttcgttgtcacctcagcgggaggattcagcatattccaaatatgctgctgaattgggggtagaggctcccggggatgtaaagctctgtgcagcagacactgaaataatctctgaaatcgaggatttgggattttggtggttggaaacaagtcttcaagggtgtctgtcttctcatctttctttgccaagc

SEQ ID NO: 347863 - DNA, 491 bp, Homo Sapiens
  misc_feature (26)..(26): n is a, c, g, or t
  misc_feature (42)..(42): n is a, c, g, or t
  misc_feature (111)..(111): n is a, c, g, or t
  misc_feature (118)..(118): n is a, c, g, or t
  misc_feature (125)..(125): n is a, c, g, or t
  misc_feature (131)..(131): n is a, c, g, or t
  misc_feature (226)..(226): n is a, c, g, or t
ccgcctttaacaacctccctgaaagnccccttcaagagaaantgggaaatttaaaccaattaaatccatttcctggggaaaatttgtttgcccccagatgggaatttaccnctgatcncccaaanaggaanccctctggaagttcctgtcacagctgaggaagcccaaaaagtttctggccccccaaagacaaacccaagtggagacacagcagctgtatttgaanaaggtggtgatgtggacgatttattggacatgatataggtcgtggatgtatggggaatctaagagagctgccatcgctgtgatgctgggagttctaacaaaacaagttggatgcggccattcaaggggagccaaaatctcaagaaattcccagcaggttccctggaggcggatcatctaattctctgtggaatgaatacacacatatatattacaagggataatttagaccccatacaagtttataaagagtcattgttattttc

SEQ ID NO: 347864 - DNA, 586 bp, Homo Sapiens
tttgggtaaatttaaaggaaaattttattcctttaaaaaatattttccatgtacactttcaatgactattttgagggggaacaaggagattatcctacagtcaatattagctaaaaaacataagtgacatgtataacaatacattttggaaataactggcataataaaaatgcaaatgtttgtagtgatttaaggctgcaagatatttaagatctcagattaaatgaacccacattagagtaatgcaaaccaaaacttgcaattttatgatttcttcatactataacccttaatactatgcataaagaagttaccccattcccaagtcataactagaaaggacaaagggaaagtctgtcagaaaaaacagtgataaatttgaatgcatagtacaatatgcatcctcctcctacttcaatgtttaacatactgacaacaaccccatttaataaaagaaaaccatgagttactatttaagcacaaattatttttatggggcaaaaaagttgagcttcttgcctagaaaaatcctttaatatatacacacgcgtccgcggacgcgtgggtcgacccgggaaataccgga

SEQ ID NO: 347865 - DNA, 1786 bp, Homo Sapiens
gggtccggaattcccgggatatcatggcggcggccagaggcctgcccggctcccggaagcaggctgtgaggggcgggagcgctgctggaacccgagccggagccggagccacagcggggagggtggcctggcggcctggagccggacgtgtccggggcgtccccgcagaccggggcagcaggtcgtccgggggcccaccatgctggtgactgcctaccttgcttttgtaggcctcctggcctcctgcctggggctggaactgtcaagatgccgggctaaaccccctggaagggcctgcagcaatccctccttccttcggtttcaactggacttctatcaggtctacttcctggccctggcagctgattggcttcaggccccctacctctataaactctaccagcattactacttcctggaaggtcaaattgccatcctctatgtctgtggccttgcctctacagtcctctttggcctagtggcctcctcccttgtggattggctgggtcgcaagaattcttgtgtcctcttctccctgacttactcactatgctgcttaaccaaactctctcaagactactttgtgctgctagtggggcgagcacttggtgggctgtccacagccctgctcttctcagccttcgaggcctggtatatccatgagcacgtggaacggcatgacttccctgctgagtggatcccagctacctttgctcgagctgccttctggaaccatgtgctggctgtagtggcaggtgtggcagctgaggctgtagccagctggatagggctggggcctgtagcgccctttgtggctgccatccctctcctggctctggcaggggccttggcccttcgaaactggggggagaactatgaccggcagcgtgccttctcaaggacctgtgctggaggcctgcgctgcctcctgtcggaccgccgcgtgctgctgctgggcaccatacaagctctatttgagagtgtcatcttcatctttgtcttcctctggacacctgtgctggacccacacggggcccctctgggcattatcttctccagcttcatggcagccagcctgcttggctcttccctgtaccgtatcgcaacctccaagaggtaccaccttcagcccatgcacctgctgtcccttgctgtgctcatcgtcgtcttctctctcttcatgttgactttctctaccagcccaggccaggagagtccggtggagtccttcatagcctttctacttattgagttggcttgtggattatactttcccagcatgagcttcctacggagaaaggtgatccctgagacagagcaggctggtgtactcaactggttccgggtacctctgcactcactggcttgcctagggctccttgtcctccatgacagtgatcgaaaaacaggcactcggaatatgttcagcatttgctctgctgtcatggtgatggctctgctggcagtggtgggactcttcaccgtggtaaggcatgatgctgagctgcgggtaccttcacctactgaggagccctatgcccctgagctgtaaccccactccaggacaagatagctgggacagactcttgaattccagctatccgggattgtacagatctctctgtgactgactttgtgactgtcctgtggtttctcctgccattgctttgtgtttgggaggacatgatgggggtgatggactggaaagaaggtgccaaaagttccctctgtgttactcccatttagaaaataaacacttttaaatgatacccaggaccgccgcaag

SEQ ID NO: 347866 - DNA, 1473 bp, Homo Sapiens
  misc_feature (1294)..(1311): n is a, c, g, or t
  misc_feature (1329)..(1424): n is a, c, g, or t
tcagctcggtaccctctctccacactgggggggaggggtcgtgtacattgtcccaccaggcgcaatgtagccgggcggcgcagagggtttcttttttggtcttgagagcatagagtcccttttcatattcacgtgtactcttaagaaagcgtctgttctccaaactggctttccattctccccgtcctaaatggtgcgtggctgacaccgtagtgttttcaaaactggatatggccaggatgctatagcattgtcagtgcatctccttggaaacaatgccatctttgaatgtgagagataaacctagtttcagcatgtctgcagcagagaccagtacatcaggcttattcccacaggaagcctcctaaagcctgtggcgcggcaaccatttccaggactaaataataatgtgtcagatgcctgtgagtggactgcctggccaaatgactcatgaagatattcacggaagaatagtcaaaaaccaaagaaaaggcatattctagaagcaccttcaattccatcgaggatttttgagcagctgaagaagaaagttctgaaaatatgagtgacaggactccagcacattttttttagttgtttcttacattatctttgttaacccatccgcttttgtgtataatattaagttattttccactactgcaatggctagtaatttacttaggctcagagttttactctgtatggacagagaaataggaggtaacaacagtgggagaacaaataggaacagttcactgggatgttggtccccagaaattggctttcattgaataattcctaaagggtgtcgtgtgctgaattgctttttcatagtgatgtgctgcttcttgttcatactcttatgactttaatttcacctttatctactcccagcctctgtatatgcctacgtttttaaaaataatttttggcactgaagatctgattaccatattttttcagtttaaaaattaaatcctcgcaaatacacctttggtatagttgcattctaccctaggttattttctaggatcaagaatagaacaatttctgttctttccagcattactctttactattcatatgttcttgttcagtgttttgttgttctcatattctaggtggaaatgaagggtaatctctatgttctattttcagttttctaggaaaccagaaaaacatgggtagtagaaatgtatagaaaatgtatgaggtctcttaaccattgtgttaaacttgcattaagcttcttttttagcaatatcgatgtcagtgttacctcttctttccnnnnnnnnnnnnnnnnnngagacagagtctcattcnnnnnnnnnnnnnnnnnnnnnnnnnnnnnnnnnnnnnnnnnnnnnnnnnnnnnnnnnnnnnnnnnnnnnnnnnnnnnnnnnnnnnnnnnnnnnnnngtgggctggatttttagtggagaacaggttcgcatgtttgggccccagg

SEQ ID NO: 347867 - DNA, 288 bp, Homo Sapiens
tacggtccggaattcccgggtcgacccacgcgtccgcctgctgctctgggtggcaggcaaaaggcctgggccacaggtggggcctgctggggagaccacaggtgaggcaggtatggctgaccctgggcgctcggcacaccggtactcctcctgcctggctgctccctcagcaggtgtcagagtctgagtcaccttttcctcacgtgacccccaccaggaccaggcagggaggtggccatctttggccctgactcagccctgcaaggagaagaggggctggaggtgcac

SEQ ID NO: 347868 - DNA, 871 bp, Homo Sapiens
gatagaacaatattaccttgccttaaggagaaaaacgagccggaggggaaaaataagagtaaggtattaaagaaatgagaccagaaatcacagtacaagacagagaaatctactttaatattcacatgtaaaagttacacatcacaagagattggacagtagcttagcgtaacatagctatagtgaaaatcatttttataaaaaaataatctagatgcggtcatcagaatttttggtctgcttaagttaatgtttgaagatcgacttttatccctgcttgaaggatttgccattatgccttttttttctcccactgttgcctattaattctttggaggaaggaaagcagaaagtgttcatttccaagagtttgtcctttggtagcaagcagagaacatttttttcatttccatgatttaaataatctgtacagacatgaaacttagtgacattaagctttagtgtaaaatgaagagtaataagcaattttttttcactttgataaaacagcagatttcgtaaactccttaaggatccaagcatttcctcatcccatatgcaaaatcattcagaatccattttgacctcagttgaaaaacaaaaacaaacacttactctgtatatattacactataaaaccctgtacttaaaaactgataaggtgtattttcaacatgtatgcttcaaatacaaagatttcaatctacatttaaaaaacacatttgaatggactcagacaagtttaatttgtgattaaacatctcatgcaatcatgcaagaccactagctataactgttacttccgagtctatactgggcaaacaaagcaaattaagagccaggccaaccagaaaagacattcagatatcag

SEQ ID NO: 347869 - DNA, 1842 bp, Homo Sapiens
gaattcccgggtcaaaccacgcgtccgtagagcagcagcaaagccttccagctcaagtcccgcctgctcagccccctcagcagcgcccgcctgccccccgaaccaggactgtctgacagctacagcttcgactacccctcggacatgggacctcggcggctcttctcccacccacgggaaccagcccttgggcctcacggacccagccgacacaagatgtcccccccgcccagtggcttcggcgaacggagcagcggtgggagtggcgggggccccctgtctcacttctattcaggctcgcccacttcctacttcaccagcggcctgcaggctggcctcaagcagagccacctcagtaaggcaatcggctcttccccgctggggtccggagaagggctcctgggcctcagccccgggcctaatggtcacagccacctgctgaagaccccactgggcggccagaaacgcagctttgcccacctgctgccctcgcccgagcccagcccagaaggcagctatgtgggccagcactcccagggcctcggcggccactacgcggactcctacctgaagcggaagaggattttctaagtggctggcaccagagataactcaagggcctgcaccaaatcgcttttgggttttctgatgttagttagtgttttttttaaaccattttctctctttcggtaatagaaaaatctctgaaagactttactgaccaatcagccggagccccaggagcccaaggggtgtgggggagtctggaggcctcattatgtctctggcttgctccccacgctgaaaccctgcagccttaagagagaggggccccggcctgctctccctccctccccccatctcctcctccgctgtgcccgtctctccggagccctcctgcctcattgctcctgtaattttggcctttcgagtgccttggaggtttccctgacctcccgtgaagatacagagactgtctcctctttttttaactttgacaactgacttctgtttccttttctaagttttatttttcaaaccaccccggacagcccccagctctgattccttcaaggcccggcctgtccgggccaccattccacaccttgcggtttgaaacagctgtttttcccacatttgctgcaggcatggctgtctcctgcccctgcctgcccatctggcctataccccagccgtggggacccggggtccctgccgctagccccattccccttctgatgcacgttaaaagctagggccccaggccctgctggccagagcctacagatgccaagctctgggagcttgactatggaccaaacagctctggcctagggattgggccaccctacccaggatctccaccctggggacagtagaaggggaaagccttcatcttggcgaaccggccccaccaccccctcctacccgggcctccgtgcagagatgggctttctctgccagtcccctgctgtctgtctgtgggagtcggacattgtgcccatctcccggagcctctgctgtcactcgcttgttgaagatgaattcttgaattctgcctgcccacccccggccagatccctggagctggcctccttccagcccagtgccagaaaccagcactccatgaagataaactctgggcccgcccaccagcaggacctgtcgacctgaggtgaccctgggccttgcccccagccaactgggccaccagcttccctcccttgactctgggggtccacatccactccaaggggactattcccccgaccccaccccagtctccccacacggacctttgctgaattaaagtttgtaagtaaatggttttaaagaaatcaa

SEQ ID NO: 347870 - DNA, 980 bp, Homo Sapiens
  misc_feature (81)..(81): n is a, c, g, or t
  misc_feature (113)..(113): n is a, c, g, or t
  misc_feature (129)..(182): n is a, c, g, or t
  misc_feature (337)..(394): n is a, c, g, or t
  misc_feature (476)..(484): n is a, c, g, or t
gaaggcagctatgtgggccagcactcccagggcctcggcggccactacgcggactcctacctgaagcggaagaggattttntaagtggctggcaccagagataactcaagggnctgcaccaaatcgctnnnnnnnnnnnnnnnnnnnnnnnnnnnnnnnnnnnnnnnnnnnnnnnnnnnnnncggtaatagaaaaatctctgaaagactttactgaccaatcagccggagccccaggagcccaaggggtgtgggggagtctggaggcctcattatgtctctggcttgctccccacgctgaaaccctgcagccttaagagagaggggccccggcctgnnnnnnnnnnnnnnnnnnnnnnnnnnnnnnnnnnnnnnnnnnnnnnnnnnnnnnnnnngcctcattgctcctgtaatttggcctttcgagtgccttggaggtttccctgacctcccgtgaagatacagagactgtctccnnnnnnnnnaactttgacaactgacttctgtttccttttctaagttttatttttcaaaccaccccggacagcccccagctctgattccttcaaggcccggcctgtccgggccaccattccacaccttgcggtttgaaacagctgtttttcccacatttgctgcaggcatggctgtctcctgcccctgctgcccatctggcctataccccagcgtggggcccggggtccctgccgagcccctccccttctgatgcctgtaaaagcgtgggccccaggccctgtggccagagccacagatgccaagctcgtgggagctgactatggccaaaacagtctggcctagggatggggcacctaccaggatctcaccctggggacagtagacgggaaagcttcatctggggacgggcccacaaccctcaacgggccgggagaaggtcacgcagccgggtgagggggagggaaggcgcaacgggcctgggcccgtggagaatgatgggcccga

SEQ ID NO: 347871 - DNA, 900 bp, Homo Sapiens
  misc_feature (219)..(275): n is a, c, g, or t
  misc_feature (338)..(355): n is a, c, g, or t
attcccgggtcgacccacgcgtccgcacccgcgagaagccgcacgcctgcaagtggtgcgagcgcaggttcacgcagtccggggacctgtacagacacattcgcaagttccactgtgagttggtgaactccttgtcggtcaaaagcgaagcactgagcttgcctactgtcagagactggaccttagaagatagctctcaagaactttggaaataatttnnnnnnnnnnnnnnnnnnnnnnnnnnnnnnnnnnnnnnnnnnnnnnnnnnnnnnnnngttgtggtacggtctaaaagcagtcttgtttcctggaaataaaaagttgggatattaacttgnnnnnnnnnnnnnnnnnnaattgcttttgtttaaaatttgatcgccttaactactgtaaacatagcctatttttgtgcttaagatactgaatggaaaactccattgtgtgttgctggactgttttggaaatatttggttaaatgtgtgttaatttggctgtaatggcatttaaagcaaacaaacaaacaaaaaaagctgtgaaaatggccttggagcattatctttagttacttgaagagtttctagtttttttaaaatacagtttatgttaaaataatttttattaatttagagaagacaatcaatgtctgtgagaaaacggactttcttttggattttctttttgtggtcattgtgagtgattgctttttccttttcttagtttcacattcttcctttgttctaaaacttagactgacatctagctttgacaatcatagtatgttttattttcctgagggggaataacttataatgctgtttagttttgtactattggtgtgttggtgaatttttaaactgtgtgctaactgcaataaattatatgaactgagaaaaaaaa

SEQ ID NO: 347872 - DNA, 319 bp, Homo Sapiens
  misc_feature (15)..(15): n is a, c, g, or t
  misc_feature (50)..(50): n is a, c, g, or t
aaaaaggtcttcccnagcccccacatcctgcagatccacctgaagcacgnacttccgcgaagcaggacggcatccgcagaaagcccgccgccgatgtcaacgtgcccacgtgctcgctgtgtgggaagactttctcttgcatgtacaccctcaagcgccacgagaggactcactcgggggagaagccctaaacatgcacccagtgcggcaagagcttccagtactcgcacaacctgagccgccatgccgtggtgcacacccgcgagaagccgcacgcctgcaagtggtgcgagcgcaggttcacgcagtccggggacct

SEQ ID NO: 347873 - DNA, 1658 bp, Homo Sapiens
  misc_feature (5)..(5): n is a, c, g, or t
  misc_feature (12)..(12): n is a, c, g, or t
  misc_feature (47)..(47): n is a, c, g, or t
  misc_feature (49)..(49): n is a, c, g, or t
  misc_feature (55)..(55): n is a, c, g, or t
  misc_feature (73)..(73): n is a, c, g, or t
  misc_feature (99)..(99): n is a, c, g, or t
  misc_feature (121)..(121): n is a, c, g, or t
  misc_feature (488)..(488): n is a, c, g, or t
  misc_feature (735)..(826): n is a, c, g, or t
  misc_feature (1549)..(1549): n is a, c, g, or t
gtggngggggantaggcagggttataggtgattgggcctcagggggntngggggnagtatggttgtgaaaggnagatgtgagtgtaggtgttagaaaanaggaagaatgtgaaagtaaganaaggaaaaagcaatcactcacaatgaccacaaaaagaaaatccaaaagaaagtctcgtttttctcacagacattgattgtcttctctaaattaataaaaattattttaacataaactgtattttaaaaaaactagaaactcttcaagtaactaaagataatgatccaaggccattttcacagctttttttgtttgtttgtttgctttaaatgacattaaagccaaattaacacacatttaaccaaatatttccaaaacagtccagcaacacacaatggagttttccattcagtatcttaagcacaaaaataggctatgtttacagtagttaaggcgatcaaattttaaacaaaagcaattaaaaaanaaagggaaaaacagcaaacgttttccatgctactcccatagaccttatttgtaagtgcaagacaggaaaacaaaacactgtgcaaaatgcttttgccttgcgtgctggtcattaaaaccacacgttaggctgcagcctctgctgccgcaatccacatagtctactaacccccttccccatgtcaatcaaggcagtccagtcctttcagcctggggctttttcagtccatagaatcttttcatgagtnnnnnnnnnnnnnnnnnnnnnnnnnnnnnnnnnnnnnnnnnnnnnnnnnnnnnnnnnnnnnnnnnnnnnnnnnnnnnnnnnnnnnnnnnnnngagagaacgacctattgtcaacttgtgcagtagttattctaagaacgctcaactgggtaaatgtgtacacctaaactctgagctggcatgggttttgtgcaattagaagtttgttataaatgcacactgcacatgcaaatctttaagctgtttgtaaacatttatattttccttgttatgtagcgaagttatcaatttgcagcttaagtttttattcagcttaacagtttcaacttaaagacagtgggaaagtcaatttaaattatataaaataaaaataaaaacagtgcgtgtacagtcttaataacaccagtgtgttttttccaaatggtgctgtgtttctaaggaaatggaatggtgtgaaactgactgggggaaggggtgcaatgggtgacaaggcaaagaatatgtggaaactcatgctttagtgaggcgagaatgtggactttggaaggactgcactgaaagcgtgaacacgtacctgggaaggggtttgacacccgcgccgaggcatgtgattaattgcagggtggcattggccggggtgtacatttgtggaacacaccggtgtgacactgggtggaagtgggatttggttgtgagatgccaaagaagccttagttttagaaggtggagcgatgggatgccgcgggggctttggaaagttgagagtaggctgagaaactgggggtaaaacccctggagttggtcccgaaagaaggngtggagagtggatttctttatggtgaaagaaaagaggtattatgggcgattggtgcgagaattgttatgtttggagagaggtagagagcctagaggggagaataggacc

SEQ ID NO: 347874 - DNA, 567 bp, Homo Sapiens
gtaccggtccggaattcccgggtcgacccacgcgtccgcccacgcgtccggctaagtccttgttaatagtcttaccctcctggaaacacttgaacacttgagtgactcttagctgtgaggagataccatctccaggtgtgctttcttagtcttggcaggcacctcttcccttcaatatctgttcttcgtatttttaaaaaaattggttttagactgccttgttctgtgtcagctcgctagctgatctcatttccttccatggtttccttaccatttatatgcaaatgactgtcagattcatatctcctttctagatcttccctaattgatgtatctaattgctaacaaatgctctttgctgtctcaggcactacatgtcattgatcttgcccccaatcctgctcctcctctcatgtttcctctttgactaaatggcattaccactaccaaccattcatttgtcctttttaccaattctccaatgctgccattttaattcaggccatcaacctacctaaattatagcaacagcctccttattagtctccctgttttttatttttattc

SEQ ID NO: 347875 - DNA, 1498 bp, Homo Sapiens
  misc_feature (3)..(3): n is a, c, g, or t
  misc_feature (11)..(11): n is a, c, g, or t
  misc_feature (16)..(16): n is a, c, g, or t
  misc_feature (652)..(726): n is a, c, g, or t
ctnccaaaatncaganttgagacagcagtgtcaggtccaccagcagttctgggcttgatgtcgcggtgacacacgccctgggagtggatgtaggccaagctgcggaaagagctggtacatgtacaccttgacatagaggatagggatggtcaacttggccttggtgaagtggcgggccacccggtacactgtctcgggcacatattccagcaccagatttaggtaaagctcgtctttcttctcgccactggagtagaaaaagtatctcagcctcacaatattgcagtggtcccacttacgcatgatctgcagctctcggttcttgaacctcttgtcctggagaaccttcttgatggcgactagttccctggtctctgccagccgtgcctggtacacgaccccaaatgagccattgccaatcactttgatgtccgtgtaagccacttcttgggagcgctctgggccttggcctagagtggctacgactgtggtcaccttcccgctgtcacggcccagcttcaccccgggcggcgggaagctagtgcctgcgccggggcctccgctgcctcctccgccgctgccgccgggtccacccccggagctcgaggccccgacgcccccacccatggccccgacagatgcctttccgccnnnnnnnnnnnnnnnnnnnnnnnnnnnnnnnnnnnnnnnnnnnnnnnnnnnnnnnnnnnnnnnnnnnnnnnnnnngaacgagctagtccgcgccctgcccgagccccccagggccgcctcccgaaggcccgccgccggctcatggcgccgagcacaggcccaggctgcggggctcgggcggcccgggctgccccagccgccgccgctgccggccgcctcccccgggccctggcctcttccaggccgcgccgctctggcttgggctccggctccggcccagcgcccgccgcggggcacgccgggagatgcagtccggctgtcgtccgcgccgccgtcaccgccctcggcccgcacagagagccgcgtggcacgccgggaaatgaagtccacaaaagcctcagagtagaccgcgggaatgatgggcgggaatgacgggtcacgctgtacgtcgggaaatggagtccagggtaatctgtcagccgactgtacgacggggagccctgaagcactttaggaagcagagagcctgatgcacgctgggaaacggagtccactcactcagtctattagctgtgtatgcctcccagagctcggtgcgctctgggaaattgagtcggcccgcgtgaacctgcgggtctcgggccgtgaggcaagccgggaaatggagtcgtcgccacgccctcaccgcattgcaggtgtaaagcgatttttaaagcacgccgggaaatggagtctcaggtggtttttaagcgacaagtggatactgcagttccgctattcgcagaattccggaccggtcccagcgtcgtatcggagcggaggcctgcgagcgggtatagatccgata

SEQ ID NO: 347876 - DNA, 2134 bp, Homo Sapiens
  misc_feature (21)..(21): n is a, c, g, or t
  misc_feature (49)..(49): n is a, c, g, or t
  misc_feature (61)..(61): n is a, c, g, or t
  misc_feature (73)..(73): n is a, c, g, or t
  misc_feature (176)..(255): n is a, c, g, or t
  misc_feature (1812)..(1878): n is a, c, g, or t
  misc_feature (2002)..(2002): n is a, c, g, or t
  misc_feature (2022)..(2022): n is a, c, g, or t
  misc_feature (2024)..(2024): n is a, c, g, or t
  misc_feature (2057)..(2057): n is a, c, g, or t
  misc_feature (2092)..(2092): n is a, c, g, or t
gatcggcgcggcctggaagangccagggcccccgggaggcggcggcacngcggcggctggngcagcccgggcngcccgagccccgcagcctgggcctgtgctcggcgccatgagcggcggcgggccttcgggaggcggccctgggggctcgggcagggcgcggactagctcgttcnnnnnnnnnnnnnnnnnnnnnnnnnnnnnnnnnnnnnnnnnnnnnnnnnnnnnnnnnnnnnnnnnnnnnnnnnnnnnnnnaaaggcatctgtcggggccatgggtgggggcgtcggggcctcgagctccgggggtggacccggcggcagcggcggaggaggcagcggaggccccggcgcaggcactagcttcccgccgcccggggtgaagctgggccgtgacagcgggaaggtgaccacagtcgtagccactctaggccaaggcccagagcgctcccaagaagtggcttacacggacatcaaagtgattggcaatggctcatttggggtcgtgtaccaggcacggctggcagagaccagggaactagtcgccatcaagaaggttctccaggacaagaggttcaagaaccgagagctgcagatcatgcgtaagctggaccactgcaatattgtgaggctgagatactttttctactccagtggcgagaagaaagacgagctttacctaaatctggtgctggaatatgtgcccgagacagtgtaccgggtggcccgccacttcaccaaggccaagttgaccatccctatcctctatgtcaaggtgtacatgtaccagctcttccgcagcttggcctacatccactcccagggcgtgtgtcaccgcgacatcaagccccagaacctgctggtggaccctgacactgctgtcctcaagctctgcgattttggcagtgcaaagcagttggtccgaggggagcccaatgtctcctacatctgttctcgctactaccgggccccagagctcatctttggagccactgattacacctcatccatcgatgtttggtcagctggctgtgtactggcagagctcctcttgggccagcccatcttccctggggacagtggggtggaccagctggtggagatcatcaaggtgctgggaacaccaacccgggaacaaatccgagagatgaaccccaactacacggagttcaagttccctcagattaaagctcacccctggacaaaggtgttcaaatctcgaacgccgccagaggccatcgcgctctgctctagcctgctggagtacaccccatcctcaaggctctccccactagaggcctgtgcgcacagcttctttgatgaactgcgatgtctgggaacccagctgcctaacaaccgcccacttccccctctcttcaacttcagtgctggtgaactctccatccaaccgtctctcaacgccattctcatccctcctcacttgaggtccccagcgggcactaccaccctcaccccgtcctcacaagctttaactgagactccgaccagctcagactggcagtcgaccgatgccacacctaccctcactaactcctcctgagggccccaccaagcacccttccacttccatctgggagccccaagaggggctgggaaggggggccatagcccatcaagctcctgccctggctgggcccctagactagagggcagaggtaaatgagtccctgtccccacctccagtccctccctcaccagcctcacccctgtggtgggctttttaagaggattttaactggttgtggggagggaagagaaggacagggtgttggggggatgaggacctcctannnnnnnnnnnnnnnnnnnnnnnnnnnnnnnnnnnnnnnnnnnnnnnnnnnnnnnnnnnnnnnnnnntgtaaatagaaccagcccagcccgtctcctcttcccttccctggcccccgggtgtaaatagattgttataatttttttcttaaagaaaacgtcgattcgcaccgtccaacctggccccgccccncctacagctgtaactccccncntgtcctctgcccccaaggtctactccctcctcnccccaccctggagggccaggggagtggagagagcncctgatgtcttagtttccacagtaaggtttgcctgtgtacag

SEQ ID NO: 347877 - DNA, 937 bp, Homo Sapiens
  misc_feature (47)..(47): n is a, c, g, or t
  misc_feature (213)..(288): n is a, c, g, or t
  misc_feature (927)..(929): n is a, c, g, or t
  misc_feature (933)..(933): n is a, c, g, or t
gcggcgggcgctgggccggagccggagcccaagccagagcggcgcgncctggaagaggccagggcccgggggaggcggcggcagcggcggcggctggggcagcccgggcagcccgagccccgcagcctgggcctgtgctcggcgccatgagcggcggcgggccttcgggaggcggccctgggggctcgggcagggcgcggactagctcgttcnnnnnnnnnnnnnnnnnnnnnnnnnnnnnnnnnnnnnnnnnnnnnnnnnnnnnnnnnnnnnnnnnnnnnnnnnnnncggaaaggcatctgtcggggccatgggtgggggcgtcggggcctcgagctccgggggtggacccggcggcagcggcggaggaggcagcggaggccccggcgcaggcactagcttcccgccgcccggggtgaagctgggccgtgacagcgggaaggtgaccacagtcgtagccactctaggccaaggcccagagcgctcccaagaagtggcttacacggacatcaaagtgattggcaatggctcatttggggtcgtgtaccaggcacggctggcagagaccagggaactagtcgccatcaagaaggttctccaggacaagaggttcaagaaccgagagctgcagatcatgcgtaagtgggaccactgcaatattgtgaggctgagatactttttctactccagtggcgagaagaaagacgagctttacctaaatctggtgctggaatatgtgcccgagacagtgtaccgggtggcccgccacttcaccaaggccaagttgaccatccctatcctctatgtcaaggtgtacatgtaccagctcttccgcagcttggcctacatccactcccagggcgtgtgtcaccgcgacatcaagccccagacctgctggtggacctgacactgctgtctcaagcttgnnntttngcag

SEQ ID NO: 347878 - DNA, 399 bp, Homo Sapiens
  misc_feature (48)..(48): n is a, c, g, or t
  misc_feature (59)..(59): n is a, c, g, or t
aggaacagggtgttggggggatgaggacctcctacccccttggccccntcccctccccnagacctccacctcctcaagaccccctcccctcctgtgtcccttgtaaatagaaccagcccagcccgtctcctcttcccttccctggcccccgggtgtaaatagattgttataatttttttcttaaagaaaacgtcgattcgcaccgtccaacctggccccgcccctcctacagctgtaactcccctcctgtcctctgcccccaaggtctactccctcctcaccccaccctggagggccaggggagtggagagagctcctgatgtcttagtttccacagtaaggtttgcctgtgtacagacctccgttcaataaattattggcatgaaaacctgaaaaaaa

SEQ ID NO: 347879 - DNA, 1037 bp, Homo Sapiens
  misc_feature (226)..(289): n is a, c, g, or t
ggtccggaatttccggaatcgctgggccggagccggagtcccgccagagcggcgcggcctggaagaggccagcggcccgggggaggcggcggcagcggcggcggctggggcagcccgggcagcccgagccccgcagcctgggcctgtgctcggcgccatgagcggcggcgggccttcgggaggcggccctgggggctcgggcagggcgcggactagctcgttcgcnnnnnnnnnnnnnnnnnnnnnnnnnnnnnnnnnnnnnnnnnnnnnnnnnnnnnnnnnnnnnnnnggcaccggcggcggaaaggcatctgtcggggccatgggtgggggcgtcggggcctcgagctccgggggtggacccggcggcagcggcggaggaggcagcggaggccccggcgcaggcactagcttcccgccgcccggggtgaagctgggccgtgacagcgggaaggtgaccacagtcgtagccactctaggccaaggcccagagcgctcccaagaagtggcttacacggacatcaaagtgattggcaatggctcatttggggtcgtgtaccaggcacggctggcagagaccagggaactagtcgccatcaagaaggttctccaggacaagaggttcaagaaccgagagctgcagatcatgcgtaagctggaccactgcaatattgtgaggctgagatactttttctactccagtggcgagaagaaagacgagctttacctaaatctggtgctggaatatgtgcccgagacagtgtaccgggtgggcccgccacttcaccaaggccaagttgaccatccctatcctctatgtcaaggggtacatgtaccagcctctttcgcagcttggcctacatccccttcccaggggcgtgtgtcaccgccgacatcaaacccccgaacctggctggtgggaccctgaacccgctggtcctcaagcttctggaattttggcagtgccaaagccagttggtccgaaggggaagccccatggtctcccaacatctggttctcgctactaccggggcccc

SEQ ID NO: 347880 - DNA, 1244 bp, Homo Sapiens
  misc_feature (1208)..(1208): n is a, c, g, or t
acaagcctttagccaaaatttaacaaatggcacattggaaaaaaaatggtccttttcctaatgtagttttacggtggcgataccctgccctgcccttttccttttgcctccgttggcacaggcattgtgccttattttgttgtaaatggctcccagtattttatcagttcactaggctggaactgatgagaggtaattaggtggctgtatttacagctcgaataagagactcgccagtgattgaacacaaactcattgggagggggtacaggatcaattctcaacttggcaagacagatccctacatatacatcttccaagtgcaaacggcggatacctaaagaaactttaaaaatcttttctgccagatctccagaaaaaacataaccagttccagaacagaagacaggataacgctcacttgggtagaggtctggtggcatgtaccacttgctatctttgtttcgattgggtgcatatcctcgcattaggtaaccagtgaaatagttatgtctgggaggcagatctggcttcagtaacttattgattaaatattcagtgttgacaaacatgtcactgtcagttttcataacatatggaatatgtggcacagtatgttccaacccagttcatgcccattagtgttttaatggtcaaattatagtacgtatctaagtattcctgttgaattatatcatgatattgtctgctttcttccagtattgcacgttgaaggtagccatttagcttaatacttaagcccaacaaaaatattcttgtgatttgaataccaggtgctagactttcattgccccaagtttgccgaatagctcttctagcttctatgtctccaggctctgcagctattagtagtattaaaaaaggacttttctcttggcatttttcaggctcattaataatatatttgccatggtaagaatttggatgtccagtacctttttcattgtaaatacttccattggcactaagtgtattctccaggcctgtaactccttgtggtgacaggtctgtgttattagagttagttgctgtttgaggcctcagggtttgagggactgtttctttccaaatgttccgaagggagctgtggtttgtctcactttttgttgaccgaaatcctcggaaagtgtatgtcacagggttttctttgaatccagctctgcctggcagccagtcatgatgattanaaaacaaaaacatagcaaaaagaaacactagagaaa

SEQ ID NO: 347881 - DNA, 1496 bp, Homo Sapiens
  misc_feature (3)..(3): n is a, c, g, or t
  misc_feature (6)..(6): n is a, c, g, or t
  misc_feature (31)..(31): n is a, c, g, or t
  misc_feature (57)..(57): n is a, c, g, or t
  misc_feature (78)..(78): n is a, c, g, or t
  misc_feature (82)..(82): n is a, c, g, or t
  misc_feature (94)..(95): n is a, c, g, or t
  misc_feature (97)..(97): n is a, c, g, or t
  misc_feature (113)..(113): n is a, c, g, or t
  misc_feature (116)..(116): n is a, c, g, or t
  misc_feature (156)..(156): n is a, c, g, or t
  misc_feature (162)..(162): n is a, c, g, or t
  misc_feature (173)..(173): n is a, c, g, or t
  misc_feature (190)..(190): n is a, c, g, or t
  misc_feature (197)..(197): n is a, c, g, or t
  misc_feature (206)..(206): n is a, c, g, or t
  misc_feature (233)..(233): n is a, c, g, or t
  misc_feature (271)..(271): n is a, c, g, or t
  misc_feature (297)..(297): n is a, c, g, or t
  misc_feature (306)..(306): n is a, c, g, or t
  misc_feature (313)..(313): n is a, c, g, or t
  misc_feature (317)..(317): n is a, c, g, or t
  misc_feature (322)..(322): n is a, c, g, or t
  misc_feature (324)..(324): n is a, c, g, or t
  misc_feature (326)..(326): n is a, c, g, or t
  misc_feature (328)..(328): n is a, c, g, or t
  misc_feature (331)..(332): n is a, c, g, or t
  misc_feature (338)..(338): n is a, c, g, or t
  misc_feature (341)..(341): n is a, c, g, or t
  misc_feature (346)..(346): n is a, c, g, or t
  misc_feature (380)..(380): n is a, c, g, or t
  misc_feature (389)..(389): n is a, c, g, or t
  misc_feature (401)..(401): n is a, c, g, or t
  misc_feature (403)..(405): n is a, c, g, or t
  misc_feature (466)..(466): n is a, c, g, or t
  misc_feature (512)..(512): n is a, c, g, or t
  misc_feature (518)..(518): n is a, c, g, or t
  misc_feature (546)..(546): n is a, c, g, or t
  misc_feature (549)..(550): n is a, c, g, or t
  misc_feature (553)..(553): n is a, c, g, or t
  misc_feature (560)..(561): n is a, c, g, or t
  misc_feature (563)..(564): n is a, c, g, or t
  misc_feature (566)..(613): n is a, c, g, or t
  misc_feature (617)..(625): n is a, c, g, or t
  misc_feature (630)..(631): n is a, c, g, or t
  misc_feature (945)..(945): n is a, c, g, or t
  misc_feature (1013)..(1013): n is a, c, g, or t
ttnttnagtatccgtcgttgcacttgaagangatatgtaggatctgtctgccaagtngagaatgatcctgtacccccncccnctgagttgtgtnnantcactggcgagtctcntantgcgagctgtatatacagccacctaaatacctctcatcantgccancctagtgaacnggtgagatactggagcnatttacnacaaaatangcacaatgcctgtgccaacacagcaanagaaaagacaaacaagtatcgccacaataaactacaanagaaaagacaattatttttcaaaggngcaattggnaaaaaangcgnagggnangnanagnnagaacngancacanccgtaggacaagttttagttaaaactcatcacanaaagaaatncaagaagtattntnnnaatttctgaagaagttaattcttaaaactataacattatataacaaaaaaggtttcccaanacaatctatttaaaaaactgtataaggagattctgtgtattaacanacaatnacaagcatgcataaatcaatggaacaanacnncanaaagganncnntnnnnnnnnnnnnnnnnnnnnnnnnnnnnnnnnnnnnnnnnnnnnnnnnacannnnnnnnnccccnnggggtggattagggttgtcattttaatatataatttaatgtaaataaaacatcactatcaattttaaggaaactttttaattgtgcaaaggataaattttttgacctattttagggttctaaatgcaataagatttagttgagttattccacaaacacattataaagttcagatgtttcatcaatgcagttctcacgaaagtatttactttttaaaaataactgagatattattttaaatttcttttattaatactttcttttattaatatatgggggaaaattattttgacatgacgtggtaaaatgtgaaanactaatgtgtctcaggctcaagtttttatagttattaaatgtttcaaaatagacaagttttgtttccncattgatgttaagaaccaaactcctatttcaatgagttattggattagaccaattactgcactcttaaacagcaccaccatttaatttcatgtatatctaacttcgaatatatctgtaaagataatcgagagcaaaagtaatcacttaaaggcacaaataggatgtactgttgaaaaagataaagagtgcaggtgcagtttcattcaacacatttttaagatgcatgtctgccaaaatgcaacatacgggaagtttatttcctgacagcaggtgtacacatgccaacacttaatcattttatggcacctatttctttcttggagtgccaagtttgcaaacctgcagtttttaatttggtagatgacaaatattctgaatcaccaattaaaaacctttttgggagggatggggaaaactacaaacgtttgacaaacacaattctaggatgaacaatgtatacaatgcacttttatgaagttttt

SEQ ID NO: 347882 - DNA, 758 bp, Homo Sapiens
  misc_feature (235)..(235): n is a, c, g, or t
  misc_feature (239)..(239): n is a, c, g, or t
  misc_feature (320)..(321): n is a, c, g, or t
  misc_feature (568)..(585): n is a, c, g, or t
atcgcttcattgaagcctgcttaatttctctcagtcaactggtgcccccaagacattatttttattcttaaatgtccaatatctgcctgatgtctgtgtttgtgcacattggggccacagtaaataggctaaaaggcagtcccacctgcttaaaacacacgcaggcttgtcagttggccttttcaaaagtgcacatcagtgtcatctgtgacttcagagatgggtgatatatatntcanaacaggtccttagtttggaaaggcatgcagttatgggcaaggaaaaataaaatgggggcaaattataaaacataaaatacnngtctctgaagtgatagtgaagacagatcgcacccgactgtacttactccccccttgctttgcgattgctttacatgatgaaggttacatgtagtgccattgcccatccatgcccatattcatgcccattccactcataggtcctagaaaggagataaaatccaagaagaggccggaaaatcagcaataattgatggtgaaaaaatagaaggaaactcagattccttttcacttattgccttggtttnnnnnnnnnnnnnnnnnnggatgtgtatggggcagagtataatggtactgtggtaaaatctttactttttcaaagaggaatttttttcccccacccaatgtaaagaaagcaggcagagcaggcagcaggcaaatgttaaacccaccatgacagtgggatagtagagtggatggagaggctggtggagcagg

SEQ ID NO: 347883 - DNA, 3021 bp, Homo Sapiens
  misc_feature (49)..(49): n is a, c, g, or t
  misc_feature (57)..(58): n is a, c, g, or t
  misc_feature (60)..(60): n is a, c, g, or t
  misc_feature (62)..(63): n is a, c, g, or t
  misc_feature (65)..(65): n is a, c, g, or t
  misc_feature (69)..(69): n is a, c, g, or t
  misc_feature (72)..(160): n is a, c, g, or t
  misc_feature (172)..(172): n is a, c, g, or t
  misc_feature (181)..(181): n is a, c, g, or t
  misc_feature (242)..(253): n is a, c, g, or t
  misc_feature (1146)..(1146): n is a, c, g, or t
  misc_feature (2205)..(2213): n is a, c, g, or t
  misc_feature (2792)..(2801): n is a, c, g, or t
  misc_feature (2964)..(2973): n is a, c, g, or t
ccaactgaggggaagagaagagaaagagggggaaaggaggaccgaagangaggaggnngngnngngggnggnnnnnnnnnnnnnnnnnnnnnnnnnnnnnnnnnnnnnnnnnnnnnnnnnnnnnnnnnnnnnnnnnnnnnnnnnnnnnnnnnnnnnnnnnttcttcgttgtntagactggnctttttttcccccctaaaaaatagcatattggagaattgggagaagtctctttggtttggnnnnnnnnnnnnggaatcttcagcctagatcactttcttatccggactgggatattaaatatacgacacatccaggagtttattggagcgcagactgatggcgcaaaggtacgatgagctgccccattacggcgggatggacggagtaggggttcccgcttccatgtacggagaccctcacgcgccgcggccgatccccccggttcaccacctgaaccacgggccgccgctccacgccacacagcactacggcgcgcacgccccgcaccccaatgtcatgccggccagtatgggatccgctgtcaacgacgccttgaagcgggacaaggacgcgatctatgggcacccgttgtttcctctgttagctctggtctttgagaagtgcgagctggcgacctgcactccccgggaacctgggagtggctggcggagacgtctgctcctccgactccttcaacgaggacatcgcggtcttcgccaagcaggttcgcgccgaaaagccacttttttcctcaaatccagagctggacaatttgatgatacaagcaatacaagtactaaggtttcatcttttggagttagaaaaggtccacgaactgtgcgataacttctgccaccgatacattagctgtttgaaggggaaaatgcccatcgacctcgtcattgatgaaagagacggcagctccaagtcagatcatgaagaactttcaggctcctccacaaatctcgctgaccataacccttcttcttggcgagaccacgatgatgcaacctcaacccactcagcaggcaccccagggccctccagtgggggccatgcttcccagagcggagacaacagcagtgagcaaggggatggtttagacaacagtgtagcttcacctggtacaggtgacgatgatgantccggataaggacaaaaaacgccagaagaaaagaggcattttccccaaagtagcaacaaatatcatgagagcatggctcttccagcatctcacacatccgtacccttccgaagagcagaagaaacagttagcgcaagacacaggacttacaattctccaagtaaacaactggtttattaatgccagaagaagaatagtacagcccatgattgaccagtcaaatcgagcaggttttcttcttgatccttcagtgagccaaggagcagcatatagtccagagggtcagcccatggggagctttgtgttggatggtcagcaacacatggggatccggcctgcaggacctatgagtggaatgggcatgaatatgggcatggatgggcaatggcactacatgtaaccttcatcatgtaaagcaatcgcaaagcaagggggaagtttgcagagcatgccaggggactacgtttctcagggtggtcctatgggaatgagtatggcacagccaagttacactcctccccagatgaccccacaccctactcaattaagacatggacccccaatgcattcatatttgccaagccatccccaccacccagccatgatgatgcacggaggaccccctacccaccctggaatgactatgtcagcacagagccccacaatgttaaatttctgtagaatcccaatgttgggcggacaggttatggacatttcatgcccaatagtataagggaactcaagggaaaaggaaacacacgcaaaaactattttaagactttctgaactttgaccagatgttgacacttaatatgaaattccagacagctgtgattattttttacttttgtcatttttcatcaagcaacagaggaccaatgcaacaagaacacaaatgtgaaatcatgggctgactgagacaattctgtccatgtaaagatcctctggaaaaagactccgagagttataactactgtagtataaatataggaactaagttaaacttgtacatttctgttgatcacgccgttatgttgcctcaaatagttttagaagagnnnnnnnnntatatccttgttttacacacaatgtgtgttgttcccaaaaagaataactgtttgggttcatcagtgaattcaccatccagaagagactgtggtatatattttaaaccggttgggccaatgagaaaagaaccacactggagatcatgatgaacttttggctgaacctcatcactcgaactccagcttcaagaatgtgttttcatgcccggcctttgttcctccaaaaatgtgacctttagtttcaaacagatctttatagttcgtgcttcataagccaattcttattattatttttgggggactcttcttcaaagagcttgccaatgaagatttaaagacagagcaggagcttcttccaggagttctgagccttggttgtggacaaaacaatcttaagttgggcagctttcctcaacacaaaaaaagttattaatggtcattgaaccataactaggactttatcagaaactcaaagcttgggggataaaaaggagcaagagaatactgtaacaaacttcgtacagagttcggtctattaattgtttcatgttagatattctatgtgtttacctcaattgnnnnnnnnnngaatgtttttgctagtatcagatctgctgtggaattggtattgtatgtcccatgaattcttcttttctcagcacgtgttcctcactagaagaaaatgctgttacctttaagctttgtcaaatttacattaaaatacttgtatgaggactgtgacgttatgttnnnnnnnnnnggtgttaagtcacaaaaagcggtaataaatatttcatttttgattttt

SEQ ID NO: 347884 - DNA, 552 bp, Homo Sapiens
  misc_feature (14)..(14): n is a, c, g, or t
  misc_feature (24)..(24): n is a, c, g, or t
  misc_feature (54)..(54): n is a, c, g, or t
  misc_feature (181)..(181): n is a, c, g, or t
agcccaaaaactgnccgccaaaanatgggaaccaacaaaatttaacatgtgggnctctgtgcctaacataatcaatcccaggtgggtaaggggtccccccgtgcaatcaatcaaggcctgggtggtggggcaaggcttggcaaaatatgaaatgcattgggggtcccatgtcttaaattgnagtagggtgtggggtcatctggggaggagtgtaacttggctgtgccatactcattcccataggaccaccctgagaaacgtagtcccctggccatgctctgcaaacttcccccttgctttgcgattgctttacatgatgaaggttacatgtagtgccattgcccatccatgcccatattcatgcccattccactcataggtcctgcaggccggatccccatgtgttgctgaccatccaacacaaagctccccatgggctgaccctctggactatatgctgctccttggctcactgctcgatttgactggtcaatcatgggctgtactattcttcttctggcattaataaaccagttgtttacttggagaatt

SEQ ID NO: 347885 - DNA, 824 bp, Homo Sapiens
  misc_feature (82)..(404): n is a, c, g, or t
gagatcccaagtcaacccacagtggacatacagctggggaacctacagggacatggcataatcccctggagcgcagcattgnnnnnnnnnnnnnnnnnnnnnnnnnnnnnnnnnnnnnnnnnnnnnnnnnnnnnnnnnnnnnnnnnnnnnnnnnnnnnnnnnnnnnnnnnnnnnnnnnnnnnnnnnnnnnnnnnnnnnnnnnnnnnnnnnnnnnnnnnnnnnnnnnnnnnnnnnnnnnnnnnnnnnnnnnnnnnnnnnnnnnnnnnnnnnnnnnnnnnnnnnnnnnnnnnnnnnnnnnnnnnnnnnnnnnnnnnnnnnnnnnnnnnnnnnnnnnnnnnnnnnnnnnnnnnnnnnnnnnnnnnnnnnnnnnnnnnnnnnnnnnnnnnnnnnnnnnnnnnnnnnnntggttgtcaagatttactagtttattcaagttcattctttttcaaataaattctcaatcatattttattttattgcaggttcatacttataacacaatttagtatttctatcacttaagaactcttggcaacacatatcagaaacttgcatgtatcagacagtagcgaactcaaggcggtgtttatgtagcaggtctcgggtgggcctctgggaccgcgcctgttgaactcagtgctgctgagggctgcagtcccaactcctctggtcacacggggggtttgcatagatccagcaagtagagtgacccacattcctgatttgcccagtactgaggggttcccctttctgattttccactgattcattagacaactatgtattaagcatagaccggacgcgtgggtcgacccggaaaatcc

SEQ ID NO: 347886 - DNA, 366 bp, Homo Sapiens
  misc_feature (189)..(189): n is a, c, g, or t
  misc_feature (192)..(192): n is a, c, g, or t
aattaaaattactggtggcctgtccaggggctgggggagggaagggatgaaaaaggtggaaaaacacaggccttttaaaggccagtgaaactattcctgtatgaacactgtgaatgagggatggatgtccattatgtatttgtcccaaattccatagaatgggtaacactacgagtgagccctaatgtncanatctgcgctcccaggggattatgccatgtccctgtaggttccccagctgtatgtcccactgtgggtgactgggatctcgacagtcggggaggatggcggtggggaggcttggaaatctgtaccctccgctcaactttgctgtgcttaaaagtgttgcaaaaaataaagtctatt

SEQ ID NO: 347887 - DNA, 321 bp, Homo Sapiens
tgagccaccgcgcccagcctaatagtatattatttttaaatgtgggctctattagtaggatcagggagttctgtaaatccttgaaattacagtaaaaaattctaatgtgaggctttttttctggaaattcctaaaccaaggctaagaaccactgttctaaaagaagtaaatagtggaattcttagagtcaagaatactttatataagcaaggtataaaagaagggcttgggctagatgatcacaaggtctcttctagttattattaactatgacttaaagaatgtaccggcatgaactaagtgctaatactgagtccacta

SEQ ID NO: 347888 - DNA, 1671 bp, Homo Sapiens
  misc_feature (1556)..(1586): n is a, c, g, or t
aagctggccccgcggtaggtagctgcccaccagaacagcaaaaaatggcgctaatgataggccctctcgcagggcccaaagatcacatttgggcaaaaacacggcctgaagctacagtgcagtcaccccaagtggggctccccgggccgggggtgggagctcaaggggacagagtctacggtgtttctatcgcttgtaaacagtcatgcggacggattctttcttacaggttgcaaggtcaaaactttctgttcaggttgccggggagaagtgggaaaaaatttgtggccacatcttagagctaagggggttgcccggcacccccggggtggccagaggaagaaggatttccagccattgctgacagactgttcaggtcccaggagaccagcatccaagggggtctccttcctgctatcagctgccccagacttcaataccacatccagcagggccagcaccagcaggacagccgtcttagcctctgtggcagctccgaggagggcacggggaagggaccaggcctcactcagcctccactggagcctgcctccccccaacactgggcgccacatggagagggctccaagtgccccagcccaagacggagaggagccaagggcagaaacacagaaccacctctggaaagtccaaaagtcactgcgtcctctgaagggaggtggggctggctcttggctcccagactgaagcgggaagcacaagaccagcgatgcaacggaaaaacagggtgggcaactttgggtgggggtggggcgggggagagggatggagctcagtcccccccaaggcccactcctgtaattccagagttcccccaacagggggcgccagaacactgatttaacaatttccccggagctccgcgtccccagccccggggcagagaaactctgccaactccctcttccttgataattttctgcaagggagggcctgcgctccatgccagttttaaggccgaaaatgtgtctcctgaataaccagagagagagaagctggagagactccccggcccagtgggggactgcagggctggggaggggcgggggtcagggtgccgggctgtcctccccatccaagccacctcccagcagacacagcccccacgctgcttcctacgtggcccacgcaggactgtggggcagaaccccggggcctgggctgtggggtgagcgcccccgccttcccgggggcgctgggcacaagacctcgcgagtgagaagacacatgtggtgccgcgggcatggctggtgtaaggctgcccggcacgggtgccaggccccggaacggaggaaggcactgagcgtcaggcggcctagaggccaggggtagctagaagactccctgggggctgtgtcggggacaggcctgagctgcagagtcgaaggagcagttccctcctctgcaaagcaaacagaggaggcggccctggagggccggggcagcggactccctttgggatttctggcccccaagagctgagggaaagaacataggggaagaaacttcaagtccgtttccaggaggcaacagcnnnnnnnnnnnnnnnnnnnnnnnnnnnnnnntgaagtatttctgaccatctccccaaaggaatctttctagcagctccaccttggccccatccaaaagggaccccagggaactgtt

SEQ ID NO: 347889 - DNA, 1720 bp, Homo Sapiens
tggatcagtgctaccccttgcctccaaaacacctcaggcatacagggcctctggaggggagggggtttggggagaacccttggctccgagctatccagcaacagggccagcaggtccaagtaatgctctgcagcgtctcctgccctccccgtctgtaggcaccctgcttgctagtatgtgcttggtctggctctgagtgcccacaatgaaggggtgaggctaggtcaggtggtggcagtagtaattctacctcaatgagaaactgcggggctttggaactgcatgggacattcaaggcctcaactagcagctccagactctccagctctgctgttgtgtcccccagttgctgatagagcctagaggcctccagaagtggaggaccccaggctgatccctctttcagggctgcaaccaagtacaacagtgctctctgtggatttcccatcttacggtgacaggaccccagtgctgtgtacacctggaccaacacaggccgtggacacaggcctgaggccgcttcatgaaggctgcttagtgccttgtctgggttccctgtgatcagctcctggagaccttggcggtaggcaaatgctgtcaggaggacatccttcaatccctgggcatcctgcagggtcaatggagcatctaattcctcagctgggggactccaagttttcagaagtaacagcagatccttagaggctccactctggcttgccattcagggtctctaattaacaaggcccaggtccccaagacggtcagcactcaaccagagggcaacctgcaggccaaccaggcggtgcagggcagacagcagctccggcagaaggcaggaagcacgaaggacagagtcccacagctccctgagcccctgttccaacctgggcccctgctgctcctgtgtctccagcactctctctaggctccgctggatatcctgggcctgatcctctgtgaaaccctgggccaagcttgccctcaggataatgaagttgcaggtgacagtcagctccaagggaagaacaggaacagctgcagggagcccttgcagactatggaggagccctctgagcccttccagtgcatcctgagccaactgctgtcgcctcagagtcagaccggagttctgagccaccttggcctgtcgaacgagccggtcattcttttccctccacaggtccaggcagctggagcccacagaggtggtctggcgggacatggtggccgaggctgggcccggagaccagaagcggacttaggaagggtgaagctggcctgcccaagctcccaaccccagcggggaggggcctgggcacttctgcaccccgccgagctcccctgcttctctcggggtcccaatccacccgcccaggctttccaggacagatgggacgctctctccccgcggcccgccgggctctcaacctcgcctctggttggccgggtctgcgaagctctgggctgcggttggtcctcttgaagagttagttcccgcgggaaactcggggaggaaacgagtcagcaaccccaaacaggcttaggcgggctagaagccggggtcgtgtctgactggggcagtcgcacggccggcggtgcggcccgctcggctctcgcggaggccacagcctcgagaaagggtggccgggagcgagtttcaggccccacagtccgtggctcggcccttcctcgcctcgtgccgaattcgccacccagc

SEQ ID NO: 347890 - DNA, 1591 bp, Homo Sapiens
ggcctgggtggcgaattcggcacgaggtgggcaggacccggaagtgagggtgtgagaggcctctctggaagttgtcccgggtgttcgccgctggagcccgggtcgagaggacgaggtgccgctgcctggagaatcctccgctgccgtcggctcccggagcccagccctttcctaacccaacccaacctagcccagtcccagccgccagcgcctgtccctgtcacggaccccagcgttaccatgcatcctgccgtcttcctatccttacccgacctcagatgctcccttctgctcctggtaacttgggtttttactcctgtaacaactgaaataacaagtcttgatacagagaatatagatgaaattttaaacaatgctgatgttgctttagtaaatttttatgctgactggtgtcgtttcagtcagatgttgcatccaatttttgaggaagcttccgatgtcattaaggaagaatttccaaatgaaaatcaagtagtgtttgccagagttgattgtgatcagcactctgacatagcccagagatacaggataagcaaatacccaaccctcaaattgtttcgtaatgggatgatgatgaagagagaatacaggggtcagcgatcagtgaaagcattggcagattacatcaggcaacaaaaaagtgaccccattcaagaaattcgggacttagcagaaatcaccactcttgatcgcagcaaaagaaatatcattggatattttgagcaaaaggactcggacaactatagagtttttgaacgagtagcgaatattttgcatgatgactgtgcctttctttctgcatttggggatgtttcaaaaccggaaagatatagtggcgacaacataatctacaaaccaccagggcattctgctccggatatggtgtacttgggagctatgacaaattttgatgtgacttacaattggattcaagataaatgtgttcctcttgtccgagaaataacatttgaaaatggagaggaattgacagaagaaggactgccttttctcatactctttcacatgaaagaagatacagaaagtttagaaatattccagaatgaagtagctcggcaattaataagtgaaaaaggtacaataaactttttacatgccgattgtgacaaatttagacatcctcttctgcacatacagaaaactccagcagattgtcctgtaatcgctattgacagctttaggcatatgtatgtgtttggagacttcaaagatgtattaattcctggaaaactcaagcaattcgtatttgacttacattctggaaaactgcacagagaattccatcatggacctgacccaactgatacagccccaggagagcaagcccaagatgtagcaagcagtccacctgagagctccttccagaaactagcacccagtgaatataggtatactctattgagggatcgagatgagctttaaaaacttgaaaaacagtttgtaagcctttcaacagcagcatcaacctacgtggtggaaatagtaaacctatattttcataattctatgtgtatttttattttgaataaacagaaagaaattttgggttttt

SEQ ID NO: 347891 - DNA, 508 bp, Homo Sapiens
cgaattttttaatgcttcagactgtctgattcagtgaactttttgtagtgaaaaagccatgaagccagtagacaagacagatattctgtatgctggaggggatacaggatgattttgaaaaggtacaaagtcctcagtgggcttagaaaattcactgtatgatccttatattatcctacttggcttgcacgtcttcgggtgcatgtatataccgctactgtgtcctcgccatcacctaaatgtgactcagtctgttccactgtaatatgttgtgaatttccttgtactgtacttttattgttggtcttcttgcatcgatgatccaacagcaacaccatttttaaattattgtgaaaagattaactggcaatgtacagagtttactcaaagttttcttaagggaaaacactacaaaaagtcacaaggataccaaatggaaacacatgatgatgcctctgggtctgtatgagaccgtgatgaagtagaaataaagcccttctgagatggg

SEQ ID NO: 347892 - DNA, 1925 bp, Homo Sapiens
  misc_feature (361)..(376): n is a, c, g, or t
  misc_feature (601)..(781): n is a, c, g, or t
  misc_feature (1266)..(1274): n is a, c, g, or t
  misc_feature (1467)..(1475): n is a, c, g, or t
agccctgggcaggctgccgcggctgcgcactggagcaggctgacttacatgctccacatgggacctgtgtcacccaatgagatgtttgttactctggtaaatgccacacgttaacacaataacacccattcctgggaccgtggggatttagggcacgtcactgcagacacgctctgcagcattcaccgacagtctgtcatgcacccaccacgttggccatgtccttgtgttcctatcggatgctcccagtaaccagggggaccacccgagctaatcatggaatgtctgttcccagcaaacacgataaagaaagattgtgcactttaacctctctcatcagggcccaagggctggctgggannnnnnnnnnnnnnnncccactaactttgtttctgaccaaagtgaattggaggcactctgctaaaagacatccccgtagacataggggagagagttgctggctgagggcttcccttggcttccagaaggcagccttccatccagacaagccagtgagctctccccttgggatcactggggtgatcagtcagcagattgattctcattcataagatcattcctccctttaaattgagccccnnnnnnnnnnnnnnnnnnnnnnnnnnnnnnnnnnnnnnnnnnnnnnnnnnnnnnnnnnnnnnnnnnnnnnnnnnnnnnnnnnnnnnnnnnnnnnnnnnnnnnnnnnnnnnnnnnnnnnnnnnnnnnnnnnnnnnnnnnnnnnnnnnnnnnnnnnnnnnnnnnnnnnnnnnnnnnnnnnnnnacttgatcttgtccaggaaagctttgtaccaaacagtgaagccgccctgatccgtgaggtatgagtatgactctgaccttcagccctccctacagccgggggtgtggcccagagaagcttccagcacagccctctacccagaacatccgggctggagggaggctcccagtgacttttctgacattcctagacaggttcattctttgctcaagaaaggcctgaatgacaatgtccaggatgtctgcacaactgagcagctcgctcactccctaaagaaacctattggcagcttcaacaggcaggcaataatctcttcccagaaccactgcagtcaggaataaactgttttctccaccaggctttgacaaaagggcccacaggaatcttaccaatgccaacatttcaaagcaccctatttcacgtagcatagctttctgctccccttccccaaagagaggttatggaggtactgtagcttttagggnnnnnnnnntgttaacacatcacaggtcaagttgaagtcattctctgtttaggcactaaaaatcggtgttgtcactcactgtgtattaccagtatttacttgctttcttgatttcaccaaaaccaaatttaatttaaaggaccacattaatttttcaaagggaaagagacaattaattgtacataatgtatacacacacacnnnnnnnnntacctgtagaaatattattcccagcatagcaggaaaacaaacaaaagtatgggactgtcggaggtgagcctgtgcgtctgtaacccttttgtgactcctgagcgtgcgctgtcttctaggttaactcacgaagtacattctctgtcttactggatactgtaggttcacccattttttttcaatttcctcgcaaataacaagacccacagaagtgactctagctacttaatggttctgttcttttatatgcagcaaacacaccgtccatttctgaagaggcttcggcctgaaggcattttccaatgatgttagtgcacaaaacgctttaaattagactggaactgccagaatcaaatgtaaatgaggaatttctcgtacccctactgcatggtatcgatttttaataaattgttgcaaatttgtttttatgaataaaaggaaaaaacctgt

SEQ ID NO: 347893 - DNA, 454 bp, Homo Sapiens
  misc_feature (192)..(372): n is a, c, g, or t
ggggcattctgctaaaagacatccccgtagacataggggagagagttgctggctgagggcttcccttggcttccagaaggcagccttccatccagacaagccagtgagctctccccttgggatcactggggtgatcagtcagcagattgattctcattcataagatcattcctccctttaaattgagccccnnnnnnnnnnnnnnnnnnnnnnnnnnnnnnnnnnnnnnnnnnnnnnnnnnnnnnnnnnnnnnnnnnnnnnnnnnnnnnnnnnnnnnnnnnnnnnnnnnnnnnnnnnnnnnnnnnnnnnnnnnnnnnnnnnnnnnnnnnnnnnnnnnnnnnnnnnnnnnnnnnnnnnnnnnnnnnnnnnnnnacttgatcttgtccaggaaagcttttgtaccaaacagtgaagccgccctgatccgtgaggtatgagtatgactttggacctt

SEQ ID NO: 347894 - DNA, 455 bp, Homo Sapiens
  misc_feature (361)..(361): n is a, c, g, or t
  misc_feature (371)..(371): n is a, c, g, or t
  misc_feature (407)..(407): n is a, c, g, or t
  misc_feature (421)..(421): n is a, c, g, or t
  misc_feature (443)..(443): n is a, c, g, or t
tcccgggtcgacccacgcgtccgcacactcattgtgagccgttccagagagaagaggaagtagggggcaagtatgtcccaaaaaaggatgatttttccaggctcttcctgggcccttagatctgcagttccgacaagctttggctgcaggaggttttacccatgaactggccatcctactaggaccacaagggaccaagggaatcagggacaaaggcccttcctgccagcccatgatcccgggattggctctcttcccctacttccacttattcttggactctgagaacttttgggaacccaatgggaatcagcatttcaaggtcaaggatgaactgaagggggaagagaagtaaaacttnggccttcttncagcccctttcatggggcaccaatgggaagtgttcntcctgtttcttctnggtcaatatgtgttgttttaanttttgtttgttt

SEQ ID NO: 347895 - DNA, 864 bp, Homo Sapiens
ggcccgcccccgaaggccattgattggaggagactggacacagcgccggaagttttccttgagtcacatgattggctgggagaaacagaagctccgcccgaccgcagcgcagattggtgccaggcccggccggtcccccagtctcgtgattggcggggcacagcagacgcccctgggctgcagcatgattggtcgcgggttgctggtcctgggtcccgggccggagccccggtgcccgatagatgggccggaagggtcgcggcgaggcccggctcagttgccccggtagacttcgatcttgctggccttggccagcatgtcgatgatgtgggcctcgaagtccgcgtcgtgcacgccagtcttccggaactcgccccgcgtaccggttgttctcccagtagtggtgccagttgccccggctgtcggccccgaacccgtacacgttcacctcatcacacacatgcagggcaaagaaaagcaccagaatccccgtggaagggtaccgcccgtgatgctctgtccacctgtcgtggatatacttgaagaaaggctgggttgtagatctggacccttttctttatccactcgaaggaaggacttcacttggggcgtaggtgaatcggatctgcccgtgacaaaggcgctggcgatccacaggaaggtccaggaccttgaagggcaccagcacgaagctgacgtttggcggggcaggttcttggaactctcagggtacatgaaatgggtgggtgggtcggctgccaacatcctgctcaaagccacggtatgggcctgattcatcctcatgatgaagttgtgcccgtccacgtctgccatagcaagagccgcaggttgcccaagatccca

SEQ ID NO: 347896 - DNA, 654 bp, Homo Sapiens
  misc_feature (544)..(544): n is a, c, g, or t
  misc_feature (591)..(591): n is a, c, g, or t
  misc_feature (600)..(600): n is a, c, g, or t
  misc_feature (607)..(607): n is a, c, g, or t
  misc_feature (635)..(635): n is a, c, g, or t
gtacggtccggtatattcccgggtcgacccacgcgtccgatgctcagcgctttaaaaaacaaattggacagctacttctgggaaaaacaacatcattccaaaaagaacaataatgagagcaaatgcaaaaataaccaagtcctccgaagcatctcacggaaccgtagactaggaagtacgagccccacagagcaggaagccgatgtgactgcatcatatatttaacaatgacaagatgttccggcgtttatttctgcgttgggttttcccttgccttatgggctgaagtgttctctagaatccagcaggtcacactgggggcttcaggtgacgatttagctgtggctccctcctcctgtcctcccccgcccccgcctcccttctgggaaacaagaagagtaaacaggaaacctactttttatgtgctatgcaaaataggacatctttaaacatagtcctgttactatggtaacactttggctttctggaattgggaggggaaaaaaatgttggcgacagattttttaaggtttttcaggacctnccagttgagtacctggcaaaattggagttgttcacagaattttggtnccctatttnccggaanccggggatgatgtttggtcccaagtgcntgtgtgtatgtgtgagtgg

SEQ ID NO: 347897 - DNA, 436 bp, Homo Sapiens
  misc_feature (104)..(104): n is a, c, g, or t
  misc_feature (107)..(107): n is a, c, g, or t
  misc_feature (252)..(303): n is a, c, g, or t
acctactttttatgtgctatgcaaaatagacatctttaacatagtcctgttactatggtaacactttgctttctgaattggaagggaaaaaaatgtagcgacanatntttaaggttctcagacctccagtgagtacctgcaaaaatgagttgtcacagaaattatgatcctctatttcctgaacctggaaatgatgttggtccaaagtgcgtgtgtgtatgtgtgagtgggtgcgtggtatacatgtgtacnnnnnnnnnnnnnnnnnnnnnnnnnnnnnnnnnnnnnnnnnnnnnnnnnnnnttctgtgggagggttgccatgggtaaccagccacagtacatatgtaattctttccattcaccccaacctctcctttctgtggcattcatggcaaggagtttcttgtaaggccatcaggagttactttagggtt

SEQ ID NO: 347898 - DNA, 521 bp, Homo Sapiens
  misc_feature (474)..(474): n is a, c, g, or t
aatcccgggtctaaccaggcgtccggagaagagccggagttcagatgaagactcccaggccacgggatagccttttgctgtgccctgtggcctgaccgcagtgaagaatgtatctgtaattccttgctgagtaacaagaagtaaaatacatgtttgtatatctacatttacattctgcgccccagagctaagacagactgcgaatcacttttctgctgtgagggtgatggtgcctgatgcggtgtctcccctatctccttatttaagcccttaactccttgccctttgagagtgtccattgctggccatggtcactaaatttgaagttccagtcctccctttggagtggacatttaaaatctgcagccattccttgcttcagttcccttccaccacccaggggctggctttcctataaagccacctccaggggtccagggggctttcttcttctctctccgaagcccctggganctgtttccttgttcatttgaaccctcgtctgtggcccgcggagaacc

SEQ ID NO: 347899 - DNA, 600 bp, Homo Sapiens
  misc_feature (567)..(567): n is a, c, g, or t
tggcttcattggccccacatagatgtcacgtgagagtgaaaaaacctggggtataaatatcaaaggaacccctatctgctggtttgctgaggagcccacttccagcagaaccttctctgtccttctgagtctgtagagggcgcttatgtcactggaatcctagtctggcatggggcaggcagaggagcaggagcccccagtgggttcagatcttctgaaaacttgaggttagcggatctgccctttgagggtctcaggctggatttgggcctggagtccgtgtttctccaagggtgttgcttgggtgagcgctggagtgcacttgcatgtgtatgtactctcacgccctcgtggactgggtgtcctcgttgtatatagagcttgaacttggtgttccccaggtccagtaccactgccgttgctgcctgccttctgtttcactgctgttttctgagtgcctcgtgtgcagcctgtccttcagccctccctgaactctgctgaccagctgtgtgtgtgctgtgctacagggagttgtgccattgagcctgagcctacatgctgagtggnccctcggctcagtggtgcagcgcagactcagag

SEQ ID NO: 347900 - DNA, 1705 bp, Homo Sapiens
  misc_feature (1670)..(1670): n is a, c, g, or t
  misc_feature (1675)..(1675): n is a, c, g, or t
agcggctaaactagggcctgctctggcatccgcaatgtacgtccactagcagtgcgcaagacctcccgcgagacaggtgttgtttttaatgcccatctcacagatgaggaaaagatctcaaagtaccttgatgatttacccaaagttcccgacccaggcctttaaaactttttatgcatgcaccgcctcttgaccacatcagacaatcaccacaaaacgatgggctgacagttactagagggttagtaacttatctttaaaagggccaggtagtaaatattttaggctttgtggccaaaagtctctaccacacctactcaactctgtcacgctagcacaaaacagccacacacaaatacattaaaaaatgggtataactgtgttccaataaaactctattagcaacaggcagtgggccagatctggcccactgactgcagtttactaactatcccctgatcaagaatgtccaacaatagctgaaagttacttgagaaagtcagcactgtaggaggaagaaactaacaccaaaacacaagccggtagttctggggaaatgctggcagaccaagggcgggacctcttgcccagaataatctctctctcctactaaggaacctataggttcactgaagtaatccattactttgaatcactctctcctttgccccacctttaaacacaaatccccatccctaatagttactggtgaacagatggactcatccctttcttatccgagaagccccatcacatgctatgtcctatcacatgctataccagaagctagggctgcagaggtggatgacgcccccagatccctgccccctaggggcttaagagtctagcaggggcacctgacccaagtaagtacaatgcagggtaaggctggctaaagagcacgtgaaaaggagctgggaacacagctggtcagcagagcttcagggagggctgaaggacaggctgcacacgaggcactcagaaaacagcagtgaaacagaaggcaggcagcaacggcagtggtactggacctggggaacaccaagttcaagctctatatacaacgaggacaaaaatgaaccaggctccctgaaagcagggaatctaacctgtgctacggcgccttcccagtccacgagggcgtgagagtacatacacatgcaagtgcactccagcgctcacccaagcaacacccttggagaaacacggactccaggcccaaatccagcctgagaccctcaaagggcagatccgctaacctcaagttttcagaagatctgaacccactgggggctcctgctcctctgcctgccccatgccagactaggattccagtgacataagcgccctctacagactcagaaggacagagaaggttctgctggaagtgggctcctcagcaaaccagcagataggggttcctttgatatttataccccaggttttttcactctcacgtgacatctatgtggggccaatgaagccaattcttcttttgtacatatgcagtcctgtaagaatgcatttcaaacgggatccgctaattaggaattttctcctggaattctcaacagtctatggggggccagaagcttttccacaaaccagtggaaggtgggccaggcaaaggaaagcctctttaggacgagggagctgggccagcagcttgntattntagggttaggaccaggcaaaaacccaacca

SEQ ID NO: 347901 - DNA, 625 bp, Homo Sapiens
aatgtgtgccactcccgatgtggtattgtgtgtgcagtgggagatggaagcaagcctgcagaaggtggtgctcacttcctcggggctaccgtggagctgagtgggagccgtagtttataaatgccctgtgctgcacccagatgctgcagctggaagcagcactcagggagcccatcctgacctgcccgggctcccagaagaggtcaggagccacaggacggtcaagcagccggacaatcacgagacactgcaaacgagctgctcctctgacacatgctagccaccaggtttggaaacctcccagttctgctcagcaaatcaactagaaccttctcccactgctctgagtctgcgctgcaccactgagccgaggggcccactcagcatgtaggctcaggctcaatggcacaactccctgtagcacagcacacacacactagctcccaaggccacctctgggaggctgttagcattgctgacttacacccagttaggaatctcggggcactctgagggaaagtgctggggctgccctgaaaaatgcaccttctcccagaaatcaggggattctttaagacacttgagaataggaccgatgatactacctctccgccccacgcaactc

SEQ ID NO: 347902 - DNA, 919 bp, Homo Sapiens
gctgggtggcgaattcggcacgaggcacttttcactggcctttgcagtccccaaaggatcaggtctcagaaccaaggctccaaaggctgaggtctccccagttcctcctctcaaaactcccacaggagctcagaggccgggggtcctgccaactttcatttggaaagttctttcgaacatctaaactagatctatcttagggtttctttctctcctagataggatcagctcccagccctagccattaggctgctggtcctggcgggggatggggtcccctcgttacccagtccttcccagggacccaacttcctaacacaacctggcttggacatgaagaccctcccccacgttaccttgtaaagagtcctccagagctgggatcccatgggcgcagcagcacacccagctcccatggcgtcactccctagctctgtcccagcttttgctatcattgctgacttttcctcctgtggctcattctgtccctgccctttgaaaacctaaaataccaagggtgtcatgctggcaactccctgcccagtcctgcacaaagccttggctgtgtgtggcaccccttgcctcctaccccagagcagctggctccattggcttctccctgcaccagccctgtcctcaggggtcaggaaaaagcagcacagctttctttcctctcctccagaggcctggaagggaggtggaggtccagtaagggcctggctgccttggatttcttggtcctgccttgccaactgcaccctgtagctcctgctccctgtgaccccagaaacagaggtgctgccttccctgtctcctagacaaagcacaaagggatgccctgcctggcttgagcctgcccaactaaaggattttctctgccccagggaccttccatccctgaatacaaggctctaggcat

SEQ ID NO: 347903 - DNA, 2718 bp, Homo Sapiens
  misc_feature (172)..(180): n is a, c, g, or t
gggatacagggttgatgaggtggctttacctgcagctatgcccagctggtcctgtccctagtgcaaggccccggtgacccctccccactcatgtccatgctgcatggcttggggctgagcgaggaggagcaggcacccggcacacagcccttgtgtcatctctgctaaaggnnnnnnnnngcttgcgggagataacatggagttgtttgaaccctcccagaaacgctgcagcagtgctgtgacctttcgcagctgtggttccgagagttcttcctggagctgaccatgggcaggaggatccagttccccattgagatgtcgatgccctggatcctgacggaccacatcctggagaccaaggaggcatcgatgatggagtacgtgctctactccctggacctgtacaatgacagcgcccactacgcgctcaccaggttcaacaagcagttcctctacgacgaaattgaggccgaggtgaatctatgttttgaccaatttgtttacaagctagcagaccagatatttgcctattataaggttatggcaggaagtttgcttcttgataaacggttacgatcagaatgcaagaatcagggagccacgatccacctcccgccgtctaaccgctacgagacgctgctgaagcagaggcatgtgcagctcctcggcagatcaatagacctcaatcgtctgatcacccagcgcgtctcagcagccatgtataagtccctagaactggcgattggacgatttgaaagtgaagatttgacctccatagttgagctggatggcctgttggaaatcaaccgcatgacccacaagctgctgagccggtacctgacgctggacggcttcgacgccatgttccgggaggccaaccacaacgtgtcagcgccctacgggaggatcaccctgcacgtcttctgggagctcaactatgacttcctgcccaactactgctacaacggctctaccaaccggtttgttcggacagtgttaccattttctcaggaatttcaaagagataagcagcctaatgcacagcctcagtatctgcatggatccaaggctttgaacttggcctactccagcatttacggcagctaccggaacttcgtgggacctccacactttcaagtcatctgccggcttctcggctaccagggtatcgccgtggtcatggaggagctgctgaaggtcgtcaagagcctgctgcaaggcacaatcctgcagtacgtgaagacgctgatggaggtgatgcccaagatctgccgcctgccccggcacgagtacggctctcctggtatcctggagttcttccaccaccagctgaaggacatcgtggagtacgcagagctgaagacggtgtgcttccagaacctgcgggaggtggggaacgccatcctcttctgcctgctcatcgagcagagcctgtctttagaagaagtgtgtgacctgctgcacgcggctcctttccagaacatcttgccgcgagtccatgtgaaagagggggagagacttgatgccaaaatgaaaagactagaatcaaagtacgccccgctgcatcttgtcccactgattgaaagactggggacccctcagcaaattgccatcgcaagagagggggacctgctgacaaaggagcgcctctgctgcggcctgtccatgtttgaggtcatcctgacacggatccggagctttctggatgaccccatctggcgcgggcctctgcccagcaatggggtcatgcatgtggacgagtgtgtggagtttcacagactgtggagtgccatgcagtttgtctactgcattcccgtggggacacacgagttcacagtcgagcagtgctttggtgatgggctacactgggctggctgtatgatcatcgtacttcttgggcagcagcggcgttttgctgtgctggatttctgctaccatctacttaaagtccagaaacatgatggcaaagatgagattattaaaaatgtgcctttgaagaagatggtggagagaattcgcaagttccagattctcaatgatgagatcatcaccatcctggataagtacctgaagtcaggcgacggggagggcacgccagtggagcatgtgcgctgcttccagccgcccatccaccagtccctcgccagcagctgagggcacgcgctgcactccgtaactcaacatggcatgcctttctctccgtaaactatttagtgagatttttagggactatttttcagtatctctgtacctgttaaagggggtgcttttcgatctaaaaacttaattttataaaattgacttatttttctagactaaaattgtatatgcttttggtaattaggaactcttgagaatattggctgctgattgttgccatcacgttcctacaaaattgtttttctatgggatgttctggcagctgtgtcataaaatgctgctgggttcattcattcattccataagaaacttaataccagcaaatgcattaaatcccttgccagttaccattaactgtaactatttagcttttgtttagggatctttctgatggtcttttatgagcaatcttagttctaagtcattgttcccatcccttttttgtgtgtttcagaaaatagtgaacttgattcccctgcttccactaaatccagttgtgacaaaatctaacgtgacatcagatcgaaaggttatagaaataaaactaatgagatctaa

SEQ ID NO: 347904 - DNA, 976 bp, Homo Sapiens
ttggtctcgtgtgccatggccaatttctaaattagtccaagctcgtgtctgaatagagttcctgtggattatccaagtgacataatactatctaaaaaagataacttggcttatgagtttgaacaagaggagttaactggggcaggttagacatatgactagttattctgcttctaccccctccccctctgttaataagactctgcactttttgaaaggtcagttgccttaacaattaagcagatcatatgttcatatctgcttcagaaatgccaagttcttcattaccagcttcgatactagatattcaagtggcacatttgctgtacattatcttggcattcattggattctgtaataatcctttctactcctctatgaaaggctcttattgaatttctcttggttcatattgtttgctgctgcaactcctattaagaatctggtacccagaagtcatgaagctgcccctgagtaggccgacagttctggattatttcctgccatgttccatgtatcctggcgaccaagtctgtgtcaccttagttctgtaaaaaagtcttgcatcttccctaatatcacatttaacatgcttttccaaagccccacagagtagcacaaagtgtttccgttgtccagaagaaaaagaatgagaacaactaacgttcaccgactaaatgaagaagaatgtaggtcaggtaatatgcctgcttttcaagttctaaatgaagactgtcatcaataatgccatctggttgttcagcctttttcttcaagaccattttctttaacaaatcagaaggcttcatctgcacaagatagcgatgtaggactgatacctgcagattactggcattaggaacatcttcgtgtttcttatccagaagcttttataataatcattatgactgaggcactgtctcagttgccttccacgtgatgtcctaattagggactcatgctgtacctaataaca

SEQ ID NO: 347905 - DNA, 934 bp, Homo Sapiens
gaattatcaaaacacaactcaactatgaatcttcaatgtttttttaaagcaaaactatttattgactttattcatccatttgtaaattttttaaggttcttgtgtatatttggggggtgggggatgaattataaattatattcagccctgagtggagacctatcagattggattgctggcaaagcacagaatgcctgtatatgatgtaactgtatcaaaaataaaaagctgtcacatattttgtaaatttttaccttgtaaagtcacaaaaatagtttttaaaggaaaaagtacagtattcttttaataaactggctcacagtctggtaggtctacaaccccatagcacaacaggtttatagagatgtatatagaattatagtccttatttttttcctttgcgtgaaaccttttataacagattaacaatcaactgcataaatattattaatattttaaaaagagttaagttgtattttgataattcacaaactatcatgcaaataacgagtaagtagacaagaataaagtggtttgagatgaaaagaacctaacattatttacagtagatgtggttttaatacaattactgccctaaaatgtctctggcaatgtacagaaatattgtatatacttacatatgtaattgttgtaagagttaaatacaaaatcatggtgacacttccaattaagtgcactaaatgaaaagttaagtcacttattaacttttcagtttggtttgcaatgagaaagagtggaaatttgtattttgttttgcttatagaattacagacatgtttgacggaagtggtgagcttttattttgctttttcatagagggcagaaagtagggaaccagatagaagatgaacaacggggccactggaaaagtgaaatttggatagcctcagcacttttaagcatggattaccaa

SEQ ID NO: 347906 - DNA, 1153 bp, Homo Sapiens
  misc_feature (15)..(15): n is a, c, g, or t
  misc_feature (73)..(73): n is a, c, g, or t
  misc_feature (134)..(134): n is a, c, g, or t
aacacttaacactgnctcccaggatactgttactactctttgcaacactggtacatgctaccaatattagtgnatcagactcccttttcagaactatggttcttggagtcctggataacttaaaaaatagagancctggtctgggctaaagaatttaaaagttctctaactctcaaccagacaccttgggaactacaatatggatatgtcctacccagttcccaggagtacattatgaagaagttcatatacatcccacatccactgcagtatctcaaaactctcctagtaacagcatcctcccatcaccacaaataccaagagtattaattaaagagggacaagcctgccactatatccttcactcacaattccaaagatgtttgtcctggaaattctatcttatttttgtgagctcttagcatattgtgatagcatgacatcttcacatcaagtatactgcttggctagcatcaataatagttcaaacaaatagcaacaatttatatactttacatcaactaggggaaaggtgacaaacattgtttaagacagtttgaagcacaggttatcaccaaggtctgtgtttggaagataaaacatgcgagataaacagaggactaacactgattaattctggagaaacatggagaagaactataaactgcttagcagggagaaaacagttctctgatttataataaaatctattcacaacacttatttgtagttacttttataatagataatattcaagttatattaaagtgcttcaagcaaaatttagcaactcctgtaaggcttcctgctgttcatcatcaagttgtgatacacattccaaccataaatcttcagaagtctgtacctgacgcacgacattagctaggcgtttggcacaaggatcctcatagttaatagtctcattaatttttccttctgcaattatactgattattttgggaagattggaattatttggaccaattacaactgggtggttactttcaattaggtcacagagaaaactcaaagtctgaatagcttcctctttatcttcatgcagtggaagccatgataaccagtgtggaagaacttcatctacatttacacagttaggcttaaacttcaaaatcttccctattgctgagataca

SEQ ID NO: 347907 - DNA, 1115 bp, Homo Sapiens
  misc_feature (1082)..(1082): n is a, c, g, or t
ggcaagggctatgtttgtttgtttttcaaaagtgctttgaagataacagcctttaggtttgagttatttcacttttcataatttttaagtagcttatatataatggtggtaccataggattttcttttttcaaatgactgtcggcagaaacagtgggcactgactcaccttttgagttttagcagagaattatttatttctttacaatgcactttctaacccattgtagctatattagcattatcttttaaaaaaagacatgcttttgtatttaaatattgtaggatttaagtgtctttctcaaaatagcttattcctttctgaaagaaaatgagggaaatactctgaattattaggagacttaaacccaatatttaaatatgctattttataacactgcatcagttttaggagttgcatctctcctgctggctcttttatatttgagcaagatcagtgtagaatatgtgtttagaaacttgtctgttgtctcagtttagtgaaaaggaggtgctgcatgtgcctgaattaaaaccaagaaatttttccaagccaaatgcagccttagtgatgagagatttaattctccattgtcaccttttagccttttatgaatgcttagttttttctgaaggatgtctgcattgtaaaactatggactaaaacctaaaaaacagaatcctcaaaaactttgctgtatgtgttttaacattttagagaacagtatgttgaataactaaggtatgtaacttgaataggaaaaatgtccatcaaatgcaccttggaaaatcacagtaggtagaaggctgtgttaaccgtttgtgtcttattaacatccttaagttaattttgaatttttgacagttttgagggaaaagacctatggaacctaatgtgaagtatttcgtatgttaactggtgttgagttgaagatttttactgtgtataagcagatatcatttgaatgataaaaatgtcattaaccctgctgtcttaagatgttcacacaaatatggagagtaattctacaatataaaaatatttattttaatactgagtttcagttaagtcataaacagtgntaaaactcttgggaagggaaaggggtttttttg

SEQ ID NO: 347908 - DNA, 1584 bp, Homo Sapiens
  misc_feature (1526)..(1526): n is a, c, g, or t
gcgtgtgagagtgcgagtgtctgtgcgcgagtgagtgagcggcgggcgggcgcgagtgtggccgccgcggagcgcgagcaggacccggcgggcgcgctccccagcctccgtctccccgccggaaccatgtcgggcaggtcggttcgagccgagacgaggagccgggccaaagatgatatcaagagggtcatggcggcgatcgagaaagtgcgcaaatgggagaagaaatgggtgaccgttggtgacacatccctacgaatctacaaatgggtccctgtgacggagcccaaggttgatgacaaaaacaagaataagaaaaaaggcaaggacgagaagtgtggctcagaggtgaccactccggagaacagttcctccccagggatgatggacatgcatgacgataacagcaaccagagctccatcgcagatgcctcccccatcaaacaggagaacagcagcaactccagccccgctccagagcccaactcggctgtgcccagcgacggcaccgaggccaaggtggatgaggcccaggctgatgggaaggagcacccaggagctgaagatgcttctgatgagcagaattcacagtcctcgatggaacattcgatgaacagctcagagaaagtagatcggcagccgtctggagactcgggtctggccgcagagacgtctgcaatctctcaggatctggaaggagtgccaccctctaaaaagatgaaactggaggcctctcaacaaaactccgaagagatgtagacgatgctttaaagcctccgatccatgttccatggaaggtacatcagcaattaattctagagcaactttgccccagcgattcctcttgggtgcgaacagaactactaacgtttcaagtttaccaagtgcaaatccaagaagacccagaacggcgtcacttctcagacactgaagaactctgctgtgaagcaaaacactcaaacctttaagggactgtccttggggaggcaggcggggctgacagctcaggagtgtctgcacactgtctcggaagccaggattccatttgtgttgctgctgtattttccccccacttctctatgtaacgatataagctatcggagggtggtaccgatcaggaacgctttttggcggggctttccactgttcaaccgattccttccgctttctttttttgtgccttgtgcccttgaggtgacctctggcatgtatcctggtggttcttacatccccctctgcaaagtgccctcttggtttggttcgggcggcggctgccaccctactcaccgctctcctccctgccccaggacttcatcggagcaggcagggtggagcgaaggagctccttagcccacctggtttgcaggtgcagggggaccttaggcacgccccaagcaccaggcaccaagggcccaaaggacgcgcaggtgttggggcacagtccccaagggcttcggcccttgggattcaggctgggcactcgctgtgcttcttcccttccttggggcgtttaaggactgggcgtntccaagcccaccatgggcccagatggaacgtgcaaagccttggaatttttttggcaat

SEQ ID NO: 347909 - DNA, 600 bp, Homo Sapiens
agaggtttaaaaaaaagataagggtcatatgaagaactccataatgttcttgccaagaaaaaagatgattgagtatataacgaacttcagatacagtgtatagaggatgatgcatttgtggcataataaatagttttcagtgctggttttgatatgagttttctgcattcatgaaaaagaaatgcattttggctttttccagaaagagtaccatcaaggaaacggagacctcaactgctgttctagactgtgggggtgcattcctgtctcagcaccaaggatcccaacaggcaggcagggaggcccttgactttgtgtcactgtgaggcagcagagtccatgctctgcatcaggggaggtgcagtaaaggtccattgtgtggcttgagacctatgatctgaggcttgtgcataataagatggcagctgttacctacagagcaaggagtttcctctttcagggtagattatgtaagaatcaattccctggtcccaggagaagttttattgtgagtttgttaatttaagaactcactcagcagaaggacatgtaatgtctgagtaatcttgatggaagaaaggaaatagatctgtgattaaa

SEQ ID NO: 347910 - DNA, 610 bp, Homo Sapiens
agtttgccgttcacccggagcgctcgggacttgccgatagtggtgacggcggcaacatgtctgtggctttcgcggccccgaggcagcgaggcaagggggagatcactcccgctgcgattcagaagatgttggatgacaataaccatcttattcagtgtataatggactctcagaataaaggaaagacctcagagtgttctcagtatcagcagatgttgcacacaaacttggtataccttgctacaatagcagattctaatcaaaatatgcagtctcttttaccagcaccacccacacagaatatgcctatgggtcctggagggatgaatcagagcggccctcccccacctccacgctctcacaacatgccttcagatggaatggtaggtgggggtcctcctgcaccgcacatgcagaaccagatgaacggccagatgcctgggcctaaccatatgcctatgcagggacctggacccaatcaactcaatatgacaaacagttccatgaatatgccttcaagtagccatggatccatgggaggttacaaccattctgtgccatcatcacagagcatgccagtacagaatcagatgacaatgagtcagggaca

SEQ ID NO: 347911 - DNA, 999 bp, Homo Sapiens
  misc_feature (135)..(175): n is a, c, g, or t
  misc_feature (725)..(735): n is a, c, g, or t
  misc_feature (941)..(941): n is a, c, g, or t
  misc_feature (946)..(946): n is a, c, g, or t
  misc_feature (966)..(966): n is a, c, g, or t
  misc_feature (974)..(974): n is a, c, g, or t
  misc_feature (982)..(982): n is a, c, g, or t
ttaactcgcctagtagatttgcaccaatggaaccgaagaactttcatagacactcacaaggttatatccatttctttgtatctatatcaaccgtatacttttccgagactgtatacgtccatatagataggtagnnnnnnnnnnnnnnnnnnnnnnnnnnnnnnnnnnnnnnnnnaagtttctttgccggcatgttgccttgtttccgcttaaattgctctattttaacttatttatgtcctaaaagaagaatgtaatttgtttacaaacctgtagataacgtctttggctatttgtatggtttaagaacactggtggctgagatgctataaaaacagctcggcccaacagacacttcccctgggttgcatcctggatgttttatgatagccatgctctgatttttgcctgctatttccgttcaataatgtcactaccgtgagaggctcaggcagaagccaaatgctaccgagttgccatcctgaggggtttaacaacatgctccgtagacgaagggagaggaggagagaaggcttcctgggtttgcaacactaacggccatccggcccaaggatgccaggatctgcaaagcactgctcgaagacttttctctcaatgaaactcgcttgagtttactaagagcatttcaaaaataggttctctttggcactgtctgtacagagattgaggtagtgttgaaatattataaatggtattgtgttgannnnnnnnnnnatttagtaacttacaggtttgtttccttattaatggcagcatctgagctgttggcatattggatgaggatcagtatggcttgctgcttttatttttatttttgaagaagaatagcctttttctctgcactatttagatccgaatggaaccttatggatgtgtatattgaggatgtactcaggtgtggatttaaacccaaattgtcnttccngtaggtcacaatatattacngtaggccnttttaacngccagtcttgctttcct

SEQ ID NO: 347912 - DNA, 1039 bp, Homo Sapiens
  misc_feature (493)..(548): n is a, c, g, or t
acggcgggtgtcggggccaggggtgagacgggacaccctgacagagcagctgcgctggctcactgtcttccagcaggcaggagacatcacgtcacccaccagcctgggcccggctggggagggggtggcagggggccctggttttgtgcggcgctcctcctcccgcagccacagccgcgtgcgtgccattgccagccgggcccgccaggcccaggagcggcagcagagactgcagggcctgggccggcagggacccccagaagaggagcggggcacccccgagggcgcctgctccgtgggccacgagggcagtgtggatgcaccagcaccctccaagggagccctcgggccagcatccgcggctgctgaaaacctggtcctgctccgcctctgaccgtcagtggtgcgaacctgggcggctctggaggcccagggcaggggtgggcgtgttgtttgctcaggaaacagggcagccaggcccccaaaactgtgnnnnnnnnnnnnnnnnnnnnnnnnnnnnnnnnnnnnnnnnnnnnnnnnnnnnnnnnggggaggaaaggctaaagctgctggcccggggcccacaggaggggcttcgaggctggccctgccaggcagttttcccggcgttttaggatctgtacatagagaaatatttaaatttttagaagcaaaacttatacaacattaaaatgataccaagtccctttccatttttacctggtttttcaccccaggtgtgtgtggtgtgcatctgtgcgcacctgtcctgagcctgccccgggaggcgcggctgacctggccacggcacaggcgggggtgcttgtgaggcaccagggctgctcaggacggccgtctgggccttgccctgaagcctgtatctgccttgcaccgaccacgccaccctctgcaccatgcctaagcctctgtcaactcccaaacgtggttctgataaacgtgctcaccagcacgcatgggcttcccgttcgctcagcctcctgtgccacttacttaccaggtgcccgtcggagcctgcgcc

SEQ ID NO: 347913 - DNA, 2695 bp, Homo Sapiens
cggtccggaattcccgggatcgcaagagcccgtgtcccgctaggctccgcgccctcgcgcccatagccccggcggcggcacgaccagaggcggccaggggagcgcgccgccccgctcggccctccagtcccgctccgccgcctccctcccgcacagcagccgccagcgcggcctcctgcaccatgtcggtggccggcctcaagaagcagttccataaagccactcagtcttccaaaaaacagtattcttgtgactgttactgagtataaactggatacttctggatacggctctggttgtacaaagtgagtgagaaggttggaggagctgaaggaaccaagctagatgatgacttcaaagagatggaaaggaaagtggatgtcaccagcagggctgtgatggaaataatgactaaaacaattgaataccttcaacccaatccagcttccagagctaagctcagcatgatcaacaccatgtcaaaaatccgtggccaggagaaggggccaggctatcctcaggcagaggcgctgctggcagaggccatgctcaaatttggaagagagcttggagatgattgcaactttggcccagcacttggtgaggtcggggaggccatgcgggaactgtcggaggtcaaagactctttggacatagaagtgaagcagaacttcattgaccctcttcagaatcttcatgacaaagatcttagggaaattcaacatcatctaaagaagttggagggtcgacgcctggattttgattataagaagaaacgacaaggcaagattccggatgaagagcttcgtcaagctctagagaaatttgatgagtctaaggaaattgctgagtcaagcatgttcaatctcttggagatggatattgaacaagtgagccagctctctgcacttgtgcaagctcagctggagtaccacaagcaggcagtccagatcctgcagcaagtcacggtcagactggaagaaagaataagacaggcttcatctcagcctagaagggaatatcaacctaaaccacgaatgagcctggagtttccaactggagacagtactcagcccaatgggggtctctcccacacaggcactcccaaaccttcaggtgtccaaatggatcagccctgctgccgagctctgtacgactttgaacctgaaaatgaaggggagttgggatttaaagagggcgatatcatcacactcactaaccaaattgatgagaactggtatgaggggatgctgcatggccattcaggcttcttccccatcaattatgtggaaattctggttgccctgccccattaggatgttatgctggctggctcgcctcctcttgacccagatagttacggttaaccactgctttggcaatgctgcttataacacatcccaagtgcaggccgcagtggtccacgtcatccagccccaccaagtgactttggttgacttgtgggctcccacaggagtcatggtgatggatgatatcctcttagcctggtgggcgtggcatgtgctttttaaaacatcatctgagaccagccagtagtcacagaactgctgtttacacagttctcaggaggctgtggtttcttagaatatgaccatgagccatttcacagaaaaaccatcccaccgaagatattgtctatcaccccaggggccatctgaaggtctctttgcatttctccatgcaaagaggagaaagcttttgctttcacactgtcccttcccaaatatgtgagtcatggaattgtcaaagtaagccttccctcaccagcaaattgtctcctgatctgaatgaatttgtctcttaatgcatccatagaaaagtgttaattgtgggttcaaagcattctctgcaaataggcatctcagctcctcacacttatggctatttctgacgtatagccagttttcttccctccttgctattaaagccagagcggtaattccaaattatttttcagtaagacagttaatcagcattattgtgagagggactgaaaagaaattctccattatgaggaattgggaagaaatctggtatccaagcttaaatttcttgctatacagaaactatgtatgtatttaggctatttctgaagggcacagggaagggggaacaaatatcttcacttcagttttatttgtgaattacatgtttcatgaatccatttggcacagagacacaaggaagaaaacactagtaaccatctttccactagttcatagactgagaaacagtaaatacctttcctttccacttttaccctgtgttctttgaacatcatttgtgcagattctgccctcaatgaggaccaaataaagatgatttttgtgcttagcagtttaaggtatatggctgcatatgcaaaactctttcccaattcagtcgctacttttacttctgccctttctatccatcgtcttcattttgtgtgtacagtgctgtgtgtaagcttatcagtgtgtttttttatttgtatcagtcatgaaagtcctgttaggtatccagagttctatttatctagctgtacagactctttcagaggtttaacgtgctgcttccgatgtgccacctgcagtagtggatcatgtggagtgaaaggcaaatcttactgcttaatgtataaactctcaccacaggaagcatcgctgtttccaataaatattgctgaagacag

SEQ ID NO: 347914 - DNA, 1022 bp, Homo Sapiens
  misc_feature (936)..(936): n is a, c, g, or t
atcaggccaaatcggccgagctcgaattcgtcgagagcgggtcgagtgtttctcagcaagagcccgtgtccgctaggctcggcgccctcgcgcccatagccccggcggcggcacgaccagaggcggccaggggagcgcgccgccccgctcggccctccagtcccgctccgccgcctccctcccgcacagcagccgccagcgcggcctcctgcaccatgtcggtggccggcctcaagaagcagttccataaagccactcagaaagtgagtgagaaggttggaggagctgaaggaaccaagctagatgatgacttcaaagagatggaaaggaaagtggatgtcaccagcagggctgtgatggaaataatgactaaaacaattgaataccttcaacccaatccagcttccagagctaagctcagcatgatcaacaccatgtcaaaaatccgtggccaggagaaggggccaggctatcctcaggcagaggcgctgctggcagaggccatgctcaaatttggaagagagcttggagatgattgcaactttggcccagcacttggtgaggtcggggaggccatgcgggaactgtcggaggtcaaagactctttggacatagaagtgaagcagaacttcattgaccctcttcagaatcttcatgacaaagatcttagggaaattcaacatcatctaaagaagttggagggtcgacgcctggattttgattataagaagaaacgacaaggcaagattccggatgaagagcttcgtcaagctctagagaaatttgatgagtctaaggaaattgctgagtcaagcatgttcaatctcttggagatggatattgaacaagtgagccagctctctgcacttgtgcaagcttcagctgggagtaccacaagcaggcagtccagatcctgcagcaagttcacggtcagantgggaaggaaagattaaggacaggctttcatcttcagcctaggaaggggattttccaacctaaaccacgattgagcccgggatttt

SEQ ID NO: 347915 - DNA, 385 bp, Homo Sapiens
  misc_feature (29)..(29): n is a, c, g, or t
  misc_feature (37)..(37): n is a, c, g, or t
  misc_feature (59)..(59): n is a, c, g, or t
gatttttggtgcccctaagcaagtttaanggtaaaanggcccgccatatgccaaaaacncttccccccaattcaagtcggcctacctttaccttccgccccctttcccatcccatcgtcctacattttgtgtgtaacagtgcctgtgtgtaagcctatccagtgtgtttttttatttgtatccagtccatgaaagtccctgttaggtatcccagagttcctatttatcctagctgtacagactctttcagaggtttaacgtgctgcttccgatgtgccacctgcagtagtggatcatgtggagtgaaaggcaaatcttactgcttaatgtataaactctcaccacaggaagcatcgctgtttccaataaatattgctgaagacag

SEQ ID NO: 347916 - DNA, 2270 bp, Homo Sapiens
  misc_feature (106)..(106): n is a, c, g, or t
  misc_feature (131)..(131): n is a, c, g, or t
  misc_feature (169)..(169): n is a, c, g, or t
  misc_feature (205)..(205): n is a, c, g, or t
taaggacctagtgaccccctctgactgctacgtgactctctggctgcccacggcctgcagccacaggctccagacacgcacggtcaagaacagcagtagccctgtntggaaccagagctttcacttcaggntccacaggcagctcaagaatgtcatggaactgaaagtntttgaccaggacctggtgaccggagatgaccctgtnttgtcagtactgtttgatgcggggactctgcgggctggggagttccggcgcgagagcttctcactgagccctcagggtgaggggcgcctggtaagttgaatttcgcctgcagagtctggctgaccgtggcgagtggctcgtcagcaatggcgttctggtggcccgggagctctcctgcttgcacgttcaactggaggagacaggagaccagaagtcctcagagcacagagttcagcttgtggttcctgggtcctgtgagggtccgcaggaggcctctgtgggcactggcaccttccgcttccactgcccagcctgctgggagcaggagctgagtattcgcctgcaggatgcccccgaggagcaactaaaggcgccactgagtgccctgccctctggtcaagtggtgaggcttgtcttccccacatcccaggagcccctgatgagagtggagctgaaaaaagaagcaggactgagggagctggccgtgcgactgggcttcgggccctgtgcagaggagcaggccttcctgagcaggaggaagcaggtggtggccgcggccttgaggcaggccctgcagctggacggagacctgcaggaggatgagatcccagtggtagctattatggccactggtggtgggatcccggcaatgacttccctgtatgggcagctggctggcctgaaggagctgggcctcttggattgcgtctcctacatcaccggggcctcgggctccacctgggccttggccaacctttatgaggacccagagtggtctcagaaggacctggcagggcccactgagttgctgaagacccaggtgaccaagaacaagctgggtgtgctggcccccagccagctgcagcggtaccggcaggagctggccgagcgtgcccgcttgggctacccaagctgcttcaccaacctgtgggccctcatcaacgaggcgctgctgcatgatgagccccatgatcacaagctctcagatcaacgggaggccctgagtcatggccagaaccctctgcccatctactgtgccctcaacaccaaagggcagagcctgaccacttttgaatttggggagtggtgcgagttctctccctacgaggtcggcttccccaagtacggggccttcatcccctctgagctctttggctccgagttctttatggggcagctgatgaagaggcttcctgagtcccgcatctgcttcttagaaggtatctggagcaacctgtatgcagccaacctccaggacagcttatactgggcctcagagcccagccagttctgggaccgctgggtcaggaaccaggccaacctggacaaggagcaggtcccccttctgaagatagaagaaccaccctcaacagccggcagaatagctgagtttttcaccgatcttctgacgtggcgtccactggcccaggccacacataatttcctgcgtggcctccatttccacaaagactactttcagcatcctcacttctccacatggaaagctaccactctggatgggctccccaaccagctgacaccctcggagccccacctgtgcctgctggatgttggctacctcatcaataccagctgcctgcccctcctgcagcccactcgggacgtggacctcatcctgtcattggactacaacctccacggagccttccagcagttgcagctcctgggccggttctgacaggagcaggggatcccgttcccacccatctcgcccagccccgaagagcagctccagcctcgggagtgccacaccttctccgaccccacctgccccggagcccctgcggtgctgcactttcctctggtcagcgactccttccgggagtactcggcccctggggtccggcggacacccgaggaggcggcagctggggaggtgaacctgtcttcatcggactctccctaccactacacgaaggtgacctacagccaggaggacgtggacaagctgctgcacctgacacattacaatgtctgcaacaaccaggagcagctgctggaggctctgcgccaggcagtgcagcggaggcggcagcgcaggccc

SEQ ID NO: 347917 - DNA, 938 bp, Homo Sapiens
gtgagggaggaagaaagaaacatttgccagccaggctagtgacagaaatggattcgaaatatcagtgtgtgaagctgaatgatggtcacttcatgcctgtcctgggatttggcacctatgcgcctgcagaggttcctaaaagtaaagctttagaggccaccaaattggcaattgaagctggcttccgccatattgattctgctcatttatacaataatgaggagcaggttggactggccatccgaagcaagattgcagatggcagtgtgaagagagaagacatattctacacttcaaagctttggtgcaattcccatcgaccagagttggtccgaccagccttggaaaggtcactgaaaaatcttcaattggattatgttgacctctaccttattcattttccagtgtctgtaaagccaggtgaggaagtgatcccaaaagatgaaaatggaaaaatactatttgacacagtggatctctgtgccacgtgggaggccgtggagaagtgtaaagatgcaggattggccaagtccatcggggtgtccaacttcaaccgcaggcagctggagatgatcctcaacaagccagggctcaagtacaagcctgtctgcaaccaggtggaatgtcatccttacttcaaccagagaaaactgctggatttctgcaagtcaaaagacattgttctggttgcctatagtgctctgggatcccaccgagaagaaccatgggtggacccgaactccccggtgctcttggaggacccagtcctttgtgccttgggcaaaaaagcacaaagcgaaacccaagccctggattgcccctgcgcctaccaagctacagccgtgggggtttgtgggtccctgggccaaagaagcctacaaatggagccaagcgcattcaagaaaagaaaccgttgccaggttgtttttggaattttc

SEQ ID NO: 347918 - DNA, 839 bp, Homo Sapiens
gccccaaggggccccaaaaggggccgggggtcccttcccaagaaagcccccggggagtttcgggggttcccccccatcgttttgttcttcgtggagatccccggagcccttattggcaaccagaaccaatattctttcggaccttgcagaaatctaagcaatttactccgggtggaaatacgggatgacattttacctggttgcagacaggcttgtacttgagtcctggcttgttgaaggatcatctccagctgcctgcggttgaagtttgacaccccaatggacttggccaatcctgcatccttacacttctccatggcctcccaggtggtacagagatccactatgtcaaatattacttttccattttcatctgttggtgaaagttcctcacctggctttagagacattggagaatgaataagatagaggtcaacatagtccaattgagcttttttcagtgagttttccaaggctggtcggaccaactctggtcgatgaaaagtggaccaaagctttgaagtgtagaatatgtcttctctcttcacactgccatctgcaatcttgcttcggatggccagtccaacctgctcctcattattgtataaatgagcagaatctatatggcggaacccagcttctattgctaattttgtgacctccaaagctttacttctcggaacctctggaggtgcataggtgccaaatcccaatacaggcatgaagtggccatcatttagctttacacactgctgtttggaatccattccctgtcacttgtctgactagcaaatgtttgctgctgcttctcctcagagattacaaaaacaatgggcccc

SEQ ID NO: 347919 - DNA, 1293 bp, Homo Sapiens
  misc_feature (1218)..(1233): n is a, c, g, or t
  misc_feature (1235)..(1235): n is a, c, g, or t
  misc_feature (1237)..(1240): n is a, c, g, or t
  misc_feature (1242)..(1248): n is a, c, g, or t
ctggaccggtccggattctccggaggatcgaaatatcagtgtgtgaagctgaatgatggtcacttcatgcctgtcctgggatttggcacctatgcgcctgcagaggttcctaaaagtaaagctttagaggccaccaaattggcaattgaagctggcttccgccatattgattctgctcatttatacaataatgaggagcaggttggactggccatccgaagcaagattgcagatggcagtgtgaagagagaagacatattctacacttcaaagctttggtgcaattcccatcgaccagagttggtccgaccagccttggaaaggtcactgaaaaatcttcaattggattatgttgacctctaccttattcattttccagtgtctgtaaagccaggtgaggaagtgatcccaaaagatgaaaatggaaaaatactatttgacacagtggatctctgtgccacgtgggaggccgtggagaagtgtaaagatgcaggattggccaagtccatcggggtgtccaacttcaaccgcaggcagctggagatgatcctcaacaagccagggctcaagtacaagcctgtctgcaaccaggtggaatgtcatccttacttcaaccagagaaaactgctggatttctgcaagtcaaaagacattgttctggttgcctatagtgctctgggatcccaccgagaagaaccatgggtggacccgaactccccggtgctcttggaggacccagtcctttgtgccttggcaaaaaagcacaagcgaaccccagccctgattgccctgcgctaccagctacagcgtggggttgtggtcctggccaagagctacaatgagcagcgcatcagacagaacgtgcaggtgtttgaattccagttgacttcagaggagatgaaagccatagatggcctaaacagaaatgtgcgatatttgacccttgatatttttgctggcccccctaattatccattttctgatgaatattaacatggagggcattgcatgaggtctgccagaaggccctgcgtgtggatggtgacacagaggatggctctatgctggtgactggacacatcgcctctggttaaatctctcctgcttggtgatttcagcaagctacagcaaagcccattggccagaaaggaaagacaataattttgttttttcattttgaaaaaattaaatgctctctcctaaagattcttcaccccnnnnnnnnnnnnnnnnanannnnannnnnnncttggtcgggccggcctccggcccctccaagaagcttttcctaaa

SEQ ID NO: 347920 - DNA, 1232 bp, Homo Sapiens
ggggcccattgtttttgtaatctctgaggagaagcagcagcaaacatttgctagtcagacaagtgacagggaatggattccaaacagcagtgtgtaaagctaaatgatggccacttcatgcctgtattgggatttggcacctatgcacctccagaggttccgagaagtaaagctttggaggtcacaaaattagcaatagaagctgggttccgccatatagattctgctcatttatacaataatgaggagcaggttggactggccatccgaagcaagattgcagatggcagtgtgaagagagaagacatattctacacttcaaagctttggtccacttttcatcgaccagagttggtccgaccagccttggaaaactcactgaaaaaagctcaattggactatgttgacctctatcttattcattctccaatgtctctaaagccaggtgaggaactttcaccaacagatgaaaatggaaaagtaatatttgacatagtggatctctgtaccacctgggaggccatggagaagtgtaaggatgcaggattggccaagtccattggggtgtcaaacttcaaccgcaggcagctggagatgatcctcaacaagccaggactcaagtacaagcctgtctgcaaccaggtagaatgtcatccgtatttcaaccggagtaaattgctagatttctgcaagtcgaaagatattgttctggttgcctatagtgctctgggatctcaacgagacaaacgatgggtggacccgaactccccggtgctcttggaggacccagtcctttgtgccttggcaaaaaagcacaagcgaaccccagccctgattgccctgcgctaccagctgcagcgtggggttgtggtcctggccaagagctacaatgagcagcgcatcagacagaacgtgcaggtttttgagttccagttgactgcagaggacatgaaagccatagatggcctagacagaaatctccactattttaacagtgatagttttgctagccaccctaattatccatattcagatgaatattaacatggagagctttgcctgatgtctaccagaagccctgtgtgtggatggtgacgcagaggacgtctctatgccggtgactggacatatcacctctacttaaatccgtcctgtttagcgacttcagtcaactacagctgagtccataggccagaaagacaataaatttttatcatttttgaaattaaccc

SEQ ID NO: 347921 - DNA, 955 bp, Homo Sapiens
  misc_feature (763)..(763): n is a, c, g, or t
tggaccggtccggaatttccgggatgtgacagaaatggattcgaaatatcagtgtgtgaagctgaatgatggtcacttcatgcctgtcctgggatttggcacctatgcgcctgcagaggttcctaaaagtaaagctttagaggccaccaaattggcaattgaagctggcttccgccatattgattctgctcatttatacaataatgaggagcaggttggactggccatccgaagcaagattgcagatggcagtgtgaagagagaagacatattctacacttcaaagctttggtgcaattcccatcgaccagagttggtccgaccagccttggaaaggtcactgaaaaatcttcaattggattatgttgacctctaccttattcattttccagtgtctgtaaagccaggtgaggaagtgatcccaaaagatgaaaatggaaaaatactatttgacacagtggatctctgtgccacgtgggaggccgtggagaagtgtaaagatgcaggattggccaagtccatcggggtgtccaacttcaaccgcaggcagctggagatgatcctcaacaagccagggctcaagtacaagcctgtctgcaaccaggtggaatgtcatccttacttcaaccagagaaaactgctgggatttctgcaagtcaaaagacattgttctgggttgcctatagtgctctgggaatcccaccgaaaaagaaccatgggttggaccccgaactcccccggtgctccttgggaggaaccaagntccctttgtggccttgggccaaaaaagcaccaagccgaccccccagcccctggatgggccctggcgctaacccaacttgcagccggtgggggtttggggggtccctggggccaacgaacctcccaatggagcccatcgccctttggaacacgtaacgttggcccgggggcttttggacattccccgcttgga

SEQ ID NO: 347922 - DNA, 786 bp, Homo Sapiens
ggggctaaccaggccagtgacagaaatggattcgaaataccagtgtgtgaagctgaatgatggtcacttcatgcctgtcctgggatttggcacctatgcgcctgcagaggttcctaaaagtaaagctctagaggccgtcaaattggcaatagaagccgggttccaccatattgattctgcacatgtttacaataatgaggagcaggttggactggccatccgaagcaagattgcagatggcagtgtgaagagagaagacatattctacacttcaaagctttggagcaattcccatcgaccagagttggtccgaccagccttggaaaggtcactgaaaaatcttcaattggactatgttgacctctatcttattcattttccagtgtctgtaaagccaggtgaggaagtgatcccaaaagatgaaaatggaaaaatactattttgacacagtggatctctgtgccacatgggaggccatggagaagtgtaaagatgcaggattggccaagtccatcggggtgtccaacttcaaccacaggctgctggagatgatcctcaacaagccaggggctcaagtacaagcctgtctgcaaccaggtggaatgtcatccttacttcaaccagaaaaaactggctggatttctgcaagtcaaaaagacattggttcttgggttgcctataggtgcttctggggatccccatctcgagaagaaaccaatggggtgggaccccgaaacctccccccgggtggctcctttgggaagggaacccaagttccccttttgc

SEQ ID NO: 347923 - DNA, 1249 bp, Homo Sapiens
  misc_feature (1131)..(1131): n is a, c, g, or t
  misc_feature (1159)..(1159): n is a, c, g, or t
  misc_feature (1218)..(1218): n is a, c, g, or t
  misc_feature (1228)..(1228): n is a, c, g, or t
ggaccggtccggaattctccggatggccagagcattgcccggctcctgaattaaactctgttctggtgcctgagctcaggggttttcagagaatgaataagagactgtccagtgactggtgggtccctgggggccagctgccttctcatcctgggaggtggcccttcccaagcccatcagggcgtgtgagcagactgaaggggccgctgcagcccctggccctcaatacccagctgcttctggctaagagtgcagcagagactgaggcatagccagtcttcaaaagcgatctgacatgaaagtcattaacaaagccagccgtgaaaaggtgccccagagttgctgtggacagacctgtaaggacttgcaaaacaaaagaaagtgaggggtttttttaacctcagagctagctgctctctgcagcctcctccactggcttctctggctcacccaagctctcccttacagaggcaacacagaattataaggaatcagaaatcccccttctaccaggctgcaaatgtggctctagcacttgcaaattgttttttcttccgaatagttcagcagggacaagttatctgaggggcaaaatgcctgcttggaggtctgcaattttggaacactgcagtatggaactttggcattggagggtctgtaaaatatttttgttcttttaccaccaacttaggggactgttttaaagagccatcccaaggcctctcctagcaggcagaagccactcctctgataacggcctctgtaaatgttctgatttgctctcagctgcagagacacagagacactgcagatgtcacacgctttcatcttccctttgagcccttttgaaccctcctggggctctggggtagatgagagaagcctgaaaaaggcagagtttgaaagctcccatttaaaaacaaaatactttttaaagccctcttgcctcttccctgcccactcctgccccctgaccagaagacagaatttgaagctggaaagggaagaccccttttcccctcctcctgtccccagtgagtcttaggcgagacttttgccctgcgcacaattgcatctggaatgtgcgggggagaggggctggtgagcccggaggcagggcaaggctggggnggtgctcgtgataggtgcttcaagccantttttgggggaaaacttggagtccttcccttcctgccgaacctaacccgtttggcttgnttttgggctnggatttccttggcaaccagtt

SEQ ID NO: 347924 - DNA, 488 bp, Homo Sapiens
gcagctcccacggctgctgggaggacatggtcatgcccccttccttcctccctccatcagtctccacttctctctccttgcttttgacaaatttctttatttccccctctggactaaagtagtggctaattttgtgccactctgcgccccaccctcactgttggccgctccttatccggcctggcctggagggtgacaccatgtcaccctcaccaggactcgtctctccattcccgtcagagtttgctttgatttccctttcctttccttctcggggaccagttcttacttccttttatttttagctctgcactccatgtggtttcagggttcagtctgatccatcaaaaggttctttttttataatcccttttgaaaatgataatcaaaggaagagatgtggtgtttggtcatgtggaaaactcaatgtataatttagacgtctgtcaaaaatccgacaaataaaatttagctggaacgaaaaaaaa

SEQ ID NO: 347925 - DNA, 1008 bp, Homo Sapiens
tcctaggtagcgaggcctgggtggcgaattcggcacgagggcgcccgcggccgcagcgtcggggctggagcgatggcggcgaccgcggtggcggcggctgtggcgggaaccgagtcggcccagggtcccccgggcccggcagcgtcgctggagctgtggctcaacaaagccacagacccaagcatgtcggaacaggattggtcagctatccagaatttctgtgagcaggtgaacactgaccccaatggccccacacatgcgccctggctactggcccacaagatccagtctccgcaagagaaggaagctctttatgccttaacggtgctggagatgtgcatgaaccactgtggggagaagttccacagcgaggtggccaaatttcgtttcctgaacgaactgatcaaagtgttgtccccaaagtacctggggtcctgggccacaggaaaagttaaaggaagagtcattgaaatactcttcagttggacagtctggtttccggaagacatcaagattcgagacgcttatcagatgctgaagaaacaaggaattataaaacaagaccctaaactaccagtggataaaatcttacccccaccatctccctggcccaagagctccatctttgatgctgatgaagaaaagtccaagcttctgacaaggcttctaaagagcaaccaccccgaggaccttcaggctgcaaaccggttaatcaagaatttggtcaaggaggaacaagaaaaatcggagaaagtgtccaagagggtcagtgccgtggaggaagtgcgaagccatgtgaaggtgctgcaggagatgctgagcatgtaccgcaggccaagcgaggccccgccccgaccagaagcccctgcaggtcctgtatgaaaggtgtgaaaaaactgcgccccacctgtttccggtggcgagtgaacccccctgatgaccatgattcccttcccggaaaattctcaaggcaaatggacctcctcacccaaggaagttctggctgaa

SEQ ID NO: 347926 - DNA, 366 bp, Homo Sapiens
  misc_feature (17)..(17): n is a, c, g, or t
  misc_feature (27)..(27): n is a, c, g, or t
ggctggagcgatggcgncgaccgggtngggcggctgtggcgggaaccgagtcggcccagggtcccccgggcccggcagcgtcgctggagctgtggctcaacaaagccacagacccaagcatgtcggaacaggattggtcagctatccagaatttctgtgaacaggtgaacactgaccccaatgggtaagccccacacatgcgccctggctactggcccacaagatccagtctccgcaagagaaggaagctctttatgccttaacggtgagtttggcttgcctttgtagcctaacctttcctgtccttgtgctatagagagccgagaggcgctttgctttcccacacagatccttttcacttggaga

SEQ ID NO: 347927 - DNA, 4116 bp, Homo Sapiens
  misc_feature (4057)..(4069): n is a, c, g, or t
ggatccacccagaagtcttggagctgctgcttgactatgcgtactcctcccgggtcatcatcaatgaagaaaatgcagaatcgctcctggaagctggtgacatgctggagtttcaagacatccgggatgcatgtgcagagttcctggaaaagaacctgcatcccaccaactgcctgggcatgctgctgctgtctgatgcacaccagtgcaccaagctgtacgaactatcttggagaatgtgtctcagcaacttccaaaccatcaggaagaatgaagatttcctccagctgccccaggacatggtagtgcaactcttgtccagtgaagagctggagacagaggatgaaaggcttgtgtacgagtctgcaattaactggatcagctatgacctgaagaagcgctattgctacctcccagaactgttgcagacagtaaggctggcacttctgccagccatctatctcatggagaatgtggccatggaggaactcatcaccaagcagagaaagagtaaggaaattgtggaagaggccatcaggtgcaaactgaaaatcctgcagaatgacggtgtggtaaccagcctctgtgcccgacctcggaaaactggccatgccctcttccttctgggaggacagactttcatgtgtgacaagttgtatctggtagaccagaaggccaaagaaatcattcccaaggctgacattcccagcccaagaaaagagtttagtgcatgtgcgattggctgcaaagtgtacattactggggggcgggggtctgaaaatggggtctcaaaagatgtctgggtttatgataccctgcacgaggagtggtccaaggctgcccccatagctggtggccaggtttaggcccatggctctgcctgaactgaagcactgcctgatatgtgattggggggcacacggccgcaactggctgcctcccggcactccccctcagtctctctaaagcaggtagaacattatgaccccacaatcaacaaatggaccatggtggccccactccgagaaggcgttagcaacgccgcagtagtgagtgccaaacttaagttatttgctttcggaggtaccagtgtcagtcatgacaagctccccaaagttcagtgttacgatcagtgtgaaaacaggtggactgtaccggccacctgtccccagccctggcgttacacagcagcagctgtgctggggaaccagatttttattatggggggtgatacagaattctctgcctgctctgcttataaattcaacagtgagacttaccagtggaccaaagtgggagatgtgacagcaaagcgcatgagctgccatgctgtggcctctggaaacaaactctacgtggttggaggatactttggcattcagcgatgcaagactttggactgctacgatccaacattagacgtgtggaacagcatcaccactgtcccgtactcgctgattcctactgcatttgtcagcacctggaaacatctgccttcttaaatgcagtacattctaaagagagtgagcatgagctcactccatcactcgatgagataatatgagatttctacttcggagaggccaagtctaatgaagagaaaaaaaggaaaagaagttgcaagactcgaataaaatctgctgcaccttgtaaatgctctaactggacatgaaggaaaggggcgagggagggggtgggatttttggtgcaagtagcacatggtttaaatatgaatgaacaaacctgtgatctagtccttgtcttgtaattgtggattaatgtcaatgttaatcagcccctcaaagggagagaaaagctggaccttttcccttgctgtaccatattcagcatttgatttccatgggccccaccatttatgtgtagaatttgaaatggttgtcacctctctctgaggacagagcttgaagcctccacaccagctgctgctggagattcaaagcccaactgtgggtccgagagggaagctggctgggctggctgaagaatgaagaccactggactctccgttaatctctaaggggtctgctccccaggaacgtttctgaacaatggggactttgttggtagccatttggtagatgttcttttctatttataagtgactttaaactttcccttggctgttaagaagtttgttatagatttagctatttattgttcgatgcctgcatgctgaaacaatgcctacagctgtcttcacatgtatggacgtgtgtgaatggttgtacgttttgcacattttgtggctgttgagatgtgctttgctgcacaaacatgaaaatttttgagttacaatttggagcataactggagggtgggttggggaggggtggatttttaaaatgtcaagacagggaaggatgacaaaatggaaatttaaatgacatcctagaggtagagaaaccgtggagatcgcttttctcagactcaccaacttttaatgggatttcatggggtttggttgtgctgatagggtaaggggaggctgctttctgcccttctccccactcccatctgatttacttaattcagtctcagctgctgaaatttggaaaggaccaaattgctttacagtttttttctttgtgtagtatcttgaaatcctggaaaattctatggaatagttctgtatatagggcacaagtaaaggcattgtccaaagtttatttatttatttattaccctaagaatgctttgccataaccacatttaatgggaaaaacggcagtatcacagatgtaaattaactcaccagatttactgggcctgaactcattctcttcttgctatatgatttagcaagttctagaaggtctccaagacaataattacattggcacaatgtatacttcagtgctcacccgtaggcaaatctctttttaaaaaactctttggtgcacaagtaacacatttggccacaaaacaccaaagaattgtaggcagtggcccctattgagaagttttccggtagagttggaaatcagttgtgaatacattctttgctagttggagtgcttgtttactaagcatgtgccgtcgtaggtattagtgctagtctcaaataggtgcttcccctgaggtgcaggggaagaccaaagtttgcaactcgaactgctttcgtccatgtttctcacattgctgtattttagaaaataggggttaagactgataacaaccttttacattgtgactgtgtttgcattgtctaatgacagataaatccttaacatttctctccaccttagtactttagactaattgtgtttgtccgtccatgccatgaatgagtgggctgtagttgggcctaaataaatgagctgttggaagaaaagaatcacagtactttccagcagtcagtccctggttcctagatgtgttctaagcaatgcaaatgtctaattgtcccccagtgggcatagtcagtgtcgtttatattgtagcagttacagctctgtagtttatgatgcaaatctgccaagagagatgtatgtgtcactgcatggcttctgaaagcaggatgaattttctgcagctgtttcaaagttggggtctgttcttgaatcctctattaattactgtgtgtgagccagagggagctgtggtaagggttgggcccccagcctgtagggaactttctggactcccactctttgaatcgatataggcatttggtctcactacttgaccattctcaccctgtgaaacgtcccacactttgaagcaaatacaattcacagcacagtacacacaaaaaccttggcataagacagagaaggttcttcttattttgtgggctggttgctgtagaaacacataacaaagggcagccctccacttctggtataattgtgtagccccttttctttgggcttgacacctgtcttgaataagagtgattagagctgcataatgtccctctcttggctattgaccatgtggttcacgtacaaaactctgtataagttgaaggaaaatgttcatgttcatatgtacttgtttgctatgactacattttgaggttttgtaaaactgttannnnnnnnnnnnncacaatgtgaaactgaaggtcaataaattattagagattttctcttc

SEQ ID NO: 347928 - DNA, 342 bp, Homo Sapiens
gggtaaggggaggctgctttctgcccttctccccactcccatctgatttacttaattcagtctcagctgctgaaatttggaaaggaccaaattgctttacagtttttttctttgtgtagtatcttgaaatcctggaaaattctatggaatagttctgtatatagggcacaagtaaaggcattgtccaaagtttatttatttatttattaccctaagaatgctttgccataaccacatttaatgggaaaaacggcagtatcacagatgtaaattaactcaccagatttactgggcctgaactcattctcttctgcatatgatttagcaagtttagaagtcgtc

SEQ ID NO: 347929 - DNA, 499 bp, Homo Sapiens
  misc_feature (380)..(380): n is a, c, g, or t
  misc_feature (405)..(405): n is a, c, g, or t
ggctaccatataggttggacgagggtaaggggaggctgctttctgcccttctccccactcccatctgatttacttaattcagtctcagctgctgaaatttggaaaggaccaaattgctttacagtttttttctttgtgtagtatcttgaaatcctggaaaattctatggaatagttctgtatatagggcacaagtaaaggcattgtccaaagtttatttatttatttattaccctaagaatgctttgccataaccacatttaatgggaaaaacggcagtatcacagatgtaaattaactcaccagatttactgggcctgaactcattctcttcttgctatatgatttagccaagttctaggaaggtctccaaggacaatnaatttacattgggcacaatgttatnacttccagtggcttcacccgtagggcaaaatctcttttttaaaaaaaactctttgggtggcacaagttaaccacctttgggccacaaaacacca

SEQ ID NO: 347930 - DNA, 944 bp, Homo Sapiens
  misc_feature (218)..(227): n is a, c, g, or t
  misc_feature (847)..(876): n is a, c, g, or t
caatttctagaggctgtctcaacttgaaaagaagaaccctgaacccctttctgagaacgtggggggccaagtaaaaaacccgggaaattgcccctccctccaccaccctgttcccagggcccagtggtggtggaccccctccgggggcctttgtcacgtggtaccaccagtaaggggagccatctcccaaaggtgcccctgtgtactcagaggcgtgnnnnnnnnnnacctactgtgaggggtgctccagcaccaagagcacggacagcggggcatccagaggataccttggcctccacctcctgcaccagaaacatatgaagaatatggatatgatgatacatacgcagaacaaagttacgaaggctacgaaggctattacagccagagtcaaggggactcagaatattatgactatggacatggggaggttcaagattcttatgaagcttatggccaggacgactggaatgggaccaggccgtcgctgaaggcccctcctgctaggccagtgaagggagcatacagagagcacccatatggacgttattaaaaacaaacatgaggggaaaatatcagttatgagcaaagttgttactgatttcttgtatctcccaggattcctgttgctttacccacaacagacaagtaattgtctaagtgtttttcttcgtggtccccttcttctccccaccttattccattcttaactctgcattctggcttctgtatgtagtattttaaaatgagttaaaatagatttaggaatattgaattaattttttaagtgtgtagatgcttttttctttgttgtttaaatataaacagaagtgtaccttttataatnnnnnnnnnnnnnnnnnnnnnnnnnnnnnncacacaaacctgttagtttcaaaaatgacattgcttgcttaaaggttctaaagtaaaggccttgttaa

SEQ ID NO: 347931 - DNA, 1000 bp, Homo Sapiens
agggacctcaaaaatattaggcttaggacaggggggggtccagggttcttataagcttaagcccaggaccattggaatgggaccaagccgtcccgaaagcacctcctgttaggccagtgaagggagccatcagaaagcacccatatggacgttgttaaaaacaaacatgaggggaaaagatcagttatgagcaaagttgttactgattacttgtatctcccaggattcctgttgctttacccacaacagacaagtgactgaaaactcctaaggcatttcctggactagaatgggtagtgaagacccatgtcagctatcagaggactcctgaaacctggagagctacctgctgtataaaggctggcctgagggcatttgctgaacacagagaaacccaggagaggagatcagcagttttctttcactctacttgatctgtcagatttacccacagaaagccagtcaggatcccttaagagtctttaggcccagaatggagtcctcagggctgcaggggactgtggtgctaacaattaaactgttcaagactttaaagagttgaaggggactaatgggtatccctagcatggcctcctagatgggaattaactggcaactcctactgtgccattcccagtatgtgtgcttccctttagcctcccatagaattggctgaaacaccctaccaccgttttctgtttccccactaccacacctgtgttatgggtgtcagcctgtgagtccttgaacccttccagagggctcccaagggagggtgatcactgcccttccataaaaggctgaggaaagccaagtgagaagattcaattaatttgggcaagttatttaacatctgaacctgtttttctcttcattgtttattacttaccttgtccaaaaaggtcataaagggtagggctttttctgttccacctctgtactatatttctccccaacaaatatctgcccctgaggacctcaataaaggtttggtcaagtg

SEQ ID NO: 347932 - DNA, 977 bp, Homo Sapiens
  misc_feature (522)..(551): n is a, c, g, or t
  misc_feature (888)..(898): n is a, c, g, or t
gcaccagaaacatatgaagaatatgaatatgatgatacatacgcagaacaaagttacgaaggctacgaaggctattacagccagagtcaaggggactcagaatattatgactatggacatggggaggttcaagattcttatgaagcttatggccaggacgactggaatgggaccaggccgtcgccagtgaagggagcatacagagagcacccatatggacgttattaaaaacaaacatgaggggaaaatatcagttatgagcaaagttgttactgatttcttgtatctcccaggattcctgttgctttacccacaacagacaagtaattgtctaagtgtttttcttcgtggtccccttcttctccccaccttattccattcttaactctgcattctggcttctgtatgtagtattttaaaatgagttaaaatagatttaggaatattgaattaattttttaagtgtgtagatgcttttttctttgttgtttaaatataaacagaagtgtaccttttataatnnnnnnnnnnnnnnnnnnnnnnnnnnnnnncacacaaacctgttagtttcaaaaatgacattgcttgcttaaaggttctgaagtaaaggcttgttaagtttctcttagttttgatttgaggcatcccgtaaagttgtagttgcagaatcccaaactaggctacatttcaaaattcagggctgtttaagatttaaaatcacaaacatcaacggcagtaggcaccaccatgtaaaagtgagctcagacgtctcgaaaaaaagtttcctttataaaagcacactggcggttgaatcttaaggttaaattttaatatgaaagatcctcatgaattaaatagttgatgcaatttttaacgttaattgatatnnnnnnnnnnncaacaaaattacggcttgtaaactgactttttcattaacgtgggttttgaaatctagcaccagacataatgtagagata

SEQ ID NO: 347933 - DNA, 2748 bp, Homo Sapiens
  misc_feature (1785)..(1814): n is a, c, g, or t
agcgggcgcgccgcctcatttccggtgctctctctcgctgggtcgctcgggtcggcttcggtcgctaccgctcccgctctgccacccccgccaaccgccgctcgggcctccgtcgctgccgcgtcgctttctcgctccttggatcgcacatcctcccagatgcagcgccgggacgaccccgccgcgcgcatgagccggtcttcgggccgtagcggctccatggacccctccggtgcccacccctcggtgcgtcagacgccgtctcggcagccgccgctgcctcaccggtcccggggaggcggagggggatcccgcgggggcgcccgggcctcgcccgccacgcagccgccaccgctgctgccgccctcggccacgggtcccgacgcgacagtgggcgggccagcgccgaccccgctgctgcccccctcggccacagcctcggtcaagatggagccagagaacaagtacctgcccgaactcatggccgagaaggactcgctcgacccgtccttcactcacgccatgcagctgctgacggcagaaattgagaagattcagaaaggagactcaaaaaaggatgatgaggagaattacttggatttattttctcataagaacatgaaactgaaagagcgagtgctgatacctgtcaagcagtatcccaagttcaattttgtggggaagattcttggaccacaagggaatacaatcaaaagactgcaggaagagactggtgcaaagatctctgtattgggaaagggctcaatgagagacaaagccaaggaggaagagctgcgcaaaggtggagaccccaaatatgcccacttgaatatggatctgcatgtcttcattgaagtctttggacccccatgtgaggcttatgctcttatggcccatgccatggaggaagtcaagaaatttctagtaccggatatgatggatgatatctgtcaggagcaatttctagagctgtcctacttgaatggagtacctgaaccctctcgtggacgtggggtgccagtgagaggccggggagctgcacctcctccaccacctgttcccaggggccgtggtgttggaccacctcggggggctttggtacgtggtacaccagtaaggggagccatcaccagaggtgccactgtgactcgaggcgtgccacccccacctactgtgaggggtgctccagcaccaagagcacggacagcgggcatccagaggatacctttgcctccacctcctgcaccagaaacatatgaagaatatggatatgatgatacatacgcagaacaaagttacgaaggctacgaaggctattacagccagagtcaaggggactcagaatattatgactatggacatggggaggttcaagattcttatgaagcttatggccaggacgactggaatgggaccaggccgtcgctgaaggccccccctgctaggccagtgaagggagcatacagagagcacccatatggacgttattaaaaacaaacatgaggggaaaatatcagttatgagcaaagttgttactgatttcttgtatctcccaggattcctgttgctttacccacaacagacaagtaattgtctaagtgtttttcttcgtggtccccttcttctccccaccttattccattcttaactctgcattctggcttctgtatgtagtattttaaaatgagttaaaatagatttaggaatattgaattaattttttaagtgtgtagatgcttttttctttgttgtttaaatataaacagaagtgtaccttttataatnnnnnnnnnnnnnnnnnnnnnnnnnnnnnncacacaaacctgttagtttcaaaaatgacattgcttgcttaaaggttctgaagtaaaggcttgttaagtttctcttagttttgatttgaggcatcccgtaaagttgtagttgcagaatcccaaactaggctacatttcaaaattcagggctgtttaagatttaaaatcacaaacattaacggcagtaggcaccaccatgtaaaagtgagctcagacgtctctaaaaaatgtttcctttataaaagcacatggcggttgaatcttaaggttaaattttaatatgaaagatcctcatgaattaaatagttgatgcaatttttaacgttaattgatataaaaaaaaaaccaacaaaattaggcttgtaaaactgactttttcattacgtgggttttgaaatctagccccagacatactgtgttgagagatacttagagggagggagtaggttttgaagaggttgatggtggtggggagggaaggcctcctgaattgagtttgatgcagagctttttagccatgaagaatctttcagtcatagtactaataattaaattttcagtatttaaaaagacaaagtattttgtccatttgagattctgcactccatgaaaagttcacttggacgctggggccaaaagctgttgattttcttaagttgacggttgtcaatatatcgaactgttcccaagttagtcaagtatgtctcaacactagcatgatataaaaagggacactgcagctgaatgaaaaaggaatcaaaatccactttgtacataagttaaagtcctaattggatttgtaccgtcctcccattttgttctcggaagattaaatgctacatgtgtaagtctgcctaaataggtagcttaaacttatgtcaaaatgtctgcagcagtttgtcaataaagtttagtccttttttaatcaaaaaaa

SEQ ID NO: 347934 - DNA, 1182 bp, Homo Sapiens
  misc_feature (1023)..(1023): n is a, c, g, or t
  misc_feature (1164)..(1164): n is a, c, g, or t
ggaccggtccggaattcccgggatccaaagtgctgggattacgggcgtgagccaccgcatgcagccttggaattatcttaaacagtgctgtcagtgcaacatttgattgcacatccctctaccagagagagcagtatcagctctgctggtggagggccccatggaaagtggcccttgcttggttttcccagggagctagaggacacttctccgtaaggaaacgtgacttgctgttgcatggaagtggggctggctgcctgcttccaatctgaaagacttccagaagtcttcccaccttacctgagggtgcctgccaaattgttttgggaacaggaaaggccattgcagactcactaagattaatgagttcctcactatctcaagcaaggtgttgggtatctccaggtttggggactggcgtacagatcacatttgtctatgaagaacctcgttgtgggagattactccagagtcaatggcagcctttttagatttgttcccttctgtccttccactcaaaactgaaaaattgcccaggctgcccaagagggccaagccaagtatagagcaaggaacaccaggggaagtgtcaagacattagaagaaactcagtgtttttggtgatctttactatgtgacctatccctgcttatccctaagtgctgtcgccacatggtttataaactgtctttgttttcccccacaggccaggacgactggaatgggaccaggccgtcgctgaaggcccctcctgctaggccagtgaagggagcatacagagagcacccatatggacgttattaaaaacaaacatgagggcgaaaatatcagtttatggagcaaagttgttactgattttcttggatctcccaggaatccctgttgctttacccacaacagacaagtgactgaaaactcctgaggcatttcctggactagaatgggtagtgaagacccatgtcagctatcagaggactcctgaaacctggagagctacctgctgtataaaggctggcctgaggnatttgctgaacacagagaaacccaggagaggagatcagcagttttctttcactctacttggatctgtcagatttacccacagaaagcccagtccagggatcccttaagagtctttaggcccagaatggagtccctcagggnctgcaggggactgtggtg

SEQ ID NO: 347935 - DNA, 182 bp, Homo Sapiens
atatcaattaacgttaaaaattgcatcaactatttaattcatgaggatctttcatattaaaatttaaccttaagattcaaccgccatgtgcttttataaaggaaacattttttagagacgtctgagctcacttttacatgtgtgcctactgccgtaatgttagagatacggtaccggctcgt

SEQ ID NO: 347936 - DNA, 2165 bp, Homo Sapiens
  misc_feature (113)..(165): n is a, c, g, or t
  misc_feature (2105)..(2115): n is a, c, g, or t
  misc_feature (2160)..(2160): n is a, c, g, or t
attgtgatggatggaaatcacgtaaacctggaccaattcaggcaaagatgttgatgggacatcacgggtaatagccattcctcagagactacctgccaaattgctccccagcnnnnnnnnnnnnnnnnnnnnnnnnnnnnnnnnnnnnnnnnnnnnnnnnnnnnnccccaaccagcagcaaaactaccaaggaatagttggagttcagcaaccccagagtcagagcctagtcagtggccaacccaacagcattggaaatcagattcaaggagtggtcatcccctatacttcagtgccaacatatcaggtttcactgcctcaaggttctcaaggaattccccatcagacttatcaacagcctgttatgttccctaatcagtctaatcaaggatctatgcccacaacaggaatgcctgtttactatagtgtcattccacctggtcaacaaaacaatttaagctcttcagtaggttacctgcaacatccaggatcagaacaagtacaatttcctcgaaccacttcaccatgcagttcccagcagcttcaaggccaccaatgtacagctggaccaccaccgccacctggtggggggatggtgatgatgcagctcagtgtaccaaacaatccacaatcttgtgcccactcacccccgcagttggaaacaaaacaaatattactgtgatcaccagagaggacagaagtgtgtagaatttagcagtgtagacaatattgtccagcacagcctcaactcagtagccccattatttcaccagctcagtcgcccagcaccagctcagctgtccaccctgaaaactgtacgtccctctggaccaccactttccatcatgcccccaattttctagaccttttgtaccccgggcaaggagattccaggtatccattacttggccagccactgcagtacaatcctcctgctgttctgcacggacacattccaaaccaacagggtcagcctggcagcaggcatggaaaccgaggaaggagacaagctaaaaaagctgcatccacagaccttggagcaggagaaacagttgtagcgaaggtcttggaaattactgaactaccagatggaataactcgcatggaagctgaaaagctttttggggaactctttaaaattggcgccaagacccggtggctccgggacccccaggcccaaccacgtcctcaccccctctgctgtggcagtggggacaacactgccaaccctgaacgctctaaacccagtgacttggcctccacctacaccgtcttagccacattcccctccatttcagctgcacagaatgcactgaagaaacaaattaactcagttaacaagtttaagctgagaacaagcaagaagcactatgactttcacattttggaaagggcaagttctcagtaacagccacctttggacccttcgcctttatggttcccctgccctctcccatctttgattggcttggtatttggagcttctgttaacattatagagactcctaggatgtgtgttcatggcattatagcttttgaagaaaggccagtgatccagcaaagggggaaaaatatgcatttcaccccacatgactaggaatccacatcagaatgatacagagttagcaggtttttctaaggaaatgccattcaaatgcctcctaacttttatagttattttgttttatatttctaaattcttgtatcagatccaaagctctattgtacagcaaattattcttcaaaatgattataaccagttgcaccctgtatttctttttgcagccagcacaatgtgacccaacttaaaatttgggggaaaaagaatgcagggagtgaaataaccaagtcaaaaccatgtactatctccttgggggttagggatgctaagaagagcccacaaatagaggattactcttcccctgaatctctaaactcagaaacaattaccaaaaaatacataactcttccttgtagggccctttccttattcatttaggtagtgtgaacattaagtataaaataaattatgttcttaatgcctcttaaaccacttacattcaaaggggaacagaaatcattctaagcaggaaaatacttccacnnnnnnnnnnncaagtatctctctaataactaaatgccacttattttcattctccntgtgg

SEQ ID NO: 347937 - DNA, 481 bp, Homo Sapiens
  misc_feature (6)..(6): n is a, c, g, or t
  misc_feature (8)..(8): n is a, c, g, or t
ggcaancnctgaccggcaaaagggtgggcctattgttggagtacgtcttgtgtcagaatttccatatattgaagcagaggtgaaatatgggattaaggagtatgcctgcactgctgtggatatgatttcacgtcgtactcgcctggcctttctaaatgtccaggcagcagaggaagccctacccaggattgttgaactgatgggcagggaactgaattgggatgattataagaagcaggaacaacttgaaacagccaggaagcttctatattatgaaatgggctataaatctcgatcagaacagttaacagatcgctctgaaattagcctactgccttcagacattgacaggtataagaagagatttcataagtttgatgcagaccagaaaggctttattaccattgttgatgttcagcgtgtattagagagtatcaatgtccaaatggatgaaaatacactccatgaaattctaaatgaa

SEQ ID NO: 347938 - DNA, 1236 bp, Homo Sapiens
atgctgtatgctcacgggcctgaccttgtagagaatcggaccttcgacatgcaatggccaattgttttgaagcgttaataggagctgtttacttggagggaagcctggaggaagccaagcagttatttggacgcttgctctttaatgatccggacctgcgcgaagtctggctcaattatcctctccacccactccaactacaagagccaaatactgatcgacaacttattgaaacttctccagttctacaaaaacttactgagtttgaagaagcaattggagtaatttttactcatgttcgacttctggcaagggcattcacattgagaactgtgggatttaaccatctgaccctaggccacaatcagagaatggaattcctaggtgactccataatgcaactggtagccacagagtacttattcattcatttcccagatcatcatgaaggacacttaactttgttgcgaagctctttggtgaataatagaactcaggccaaggtagcggaggagctgggcatgcaggagtacgccataaccaacgacaagaccaagaggcctgtggcgcttcgcaccaagaccttggcggaccttttggaatcatttattgcagcgctgtacattgataaggatttggaatatgttcatactttcatgaatgtctgcttctttccacgattgaaagagttcattttgaatcaggattggaatgaccccaaatcccagcttcagcagtgttgcttgacacttaggacagaaggaaaagagccagacattcctctgtacaagactctgcagacagtgggcccatcccatgcccgaacctacactgtggctgtttatttcaagggagaaagaataggctgtgggaaaggaccaagtattcagcaagcggaaatgggagcagcaatggatgcgcttgaaaaatataattttccccagatggcccatcagaagcggttcatcgaacggaagtacagacaagagttaaaagaaatgaggtgggaaagagagcatcaagagagagagccagatgagactgaagacatcaagaaataaaggagggcatgcaagtgtggagtatttacttgctcagtaactgtgactgttgtctattgagacctagcctagttttcctgcagacaatgaacgaagtgtgctcattgaaataaaatacagagtcaaatcgcctattggtggggttaaaggaaccggtttttagctggaatgggct

SEQ ID NO: 347939 - DNA, 1908 bp, Homo Sapiens
  misc_feature (1378)..(1445): n is a, c, g, or t
  misc_feature (1684)..(1693): n is a, c, g, or t
agcggtctagccggcgcaggcagcggcggcagcagcaggcgagcctcggccccgcaaggccatgaaggtgaagaagggcggcggtggggccgggacggcgacggagtccgctccggggccctcgggccagagcgtggcccccataccacagccgcctgcggaatccgaatctgggtccgagtcggagccggacgcaggcccagggcccaggccggggccgctgcagaggaagcagccgatcgggccggaggacgtgctggggctgcagcggatcaccggtgactacctctgctcccctgaggagaatatctacaagatcgactttgtcaggtttaagattcgggacatggactcaggcactgtcctctttgaaatcaagaagcccccagtctcagaacggttgcccatcaaccggcgggacctggaccccaatgctgggcgctttgtccgctaccagttcacgcctgccttcctccgcctgaggcaggtgggagccacggtggagttcacagtgggagacaagcctgtcaacaacttccgcatgatcgagaggcactacttccgcaaccagctactcaaaagcttcgacttccactttggcttctgcatccccagcagcaagaacacctgcgagcacatttacgacttcccccctctctccgaggagctgatcagcgagatgatccgccacccgtatgagacccagtctgacagcttctacttcgtggatgaccggctggtgatgcacaataaagcagactattcctacagcgggacaccctgaccccacggctgccctgaccccaggagggctccagtcctgggctgggagctgtgaacctccccaaagctcacccctcaaccccaagtccttctgcttggggagttctccaggagctccggaccctgagtcaatgttgggaggaagggtacctggtgtccccagtcaagcccatgaagcccatgcggcctgctacatggggtggggtcgtagggaggctgtttgcctccacgtctaggaaggcctgtgagaggagcagtcaggacttccggacaacttagctgggccctacttgggcccaagtttcagaatagtgttcccctatcaaggctgtgactagatcaggcagggatccattccctgtcccctgcccactaccttcaggccatttagagttgtaaatttacaaagatccacggtgggctccagctgccaagccacccaagggagtctgggccctaggcctagccccatccctccccatgaggggccaagacactgcctaaggtgtgggagggactggctgagattgcagcccatggtaggagctggaccaactgtatatagttttcaataaactttttccttttctgttcnnnnnnnnnnnnnnnnnnnnnnnnnnnnnnnnnnnnnnnnnnnnnnnnnnnnnnnnnnnnnnnnnnnngagaggaggggcgcgcgcgccccacaaatactatccccgcgggggggcccacaaagctagagccgcgcaccccgcctttttttgaacaaggggggcgccccaatgggaggggctttatataaaaagagcgagagcgacgagcgagcgcggcgcgggtataaaacacagcgggcgcgcgcgggagacaaacacgcgcgccagggaggaaatcattgggatcagagaacaccccctacacnnnnnnnnnnacaacaaatatggggaaaaaacccccgccccaccaaggagaatcagaaacgcacccaccaagaggagaaggataaaactaacaacattcgcggcgtgttataatgtcgcggtgatcacaaacacacccggataattctggcgggccgcgctaagaaaacatcgtatgcgctacacagtagcactttgtacccgaaacaaaatttttaacacaggg

SEQ ID NO: 347940 - DNA, 1517 bp, Homo Sapiens
ggataaagaaaagcccccaaaagcgagaagcccaagtgttgattttcaacgtttctttaaccttgtataaattaatcaggaaactggcaggctgaaaacaaatggagtattctcggaatagttgctatttttgtaaagtttccgggcgtggcactcgctgtatgaaaggagagagcaaagggtgtctgcgtcgtcaccaaatcgtagcgtttgttaccagaggttgtgcactgtttacagaatcttccttttattcctcactcgggtttctctgtggctccaggccaaagtgccggtgagacccatggctgtgttggtgtggcccatggctgttggtgggacccgtggctgatggtgtggcctgtggctgtcggtgggactcgtggctgtcaatgggacctgtggctgtcggtgggacctacggtggtcggtgggaccctggttattgatgtggccctggctgccggcacggcccgtggctgttgacgcacctgtggttgttagtggggcctgaggtcatcggcgtggcccaaggccggcaggtcaacctcgcgcttgctggccagtccaccctgcctgccgtctgtgcttcctcctgcccagaacgcccgctccagcgatctctccactgtgctttcagaagtgcccttcctgctgcgcagttctcccatcctgggacggcggcagtattgaagctcgtgacaagtgccttcacacagacccctcgcaactgtccacgcgtgccgtggcaccaggcgctgcccacctgccggccccggccgcccctcctcgtgaaagtgcatttttgtaaatgtgtacatattaaaggaagcactctgtatatttgattgaataatgccaccattccggcctcccttgttctttcggtgctgtcccttttgtattgagagtgaggttgggggagagccacgccggcagagaggcttggggcagtggggcacgtgctgggtattggcccacgtggctgtggtggctgtagagggcgagacggttctgttgagtcggggcctgccagggcctcgaatgcgttggcatgccaaggtggtggatgcaggtttggccaaaaccttcctgggaatggggagggggggtgtctaggtgcctggcacccgaccctgactaaaacagctgaaaacagttttataaaatagtataaaattgcttacccacgaatacgtatcaaggtcttaaggaattaacaggtcaaaatttttattcattcatttattcctttgttttgcttggtcattcagaggcaaggtcagcatttgatggaggcaggagagaagcagcccttccacctgcccctggagctggttttgcccctcactgcttgagccaactggaacgtggcatggtggcctcagggctgggcatggaaggccgactccaaggctgactccgagccgcctgtcagtgatgtgcaagtctttaccctgctgtgaggggtaggaggtcaactgagtcaaggagcaaagccaagaaccagatctgta

SEQ ID NO: 347941 - DNA, 941 bp, Homo Sapiens
  misc_feature (279)..(279): n is a, c, g, or t
cccccaacacaacaaggtctccccggcattggcctgaggcccagaaaaaccgagtgagaataaaaggaagattctgtaaacagtgcacaacctctggaacaaacgctacgattggtaacgacccagacacccctgctctctctttcatacagcgagtgcaacgcacgagaactttacaaaaatagcaactatccgagaatactccattgttttcagcctgacagttactgaataatttatacaaggttaaagaaacgtagaaaataaacatttggtttntgtttttggtggtttttttacacaaaataaagaaactatgcacatggcctcggcctccgggtccggcagacggcatggctcccaccgagggccctgggtcccggcccagctggcagccgcccctactccttgccggcgtagcgggcctcattgatgctcctgaccgcgcggttgtccactttggggcctgaggcccagtgggccggcctccccggcgagcggccaggatctttggtgaatttgtgtgagaggaacttctccgcctccagggagtcctcctcaccgcggcccagatcctcgtcctcctcatcctccctgacggccgcgtggccggccggcccgggcagcgcctcgtccgccctgcgcggcggcggcgtgaagttcttgcactggtagagcacgtccttgtggccccccggccgctcaatggggttgcggatggggttgagcggggcccactggttgttggcgctctcctcccgcggcagccggctcctctcccgctctttcctgcgcttgcgtgtccaccacacgcacaggaccacgcacgccagccacagcacgctgaaggcaccacacagcacaggcaccagcagacctgtggaagagccgcccgtaacaaccgtctccacctgacctcggtacagccagaagcagtagct

SEQ ID NO: 347942 - DNA, 1269 bp, Homo Sapiens
gaggcctgggtggcgaattcggcacgaggcaacccctgtgtgaatggtggcacctgcgtgggcagcggggcctccttctcctgcatctgccgggacggctgggagggtcgtacttgcactcacaataccaacgactgcaaccctctgccttgctacaatggtggcatctgtgttgacggcgtcaactggttccgctgcgagtgtgcacctggcttcgcggggcctgactgccgcatcaacatcgacgagtgccagtcctcgccctgtgcctacggggccacgtgtgtggatgagatcaacgggtatcgctgtagctgcccacccggccgagccggcccccggtgccaggaagtgatcgggttcgggagatcctgctggtcccggggcactccgttcccacacggaagctcctgggtggaagactgcaacagctgccgctgcctggatggccgccgtgactgcagcaaggtgtggtgcggatggaagccttgtctgctggccggccagcccgaagccctgagcgcccagtgcccactgtgggcgaaagtgcctagcacaaggtccacacgacagtgccatgcgaccagccatgtggatcactgagatgtgaggctgccaccttggactgcgcaggatgaacccgctgccctgccccaactccgggcctccatgagacggataactgatgggccgtactcaaccttgcaatgctgaaaaccaggagccccggtgccccccaagccaaccccaactgggcaacctcattttgctaacgggaaatccagcatcaccctgcccaaacccaccaaaagggctgatcggcacaccgataccccgcactggcttgggagtatcgcctcttgcataaaccagacccacacccttggggagagccccattctgccactttaaacagcgggctcctcccaaaccttttcatgcacactggccacaggcggacatacatccccagacacaacagcatcctatgaatcccgcgggctctcagggtgtacataacttctgttcaccatgcgattatgtaaaattcacttgcgctgccctatacactcacactacccctcttcacatcatccgtactgcccaataacatccacacgatatatataatacactccgtacttctcctctgtccaaagatcatcactcagccacaacttgtacaatagcataatctaatattataattatatattattaggatacctcaacgccatgcacgccagcgtcctgtatctcccaggctag

SEQ ID NO: 347943 - DNA, 506 bp, Homo Sapiens
  misc_feature (60)..(60): n is a, c, g, or t
  misc_feature (72)..(72): n is a, c, g, or t
  misc_feature (76)..(77): n is a, c, g, or t
gggcgcccacgagcgtcaggccgcggccacgagcacagcacccagggaacccaaccaaancccccaaatttntttnnccccctggggccagcagccttcgcagccaccacacacacccgagctacggtcctcccggagtgccccctctctacggcccccccatgctgatgatgcccccgccgcccgcggccatggggcccccaggagcccctccgggccgcgacctggcctcagtgcccccggaactgaccgccagcagacagtccttccgcatggccatgggaaaccccagtgagttctttgtggatgtgatgtgagcagggcccctcccccagctccattccgctcccaccccagccggctgcgttcctctctccatccgtccgtcttttttactttgtctggtacctgaaagggaaataaaaggaactaaatccaggtgcgctaactgctcgcagggtgctgcaagggtggggtgcccctaccgattggctttgcagccccct

SEQ ID NO: 347944 - DNA, 2531 bp, Homo Sapiens
  misc_feature (50)..(86): n is a, c, g, or t
  misc_feature (2198)..(2259): n is a, c, g, or t
  misc_feature (2440)..(2440): n is a, c, g, or t
gatgtatagactcactatagggcgaactggagcttacgcggtggcggcgnnnnnnnnnnnnnnnnnnnnnnnnnnnnnnnnnnnnnatcaggccaaatcggccgagctcgaattcgtcgagagcggagagtggggagcggaagcggccgccgtctgggaggctcggcccggccgcccgagcaggccgcgcgcgggccgccgggcccgaggccagagccatgggcgagaccaagatcatctaccacttggatgggcaggagacgccgtaccttgtgaagctgcccctgcccgccgagcgcgtcaccttggcggactttaagggcgttttgcagcgacccagctataagttcttcttcaagtctatggacgacgatttcggagtggtgaaggaggagatctcggatgacaatgccaagctaccatgcttcaatggccgggtggtgtcctggctggtgtcagctgagggctcacacccagacccagcccccttctgtgctgataacccatcggagctgccaccacctatggagcgcacgggaggcatcggggactcccgacccccatccttccaccctcatgctggtgggggcagccaggagaacctggacaatgacacagagacggactctttggtgtctgcccagcgagagcggccacgccggagggatggcccagagcatgcaacccggctaaatggaactgcgaagggggaacggcggcgagaaccaggggttatgatagctcatccacccttatgagcagtgagctggagaccaccagcttctttgactcagatgaggatgactccaccagcaggttcagcagctccacagaaacagagcagtgcctcacgcctgatgagaagacacaagcggcggcggcggaagcagaaaggttctcggattggagcggtcctcgtccttcagcagcatcacggactccaccatgtcactcaacatcatcacggtcactctcaacatggaaaaatataacttcttgggcatctccattgtgggccaaagcaacgagcgtggtgacggcggcatctacattggctctatcatgaagggtggggccgtggctgctgatggacgcatcgagccaggagatatgttgttacaggtaaacgagatcaactttgagaacatgagtaatgacgatgcagtccgggtactgcgggagattgtgcacaaaccggggcccatcaccctgactgtagccaagtgctgggacccaagtccacgtggttgcttcacattgcccaggagcgagcccatccggcccattgaccctgcggcctgggtctcccacactgcagccatgaccggcaccttccctgcatacggcatgagcccctccctgagcaccatcacctccaccagctcctccatcaccagttccatccctgacacagagcgcctagacgacttccacttgtccatccacagtgacatggctgccatcgtaaaagccatggcctcccctgaatcaagggttggaggtccgtgaccgcatgtggctcaagattaccatcccctaatgctttcatcggctcagatgtggtgggactggctgtaccacaatgtggaaggcttcacggaccggagggaggcccgcaagtatgccagcaaactgctgaaagctggcttcatccgccataccgtcaacaagatcaccttctccgagcagtgctactacatcttcggtgacctctgcggcaacacggccaacctgtctctccacgatcacgatggctccagtggcgcctctgaccaggacacactggcccctttgccgcacccgggggccgccccttggcccatggctttcccgtaccagtacccaccacccccgcacccatacaacccgcacccgggcttcccggagctgggctacagctacggcgggggcagcgccagcagtcagcacagcgaaggcagtcggagcagtggctccaaccgtagcggcagcgatcggaggaaggagaaggacccgaaggccggggactccaagtccgggggcagcggcagcgaatcggaccacaccacacgcagcagccctgcgggggccgcgggagcgggcgcccagcgagcgctcagggccggcggccagcgagcacagccaccgcagccaccattccctggccagcagccttcgcagccaccacacacacccgagctacggtcctcccggagtgnnnnnnnnnnnnnnnnnnnnnnnnnnnnnnnnnnnnnnnnnnnnnnnnnnnnnnnnnnnnnnaggagcccctccgggccgcgacctggcctcagtgcccccggaactgaccgccagcagacagtccttccgcatggccatgggaaaccccagtgagttctttgtggatgtgatgtgagcagggcccctcccccagctccattccgctcccaccccagccggctgcgttcctctctccatccgnccgtcttttttactttgtctgggacccgaaagggaaataaaaggaactaaagcccagaaacacgaagccagggggtgaaaaacccctgtgg

SEQ ID NO: 347945 - DNA, 1442 bp, Homo Sapiens
  misc_feature (27)..(27): n is a, c, g, or t
  misc_feature (779)..(819): n is a, c, g, or t
  misc_feature (1343)..(1377): n is a, c, g, or t
ccgagcagcttctgatttgaagctcanaggggtgttccttttccctgagcttcgcatcatcagcaccatcacgagagaagtggagcctgaaggggacggggctgaggaccccacagttcaagaatcactggtgtccgaggagatcgtgcacgacctggatacctgtgaggtcacggtggagggagaggagctgaaccacgagcaggagagcctggaggtggacatggcccgcctgcagcagaagggcattgaagtgagcagctctgaactgggcatgaccttcacaggcgtggacaccatggccagctacgaggaggttttgcacctgctgcgctatcggaactggcatgccaggtccttgcttgaccggaagtttaagctcatctgctcagagctgaatggccgctacatcagcaacgaatttaaggtggaggtgaatgtaatccacacggccaaccccatggaacacgccaaccacatggctgcccagccacagttcgtgcacccggaacaccgctcctttgttgacctgtcaggccacaacctggccaacccccacccgttcgcagtcgtccccagcactgcgacagttgtgatcgtggtgtgcgtcagcttcctggtgttcatgattatcctgggggtatttcggatccgggccgcacatcggcggaccatgcgggatcaggacaccgggaaggagaacgagatggactgggacgactctgccctgaccatcaccgtcaaccccatggagacctatgaggaccagcacagcagtnnnnnnnnnnnnnnnnnnnnnnnnnnnnnnnnnnnnnnnnncggcgaagaagaggatgacatcaccagcgccgagtcggagagcagcgaggaggaggagggggagcagggcgacccccagaacgcaacccggcagcagcagctggagtgggatgactccaccctcagctactgacccgtgcccccggccacctcggtttctgctttcgaagactctgctgccatccgttctcccagtcccaagggtccacgatgtacaaagtcatttcggccagtaggtgtgcagacccctccccgccacgatcgtcgctgtgcttggtgtgtaggaccctaggctccccgcccaccctctgcctggtcgcgctcttcagtcccacgaggagctgacacgtcctctctggccgccatccggctcgcacaggggcctcccagcgcctcaggccccgcgtttgtgtctggagtctccccccggggagaggacactggcccctcgcactccagaaaagccatgccagctgggctcgttgacaaagggtaaaacatgctcactcccacccggtaatcannnnnnnnnnnnnnnnnnnnnnnnnnnnnnnnnnnccaaactagtgcatgtataaataatggcaggatggggggtactgtgtagatgattaactgacttt

SEQ ID NO: 347946 - DNA, 1544 bp, Homo Sapiens
  misc_feature (450)..(484): n is a, c, g, or t
acactcagcttcttgtcggctccctctagaaacttggcttccacgccaaccgtgcgccaatgccaccaaacctgtcgcctggtgcaggaagcatcccctgggctccacacctttatctgctagctgcctcctagaaaggctcactcgcaccacccccagtaggtgtgcagacccctccccgccacgatcgtcgctgtgcttggtgtgtaggaccctaggctccccgcccaccctctgcctggtcgcgctcttcagtcccacgaggagctgacacgtcctctctggccgccatccggctcgcacaggggcctcccagcgcctcaggccccgcgtttgtgtctggagtctccccccggggagaggacactggcccctcgcactccagaaaagccatgccagctgggctcgttgacaaagggtaaaacatgctcactcccacccggtaatcannnnnnnnnnnnnnnnnnnnnnnnnnnnnnnnnnnccaaactagtgcatgtataaataatggcaggatggggggtactgtgtagatgattaactgactttttaatattttgtaaataaatcggattccttgtgtcctttgtgctagtgtaacccgggactggaatgtaaagtgaagttcggagctctgagcacgggctcttcccgccgggtcctccctccccagaccccagaggagaggcccaccccgcccagccccgccccagcccctgctcaggtctgagtatggctgggagtcgggggccacaggcttctagctgtgctgctcaagagactggatcagggtagctacaagtggccgggccttgcctttgggattctacctgttcctaatttggtgtggggtgcggggtccctggccccttttccacactcctcctccgacagcagctccctgggcagtggcctggtctcaccgtgtgcagccttgtggtttatgcttaaatgtacattttcctgctggtaaaaggagaaactgagaggtgtcctgcagaccggctgaccactccttttggagacggcaggaggcctgagcgatccgtactcagaacgtccaggagagacgcatggcccgaagtcaaagtgctggaattttccaaaacagcctgttctctcctctctcctccccagagcaccccctgccatcaggggggttgaaatccctctcccccaggagccctgctgctttgcttggtggtagggcaggagagcaaacaaacagtcatggtctaaaacccacatagcactttgctcttagttacatgtaaaattttagatttctaaaacaggtgggcaatcattttgaatactgttctgtgaccctgactgctagttctgaggacactggtggctgtgctatgtgtggccatcctccatgtcccgtccctgtagctgctctgtttagacagcggacagacgctcacgcccaggggatgtcctcacgctgtcgccgcgcggtttcccttcgcagatgtgtatactcatgataggtcagaaagtgtatccgctacaataaagttctggttctaactaactcc

SEQ ID NO: 347947 - DNA, 2121 bp, Homo Sapiens
tggaccggtccggaattcccgggatcggaaaccgctcctttgttgacctgtcaggcccaacctggccaacccccacccgttcgcagtcgtccccagcactgcgacagttgtgatcgtggtgtgcgtcagcttcctggtgttcatgattatcctgggggttggccgtgtggattacattcacctccaccttaatattcgttgctgatgtagcggtccattcagctctgagcagatgtagcttaaacttccggtcaagcaatggacctggcatgccagttccgatagcgcagcaggtgcaaaacctcctcgtagctggccatggtgtccacgcctgtgaaggtcatgcccagttcagagctgctcacttcaatgcccttctgctgcaggcgggccatgtccacctccaggctctcctgctcgtggttcagctcctctccctccaccgtgacctcacaggtatccaggtcgtgcacgatctcctcggacaccagtgattcttgaactgtggggtcctcagccccgtccccttcaggctccacttctctcgtgatggtgctgatgatgcgaagctcagggaaaaggaacaccccttctgagctttcaaattcagaagctgctcgggcaaaatggtggacgccactcaggctgatcttgggctcctcgggctgtaaaaccatcacgtagccatctaccggggggaccgaaatgcaggtggcctcgttaaaacacttgattgtgctggtgaatttgagtctgcgaattccgggcgtggggaactgccgggagttcaggtacgagatgtgctgcatggccttatccaattccccgaggtcttctccctccaaggtcaataccaactggctggggtgtgcttggatctgcacgcctctgccactgtcttcgaggacctgcaggtccagcccctccttgcaggtatacagacagtcgatcaccttcttatccgcgagtttcccggaacggagagttaagccagccagattgcctcggaaaaactgggtcatgtgcaggtcgccacctgcagaggccacagtcacaggctcagtttcattgtcattttcaactcctgaaaactcttgccagcaagcccccaccacgagctgagtttctatcttggatggatggagcgggtaatcctcagtcacagagaagggctcgtgggacgtgccatccacatagagagtcacactcgggaattctacattgaggacgtagtggtgccattcctcatcacagacctgattcaacttccagtggaactctgcaggtctgtatttcttctcctcagaaggatcctgacggaagaggaagatcagccggcacccgtggacatagagggagtagtggtgccgattcatatctgttttatcagaactgcaaagaattgtctccttcttcctgccgaatggcccatgtctcatccacaccgagatggtgaacggctctttggggctgaccgacacgacgccatccgggatcctcactgcctgggtgccgttgaactcaaacacctggtcgctgtcgtggccattgtcggtgggcaggcccatggtccagttgagggatccactcggggatggcagcagctcggcagtgcccgcggccgcaccacagagccggtggagggacttctctgagtaggtgtctcggtcgcagcctttccctatgtgggctggtttgctaggccttggcccatgcccttggtttgggccccctggttaggccttggaagggggcccgggaagccttgtgacttcgttcacatgtctgccaggtggatatttggaaagacggccagcgcgccggtgcccggctcatactcaatcctgttgttccatccttgccacccaggggtgcaggtgggcttaatgctgatcttcaccaaaacatcttctgtggctcttttcttcccacagtcataggcagtgacggtcagcttatattgatgttctttcccgtagtttaatttctctgtgttttttatataaccatctttgtcaacagtaaagggcacgtctggagtgatgatttcgtagctgcaaatctggctgaactgaaggcagcggcagcaactaagatggcggcggcgctctcccccccgct

SEQ ID NO: 347948 - DNA, 1249 bp, Homo Sapiens
  misc_feature (108)..(109): n is a, c, g, or t
agcggatcgttagttgctgccgctgccttcagcaagacgctgctctgaggcggggagggcgccgcgtcctgagcgcgcggcccagcgtcacggcggggcggtggggcnntcctccttggacccccggagctccccgcgccgcggagcagctggccccaggcccctagagccccgagagctccgagagctccgctcggcgtcccgcgcgcctccctgccgctcccgccccgggctggcgatgctgcgccgccccgctcccgcgctggccccggccgcccggctgctgctggccgggctgctgtgcggcggcggggtctgggccgcgcgagttaacaagcacaagccctggctggagcccacctaccacggcatagtcacagagaacgacaacaccgtgctcctcgaccccccactgatcgcgctggataaagatgcgcctctgcgatttgcaggtgagatttgtggatttaaaattcacgggcagaatgtcccctttgatgcagtggtagtggataaatccactggtgagggagtcattcgctccaaagagaaactggactgtgagctgcagaaagactattcattcaccatccaggcctatgattgtgggaagggacctgatggcaccaacgtgaaaaagtctcataaagcaactgttcatattcaggtgaacgacgtgaatgagtacgcgcccgtgttcaaggagaagtcctacaaagccacggtcatcgaggggaagcagtacgacagcattttgagggtggaggccgtggatgccgactgctcccctcagttcagccagatttgcagctacgaaatcatcactccagacgtgccctttactgttgacaaagatggttatataaaaaacacagagaaattaaactacgggaaagaacatcaatataagctgaccgtcactgcctatgactgtgggaagaaaagagccacagaagatgttttggtgaagatcagcattaagcccacctgcacccctgggtggcaaggatggaacaacaggattgagtatgagccgggcaccggcgcgttggccgtctttccaaatatccacctggagacatgtgacgagccagtcgcctcagtacaggccacagtggagctagaaaccagccacatagggaaaggctgcgaccgagacacctactcagagaagtccctccaccggctctgtggtgcgggacgcggcactgccgagctgctgccatttccgagtggatcccatctacga

SEQ ID NO: 347949 - DNA, 767 bp, Homo Sapiens
gcagcaacgaatttaaggtggaggtgaatgtaatccacacggccaaccccatggaacacgccaaccacatggctgcccagccacagttcgtgcacccggaacaccgctcctttgttgacctgtcaggccacaacctggccaaccccacccgttcgcagtcgtccccagcactgcgacagttgtgatcgtggtgtgcgtcagcttcctggtgttcatgattatcctgggggtatttcggatccgggccgcacatcggcggaccatgcgggatcaggacaccgggaaggagaacgagatggactgggacgactctgccctgaccatcaccgtcaaccccatggagacctatgaggaccagcacagcagtgaggaggaggaggaagaggaagaggaagaggaaagcgaggacggcgaagaagaggatgacatcaccagcgccgagtcggagagcagcgaggaggaggagggggagcagggcgacccccagaacgcaacccggcagcagcagctggagtgggatgactccaccctcagctactgacccgtgcccccggccacctcggtttctgctttcgaagactctgctgccatccgttctcccagtcccaagggtccacgatgtacaaagtcatttcggccagtaggtgtgcagacccctccccgccacgatcgtcgctgtgcttggtgtgtaggaccctaggctccccgcccaccctctgcctggtcgcgctcttcagtcccacgaggagctgacacgtcctctctgg

SEQ ID NO: 347950 - DNA, 440 bp, Homo Sapiens
  misc_feature (11)..(11): n is a, c, g, or t
  misc_feature (430)..(430): n is a, c, g, or t
ccctctctccntcccccaaaagcacccccctcccaatcaggggggttgaaaaccccctctccccccaggagcccctgcctgctttgccttggtggtagggccaggagagcaaacaaacagtccatggtcctaaaaccccacatagcactttgcctccttagttacatgtaaaattttagatttctaaaacaggtgggcaatcattttgaatactgttctgtgaccctgactgtctagttctgaggacactggtggctgtgctatgtgtggccatcctccatgtcccgtccctgtagctgctctgtttagacagcggacagacctcacgcccaggggatgtcctcacctgtcgccgcgcggtttcccttcgcagatgtgtatactcatgataggtcagaaagtgtatccgctacaataaagttctggatantactaactcc

SEQ ID NO: 347951 - DNA, 414 bp, Homo Sapiens
  misc_feature (375)..(375): n is a, c, g, or t
agttcaacggcacccaggcagtgaggatcccggatggcgtcgtgtcggtcagccccaaagagccgttcaccatctcggtgtggatgagacatgggccattcggcaggaagaaggagacaattctttgcagttctgataaaacagatatgaatcggcaccactactccctctatgtccacgggtgccggctgatcttcctcttccgtcagatccttctgaggagaagaaatacagacctgcagagttccactgggaagttgaatcaggtctttgatgagggaatgggcaccactacggtcctcaatgtaggaatttcccgagtgtggactctctatgtgggatgggcaagttcccacgaggcctttttctgttgantgagggtttaccccggccttcgtttccgattttttggtt

SEQ ID NO: 347952 - DNA, 1190 bp, Homo Sapiens
actcatccactttgactgacatggggagaagtgcaccaagggaaagaagaggaactccagaaaaagagaaattgcctgcaaaagctgtttatgattttaaggctcagacatctaaggagttgtcatttaagaaaggagatactgtctacatcctcaggaaaattgatcaaaattggtatgagggagaacaccacgggagagtgggcatcttcccgatctcatacgtagagaaactcacacctcctgagaaagcacagcctgcaagaccacctccgccagcccagcccggagaaatcggagaagctatagccaaatacaacttcaacgcagacacaaatgtggagctgtcactgagaaagggagatagagttattcttcttaaaagagttgatcaaaactggtatgaaggtaaaatcccaggaaccaacagacaaggcatcttccctgtttcctatgtggaggtcgtcaagaagaacacaaaaggtgctgaggactaccctgaccctccaataccccacagctattctagtgataggattcacagcttgagctcaaataagccacagcgtcctgtgtttactcatgaaaatattcaaggtggggggggaaccggtttcaggctctgtataactatactcccaggaatgaagatgagctggagctcagagaaagtgatgtcattgatgtcatggaaaagtgtgatgacggctggtttgtggggacctcaagaagaaccaaattctttggtactttccccggaaactacgtcaagaggctgtgaattgcgctccctccttctgtagaggccgcctgccagccatgcacctgcgtcaacgcgcctgaaacaccccgcgggcctcccgttgtcatgccttacggtttccaatgcgccgtcaccatctccacctgccaccaaaccaccagcagagtagccgccgctgctgtgagcctggggacgacatggcaggctggtccccctccgtgaaagtgtggattcctacttcctgctctaagctttgacacgtcaaaatgtgggatcagaaagaaaaaaatcatgatatttaaaaatggtcaaatatttgaggcaaaagaagaaacaaaacaggtgtctccaggaggctgcccagcctcggggctccattccaagcttttccccccaggcgaggttctcccccaaggagaccagaact

SEQ ID NO: 347953 - DNA, 510 bp, Homo Sapiens
tcagctcggacccactttcagagtagcctctccttatctcacagatcacaagcacccctagatagtgtgattctgtcagatagcatttatgcaaaaatctatgaagttaaaagatcgtagaagccaaatgaaatgtacatatctactgactgatgacaagggaatttcattaggaagaaggtaaagaaacatcgttgagtagcctaccttgatttctgtcaagttcataaccagcttcatattttaaaggcttcaggtttgaaattaagtcaactgcatgcagctttgctgataaatgaataattctctttgatgccatttatgagaaaagacttcaatatctgttgcctgtcatatttaagaaaaattactgtttctactctctgtatctgattttaaaagaaaaaactattcatacctggcttccaggtaattgactttgaattcttacaagcaaaggtcattgtgtttttcttgaatagacatctaataaattttgcttggaagtat

SEQ ID NO: 347954 - DNA, 671 bp, Homo Sapiens
tgctctcccttaccaggtgctgcccataaactcgtgtgttatttcaccaactgggcacacagtcggccaggccctgcctcgatcttgccccatgacctggacccctttctctgcacccacctgatatttgcctttgcctcaatgaacaacaatcagattgttgctaaggatctccaggatgagaaaattctctacccagagttcaacaaactaaaggagaggaacagagagctgaaaacactactgtccatcggcgggtggaacttgggcacctcaagattcaccactatgtcgtccacattggccaaccggtgaaaagtttatggcttcagttatatcccttcggaggacacatgacttggatggtctggaccttttcttcttatatccgggactaagaggcagccccatgcatgaccgggggacttttctcttcttaatggaagagctccggttcgccttccggaaggaggcacggctcaccatgcgcccgaggctgctgctgtctgctgctgtttctggggtcccacacatcgtccaaacatcctatgatgtgcgctttctaggaagactcctggatttcatcaatgtcttgtcttatgacttacatggaagttgggaaaggttcacaggacataatagccccctcttctctctgcctgaagacccca

SEQ ID NO: 347955 - DNA, 1395 bp, Homo Sapiens
tggctaggtacgaggcctgggtgttaatcggcacgaggcgagtcacaggctttgtggacatgtgtgtgcagcatatcccttctccaaaggtgggcgccaagcccaagattgagcacacctacaccggtggtgtggactccgacctcggcgaggctatgagtgactgtgaccctgatggccccctgatgtgccacactactaagatgtacagcacagatgatggagtccagtttcacgcctttggccgggtgctgagtggcaccattcatgctggagcagcctgtgaaggtactgggggagaactacaccctggaggatgaggaagactcccagatatgcaccgtgggccgcctttggatctctgtggccaggtaccacatcgaggtgaaccgtgttcctgctggcaactgggttctgattgaaggtgttgatcaaccaattgtgaagacagcaaccataaccgaaccccgaggcaatgaggaggctcagattttccgacccttgaagttcaataccacatctgttatcaagattgctgtggagccagtcaacccctcagagctgcccaagatgcttgatggcctgcgcaaggtcaacaagagctatccatccctcaccaccaaggtggaggagtctggcgagcatgtgatcctgggcactggggagctctacctggactgtgtgatgcatgatttgcggaagatgtactcagagatagacatcaaggtggctgacccagttgtcacgttttgtgagacggtggtggaaacatcctccctcaagtgctttgctgaaacgcctaataagaagaacaagatcaccatgattgctgagcctcttgagaagggcctggcagaggacatagagaatgaggtggtccagattacgtggaacaggaagaagctgggagagttcttccagaccaagtacgattgggatctgctggctgcccgttccatctgggcttttggccctgatgcgactggccccaacattctgggtggatgatactctggccctctgaggtggacaaggctcttcttggttcagtgaaggacagcatcgttcaaggtttccagtggggaaccagggagggccccctctgtgatgaattgattcggaatgtcaagtttaagatcctggatgcggtggttgcccaggagcccctgcaccggggcggggggccagatcatccccacaagccaggagagtcgtctactctgccttcctcatggctactcctcgtctgatggagccttactactttgtagagggtccaggccccttgcagattgcgtctctgcagttataccgtcctggtcaggacgcaggcggcacggtgactcaggatgcaccgatccaagctccctctgtacaccatcaaagttttatccc

SEQ ID NO: 347956 - DNA, 1669 bp, Homo Sapiens
  misc_feature (1608)..(1625): n is a, c, g, or t
  misc_feature (1639)..(1639): n is a, c, g, or t
tccgacggcagtaccccggagttataggtagcgaggcctgggtggcgaattcggcacgagggctatccatccctcaccaccaaggtggaggagtctggcgagcatgtgatcctgggcactggggagctctacctggactgtgtgatgcatgatttgcggaagatgtactcagagatagacatcaaggtggctgacccagttgtcacgttttgtgagacggtggtggaaacatcctccctcaagtgctttgctgaaacgcctaataagaagaacaagatcaccatgattgctgagcctcttgagaagggcctggcagaggacatagagaatgaggtggtccagattacgtggaacaggaagaagctgggagagttcttccagaccaagtacgattgggatctgctggctgcccgttccatctgggcttttggccctgatgcgactggccccaacattctggtggatgatactctgccctctgaggtggacaaggctcttcttggttcagtgaaggacagcatcgttcaaggtttccagtggggaaccagggagggccccctctgtgatgaattgattcggaatgtcaagtttaagatcctggatgcggtggttgcccaggagcccctgcaccggggcgggggccagatcatccccacagccaggagagtcgtctactctgccttcctcatggctactcctcgtctgatggagccttactactttgtagaggtccaggcccctgcagattgcgtctctgcagtttataccgtcctggccaggcgcagggggcacgtgactcaggatgcacccatcccaggctcccctctgtacaccatcaaagcttttatcccggccatcgactcttttggctttgagactgatctccggactcacacccagggacaagccttttctctgtctgtcttccaccactggcagattgtgcctggtgatcccctggacaagagcattgtcatccgccccttggagccacagccagctcctcacctggcccgggaattcatgatcaaaacccgccgtaggaagggcctcagtgaagatgtgagcatcagcaaattcttcgatgatcctatgttgctggaacttgccaaacaggatgttgtgctcaattaccccatgtgagtgcgtggactcctgggagctcctgctccctacagtgggctgcaactcctgtacttgaagctgagacctcatatgacgtggccttcgtgttgtcagagagtgtctggaagctgctgttgccatcttgaacaactcaccaacctccaacccagagccccagtgagagaggagcatttggcctcctgcttccttctgtggcctctgccgggctccattcccaaggaaaagagaggagcttgggctcacagaaagagaaggggatgaaaccccaaggggccctatctttgggatttacatggaattttattttctacaagtttgaccttagccatggtttgcaagtgaacagaacattctgacctctgtcttgctctgctcctttcatcctcgtctcccctgccccgtctggtgcttacattctgaatatatgtcatctcccaagaggcttcactgcctctgcttccnnnnnnnnnnnnnnnnnnctcgagactagttnctctctccctcgtgccgaattcgccaccca

SEQ ID NO: 347957 - DNA, 1582 bp, Homo Sapiens
  misc_feature (1350)..(1350): n is a, c, g, or t
gaagcctgggtggcgaattcggcacgaggcctcggcgtggggcggaagcacgatctccggcagcggcctgggaactcttagctgagcaggcgagagcatcatggataccgacttatatgatgagtttgggaattatattggaccagagcttgattctgatgaagatgatgatgaattgggtagagagaccaaagatcttgatgagatggatgatgatgacgacgacgatgacgtaggagatcatgacgatgaccaccctgggatggaggtggtgctgcatgaggacaagaagtactacccaacagccgaggaggtgtatggtcctgaggtggagaccatagttcaagaggaagacactcagcctctcacagaacccattattaagccagtgaaaaccaagaaattcactctgatggagcagacattacctgttacggtgtatgagatggatttcttggcggatctgatggataactcagagctcatcagaaatgtgaccctttgtggacatctccaccatggcaagacatgttttgtggattgtttaattgaacagactcacccggaaatcagaaagcgctatgaccaagatctgtgctatactgacatcctcttcacagagcaagagagaggtgtaggcatcaaaagcactcctgtgacagtggtcttgccagacaccaaaggaaaatcttatctcttcaatatcatggacactccaggacatgtgaatttctctgatgaggtcacagctggcttgcgcatctcagatggagtggtccttttcattgatgctgctgagggggtgatgctgaacacagagcggctgatcaagcatgcggtgcaggagaggctggcagtcactgtgtgcatcaacaagattgaccggctgatcctggagctgaagctgcctccaactgatgcttattacaagctgcgccacattgtggatgaggtcaatggattaataagcatgtattccactgatgagaacctgatcctttccccactcctgggtaacgtctgcttctccagctcccagtacagcatctgcttcacgctgggctcctttgccaagatctatgccgacacctttggtgacattaattaccaagaatttgctaaaagactctggggtgacatctacttcaaccctaagacgcgaaagttcaccaaaaaggccccaactagcagctcccagagaagtttcgtggagtttatcttggagcctctttataagatcctcgcccaggttgtaggtgacgtggacaccagcctcccacggaccctagacgagcttggcatccacctgacgaaggaggagctgaagctgaacatccgccccttgctcangctggtctgcaaaaagttctttggcgagttcacaggctttgtgggacatgtgtgtgcagcatatccctttctcaaaggtggggcgccaaagcccaagattgagcacacctacaccggtggtgtggactccgacctcgggcgaggctatgagtgaactgtgaccctgatgcccccctgtagtgcccccactacctagatggacagccaccgaatgatggagtccagtttcccg

SEQ ID NO: 347958 - DNA, 1102 bp, Homo Sapiens
  misc_feature (932)..(932): n is a, c, g, or t
  misc_feature (962)..(962): n is a, c, g, or t
  misc_feature (1023)..(1052): n is a, c, g, or t
ggcctgggtggcgaattcggcacgagggagatgaagaaggtgaaggtgacgaggcagaagatgaggagcagagggggcctgagctcaagcaagcctctcgccgagacatgtacaccatctgccagagtgctgggctagatggcctggccaaaaagtttgggcttactcccgagcagtttggggagaacctgcgggatagctaccagcggcacgagacagagcagtttcccgcggagcccttggagctggccaaggattacgtttgcagccagttccctactccagaagctgtgctagaaggcgcccgctacatggtagccctgcagattgcccgtgagccccttgtccggcaggtgctgaggcaaaccttccaagagagagccaagttaaatataacccccaccaagaaaggtagaaaggatgtggatgaggcccactatgcctattccttcaagtatttaaagaacaagcctgttaaggaactgagagatgaccagtttctcaagatatgcctggctgaagacgaagggctcctcaccactgacatcagcatagatttgaagggagtggaaggctatggcaacgaccagacatattttgaggagacaaaacagttttactaccgagatgagttcagccaccaggtgcaggagtggaaccggcagcgcaccatggccatcgaacgggctttacagcagttcctctatgtgcagatggccaaagaactcaagaacaagctgctggctgaagcccaaggaatatgtcataaaggcctgtagtcgaaagctctacaattgggttgagagtggcaccctaccgaccagatcagcaggtgggaagaagatgaccacttttatggaccagaacccaagggaaaggcattccagtccctcggcatttgctttctcctcctgccgagatcaccctggggntcctgcgccccgtggccatggggaaagganaaatgaacagactttcctttcgactggcccccatttttacccaaacgggggaacttgcttnnnnnnnnnnnnnnnnnnnnnnnnnnnnnnggcttcagaacatttggaacaccctaaagaaatttccttcctggaataaa

SEQ ID NO: 347959 - DNA, 2081 bp, Homo Sapiens
gcagatcagccagtagacatgatgagcatcaaagcctttacgcttgtctctgctgtggagcgggagctgctgatgggcgacaaggagcgcgtcaacatagagtgcgtggagtgctgcggcagggacctctacgtgggcaccaacgactgcttcgtctaccacttcctgttggaggagaggccagtgcctgctgggccagccacgttcactgccaccaaacagctgcagagacacttgggcttcaagaagcccgtgaacgagctgcgcgcggcctcagcactcaacaggctgctggtgctgtgtgacaactccatcagcctggtcaacatgctgaacctcgagccagtgccttcgggggcccgcatcaagggggcagccacgtttgcactgaacgagaaccctgtgagtggggaccccttctgtgtagaagtttgcatcatctctgtcaaacgcagaaccatccagatgttcctggtgtacgaggaccgggtgcagatcgtcaaggaggtgtcgactgccgagcagcccctcgctgtggctgtggacggccacttcctgtgtctggctctgaccactcagtacatcatccacaattacagcacaggcgtctcccaggacctgtttccctactgcagtgaggagaggccgccgatcgtcaagaggatagggagacaggagttcctgctggcgggccccggagggctggggcatgtttgccacagtcgcagggatatcccagcgtgcccccgtgcactggtcggagaatgtgattggggcggctgtgtcctttccatacgtcatagcgctcgatgacgaattcatcacagtccacagcatgttggatcagcaacagaagcagacgctgccctttaaggagggccatatcctacaggactttgaaggaagagtgatcgttgccacaagtaaaggagtttacatcttggttccattacctttggaaaaacaaatacaggatcttctagcaagccgcagagtagaagaggctttggttttagcaaaaggagcccggaggaacattccaaaggaaaaatttcaggtaatgtacagaaggattctgcagcaggcgggatttatacagtttgcacaacttcagttcctggaagctaaagagctcttcagaagcggccagcttgatgtccgggagctgatctctctctaccccttcctgttgcccacctcctcctccttcacccggtcccaccctcctcttcatgagtacgcagacctgaaccagctgacccagggggaccaggagaagatggccaagtgcaaacgcttcctcatgagctacctgaatgaggtccgcagcacagaggtagcaaatggctacaaggaggacatcgacacagccttgctcaaactgtatgcagaggctgaccacgacagcctgctggacctcctggtcactgagaacttctgtcttctgacggacagtgctgcctggctagagaagcacaaaaagtattttgcacttggactgctctatcattataataaccaagatgctgctgcagttcagttgtgggtgaacattgtgaatggcgatgtccaggactccacacgctcagacctgtatgaatacatcgtggattttcttacctactgcttagacgaggaactagtgtgggcctatgctgattgggtcctgcagaaaagtgaagaggtcggagttcaggttttcaccaagagacctttggatgaacagcagaagaacagttttaatccagacgacattatcaattgccttaaaaaataccctaaagcccttgtggaagtatctgggaacatccttgtgataggacaagagaactggcagaaaagaaagagtatccacaccccaccttaagctgtgctgtacctggaagaagtgctgctgcagagggcctccgccagtggcaagggtgcagaagccaccgagacgcaggccaagctgcggcggctgctccagaaatctgatttataccgagtccactttcttctcgagaggctgcagggagctggcctgcccatggagagcgccatcctgcacgggaagctgggcgagcatgagaactgtgcag

SEQ ID NO: 347960 - DNA, 1097 bp, Homo Sapiens
accctgaccggcagcaggggttggaatttcatcattccaaagccccctcccaagagagggccctgccgtgtgggggtccgggtgtgcccctggcaaggaggggagtgggggagtcagggaagtcttgggagccagagtggctgcagagggcgaccacagtgctctctcctcccgcgccctagcacagtggggcaagtgggcccacagtgaacagcctggctctggtcccgtctgcctcccgaggtctgacacctccccctgggagcagcaggaaaagacaggcaaggctgagtccaggggctgagcagagggtgcgggggcaggtcccctccgatgtccctagcccttcctgggacagcatctgctgttcaaacctaggctcctgaaggccatctcagttggacaggggcaggcgatgggcctctggcctcagccactacccagagcctggctcgcagcgctgtcggtgccccctcctctgcgctctgggtggggctagcccaggtttcctctatgtacaatagcatacccagtgatgggtcgccgagggcaggctgacagtgaaacggttcgagtttaggattctcaacaccctccctatccctgtgggcagtggaagactgggaggttggtatttcccctctgagtcacagaggagctagagacagacttcagggctggagtgactctcccaagaaaatctgcgagtcttgtccacgttcctgccgtcactggatgccctcctcttctacgtacgttgaaggaaaccagccaatccgtccgttggtctcgcccttccaccagccctggtctccgccgatgcggctgtagatcctcaccacgtcaccctcccgcagcgaaagctccctcatatctcgggcggcaaagttatacctggccacagctgtgccgatgacgcggggcgtgaacactggggaccggctggaggccctggaggccgaacgttcccgggacttgtaggggtacttgagtgtggtgtccagctgcttgaagctctccttcagtgagtggcactggtagtactccaccaactccaggaggccctcgtgccgaattcgccacccaggcctcgctac

SEQ ID NO: 347961 - DNA, 1587 bp, Homo Sapiens
gaattcccgggatgccagctgtggactgggcggacatcaagggggctgtggcccctccagcccagagggcccacctgaggataggagggtctcacctgaggataggagggacccacctgaggataggaggggctcacctgaggatagcagggagctcacctgaggataggagggacccacctgaggataggaggggctcacctgaggataagaggggctcacctgaggataggaggggctcacctgaggataggagggacccacctgaggataggaggggctcacctgaggatagcaggggctcacctgaggataggagggacccacctgaggataggaggggctcacctgctggggctgcttacctggccttgtggctctcaggcctgttgtgccctgagggggcatccctgaacactggctcctgtttgcccatcctggggcggggcaggaactcggtggtgactctggacgtgtgcctgagggcctgggctttctcatgcaggagctcactggctgcagaatgtagctgaagaaggcaaggcagggactgtttactcctcaggggaaaccgaggcccaaggtacttagctcccgcacacacccaggcagaaggcttcactccacctgggctctgccgcgggcccctaggccaggctccttggcgcggggaaggcaaggatgatgctcaggtttgtctcccgccccctccgccttgcagattgcagaaggggccagtttgggcccagctgcaccctgcactgtgactgcgggggtggggctgactgcgaccctgtcagtgggcagtgtcactgtgtggatggctacatggggcccacgtgccgggaaggggggcccctccggctccccgagaacccgtccttagcccagggctcagcgggcacactgcccgcctccagcagacccacatcccggagcggtggaccagcgaggcactagtaaaggcagtcccgtggaacccgcctctccagtcccagccaaaggggaccctggcctttggtgaccactgagaaggacacttcacgggcccagagctcctggtactgcccttcctttgagggccgtggagggctgtggacagcccagcaacctgtcgctcttggaggctggtgtggccttgaggagggaagcctcgcatggccgctggaagagaggcgcctcctggcctggctctgcagaacccaggggcacgctctgggcctgggctgaggaagtcccgctctccccgcggctctgagttggactgaggacaggtgtgggcgccagtgtgggtgcaggcgcaggtgcaagcacagggccactggcctccaggcaggctttttggtgctaggccctgggacctggaagtcccccaccccgtattttatgtaaaggtatttatgggccactgcacatgcccgctgcagccctgggatcagctggaagctgcctgtcatctcctgcccaactccccagaaaccctgattcaggtctgcaggctcctgcgggctcaccaggctgctggctccggtaccatgtaaacctaggaaggtaaaggagcaggcaacctcctcgtggcctgtgtgt

SEQ ID NO: 347962 - DNA, 1561 bp, Homo Sapiens
gaacgacccatgtgttgcggctcagctggtcacctgatgggcattacctggtgtctgcccatgccatgaacaactcaggccccactgcccagatgcatcgaacgggagggatggaagaccaacatggactttgttgggcaccggaaagctgtgactgtcgtgaaattcaacccaaaaatcttcaaaaagaagcagaagaatgggagttctgcgaagcctagctgcccgtactgctgctgtgctgttggcagcaaggaccgctcgctttctgtctggctcacatgtctgaaacggccgctggtggtcatccatgaactgtttgacaaatccatcatggatatttcctgcactctgaatgggctgggcatcttggtatgctctatggacggctctgtggcattcctcgacttctcccaggatgagcttggcgatcccctgagcgaggaggagaagagccgcattcaccagtccacctatggcaagagcctagccatcatgaccgaggcccagctctccacagccgtcattgagaaccctgagatgctcaagtaccagcgaaggcagcagcagcagcagctggaccagaagagtgctgcgaccagggagatgggctcagccacctcagtcgcaggcgttgtcaacggggagagtcttgaagatatcaggaagaatcttttgaagaaacaagttgagactcggacagcagatggccggagaagaatcacgcctctctgcatagcacagctggacactggggacttctccacggcattctttaacagcatccccctctcgggctcccttggcgggcaccatgctctcttctcatagcagtccacagctactgccactggactccagtacccctaactccttcggcgcctcgaagccttgcacagagcctgtggtggctgccagtgccagacctgcaggcgattctgtcaataaagacagtatgaatgctacctctactcctgctgcattgtcaccttctgtgttaacgaccccgtccaagatcgaacccatgaaagcgtttgactcccggttcacagagcggtccaaagccacaccaggtgctcctgccctgaccagcatgactccgacagctgtggaaaggttaaaagagcagaaccttgtgaaagagctgaggccccgagacctcctggagagcagcagtgacagcgatgagaaagtccctttggctaaggcttcctcactgtccaagcgaaaacttgagcttgaggtaggagacagtaggagaagaagaagaaagggcggcctcggaaggactctcgtctcatgcctgtgtctctgtctgtccagtctccagctgccctaaccgcagagaaggaggccatgtgtctgtctgcaccagcacttgcactgaagctgccaattccaagcccccagagagcattcaccctccagggtctgcggaagagggagctgctgaaggagctgctaccagtcatcgggcagaaactccgattccagcgcctcttcacgagtgtcaggaacagctcgacatcctgagggacagtagcctgcccagcctgccctg

SEQ ID NO: 347963 - DNA, 1497 bp, Homo Sapiens
agagcagaaccttgtgaaagagctgaggccccgagacctcctggagagcagcagtgacagcgatgagaaagtccctttggctaaggcttcctcactgtccaagcgaaaacttgagcttgaggtagagacagtagagaagaagaagaaagggcggcctcggaaggactctcgtctcatgcctgtgtctctgtctgtccagtctccagctgccctaaccgcagagaaggaggccatgtgtctgtctgcaccagcacttgcactgaagctgccaattccaagcccccagagagcattcaccctccaggtcagctccgatccttccatgtacattgaggtggagaatgaagtgacagtggtggggggcgtgaagctgagccgcctgaagtgcaaccgggaagggaaggagtgggagacggtactcaccagccggatcctcactgctgcgggcacctgtgacgtggtgtgtgtcgcctgtgaaaaaaggatgctgtcagtgttctccacctgtggtcgccgtctcctctctcccatcctcctgccatccccgatctctactttgcattgcacaggctcctacgtcatggcgctcaccgctgcagccacactctctgtctgggatgttcacagacaggtggttgtggtgaaagaagagtctctacactccatcctggcaggaagtgatatgacggtatcacagatcttgctgacgcagcatgggaatcccagtaatgaacctgtccgatgggaaggcgtactgctttaatccgtcactttccacatggaacctggtttctgacaagcaggactcactggctcagtgtgcagactttaggagcagcctgccatcccaggacgccatgctgtgctcaggaccgttagccataatccagggccgcacctccaactcgggaaggcaggctgcccggctcttctccgtgcctcatgtggtgcagcaagagacccaccctggcctacctagaaaaacaggtggcagcagcactcaccctgcagtccacccaccaataccgccattgggctcctcgtctaaccccgggaacctcctaaaagaagggtttggaattaccgaacttccagaaatatgccaggaacttacctggggtccgggttccctactccactgggaagcccatgggggatccaaccagaagtggggcctcgccgaaaaagggaaccttgctgaaaggaacctgctacccagtcctccggggcaaaaccccccccaattcccaggcccctctttccccgaaatggtccagagaaaccgttccaaacttcctggaagggaaaaaagatagccctgggccccaagcctgggcccttggacttccagaacaggggggaagggggcccaaacctctccccccccgttgaaggacattttcagggaacccctccctctccaacctagaacccaaggtttgttaaggggggggaaggaaaacaccctgcggcccagagaaaaatatcgccccctcc

SEQ ID NO: 347964 - DNA, 399 bp, Homo Sapiens
  misc_feature (356)..(356): n is a, c, g, or t
gggaaatatgcaaggacttactgggtccggttcactactccactggaagccagtgggagtcaacagtagtgggtctgcggaagagggagctgctgaaggagctgctaccagtcatcgggcagaacctccgattccagcgcctcttcaccgagtgtcaaggaaacacctcgacatcctgagggacaagtagcctgccccagcctgccctggctgcagcaagggcagggccacactctcgccgctgatgacatgcaggacccgcctcttcaccttgaccaggctgtagggggaggagacactggcaggagatgtgctgtcctgcaccagcgccagccaagctccctgggcagatgtgncctgtgtcctgggtctgacatttgcttcaagaaggggaaaact

SEQ ID NO: 347965 - DNA, 804 bp, Homo Sapiens
  misc_feature (18)..(18): n is a, c, g, or t
tgcgcccggaggacgcgngcttagccaatcccaggctacagggcgcttttaaaatgcaggaacctacttcaggcaaccatacagaggccaaattcagaatccctacttgaaccgctgaccttttgccctctccaaggccggaagcaagcccttgcctgatgcacgcctcagtcgccccgtctgtaaagtgggcagcccatcaaattcacatctccctggctgagagtcatctggagaaataatgactatgtgacctaatgaaaattgcacggtgcctgccgagcgaggtgggtaagccactggcccaacgctgtcattacaggaggtgaagcagcgcgtgggctgatgactggcaaggggtgcagccgcaggaacctttcatcatgggttcccttgggaggccaggtaggtcagctctgaaagcacccggtgctgcggggcctgccttcctgtggcttcggcttgggcgccatcccaagccgggttggccagaactctgcctgtgcagccccgcccccaggcaagcaggaaacaatgcacctgagcaacctcctcccatctgcagaggaggaagctaaggtgtagggggggtcaaggcactggcctaaggtcccacagccaaggggtggctgggaggtgcaatcaggtctgcctggcacagagtctggtctcctgaccacgatgccaaactggttattattgtcaccacaatagaatactaataatagttgtcgtaattattattattgtggagggctgttctccaggcaggcaggtcctgggttgctgcgttactggggccag

SEQ ID NO: 347966 - DNA, 782 bp, Homo Sapiens
cgggacccaggcccgggatcgccgagcccgacctcgggcgccccgccggtcacctccgcgcggacaccagccctgcagagcccagtgagatggaagacttcgccctgaggggcggcctccccaggcccctcccggcctggcctggttcccgtcagcatcatcggggctgaggatgaggattttgagaacgagctggagacaaactcagaagagcaaaacagccagttccagagcctggagcaggtgaagcggctgcccagcccacctcatggccctcctgcagcacgtggccctgcagtttgagccaggacccctgctttgctgtctgcatgccgacatgctgggctcactgggccccaaggaggccaagaaggccttcctggacttctaccacagcttcctggagaagacagcggttctccgggtgccggtccctcccaacgtcgcctttgaacttgaccgcactagggctgacctcatctccgaggatgtccagcggcggttcgtgcaggaggtggtgcaaagccagcaggtagccgtgggccggcagctggaggacttccgttccaagcggctcatgggcatgacgccctgggagcaggagctggcccagctggaggcttgggttgggcgggaccgagccagctacgaggcccgggagcggcacgtggcggagcggctgctcatgcacctggcgggagatgcaaaataccatctctaacggacgaagaaagagtgctgccggggtcaacggcattggcctgtacatgcggcaaccccga

SEQ ID NO: 347967 - DNA, 2403 bp, Homo Sapiens
aatcaacctctccctccgctcaacaaaacacaaaaacagctggtccggtccggaattcttccggatttcacagtatttatgtgagccaacttactagagccgctacaactaatcatgatagacagtccagaatctccctggactttatactgggccagcctcattgtccctaagatttctctttttatgtctcatggattacttctctttttaattgccccaggcacattccaaatgagaacctggtaaaagtcacattggacccccttcagtatgtcttcggctaatgtgttagccttcaatataaggtgataaccccttttcaacctatctagtctataaagaggaaaaattcagatttggagttctaatcctatttctcccaaagggaactattcttctaccccatggttctaggagaccacttcactgtgcaacagttttacatgcattgtggatggaggatatttttattctgaactgttacatttaggtaaaaatattttctgcagtggtaactgattagaaaaatgccaattggatgcccttaggtggaggtgagaaaatggcatccttgccttcttctcaatatgaaacattaactagttgacaaatttatccttgtagaaatgaaaatctatttaatcagggaccagaaatggctgaggagataaatgcatcattacaaaattctgcttttgaatcctggacattacaagggggtaaatgcagcatgactttttgttaaccacattccaaaatgtggaacatttcttttagaaatgaaaatatttcaaggctgatgtattttaagactacacattatcaggaaacatacattgagagttcgcttaattaaaggttgttgggcatcaaattatgtttaagtagggtactattctctaacaactcaaggatgctttaatggatctgaatttgacaaagagcatgccacactaatactacagtcaacaacagcccagagaacaattactatgtcagctggaggctatattatgattctaaattcttaaaggtttttttccctccataaatcaaaaattaccttatgtaaaccaaaaattagttggtatttatggtcatgatcttaattctcaagtttagcttaatcttgtatttcattgtttgtcttctaatatgacagcttaaattcagatttttaagtgactcagtaaaataggaggagtgtcccaatttattagtgttgtacatattgaagaaaacctttttgttccttcagatttagaaagaaacagtttaaccatttatttcttggtattctgctgctgtgaataggtttacttattcttttaacatatattgtgtgactacgcaagtataggtcctgttgtattgcattaatctttaccagtaactaaacatcacaaggttaatattggtttggctgaaagaattatgcagtaaagttatttataagggaacatgatgactttattcaatatttttcttctttgaaacatctcattactaacttttaagattatttcataatcccttatacatgagccaatgaaatattttgagctctacttaagaagcatgaagtctatattataaacctaaacaacaaaagcacttgtaaacttgtttagtaaattccatgccttattttccatttttgacaccgtaaagtgcattttctgtcgactgtgagcaaatttcccttttgcctttaatgaaaatagtgcattaagtagccaattgctgcagaattataaagcaaattagctaacagtgggtcacattggactaccactcaaagaaacaagatgcataacagatgatggaaggtacatgtggtgtggcttagggagagcgcacctgtgccagatgcatgccactttcagtagctgccaaatgtgcctttaattaagaacatctctaatttttttcttcagatcaagtcagcatttggggtcgggatttgggcagggaactctggggtgcaaatatctggtgaaaccaccagagaatttgtttgtcaaagtgacatgtataattttagttgagacgtgtttgtgtatatatgtgtatttgcctttgtttagtagcacggttatttgctaaaataattgtcaaaaaattgctctgtcggtcggtctttgatgtaagaacaaagtgtggtctatacatctaatatggcctttgtacctaaccatgttcataggtaatctttgtactctgtgtgcagcagtatttggtttgcatttaaagtgaaaataacggctgttatttttctggcattactaagataaactgaaaaataataaagaaaaatgccttacatagcccacaagtgtattatttttgcatgtatttatttgagagggcagtatttttgaaatcattactgattctcat

SEQ ID NO: 347968 - DNA, 945 bp, Homo Sapiens
aaaagtgttaaacagttcaaaattacattcatctcagttatatgaagttgtatgtgtaaataccttgtacaatttgcactctcagtaataagattgatttatattataaatactatcaaaagaaactagacctaaagattccattgtgaatatggttatctaatataaacatttaaaaattaaaatggctccaattagtagataaaggaaacactaaacttttcatcctatttcctacccaatcatttcacagtcataacttagagacactaaagtttgctcttaataagtatctgcatatgtatttccttggaaaaatcatgctgattctgcagaagatcttcatacaatttatccagtaatattcaagcattaatacagataatggcaaattattagcaggaacattggcaataacaggtgtgcaaaagaatgcatgagtattaagtacaccaagctgtccacattttcaggtgagaaattggagcaatctaacgatgtatttgtccatattcatttattttcaacttctccaaaatgtcatcaagtttagtgttcagtctttgaagatacgagctgaccttgtcctggaatgccagtgtagcttcacatccacaagcatcttcagtggaaacaagtcttcgtgcttcctcagtggctgaacatgttttcttgtcctcatttaaggtgtagccaggatagcaatcacagtggtaggatgcggccccatcactcacacaaatgtgctggcaaccatgagagcctagggcacacttgtcacggactgaacatgtttttttatctgcattcagagtgtagccctcatagcattcacaatgatgggaccctgttctgtcattcacacaaatgtgctgacacccatgggtacccaaagcacatttatcttgagctgaacaagttttcctgtcttcattcaaggtatcc

SEQ ID NO: 347969 - DNA, 925 bp, Homo Sapiens
  misc_feature (923)..(923): n is a, c, g, or t
aacaccttgggggcaccgtggttataaaaaaccctctctcttatcaaagaggggccgtgccttattccctaccaaggaactaaggcaagtttctcaaaggttcccccttaagcctaaattgccagcacccccatataccctttttaagccagggtccaaaatagggaacaacaagcagcccttcaggctatggaatgtgaataataaagcaagcctagggtcagggtttagggagcaaagagagagccaagaagttgcccacgtgtaatttcaagcccttcccactggaacttgacttcccaggtcaaggagtccgtctcattctggctggtcgagtgaccaaaggcctgtgtgaatgtgggcacctgcttttcctacctggaatgttttctggctcagctgcagcaacatctgtaagcccagtgtctgccctgtgtccctgggctcgctccaagtgcaggaacatacatgcagggcccaacatgatgatggtgtgaagggcaggaaacagtcctctgaaggagtggggaggtgggcagtctgcccccgccaggtaccatcgcctcctgccagcttccttagaccaggcagggctgccatggtgctagctgcaagtccatcagtattgaccgtctcgctccatcttggtcctccggagtcccaagtttccttttcatcaaatctgacaagagagaagaaacatgggtgtgctttgcccacagggcctggtggtgatggacctccccgctccctcaagctctggatggctgcagtgttgtactagactttgttcaggctgttctcatctcagtattgccccttcctttcactttcacacttcatctcattcctgttgtcactttccccgaaacgaataaagtctccccagctcctgctgtgtaggctgggcagaaaccacaacncg

SEQ ID NO: 347970 - DNA, 2731 bp, Homo Sapiens
  misc_feature (564)..(581): n is a, c, g, or t
  misc_feature (1589)..(1604): n is a, c, g, or t
  misc_feature (1664)..(1664): n is a, c, g, or t
cgtccccgcagcgggcccagtccagcccccaccgcagaacagccgcagtgaaagacggccctcgggtgacaagaagacttccgagcccaaagccatgccagaccttaacgggtaccagatccgggtctgaggcggatgccagcaccccaggccccacccactcttgggggccaggatccacctgctggtaaccagccttatgcatggggaaggcggggctggtgacaaggcagggcaagaggctgcaggaagagtgtgttccagctcagccccccaagctgctctcgctcccactgagccaagccccctaactttgggcctagaggccgttagctattttatttggagtttttaactctacaactgaagtttaaggtatttggggaaaacttagtccaaatggatctgctgatggtgggaaggccagtgcttaacaaatccatgtgtcatggggccaggtgagggaaactgctggttctgctggtgcctctgcccctggcttctctctgggagttgggtgcatcttatcagtgggaaatctcccagccttaccaggcctgtgannnnnnnnnnnnnnnnnntggagatgtttctccagttctgcctgccctggcagaatcttgacccagggaaagggaagcagggtaggagtccttctgagaacaggtctgtgtagcccattaaccaggagcttggcacaggccacatctgccccaagagcatgagctcgtggctcaggagagccttcaggcccttgaggcccccatgggcagtgctgtgtgggcagaggaggggtgatatgagagcgagcccagggaaggacctctgggcaaaaagttcccagaccctaactgcgtctacttgctcagtcccagctctgcctgttgctctagcccacaggctccctgcggagggtctgggcttggcggaggacccagaatggcactgaggccagcatggctgtgggagttgagcaaaccctgggtgccagtccaggagctgtggctggacatggggtgatggggcgggatgcttgggcctgggtctctccgccagcagtgccaggagcccttgctggggaaatcaagaccagactaggatgcttctgccccaggcctgccttccattctttaacagcccatcttggcttggggttgcaatgatggctgggccagtcacttgtggcacggcatcagggccctggcagggaagaacctaggcacctggggttgtccccagcctgcccgtcagcatgagatacccagtgggaaaagtgagaggatgaagagaggttggcagagccaggggtaggttctggaggcccaagcaacaaggaggtgcaggtaaagggtgcagtgcagccactgagggacagctgggaactgggggatgaaagggagaaagggatgtgggggagagttcaggatcaggctgcttgaggagtaatgggttacctacagcagagacgagatggctgtttgtcaggaggcggtagaaaggtagaaaggattcagattgtctgctttgtcagaggccagaattctgactttttatgtgaaataggatttttaaatgctggtgatcacttnnnnnnnnnnnnnnnncccaatactggcaaaagaggatgccagtttgcaatccctgaagtagagagagctcgtgcntggggagaaatccaccaagatgctttgaggcgggctgtagcaaagtcctgtttctcagagctgggctgggctggggtaggatccttgcagctgaggaggaggaaaagccactgagtctcctcccagagcgggacaaaccagaggccctttgcagttgctgggtcaccagcgggggtggcgcatggagtacagacagtgtagctcttggcctgccaggggagacggatggtgcctttgaagcaaagaggaagggaaggcagaaccaggggatgcctttgctggatgagagtgcctgtcagggaaggcgccacaggctggcagctcttcaaaccagcagcgcttgacccagagccagatccagcatggcctggccagaggcaccctgggaagccagctggtcagtcccttgcctccccaagttccccctggggtcaatgagccctgggaggatgcctaacctaactccagccagactaataggggcatggtgacccttgactcaccatcccatcccagctttcagggagtgggggtagtgtggtctccatgttcctactatgcctaagaagagatggctcaccttgggaggtgccaggctgaaactaggtcctttccgggtctggatgctgccgctcaggagcaggggcgtggcctcagctgcctctgggagcttcccgggaatgacagggtttgaggggagtagatatgagagggagccgctcctggttctggagtcttaggaggttccaacttgcaggatcctttcccagagccctccatggagaaaacagcaaaatgaagcccttacctgcttgctgtctgcaagggagggagccgagccccagctgataatcccccagcactcacccttccttgagctgagactttcggggctgtgggagaccagcacaggacattagtggttgcttttttaaatttatttttaactgtttctcatatgtagcaacccctcctcccctcctgggcatgtttacacaggctctgctctggggctgcctggctgtgaggtttctgcctcgtgccgactaaacccggggctcactagg

SEQ ID NO: 347971 - DNA, 1491 bp, Homo Sapiens
  misc_feature (56)..(143): n is a, c, g, or t
  misc_feature (1475)..(1475): n is a, c, g, or t
ttgggggctttagggaaaaaattccttttcccccgaaaccgaaggttttgttgaannnnnnnnnnnnnnnnnnnnnnnnnnnnnnnnnnnnnnnnnnnnnnnnnnnnnnnnnnnnnnnnnnnnnnnnnnnnnnnnnnnnnnnnctcagctaggaattagaaacatcatttgtcctcttggcctgttcagctggtgactgtagatttgatgaaaaggaaacttgggactccggaggaccaagatggagcgagacggtcaatactgatggacttgcagctagcaccatggcagccctgcctggtctaaggaagctggcaggaggcgatggtacctggcgggggcagactgcccacctccccactccttcagaggactgtttcctgcccttcacaccatcatcatgttgggccctgcatgtatgttcctgcacttggagcgagcccagggacacagggcagacactgggctcacagatgttgctgcagctgagccagaaaacattccaggcaggaaaagcaggtgcacacattcacacaggcctctggtcactcgaccagccagaatgagacggactccttgacctgggaagtcaagtcccagtgggaagggctggaaatcacaccgtgggtcaacttcttgggctctctctgctccccaaaaccctggccctaggctggctttatcatcacatcccaaggccagagggctgctgctgtccccatcttggccctgctagaagagggataggggtggctggcatgatgggtgaggggaacatgagaatatgcagaggccttggaggaagaggactggcagttatgacaggaaggctctctatacctggctccccagtgttctgcccctggcactgagcatgaggagccaggctttggggagactttgcaatcacccccccaacctggtccattttccacaggtagctttcttgaactcaccttgacccctcctcagccagcagcccccacctccaggggcaaaggagctgaaagacagtcctgaactggggggagctgggatcacatcagccaggccctgtccctcacaggaagtgagatgaggtgataccatggatggtgactaaggccccaaagtccctgcctctctgcctccccagaaacctcacagccaggccagcccccagagcagagcctgtgtaaacatgcccaggaggggaggaggggttgctacatatgagaaacagttaaaaataaatttaaaaagcaccactatgtcctgtgctggtctccacagccccgaagtctcagctcaggaagggtgagtgctgggggattatcagctggggctcggctccctcccttgcagacagcaagcaggtaagggcttcattttgctgttttctccatggagggctctgggaaaggatcctgcaagttggaacctcctaagactccagaaccgacgcgtggtcgacgatatcccgaacgtccggaccngtaccctcagtctcca

SEQ ID NO: 347972 - DNA, 561 bp, Homo Sapiens
  misc_feature (24)..(24): n is a, c, g, or t
  misc_feature (34)..(34): n is a, c, g, or t
  misc_feature (46)..(46): n is a, c, g, or t
  misc_feature (104)..(104): n is a, c, g, or t
gggaatgcaagtgagaaaggaatntgggggaganttcaggatcagnctgcttgaggagtaatgggttacctacagcagagacgagatggctgtttgtcaggagncggtagaaaggtagaaaggattcagattgtggaagggtaaatggatgagatgaccattaaggttttgttttactgagaggctgtaagtctgccagggacagctgtcagtaaggctgcagaagggctggggggctacacaaggaagagcagaactagggttgtaagctcaaatgacgagccaacggtgagaaggaggcctgaagggctgtgtggggactatggctacctgaagagggcacaccctgttaaaggggccacagctgctcagctgttcttacagtgccggccctgtgttgccagattgtctgctttgtcagaggccagaattctgactttcttatgtgaaataggatttttaatcgctggtcgatcaccttagaaaaaaacttaaaaccccatactggcaaaggggatgccagtcttgccatcctgaagtagagagagtctccgtcgaact

SEQ ID NO: 347973 - DNA, 915 bp, Homo Sapiens
agagaaaaatatgtccattttattaagcacaacactgagcatgaagctggaggggtggagggcgaggaaactggggaaggacaagaatggtgtgctggactttcaaggagagaaaagggaacagaggcaggattagaactcctggcagacattaaaatagtcaacttccaaggttaactccattgggtgtgtgcacggaggacatgtggcaaggataagaattccttgcagcccttactcatgaacttctttctattccactttggagggtgtggcactgcttttagattgaggcagggagaagggccagaagtgtgctggctgggtctcagcgcacttgggagctaatcctggagttaaggattagaacttgaagagctcacaggcagaccaccatggggagctgcctgtcattcatgcagatgggcaggcaacgacattaatgagcccaatctggccaagaggttggaggcttgagaggtgggagtgagtgtgtgcagagtgggagtctgggtagatgctccatatggctttgcttggagaaggtgacacagcctggccagcccattaagcttttcacgacaaacagcacagacccaggcgagagctatctacgtacactgcacagagccacggcacgtagggtgtggggcatagagcaggccaggtcagggagacctggaagctggtgggcaccgcttctcctgctcacagcttcaacaaggcttctaagccttggggctccctcctgggcctcctatgaggcgctgccccgctggcagcaggctggtgcttctggccagaaactgctcctgctaagccctgctccacttgctctgccttcctccctctgccggatagacaccaggtttggaagagcagaggagttgaatatgtctcctgaaaattgcagtg

SEQ ID NO: 347974 - DNA, 1230 bp, Homo Sapiens
ggaattcccgggatctgcgccccccagtggactcgcgagagggtgccgcgggcgagaagggcgcaggaaccgaggactccaggggctggggacttcgggggcggctctgggaagcggaaagcagtcagcggagaggaccccattctgggactgctcaggctccccaagacttgacgcagccccccacgcttctggaggtggggagggcctctggacagatgggtgtcccctggtgcccctccactcttctcttcctctcttttttggggggagaaacctcggaatttctatgagacctcccccagggagggggtcagttgggcccccatccctccccttgccacatcgcagcccctgttggaataaaaaaaagaacaaaaccccaaaagaactgattaagcactcttggaactgtggaaaacttgaggaggaaatccctttttgcgcatcttcttcctttcggatcattactgagcaaaatacaatacaggataatgggaagactgagggatgaggctcaccgggggcggggcgctgctgcgagtatccctccaatgtgccccgaggcttacgcggtaccccagggtttcgttcgttctaaggagggtcccctatcccccgagccctctatttataaggcattcggcacttggggcggacagtgtttaccaaccgtgccatgtacgtgcgcgaaaaaacctgggaacaactttggtggagtcatttgggggcaaagggacacccctagaaatttcctcgtatggggggtgggacgcttgagaattggagtaccagaagggtgggcccttaaccagcaacagaattttcaaaaggggttgttaaagcggtggaaaacgcataaagaaatttctccaaaggcgggttatcaatggggggcgtagaaaacacaacccttgcacacatggccattggggtgggcttgggagaagaattcttggcttttacttgcagggtacggatttctgttgaagaaattatttagtaacccccgtggagaactaggtgggaattccctaacatgggttggggtgggatttatgtgaaaaatccacaagcccacccaaggggtttcattttcaagagggccccctacgcgcccactcagcaggtctagggtccatgggaggctctatatccacccccttaaaaaaccatttggacaaagagagtttcactgtggtctgttaaaaaaaccccccccacaccccg

SEQ ID NO: 347975 - DNA, 1245 bp, Homo Sapiens
  misc_feature (862)..(925): n is a, c, g, or t
tgcatgagcgcgcgcagcacagcgtggttgagcgccggcggccccccggaccccgacagcgcgacgggcagcgcgcactgaccctggcagtagttggccaggaagccgcgcggcgcgatgacccagcggtgccagcccacctcgcggaagctcacgtacagccgccgcgcgcgacaagcgcccccggggccgccgcccaacacgggttcggcgtcgcgccgcggccgggccagggggtggcacaggcgcgggtcgagggtcaccagcagcagcgaggcctcggccaggcgcgcgcaggcggcaggggcccgggggcgtagcgccagcgccaggcggaggctgcgcggccatgaggcgttgcgagcccaagcggcgcccagcagctccgcgcgcactggcggccccagggcgggcaccaactggcggagcagcaccggcccggggtccgcgcccgcgccctggcccgcttgcgccacgctcagctcccagccgccctccggggctgccgccgccgccgccgcgaaacgcagctccaggcgggcccggctcgggcgctcagcgggttccacagccgacaggtcgaagacgactgtccactcagggcaatgccccgcggccgagacaggctccgaggcccgggtgggcgcaccgcggtccgggatgtggcgcacgatgtttccggcgacccccagctcctccacgtggcacggttgcagggtgacccctggggacgtccgccgcgagccagacctggtctcctgggggtcccggcgtcgaaacaggcgccacatgaccgggggaaccggccggagcctgggggcaccctggggctcatcgcgcagtcctagagcctggagcaggnnnnnnnnnnnnnnnnnnnnnnnnnnnnnnnnnnnnnnnnnnnnnnnnnnnnnnnnnnnnnnnnggaggaggaggaggtggtggccgcagggaccttgctgcggcggtggcatcttcctcccaggcgatgaccagagagtgcgcagggtccgcggcggcccgggaccagtgggctgagggcggggccggtgtccccggaggggcaggggtcctggggggcgtggccgggaaatggaggcaggatgagggggcggggtcccaggggaggtggcggcggccctagaggagcagagttggagggggtggaggggcggccaaggacggggagcgtggccggggtattcggggtggggccgggatcccgggaattccggaccggtccac

SEQ ID NO: 347976 - DNA, 1183 bp, Homo Sapiens
  misc_feature (65)..(94): n is a, c, g, or t
  misc_feature (147)..(177): n is a, c, g, or t
cctgtatagcaacctatttggtaatgattccagcacccacagaacagcttgcgtgcgcgcgcatnnnnnnnnnnnnnnnnnnnnnnnnnnnnnncactaacaaatgcaagttggtaaataaactttaaagaggcataacaaaacctnnnnnnnnnnnnnnnnnnnnnnnnnnnnnnnttaaaaaatctttttagtttgtactagaaagagctgcggacagaactgaccaccatcccatagctcatggaggttttcctgggacggcacgtgagcatgcacgtgtgtgtgtgtacacacactcacacatgtccagatgggagcttggtttgggagtccctccttttgaggatagccccggggtgttcctctcagccccatttctgagaacaggtgaatggcagaacagccctggccttggcccagccagctctctgtgttgcgcccttagagcctctgcgccctcagttccgtcctgctcttggcaaattccagaccctttcagaaatggccgaagccctaagcctctcctcactctgcactcccaaaaacagaacaatttaaggatgcttctctttcgggtggtggtggttgttaatttcaggaatttagaagaatcattgctccgaccaagaaaaagaaaaagcacaaacaaaaattgcggggcggccccaaatagatattccccataggaagagggcacccagaaagtgtcagccaccgctcccgccgaattctgtggtgtccaagacaggcgttccccccttaccagcagacatgccgatcatgaagatcgctcaggatggatagtgctgcactgcctttagctcaacattcggcggtggaaacggaggacaaacacgggtcgacccagttggggaaaccaacctggtgcgctgaaagagaccactcacacacatccgaggtcgggccagcacacacaatcagtgtgcccactcggtctcacccctcacaatgaggttcataacccgccccaagcggagactacttcaccaacgcatggcaacgagaggccttacgcctggtgtcataaccctaggctgcgaaattacgtggccctacctacaacacgatcacacgccatacgccgaagctcccaactcattggaacacccttttattatcccccggcggcacggctacctaaaatgcgaccatccaccat

SEQ ID NO: 347977 - DNA, 2310 bp, Homo Sapiens
  misc_feature (31)..(31): n is a, c, g, or t
  misc_feature (123)..(170): n is a, c, g, or t
  misc_feature (431)..(431): n is a, c, g, or t
  misc_feature (435)..(435): n is a, c, g, or t
  misc_feature (437)..(437): n is a, c, g, or t
  misc_feature (440)..(440): n is a, c, g, or t
  misc_feature (442)..(448): n is a, c, g, or t
  misc_feature (450)..(450): n is a, c, g, or t
  misc_feature (452)..(452): n is a, c, g, or t
  misc_feature (468)..(468): n is a, c, g, or t
  misc_feature (471)..(471): n is a, c, g, or t
ccctgctgacgtcagctggcggcccgcggancgggtgcgcagagccgctggcgcactcgcgcgctgcgctggcctcctccccgccccgggcccaggcgcgcgcgcgcttgttcgctctcccannnnnnnnnnnnnnnnnnnnnnnnnnnnnnnnnnnnnnnnnnnnnnnngagctcccggctggctgcggctccctggcgctctccctctctctccggtaggctcaccgagcgatgcgagctctgggagacagcgacgccgcctcccgctagagacctgcccctcggcccggccccctgcccaaccctgcccagcgcgcgggggtcggcgaaggcgccgcggacgcaccgacggctgaagagcggcgatgcacatgcactagcagcaccccctaactcactccctccacatcccgcgccgccgcagcagcntcancnaantnnnnnnncncngccgccgcctcctccnccnccggcagccgcggcagcaggacccaccctgccccccaccccaccctctgtcggctccggctgcggctccagcctcgactattattttatttattttgggtcgtgcacaagcctcagtgcctgcagtccgcgcctcctcggcccgcgggcgcctcctcccttggctccggagccccagaccccggccaccctcgattcgacaaccccagacccctgccagctgccgcgagtctccgctgctggaatcttgttagcggctgtctttttggagggttctggtttcccgacatttttgtttccagcccaggagaggatatcgtgattttccccccttgagcccaggctctgctctctggggaggggtgcggcgctccaagccggggagccgtgccagccgagtcgtgcgggctgtggcagggaaggggccaccatgggatgtactctgagcgcagaggagagagccgccctcgagcggagcaaggcgattgagaaaaacctcaaagaggatggcatcagcgccgccaaagacgtgaaattactcctgctcggggctggagaatcaggaaaaagcaccattgtgaagcagatgaagatcatccatgaagatggcttctccggagaagacgtgaaacagtacaagcctgttgtctacagcaacactatccagtccctggcagccatcgtccgggccatggacactttgggcatcgaatatggtgataaggagagaaaggctgacgccaagatggtgtgtgatgtggtgagtcggatggaagacaccgagcccttctctgcagagctgctttctgccatgatgcggctctggggcgactcaggaatccaagagtgcttcaaccggtcccgggagtatcagctcaacgactctgccaaatactacctggacagcctggatcggattggggccgccgactaccagcccaccgagcaggacatcctccgaaccagggtcaaaaccactggcatcgtagaaacccacttcacattcaagaacctccacttcaggctgtttgacgtcggaggccagcgatctgaacgcaagaagtggatccattgcttcgaggacgtcacggccatcattttctgtgtcgcgctcagcggctatgaccaggtgctccacgaagacgaaaccacgaaccgcatgcacgagtctctcatgctcttcgactccatctgtaacaacaagttcttcatcgatacctccatcattctcttcctcaacaagaaagatctctttggcgagaagatcaagaagtcacctttgaccatctgctttcctgaatacacaggccccaatacctatgaagacgcagccgcctacatccaagcacaatttgaaagcaaaaaccgctcacccaacaaagaaatatattgtcacatgacttgtgccacagacacgaataacatccaggtggtgttcgacgccgtcaccgacatcatcattgccaacaacctccggggctgcggcttgtactgacctcttgtcctgtatagcaacctatttgactgcttcacggactctttgctgttgacgttgatctcctggtagcatgaccttttggcctttgtaagacacacagcctttctgtatcaagcccctgtctaacctacgaccccagagtgactgacggctgtgtatttctgtagaatgctgtagaatccggttttagttgagtcttcacatttagaatttgaaaggaaaaacagaacatttctcatgtgctttgtagcttaaaaaaaggaaaactcaccatttcatccatatttctttttcttggcaaaacaaacatacccatctggcaccgacggcctgcccccgtcc

SEQ ID NO: 347978 - DNA, 2741 bp, Homo Sapiens
  misc_feature (1236)..(1236): n is a, c, g, or t
  misc_feature (1456)..(1464): n is a, c, g, or t
  misc_feature (1466)..(1467): n is a, c, g, or t
  misc_feature (1474)..(1474): n is a, c, g, or t
  misc_feature (1477)..(1477): n is a, c, g, or t
  misc_feature (1486)..(1511): n is a, c, g, or t
  misc_feature (1680)..(1741): n is a, c, g, or t
  misc_feature (1894)..(1930): n is a, c, g, or t
  misc_feature (2159)..(2159): n is a, c, g, or t
  misc_feature (2226)..(2226): n is a, c, g, or t
  misc_feature (2249)..(2249): n is a, c, g, or t
  misc_feature (2257)..(2257): n is a, c, g, or t
  misc_feature (2489)..(2501): n is a, c, g, or t
  misc_feature (2558)..(2567): n is a, c, g, or t
  misc_feature (2711)..(2711): n is a, c, g, or t
aagccctaagcctctcctcactctgcactcccaaaaacagaacaatttaaggatgcttctctttcgggtggtggtggttgttaatttcaggaatttagaagaatcattgctccgaccaatccactgtctcctgagttttctttattcatgttaagatggcaagaatcagagaacagggagacttggtctgctttctaaaagcagctgacaggaggggactcaagttcacctgcagagttgaaaccagccccgctccaagagggcatgtgggaaggtggggagcgaggggaacaggcgtggcggggagggccggacttgtgggcctgaccctgagtcagggtctcatggggggggccaggcttccccaggtgcccgggatgggcttcaatggggttcctgacccctcgtgctgctgccccatctcgcccaaccccagcagtagtcaaaatgttctagggttttttggatggttggttggcttttaaaatcaaagaaaatggtcagactggaccccttatctctctctctacagactgcttcacggactctttgctgttgacgttgatctcctggtagcatgaccttttggcctttgtaagacacacagcctttctgtatcaagcccctgtctaacctacgaccccagagtgactgacggctgtgtatttctgtagaatgctgtagaatccggttttagttgagtcttcacatttagaatttgaaaggaaaaacagaacatttctcatgtgctttgtagcttaaaaaaaggaaaactcaccatttcatccatatttctttttcttgcaaaacaaacatacccatctgcaccgacgcctgcccccgtcccacctcgcggcgcagcccctggagctcctgctggggggcagggcccatctgccgcctggggctccggtgcggtgcactggtccgaggagtgtgctcaggccgggctttccagaaggccacaggccactgcaaaccctgctgcctgccggccgcccagacaccacagacgccacctggcggccctaagccactcccgccacacgctcactccaggttcgtatagaaaaagcacagctctcactggccagtagctgccaaaaagaacacccatcgtataaggaaatccagccccatagaaaacaatctgcccaccgaccccctttctaaggatagcctttgtaggggtttttggttccttttgttttttgcagtttgggtgtttaactttgngtcccgccgagtactatgtattaccagccccccaccccacagatcagttttcctagtctttgggaaacgggttgtgttttttttcctttgccgtgttggatttccggtcccggctgacacctcccttcgtgtgtgcgcccctccccacccctgcctttgtttcggtgccctgtgtccgctctctcatgtggggatgtttgtgctgcagacaaaaagaacnnnnnnnnntnnttaaatnccncaagatggnnnnnnnnnnnnnnnnnnnnnnnnnngatggaatgtagtgtttacattaaagccgccgttttcatgaccaatcctatgtcatttctactttgactaatacccaaaccctaaacctcttcacggtttcacttttaagacttaatctttgctgaagaagaccagtcacagccatttcaaataaagaggaggcaaatnnnnnnnnnnnnnnnnnnnnnnnnnnnnnnnnnnnnnnnnnnnnnnnnnnnnnnnnnnnnnntccccccgggcctttgtaacccctttctattcccaatctgcgagggttttctgtgaaatcttaaaaaatgaaaagccctacttcttctgcctattgggaaaaattccctgcgtagcctccacactataagaaatgtctgccttgcccaacaannnnnnnnnnnnnnnnnnnnnnnnnnnnnnnnnnnnntaatcactcccaccacatttcaacaaatacactaacaaaaagcaaataaccaacgggggggctgcgcttttctctccatatttacatcccgcctaataggcggcctcacacaacgccttctacctgtatttccccccccgctccctttatttttatacacaaaaaacaaaacggacggttcctctctaaattgttgcccgccccgcaaccccaccaaatattattattntataaaccattttctaatcgcaaacccaatttatgggagccgcctaggtccccttggccaatacctngctatctccacaacccgaagacntcccctancattccagtgatagtttttggatggtgaaaaaaatcaccctaccctctgagcataatacacttacatctgtggaggcgcccccactatttgtttttgttttgtgcccccaccccggcgaggatgttacagcacccgataacgccaccccccctaacggggagggcggcccggccaggaccccaattattaggaatatatttggggtgccagcttatcaaatacgggccgtcnnnnnnnnnnnnnctggcggccgccccagtctttctcccgggggcctcttctccgcaacaaatgggagannnnnnnnnnaccaagacaaaaataatacttagattataagaacgggagcgattcacaaccacccctgggtccccccaccgtgacccactgtaacctcaccaggacaaaagacgcgcaactcgagaggggacctcccctttttttaaatggttngatcaactgtttatataccaaaccagacat

SEQ ID NO: 347979 - DNA, 480 bp, Homo Sapiens
  misc_feature (53)..(83): n is a, c, g, or t
  misc_feature (206)..(206): n is a, c, g, or t
cactaacaaatgcaagttggtaaataaactttaaagaggcataacaaaacctnnnnnnnnnnnnnnnnnnnnnnnnnnnnnnnttaaaaaatctttttagtttgtactagaaagagctgcggacagaactgaccaccatcccatagctcatggaggttttcctgggacggcacgtgagcatgcacgtgtgtgtgtgtacacacctncacacatgtccagatgggagcttggtttgggagtccctccttttgaggatagccccggggtgttcctctcagccccatttctgaggaacaggtgaatgggcagaacagccctggccttggcccaggccaggcttcttctgtgtttgcgcccttaggagcctctgcgccctcagttccgtcctggtcttggggcaaattccaggacccttttcaggaatggggccgaagccctaaggcttttccttcattttggcatttcccaaaaacaggaaca

SEQ ID NO: 347980 - DNA, 442 bp, Homo Sapiens
  misc_feature (29)..(29): n is a, c, g, or t
caaagggggggcccccagccttccccccngtgcccgggaagggccttcaaatggggttccctgaaccccctcggtgctgcctgccccccatctcgccccaacccccagcagtagtcaaaatgttcctagggttttttggttggttggttggtttttaaaatcaaagaaaatggtcagactggaccccttatctctctctctacagactgcttcacggactctttgctgttgacgttgatctccctggtagcatgaccttttggcctttgtaagacacacagcctttctgtatcaagcccctgtctaacctacgaccccagagtgactgacggctgtgtatttctgtagaatgctgtagaatccggttttagttgagtcttcacatttagaatttgaaaggaaaaacagaacatttctcatgtgctttgtagcttaaaaaaaa

SEQ ID NO: 347981 - DNA, 498 bp, Homo Sapiens
  misc_feature (86)..(86): n is a, c, g, or t
  misc_feature (109)..(109): n is a, c, g, or t
  misc_feature (113)..(137): n is a, c, g, or t
  misc_feature (302)..(367): n is a, c, g, or t
ccttccccaccccgtgcctttgtttcggtgccctgtgtccgctctctcatgtggggatgtttgtgctgcagacaaaaggaacaaanaaaaatttttaaataccacaagntggnnnnnnnnnnnnnnnnnnnnnnnnngatggaatgtagtgtttacattaaagccgccgttttcatgaccaatcctatgtcatttctactttgactaatacccaaaccctaaacctcttcacggtttcacttttaagacttaatctttgctgaagaagaccagtcacagccatttcaaataaagaggaggcnnnnnnnnnnnnnnnnnnnnnnnnnnnnnnnnnnnnnnnnnnnnnnnnnnnnnnnnnnnnnnnnnngcccacgggtctttgtaagcctttctattcccaatcggtgaggtttctgtgatatcttacacactgccagtctacttctctgactaatggaaaattcctgtgtagctcaataaaagagaatgtttgtctgt

SEQ ID NO: 347982 - DNA, 1268 bp, Homo Sapiens
  misc_feature (909)..(978): n is a, c, g, or t
gcgtggtcgcggccgaggtactcttcaggttttctaagttctccatctgaataataagactaggccaccatcttttctggcaacccagcctacagccactgccatcttcctaactagcagcctcctaagctgcactaaaactgggattaacacaactgaagataacatttttgacctttcttcctagaagtcaaagggctcttcaggtaggaaaggtcaggaggttttgcatcaagcttgccttcacactcactattagtagaagggctgtgaaatctacccatcacacacctgtattcagtgtttgagtgtacttacccatcaacacacaaggaagttagagtaaattaacaagtcactctggaccaagcccctcaaaacagaggcaaatttggtgaaccaaggtcattcactgcctgtggtaaaaacctcagttcacctaagtcctttcctgaaaaaccacattaatctgattcaagaggcacctctggccagcacagagcacagaaggaaagcataacttcagggtaggggaatgccacatggaatttagaagttgcagtttagtctacagcaaaagatggcaccatcgctaatatttacagctggaaagagcgctggctggaccacactcctggagcatctttactaatgcagcttaacagcagttgcccagatgtcgttgctggggagcgggggaaggacccatccttggggaacgaagttgcctttgggatgatcggatggcaccaggtactgatcccaatcatgcctgatctggatgagcgctggcagggagtgctcggcttggagataatactgtcggaaaggctccaagaggtgagcaagtgggaactcatctggatccccaaacaacttggactcaatttcacgtttctgaagtaaaannnnnnnnnnnnnnnnnnnnnnnnnnnnnnnnnnnnnnnnnnnnnnnnnnnnnnnnnnnnnnnnnnnnnncataactctgagggctctctcttcagcttcatacagttcagagcgctttttaatgagttttctcagtcgctgaagatgatgcgtaaaagtctcatctgctgaggctggaggacagacccctttcctcgctgcagcctctttcctcagtttcctcaatttctccaaagcccgtagaatgtccaccattcttttggtatctgcttgttttttcctcacttcagatagtacgccatcagcggctgctttgagttcctgctcccgcttcttctcctccacctcctgcacacact

SEQ ID NO: 347983 - DNA, 378 bp, Homo Sapiens
cagtggaacgcgagcaggagattgaccgctggagggtgaagtgtgtgcaggaggtggaggagaagaagcgggagcaggaactcaaagcagccgctgatggcgtactatctgaagtgaggaaaaaacaagcagataccaaaagaatggtggacattctacgggctttggagaaattgaggaaactgaggaaagaggctgcagcgaggaaaggggtctgtcctccagcctcagcagatgagacttttacgcatcatcttcagcgactgagaaaactcattaaaaagcgctctgaactgtatgaagctgaagagagagccctcagagttatgctagaaggagaacaagaggaagagaggaaaagagaattagaaaagaagc

SEQ ID NO: 347984 - DNA, 2041 bp, Homo Sapiens
gcggtatggcggcggcggggcccgcggcggggccgacggggcccgagcccatgccgagctacgcgcagctagtgcagcgcggctggggcagcgcgctggcggcggcgcggggctgcacggactgcggctgggggctggcgcgtcgcggcctggctgagcacgcgcacctggcgccgcccgagctgctgctgctggcgctcggcgcgctgggctggaccgccctgcgctccgcggccactgcgcgcctctttcggcccctggcgaagcggtgctgcctccagcccagagatgccgccaagatgcccgagagcgcttggaagtttctcttctacctgggcagctggagctacagtgcctacctgctgtttggcaccgactaccccttcttccatgacccaccatctgtcttctacgactggacgccgggcatggcagtgccacgggacattgcagccgcctacctgctccagggaagcttctatggccactccatctacgctacgctatacatggacacctggcgcaaggactcggtggtcatgctgctccaccacgtggtcactctcatcctcatcgtctcctcctacgccttccggtaccacaatgtgggcatccttgtgctcttcctgcacgatatcagtgacgtgcagcttgagttcaccaagctcaacatttacttcaagtcccgcggcggctcctaccatcggctgcatgccttggcagcagacttgggctgcctcagcttcggcttcagctggttctggttccgcctctactggttcccgctcaaggtcctgtatgccaccagtcactgcagtctgcgcacggtgcctgacatccccttctacttcttcttcaatgcgctcctgctgctgctcacccttatgaacctctactggttcctgtacatcgtggcgtttgcagccaaggtgttgacaggccaggtgcacgagctgaaggacctgcgggagtatgacacagccgaggcccagagcctgaagcccagcaaagccgagtgagtgtggaggggcccgcaccccgcgttccctcctttagtgtcacccgtccaagcgtgttcgtgggcaggcccccaagacccagcagcagatgaggccgacgcggatgctgccccccaagcctactccaaaacagagactgcaataaaggcgtggacgatgtggccagtaccctgaaggacaggacagtgaggaaggggagggagaggctggggaggggcaggcagggcgacaggcagggtctcagcggtagggacactgagggccaggcctagtggctggcgtggcgggagtggcgagccagggccctgtgggtggtgaggagtagttgctggccagcctggatgacgacctctgacccatgtcgccactggagctggtggcagtggggctggggaggaaggaacgccaagggccacagagagaacccaggctccatctgggccgagacatcctggcctctgagtctgacaggggagcccactgcccggccaaacaggagctggggctgggagctcagactcagtccagcccaggtgggagtcctggggaaggagatagcccacgagcctcaccagccctgggtgacagccagatggtgtccgaagccccaggcctggggcaggcagggggtgtctgggccagggatgaacggaggccaaactgggtaacaagcagagtcgggtgtgcagtgtctcataggcaacgtgaggagtgtttgagcaggagccggggcaggaggttgtggaaggccctggaaggtgccgaccagccaggccctctgatttggccggtgggggccatcggtgacgtgggaacgatggtttcagggaagcagtggctcagagctccgtgacgttttttggaacgggaggtgcgagatgcagacatttaacacatccggggctgtagccaggcagaggagcgtcagaccccccaccctgtttggaagggagaacccatcagattcgccttgggtgtagataaaacacaaataaaagaatgcaaagacgactcaaaaaaaa

SEQ ID NO: 347985 - DNA, 1596 bp, Homo Sapiens
  misc_feature (39)..(39): n is a, c, g, or t
  misc_feature (108)..(127): n is a, c, g, or t
  misc_feature (202)..(244): n is a, c, g, or t
  misc_feature (357)..(365): n is a, c, g, or t
  misc_feature (479)..(569): n is a, c, g, or t
  misc_feature (739)..(791): n is a, c, g, or t
caaaggaaggagcggggctgggtaaaacatctcgcggcncgtgggggctaaagacgggtcatcatacggtcggggggccgctaagggtcaaaaaaaaaaaagagagannnnnnnnnnnnnnnnnnnnttaccatgaatttaatgcgggggagtaatggcaagggcaacgggcacgggggggtatagtaatagaatacccgcnnnnnnnnnnnnnnnnnnnnnnnnnnnnnnnnnnnnnnnnnnntcggaggtcgtctgcgcccctctaaaatacgggtgcgggatcaaaaaggcggggctgcgatgttgcggcctacccacatgcagtgggggtggtgtttttactggccgtaacannnnnnnnncgtgatttggtcagatggggtcactccttcattttggcggcggggatgtggtgtatcgtaccccgtagtgggcgggggataaagcgcggtgggcaaactcgcaaacaaccggtnnnnnnnnnnnnnnnnnnnnnnnnnnnnnnnnnnnnnnnnnnnnnnnnnnnnnnnnnnnnnnnnnnnnnnnnnnnnnnnnnnnnnnnnnnngcggatttatcctcgtcttacgcggggcacgaggtgtccgcgggattaccatgggcggggggaatataaataggggcgcggcgattatggacgcggtgtgtgcgcgctgatgggaataattagggccggcggtgaccgggagttaaggcggcgagtatagtatgagatannnnnnnnnnnnnnnnnnnnnnnnnnnnnnnnnnnnnnnnnnnnnnnnnnnnnataaggcgcggggcggctatcacgatatgggcctaaaatgcggatgcggggggagggatgggcggtatatcccgaggcgacatgggggcgggtaagatgcgggggtctcgggttttctctaggggatgcgtgggtgcctgggggggatttgtccgtgcgaatggaaggcagaagtgaggggttcgcggtacccagtgggggttcgcggaggggctaggggaatcggagttgtatggggtgaggaggcgaccgaggtcggggaaggtggccggagtatgaggggtggggccgggtccacgggggcggggccgaagggttcagaagcgcttgtccttcaccaggccgttcctcagtggcttctcggctttgctgggcttcaggctctgggcctcggctgtgtcatactcccgcaggtccttcagctcgtgcacctggcctgtcaacaccttggctgcaaacgccacgatgtacaggaaccagtagaggttcataagggtgagcagcagcaggagcgcattgaagaagaagtagaaggggatgtcaggcaccgtgcgcagactgcagtgactggtggcatacaggaccttgagcgggaaccagtagaggcggaaccagaaccagctgaagccgaagctgaggcagcccaagtctgctgccaaggcatgcagccgatggtaggagccgccgcgggacttgaagtaaatgttgagcttggtgaactcaagcagcacgtcactgatatcgtgcaagaagagcacaaggatgcccaattcggaaattccggaccggtaccagcgggatgtga

SEQ ID NO: 347986 - DNA, 1086 bp, Homo Sapiens
  misc_feature (160)..(160): n is a, c, g, or t
  misc_feature (290)..(290): n is a, c, g, or t
  misc_feature (562)..(792): n is a, c, g, or t
  misc_feature (811)..(829): n is a, c, g, or t
ctcaaaatatatatattattaggacagaaaagcaaaaccttaccataattccataactatgattattggaattacaaagtaaatgaacacttcaattgtctaatagcagtgatttgtcattaaggtctcaggtcaataatacatttaaaatctaacaaangtttggaaagatagtatcattaaattatcttaaaacactacattagttcattattatccctgcagacaaggataaagatggttggtaacactatagggtggctaaaacaaagtaaaaggatcaaaatggncaaaattctttactctgatcatatcatttgattaatcacacttttatctatcacatttttagtttggaaatagtttgcttatcaatatagaattctactttattgcacaatgtccagtttggcaactttcagctatgctgtgaagctaaacaaaagcaaagttgggtctaacaagctgaaagagttctgctcaaaaacctattctgaaaaaggaacttgtcaaaacattttcaccttaaaaaaatttcaggccgggtgcagtggctcacacnnnnnnnnnnnnnnnnnnnnnnnnnnnnnnnnnnnnnnnnnnnnnnnnnnnnnnnnnnnnnnnnnnnnnnnnnnnnnnnnnnnnnnnnnnnnnnnnnnnnnnnnnnnnnnnnnnnnnnnnnnnnnnnnnnnnnnnnnnnnnnnnnnnnnnnnnnnnnnnnnnnnnnnnnnnnnnnnnnnnnnnnnnnnnnnnnnnnnnnnnnnnnnnnnnnnnnnnnnnnnnnnnnnnnnnagagcaagactctgcctcnnnnnnnnnnnnnnnnnnnttgaacacagctacacatctttgtcatttttgctctactcaattctttctgaaaaagtttattattattaaggaaataaagtgtggaaggatcataggaaatacttgcaataaaaagaataatcattaacattggcaactgccactaggaaggtgtatatgccacatactactgataaaaattgtaggaacccattggtagttcccataaccaccattgatgtgttaattcccacaacatcaaaaataaagaattag

SEQ ID NO: 347987 - DNA, 498 bp, Homo Sapiens
  misc_feature (112)..(202): n is a, c, g, or t
acccatctttatccttgtctgcagggataataatgaactaatgtagtgttttaagataatttaatgatactatctttccaaactttgttagattttaaatgtattattgacnnnnnnnnnnnnnnnnnnnnnnnnnnnnnnnnnnnnnnnnnnnnnnnnnnnnnnnnnnnnnnnnnnnnnnnnnnnnnnnnnnnnnnnnnnnacgccatctcaaaaaatatacatatataaggagataaagtttcccattttccaatacagtttcacatttgaacagccctaattgatacaactttatggcagggttttagtgtgtgagtgggatccaaaacactcaatcctgtaaaagggtacagtcctattgtatgttaacacactgatgatgtgagcctgtgagatgagccaatcaccagttgttatgttcgaatctgctttgtgttgggacgctttaatgtcagggtttcactaaataaatgaattttcatatactgaaaaaaa

SEQ ID NO: 347988 - DNA, 649 bp, Homo Sapiens
gggagaccagagggtctgtgttctccaggagaatgagggtgttggtcccagaattgggaccggggccccgctggccagccctgggccacttcccgggtctccattgtgcgtgggtggcgtgttccaggcgtggctggagctggcttcctggctgtgctgccatgggcccctccctcagaagcacgttggcaggaggccgatcagaaccctagcgcctttggtcctaagaatgggaggctgccttccttcccaatctccctgccagggcccacagcgtggccctagccctcccctccccgggatgtagaacggggaccctcgcagggttggggcgggggctgatactcctcggcccctccctaccctgccctgtgtgttggctttgtggccgtccaagtgccaattggcttttcgcccaaataagggctggtatttctcctctgtccttggaggtgatttccccctgaccccctcccccaggtgagtgaccacctgggtgccagttacaggtgtttccagagaccatagaaatgtgttttcctgagagttcgtgtcattcgtgacttttttgtaaagaagttgtgttttcagaggtgattttatgacaggaaagtgaaagaattagttttgcaaaaaagcaaaagcaaaa

SEQ ID NO: 347989 - DNA, 1800 bp, Homo Sapiens
ctccagtgaaaccagtgactgattcaacatctgcccctgcccccaaactggccttgcgtgagacccccgcccctttggcagtaacctcttcagagccctccacgacccctaataactgggccgacttcagctccacgtggcccaccagcacgaatgagaaaccagaaacggataactgggatgcatgggcagcccagccctctctcaccgttccaagtgccggccagttaaggcagaggtccgcctttactccagccacggccactggctcctccccgtctcctgtgctaggccagggtgaaaaggtggaggggctacaagctcaagccctatatccttggagagccaaaaaagacaaccacttaaattttaacaaaaatgatgtcatcaccgtcctggaacagcaagacatgtggtggtttggagaagttcaaggtcagaagggttggttccccaagtcttacgtgaaactcatttcagggcccataaggaagtctacaagcatggattctggttcttcagagagtcctgctagtctaaagcgagtagcctctccagcagccaagccggtcgtttcgggagaagaatttattgccatgtacacttacgagagttctgagcaaggagatttaacctttcagcaaggggatgtgattttggttaccaagaaagatggtgactggtggacaggaacagtgggcgacaaggccggagtcttcccttctaactatgtgaggcttaaagattcagagggctctggaactgctgggaaaacagggagtttaggaaaaaaacctgaaattgcccaggttattgcctcatacaccgccaccggccccgagcagctcactctcgcccctggtcagctgattttgatccgaaaaaagaacccaggtggatggtgggaaggagagctgcaagcacgtgggaaaaagcgccagataggctggttcccagctaattatgtaaagcttctaagccctgggacgagcaaaatcactccaacagagccacctaagtcaacagcattagcggcagtgtgccaggtgattgggatgtacgactacaccgcgcagaatgacgatgagctggccttcaacaaggggccagatcatcaacgtcctcaacaaggaggaccctgactggtggaaaggagaagtcaatggacaagtggggctcttcccatccaattatgtgaagctgaccacagacatggacccaagccagcaatgaatcatatgttgtccatccccccctcaggcttgaaagtccttttgtggctttcctagttactcaaattgactttcccccacctttgcacaggtgctttcaatagttttaaaattatttttaaatatatattttagctttttaataaacaaaataaataaatgacttctttgctattttggttttgcaaaaagacccactatcaaggaatgctgcatgtgctattaaaaattgttccaaatgtccataaatctgagacttgatgtattttttcattttgtccagtgttaccaactaaattgtgcagtttggggcttttcccccttaccatagaagtgcagaggagttcagtatctctgttttaaagacgtatagaatgagcccaattaaagcgaaggtgtttgtgcttgtttgtgtgtatcagctgtaccttgttgagcatgtaatacatcctgtacataagaaattagttctttccatgggaaagctattaccttggacgatgctctaatcatattgcatttaattttatttttgcacagatgacctttgtagcccggatgaaaaaaa

SEQ ID NO: 347990 - DNA, 646 bp, Homo Sapiens
gggggatgtacgactacaccgcgcagaatgacgatgagctggccttcaacaagggccagatcatcaacgtcctcaacaaggaggaccctgactggtggaaaggagaagtcaatggacaagtggggctcttcccatccaattatgtgaagctgaccacagacatggacccaagccagcaatgaatcatatgttgtccatccccccctcaggcttgaaagtcctcaaagagacccactatcccatatcactgcccagagggatgatgggagatgcagccttgatcatgtgacttccagcatgatcacctactgccttctgagtagaagaactcactgcagagcagtttacctcattttaccttagttgcatgtgatcgcaatgtttgagttattacttgcagagataggagcaaaaattacaaaaacacacagggtagtgggtccttttgtggctttcctagttactcaaattgactttcccccacctttgcacaggtgctttcaatagttttaaaattatttttaaatatatattttagctttttaataaacaaaataaataaatgacttctttgctattttggttttgcaaaaagacccactatcaaggaatgctgcatgtgctattaaaaattgttccaaatgtc

SEQ ID NO: 347991 - DNA, 1342 bp, Homo Sapiens
  misc_feature (1128)..(1182): n is a, c, g, or t
aacttttgtatgaagaatttaattatctatacacggaactaattcaaaaggttgtattacagttgttaaagccgcaggtttatatatttatatattttacattcatatccgtgaaaatactgaagtgcaactgaacgaggaggagaggtcctcgctctctgcaccatgtgaaaggagaaggacctctacacgaccaccagcacagcctcccgacagcgccgggagaacgcgaggggagtgagcattacagagtctttaggaggacagctagattgtgcttgaggctccccctgccccattttctgtgctgtgagcagcaggcatttttattgagagcttccaactagtgtttaaaagacaaacagggcttcagctacagcatatctaacacacaaacggaccatgagctccatttcatattaatctgtagaaattccacagtctagttaaaaaatgtaaacattggaaattaattgcagggagacttctatacattctttcttgtcaagaaaattacttgttcaaaataggtcattccatgaaaagtaactggaataaaacttcatgtaacagagactaaaaagagactgtggatatcgttgatcgtaacgacctcagtggtgttgtctactgattttatgctatgcaaacacgcaaaattaaaaaccccaaacaaaacaccaactcaaccagataaatctgagaccgaacaaaaacacagagtgctttctcatgtggctacaaggtcactgtgcaaaataaaattaaatgcaatatgattagagcatcgtacaaggtaatagctttgccatggaaagaactaatttcttatgtacaggatgtattacatgctcaacaaggtacagctgatacacacaaacaagcacaaacaccttcgctttaattgggctcattctatacgtctttaaaacagagatactgaactcctctgcacttctatggtaagggggaaaagccccaaactgcacaatttagttggtaacactggacaaaatgaaaaaatacatcaagtctcagatttatggacatttggaacaatttttaatagcacatgcagcattccttgatagtgggtctttttgcaaaaccaaaatagcaaagaagtcnnnnnnnnnnnnnnnnnnnnnnnnnnnnnnnnnnnnnnnnnnnnnnnnnnnnnnnaactattgaaagcacctgtgcaaaggtgggggaaagtcaatttgagtaactaggaaagccacaaaaggacccactaccctgtgtgtttttgtaatttttgctcctatctctgcaagtaataactcaaacattgcgatcacatgcaactaaggtaaaatga

SEQ ID NO: 347992 - DNA, 300 bp, Homo Sapiens
ccaagtattacgtaaactcaatttaagggcccataaggaagtctacaagcatggattctggttcttaagagagtcctgctagtctaaagcgagtagcctctccagcagccaagccggtcgtttcgggagaagaaattgcccaggttattgcctcatacaccgccaccggccccgagcagctcactctcgcccctggtcagctgattttaatccgaaaaaagaacccaggtggatggtgggaaggagagctgcaagcacgtgggaaaaagcgccagataggctggttcccagcttaattat

SEQ ID NO: 347993 - DNA, 613 bp, Homo Sapiens
atctgggaatgcactggtcacatctgaagtgaacaaggccctgggtttcacccaaggcctgaagcccatggtaagtatttcctgggtaccactgatgtttactcaaggcataaggactgtttagtcagtaaatgattaatcctgtcaggaccaggtccttctcttcaaggaaatgagtttccttctggcccagggtgtatctaacaatgtcatccaggagctagggcctggaatgggggcctaaggactctccctggtgccctactctactgtggctgagctgatatccaagttataagacaatatcctctttactcttccctctcctctcctcaagccaaaagagggattccctcctagagctgggagctgcactgcctgggattgggggagtagtgatgcaagcattcctttggccaccctggcagttgtctcattgtgtcatgtgcaccccaaatccactggctccaagcccagcacagcaccagaacttgatcaagacttgcagtccttgtagcctagactgcctttcaagtttatttaggaccccagagtgctttaggcctcagtggtggggctagccagaactcaaattccaattgctgggatgggt

SEQ ID NO: 347994 - DNA, 1646 bp, Homo Sapiens
  misc_feature (47)..(47): n is a, c, g, or t
  misc_feature (728)..(756): n is a, c, g, or t
ggccatcttagctaattctgtttaaaactctgtcagaggcctgcagntgtgagttatatttataaatatatcttcagaaattaatcttaaaagaggcattagttcagaatacttttttaaaagtttaaattaaatatttaggcacgtcagaaattacttttccttattttgaaatgaggctacttatgtcttggttttattttgttccatgtttaaatcattcactttgatttgagtgggaaaagcctgaagcctttatcatgtggttgctggtgtgtgtaattattaatgaaatgttcactcctagtcccttatgaggcttagaatttcaaccacgtgtcaggtcagacagtattataaactgtactttgctgtctgagacagcacatttgtgaatgatgcttgctgcctgccattttcaacctattctctcttaagagtgctaggtaccaaattgtgaaagtttgttttcagttatattacttttgaggctggtgaaaaatttaaatgtaactttgtgggaacactgattcatatttagaaaatgtaaatgtctgtagcactttcttgcagttaatttgaaaactttggatgctgaaccttgtttgtcagtgatttagatgatttaaaaatgcatgtgtgatttgaattttataattgttttgacaagcataatttacttggacaacttcgtaggtagccttaacttctggccaagtttgtttttnnnnnnnnnnnnnnnnnnnnnnnnnnnnntatgtatggttgtaaattcatacacttatcacatgaatgtgttactgtatacaaaactcttaatgctttattctcaaatgctgggttgaaaaatgttttgaaagccttttaaaatatatatctttataaagtaatattcaggatgatgataaaaattgtttatattgttatgataaaaatgacagtataatgttgcccagtgtatttaatgatttatttgaagagggattgggaaggaacgtcttcataccactttctcctttgaaattttcagtttattgacttttaaaaaatgaatacctcaggcagtagacattttttttctagtatcatttaattgataccctgtgcgctaaatagtgtgtggtgcctgattaatttggtctgaatatttgattctttctgttcctttcaacttgacattcagattattgactcaaggagagaggctcagagtggaatggttggcgctgtgggtaaggttggatctcccttaaaactgccttttggattcagtgtttgtgcttgagttcgctttcaaatatgaccataatcgtgtgggtgcaagactgtacagtgatacatatgtagaggtaaagcattcattttaatacttaaagttatataaatcttttcaaaaagtgttttgttataaaatacgctgtttgtacccataccagcccacctcttctgaggccctgtattcaaataggatgatagtgatctatctttcctgcatgaagtgtaggtggcgagtgggcgaggggcgcagacttctttgaaatcgaagggtacagtcaaatctactgctgatttggttgttttgttgctgtggcagaatatgccatgaaacacatacagacttctccgaacgtgcaccctcatcagcc

SEQ ID NO: 347995 - DNA, 1514 bp, Homo Sapiens
  misc_feature (19)..(19): n is a, c, g, or t
  misc_feature (220)..(220): n is a, c, g, or t
  misc_feature (773)..(773): n is a, c, g, or t
  misc_feature (830)..(839): n is a, c, g, or t
cccaaacccttaccccagnagctctgaatgcctgtataccatcgagctggaggagggtttcatggtcaacctgcagtttgaggacatatttgacattgaggaccatcctgaggtgccctgcccctatgactacatcaagatcaaagttggtccaaaagttttggggcatttatgtggagagaaagccccagaacccatcagcacccagagccacagtgtncctgatcctgttccatagtgacaactcgggagagaaccggggctggaggctctcatacagggctgcaggaaatgagtgcccagagctacagcctcctgtccatgggaaaatcgagccctcccaagccaagtatttcttcaaagaccaagtgctcgtcagctgtgacacaggctacaaagtgctgaaggataatgtggagatggacacattccagattgagtgtctgaaggatgggacgtggagtaacaagattcccacctgtaaaaaaaatgaaatcgatctggagagcgaactcaagtcagagcaagtgacagagtgaatgacgggaccccacacaatgcagacatccagaaatggatcactcccaagacccctggggcccagagctgcaccacccctccccacccacaacacccccgtgcccctttccatgtggattagaatgggtgctgaacaacatgatctcagcagttgaagctgctacgtgtgtgaaagcaaattctccacttgagggtttgcccatcattcaaacactattccagaaaataatganaaaaaaatgtgggatttattttagcacctctgagtggactgtacttttctcaacggnnnnnnnnnntgcccttggtccttgagacaaaagatttaatatacaaccatgtggcctcaggctgaccagatcaaagtggtttctaatccattctacatgtcaagtttaaatgaaccagactgcctgtgactttatgaatctgaaggtattacctgttgctgctttcttaaccaccatgagtaggtaaagcaaataataactcacagagtgtggatttttgagaatctgaatgttttctcattcacaaaagtatcccttctacccctatctggcgcagggctgaaatgtcatcattagaggttctgtcttctggggcttacaagttctatgtttcttaaaattcgctgattaaaaattttaaaaagataggatcacacctgaaagcagtggtcccagctctgtgctgtgggacatcacaggtcctaaacagtgatagagaaagggctggggagtggcagctggaatctctgcttccgtctgaacatctggacacacatgtcagagaatctttgcattaaatggactgcccaatctatttggtgattaaatggctgtgcggtgaggggagaaccctgggcagtctggagactgaggtgccattctcggctagagacaccacccaaagaagagatgggctggctactaaagacaagtgtcagttgaataaatgtctttaaacctaaa

SEQ ID NO: 347996 - DNA, 1335 bp, Homo Sapiens
  misc_feature (97)..(145): n is a, c, g, or t
gccgcacgggataaaggagggaagggaaggagcagatcttttcggtaggaagacagattttgttgtcaggttcctgggagtgcaagagcaagtcaannnnnnnnnnnnnnnnnnnnnnnnnnnnnnnnnnnnnnnnnnnnnnnnnggatctgttgcaggcaggggaaggcgtgacctgaatggagaatgccagccaattccagagacacacagggacctcagaacaaagataaggcatcacggacaccacaccgggcacgagctcacaggcaagtcaagctgggaggaccaaggccgggcagccgggagcacccaaggcaggaaaatgaggtggctgcttctctattatgctctgtgcttctccctgtcaaaggcttcagcccacaccgtggagctaaacaatatgtttggccagatccagtcgcctggttatccagactcctatcccagtgattcagaggtgacttggaatatcactgtcccagatgggtttcggatcaagctttacttcatgcacttcaacttggaatcctcctacctttgtgaatatgactatgtgaaggtagaaactgaggaccaggtgctggcaaccttctgtggcagggagaccacagacacagagcagactcccggccaggaggtggtcctctcccctggctccttcatgtccatcactttccggtcagatttctccaatgaggagcgtttcacaggctttgatgcccactacatggctgtggatgtggacgagtgcaaggagacgggaggacgaggagctgtcctgtgaccactactgccacaactacattggcggctactactgctcctgccgcttcggctacatcctccacacaagacaacaggacctgccgagtggagtgcagtgacaacctcttcactcaaaggactggggtgatcacagccctgacttcccaaacccttaccccaagagctctgaatgcctgtataccatcgagctggaggagggtttcatggtcaacctgcagtttgaggacatatttgacattgaggaccatcctgaggtgccctgcccctatgactacatcaaggtgagcctgcaatgaacacttgtcctggagatgctgggaaaatcttggctgagttgggaaaattgatattgcggaaccttcaccttcttctcccaggatagagagcctagcagctagttcctcaaaaaggcattatttaaaataatatctaccatcttagttagatctattccaggaatctctgatccgaaatgaccccactggccactagggtggcttgaggaggagagtcgtgaatctgcattttagaaaggtctctggcggg

SEQ ID NO: 347997 - DNA, 875 bp, Homo Sapiens
  misc_feature (106)..(158): n is a, c, g, or t
  misc_feature (734)..(734): n is a, c, g, or t
  misc_feature (792)..(792): n is a, c, g, or t
  misc_feature (840)..(840): n is a, c, g, or t
  misc_feature (845)..(845): n is a, c, g, or t
  misc_feature (860)..(860): n is a, c, g, or t
gctgaagtcagccacacaggataaaggagggaagggaaggagcagatcttttcggtaggaagacagattttgttgtcaggttcctgggagtgcaagagcaagtcannnnnnnnnnnnnnnnnnnnnnnnnnnnnnnnnnnnnnnnnnnnnnnnnnnnntctgttgcaggcaggggaaggcgtgacctgaatggagaatgccagccaattccagagacacacagggacctcagaacaaagataaggcatcacggacaccacaccgggcacgagctcacaggcaagtcaagctgggaggaccaaggccgggcagccgggagcacccaaggcaggaaaatgaggtagaaactgaggaccaggtgctggcaaccttctgtggcagggagaccacagacacagagcagactcccggccaggaggtggtcctctcccctggctccttcatgtccatcactttccggtcagatttctccaatgaggagcgtttcacaggctttgatgcccactacatggctgtggatgtggacgagtgcaaggagagggaggacgaggagctgtcctgtgaccactactgccacaactacattggcggctactactgctcctgccgcttcggtaacatcctccacacagacaacaggacctgccgagtggagtgcagtgacaacctcttcactcaaaggactggggtgatcaccagccctggactttcccaaacccttaaccccaaggagnttttgaatgcctgtattaccatcgagctgggagggagggttttcatgggtcaacctgncagttttgagggacatattttgaacattgagggaccatcctgaggtgncctgncctattgattacatnaagttcaaagttggt

SEQ ID NO: 347998 - DNA, 1786 bp, Homo Sapiens
  misc_feature (13)..(13): n is a, c, g, or t
  misc_feature (1445)..(1528): n is a, c, g, or t
  misc_feature (1532)..(1588): n is a, c, g, or t
  misc_feature (1725)..(1734): n is a, c, g, or t
gccaccagccagntggctttaaaccaggggcaggttgtccctccaggcagcattggaaatgtgtgtgtgttgagggggtcacagtgactgtgggggcaccctgggcatctagtgggcatcccacaatgtgcagaacagtctctgacagcaaagaattggtccattcaatgccaattgtagtacctttgagacattctggctgagccaatgccttctccctgtcagagtcccccagagcagagagggtcaggcttctctggaccttggctcccagagcaagccaaaataaagactacactgttgccttgggggcttgtcgggccagggccaagacggtctgcgtgctgcagggccaggacagaaatagccacacatgccggtgagaacaaagagcctctttctttctcatgttgacatcgactttctgtgccaagtcctttgggtataaggatgctagggaattcctataggcaccaaacagaaggaaagctaggggcttggactactgggtataggacttgctctagctctcaggtcctagcccaagctcaatgcaaacacagcccctccgggctctctgtttctgtgaggttctggaatcccttcctctgtgtccgtgagtctgacagaatcgatgatgttcccttagagctgggaaatccatgtgtttattcacggagggaactcaccattacctcccttgtcttctttgcctgccttggagaaatccagagtcttcggaatggcaaaggcagctcctggatttccctggaggggaggcactagctgagggaagtagctcccttcattcatgatgcacagtttacgcagcagacacacaactgcgcctactatttgctcggtgccctgcaaggtgctgcctaactttgatttgttatttcagctctctccaggatagtgccaaatggtgcaatgggaaacctgttttgctggggggctctagatcactggctccagaactcccggctgccagggtagcccctacccccagccccttgctcctggacagcagtgggtctcacctttagcctctgcccccagttctggtctgacccaacagaggggctctatgatattaagaaggggcccttcctgctctgtgcctcaacctattctccataatagggagtctaatcctattccttccctgcctgatgaggatggtgtgaggatgaggaggacggcatctcatttggggctttttggcagtgggcctcattttaatcctgcagggctgcctgccagtggatctatccagctgcttccttgtagccaagaatgagttcaatgaattgtgattcactgattttattgattttgttttaaaacagggagactggtatttttgaagctgctatcattttctatttctttattaatttctttgtaatcatcttattaaagttttcttatttagtgggaannnnnnnnnnnnnnnnnnnnnnnnnnnnnnnnnnnnnnnnnnnnnnnnnnnnnnnnnnnnnnnnnnnnnnnnnnnnnnnnnnnnaaannnnnnnnnnnnnnnnnnnnnnnnnnnnnnnnnnnnnnnnnnnnnnnnnnnnnnnnnatttttttttaaaaaaggggccccctatggggggcccttttttaaaaactggccccggccccccttttttaaaaaccccgggggtgggaaaacacccccccttggggaaatttttggggagaaaaccctttttctcnnnnnnnnnncaaaaatttggggaaacattccccccaagaaattattaagccctcaagggag

SEQ ID NO: 347999 - DNA, 1185 bp, Homo Sapiens
aaggtttccctctgtgggggagaaaaagaaatccaggagctcctccctggattaaaaccaacgaggtgcagaccaaactttaacacctttagccttatgtggaaaccaaaaaccaactgctgggaaactgtgaaaagcccttttacccacaaggggaggggtcaaagttgctgccctttggggacacccgagacccctaattagcctatctgaatgaggaccaaaggttagagccctctttctccccgaagaaagagcccggaaaaacatggcagagcaaagagcaaaatcctttctcccccgaatgctttaccagtttctcagcaacatttattcaagatgatttttaccaggaaccttatcaaaggcaaaaccacagctgcttgggttgaagtccccatcctggcctcctctcagccgccagacatggccaggaaccctgtggttcccaagaacaatttaaagatcactctttgatttgaaagaccaccattatcattttactaaattcttatatatacttgtgccttttccaactttcagttctcttaagaaaaacatccactgtagctttataaaataccttagtatcagctaggtccaagtctccaggcaggactatcaaaatggactccttcttcctatcagctctagaaccccagaggacttgcccagtaggccagctgagcacttaccaggcagcatctccctggccttccacagtctcgcctgtctgtctctggccttggtggacctggctccctccctaggaggcttttgccctcagcttgaatacagttcctggtgcatcaaagctgtaagttctcagctgctggcctgcactcatcacctcttcctacaaataaacatttggaaaaaagtccatcttcaatatgcttaaagagaagggtaggagataaggagaaagaacagatacggtttttttcccctttaaggcctttagattttgaggtactgtaaggggcctagaaggacaaaaggctttcattccctcttccttttggcaggcaggttatcagtccttggcagaagggcccagccctatccttttctgtatcaaacaaaatccttgaggttggtatacaagttaaggctgaaaaaaggccttaaattcccagtaaagaatgtgaaagcaagcatgtaaaataaactggtcttcaaaaa

SEQ ID NO: 348000 - DNA, 448 bp, Homo Sapiens
  misc_feature (208)..(208): n is a, c, g, or t
  misc_feature (321)..(321): n is a, c, g, or t
  misc_feature (355)..(355): n is a, c, g, or t
  misc_feature (425)..(425): n is a, c, g, or t
gggaggctggtcagagggaggagacccctggtcctctgctgctggaaggagaggggttcagcccagataactcctttgtggcctgggcaggatcagagaatgacaaggctgaaaggagggggactggaggctgcctggctccagcgagacttccttctgggaccagagggtgggacggccaggcaaaaccacagctgcttgggttgangtccccatcctgggcctcctctcagccgccagacatggccagggaaccctgtggttcccaagaacaatttaaagatcactctttgatttgaaagaccaccattatcattttantaaattcttatatatacttgtggccttttccaantttcagttctctttaaggaaaaacattccatgttagctttattaaaattaccttagtattcagttaggtnccagttttccagggaggattatc

SEQ ID NO: 348001 - DNA, 883 bp, Homo Sapiens
  misc_feature (430)..(521): n is a, c, g, or t
gcgatttggggagtgttgtgaattccgagggctccacacttaagaggttgtacactcacctgtctacctggactccaatttccatatttccagccacttgaggactgagaggtggatgataaaccctgtcatagtggagcaagttcaggtgtttaaccgctgttatgggggatctgccttttctccctcttctttcttacttccataagtatgtatgtgcagagattgaaaaataaccttgagagagtccatccatctaactccagttcattggaaatttctgcttctttgagactgaggttatattccacttcttctgactacaccaccaccatcaatctccttctctgaactcttggatcattacttcaacctgaaacaactcatcaggcagaatagttgcctactgccccaaccccaccaaatgttnnnnnnnnnnnnnnnnnnnnnnnnnnnnnnnnnnnnnnnnnnnnnnnnnnnnnnnnnnnnnnnnnnnnnnnnnnnnnnnnnnnnnnnnnnnntattcaccttggacccagtgttaatcacaaaaggttttttacaagatgtgaagataggctttaagaagccagaaaagtgatattgtgacaatgggattcagttgtcagaagttgggagttgactttgatgttgatgaaggaatttaaaccttgcttggtttctgggccttttaagggattgaaagttaaattgggtcccattgaagcctcaaggcacataccacggtgtgcgcttcttttttcaagtaaatttttgtatacagatgggttaattcattttttgctaaatttcaggggtttttgaattttttgggctatgtagggcaattggggcttcatggatgggacctcttgtgactttt

SEQ ID NO: 348002 - DNA, 2337 bp, Homo Sapiens
cacaacgcccagtgagtttgggctgatgcaccacaacctgtaaactttcagacacagaaaacaggacaggaaccagctgccgaaggccgaggcggcccttgcacagaagagacttgggggaggggccgaggccaggtcaccaagacggtgagggcagaggggcgtgccagcctcggcccccacccacgccctgtcccctgcccacagaccctgacgcacactggaggctccaagtgaccgacacttgaccaagtccatctggcttctggctcccatgtacccgagcccactctccactccacctccttgggcctcaagtgtcctgggatgacaggagtgagggctgcaggtgtcaccgggccaaggcttggtcagctcctgacctcggcaggggagcacccgggggactctgggaaggcagcccccaaaagcaggaggacttcaatcatagggggcagggaaagtccagcctgcccctgggggaagccaagtttgcaaaaaacgcaggagcttcggaaggtggctttcacgggggacgctgcttctgcctcaggcgtgtatgagagggccctgcagacgtgctcactccaccccgagtcacctgaacccatggggcaatgccttccaagaccttggctcaaacatggctctgcagaagccctactcagcactggcttaaagtggctggaaatttccaatcgcagactggcactttgggctcgcgttcatgcccgaggaccctgattctaccagcagcaaaaaccaaacccagcccaaagacgccaaacatacggacaccaccatcaccacttttggcagagatgactgacaaaccaagaaggacattctcagatcttttctcctctcccaaactggtcagccccaaacccgctctgactctagtagcccacccctcccgggccccggggtgctggccacggacagcaccaccccttctggaccaggcagtgcagggggcccaggcccaaaggagccctggccaggctttcctgggtgcccgagtctaaccaggcagaggagaagggagccctggcgaggcctgggagggaagcagagaggaagggacagagcaagcctgcctgagaggaaggcgcacaggggagggaccatcagcccttggggtggagacacagacccctgccctgaccgccacaggcctccagtcctgctgctcgggacctatctgctgtgggccaaggaaggtgggcactgctcccaacgagggccaaccccagtgcttgccactgcttgtttggggacgagggcacgggagtgagcttctgacccgagccaggaccctttgccaggaggcaccgcagagcacacaacacgcatgtggatgaaccataacatgtgagcccgctgacaatcatctccactccagggtgctccccactacgcccacgtgcagtgtcagggtcgggctggccttgcagacctggatccagactggagtgtgggaatgcgccaagaggaaggacttgtaggtcccgccctccggggttcagagacagcctcattatgagtgaggcatatagggccttagggagggccaggcaattgctccagtgtctgcaacacaagctggtgaatcctgacccagccctggccccctcagtcccaggcaggccctctccaaggagctgagccccagcccgtgtgcacctccaccccaggcccagctgggtttttcacgcagccctttcctaacattcccaggattctgcaccccaaggcaccttccctgggaaggtcccagtacaagactcagaaacgcctttccaggtcgacctggggccaggagaaggatcacacacaaacaggcctagggagggcctgacctgcgtccccatctccgtccccaacttggaggggcagggtccgggggagtgggtgggattccaacaacccacatgtgggaatatggttttgggatgtcagggcgctcctggcaggaaacaaggcagcaagcccttggtgctgcggctgggaggggtctgcagagggcactgggtccagtccccctccaggcagaactctccccacgccttccaagagtgcagcctcaggcaaaaagcccccgtgaaggcctttccagggacaggggaatgggacaagtccaggcccccaggggcagcccggttccacctccggaggtgggcaggttaggcatcccagggcacagggcagggggccagggtctcctgggccagctcagggcccatgaccctcccttgctggggcgcagctatcactgcccttaaccacacctctggcagaaggcaaacccaacgcagcagtggctccgagaccgct

SEQ ID NO: 348003 - DNA, 1800 bp, Homo Sapiens
  misc_feature (1170)..(1170): n is a, c, g, or t
ctaaggagcaatgacattgactactacctgggacagagcttccgggagcaactcgcccagggaagccagctgacagagaggctcaccagcaaactcagcaccaaggatcataaaagtgagaaagatcaagctggacttgagccactggccctcaggctcagcagggagctgcaggagaaggagaaagtgattgaagtcctgcaggccaagctggatgctcggtccctcacaccctccagcagccatgccttgtctgactcccaccgctctcccagcagcacctctttcctgtctgatgaactggaagcctgctctgacatggacatagtcagcgagtacacacactatgaagagaagaaagcttctcccagtcactcaggtgccagcactgttcctcctgcttccacagctacattgctgagcaacgacttggaagccgactcttcctactacctcaactctgcccagcctcactctcctccaaggggcaccatagaactgggaagaatcctagagcctgggtacctgggcagcagtggcaagtgggatgtgatgaggcctcagaaagggagtgtatctggggacctatcctcaggctcctctgtgtaccagcttaactccaaacccacaggggctgacctgctggaagagcatcttggtgaaatccggaacctgcgccagcgcctggaggaatccatctgcatcaatgaccgcctacgggagcaactggaacaccggctgacctctactgctcgtggaaggggatccacttctaacttctacagtcagggcctggagtccatacctcagctctgcaatgagaacagagtcctcagggaagacaatcgaagacttcaggctcaactgagtcatgtttccagagagcactcccaggaaacagaaagcctgagggaggctctgctgtcctctcgatcccaccttcaagagctggaaaaggagctggagcaccagaaggtggaaaggcagcagcttttggaagacttgagggagaagcagcaagaggtcttgcatttcagggaggaacgtctttccctccaggaaaacgactccagactgcagcacaagctggttctcctgcagcaacagtgtgaagagaaacagcagctctttgagtccctccagtcagagctacaaatttacgaggcactntatggcaattccaagaaggggctgaaaggtatgtgttcttctccctcaccccatgagcctttttgcccttgcataggatgctagtgaggtctttcctttgggagttgtggagatcatgggaagctacagagttctgtcacagaaaccccacccgagcctggggctcccagtaggagctctcaaacacaaagcccaacgggacaggttggtggcacgagcaagatccggcctgatcattcctaattactttaagaaaatctagacattcctatcaatgtctagattgtaacatttttgaaagcaaaagaactgtcctaatgatatcatcatttgaaaaggcctttaatattgttggtaatacatactgacaacccattcagcccaatgtagcaggcagtctgctcccaccctgaccctttccgtagtgacatctggctctcagcttattgccctttcatgtaattttcataaatcctgatttagtttcctgattttctaaagagaaggtgaactggaatttgaagaaatacaggggcttaccaggctgggcgaatagcttaagtacaaagtcatggtgagtgttgagtcagtggggaccagcctgcccacaggagaaaattaaaagacaca

SEQ ID NO: 348004 - DNA, 1510 bp, Homo Sapiens
  misc_feature (1360)..(1360): n is a, c, g, or t
  misc_feature (1363)..(1363): n is a, c, g, or t
  misc_feature (1465)..(1465): n is a, c, g, or t
  misc_feature (1474)..(1475): n is a, c, g, or t
  misc_feature (1486)..(1486): n is a, c, g, or t
agcgggtcacggcagcgcgccggccgcgagagagggccccgtcgcgaccgcgtccccttgggtccttgatcctgagctgaccgggtagccatggccttgcggctcctgaagctggcagcgacgtccgcgtccgcccgggtcgtggcggcgggcgcccagcgcgtgagaggaattcatagcagtgtgcagtgcaagctgcgctatggaatgtggcatttcctacttggggataaagcaagcaaaagactgacagaacgcagcagagtgataactgtagatggcaatatatgtactggaaaaggcaaacttgcaaaagaaatagcagagaaactaggcttcaagcactttcctgaagcggggattcattatccagacagtaccacaggagatgggaagcccctcgccaccgactataatggcaactgtagtttggagaaattttacgatgatccgagaagcaatgatggcaacagttaccgcctgcagtcctggttgtacagcagtcgcctgctgcagtactcagatgccttggagcacttgctgaccacaggacaaggtgttgtgttggagcgctccatcttcagtgactttgtgttcctggaggcgatgtacaaccagggattcatccgaaagcagtgtgtggaccactacaacgaggtgaagagcgtcaccatctgcgattacctgcccccccacctggtgatttacatcgatgtgcccgttccagaggtccagaggcggattcagaagaaaggagatccacatgaaatgaagatcacctctgcctatctacaggacattgagaatgcctataagaaaacctttctccctgagatgagtgaaaaatgtgaggttttacagtattctgcaagggaagctcaagattcaaaaaaggtggtagaggacattgaatacctgaagttcgataaagggccgtggctcaagcaggacaatcgcactttataccacctgcgattactggttcaggataagtttgaggtgctgaattacacaagcattcctatctttctcccggaagtcaccattggagctcatcagactgaccgtgtcttacatcagttcagagagctgccgggccgcaagtacagccctgggtacaacaccgaggtgggagacaagtggatctggctgaagtgaacgggccgccttctgctccagctgcatcacagtgatggccaagctgcatcagccgcactctcctggacgccatatagcttttaagatcggggggagggtaaataatgcaaaaattgcacagtgggaagaaaggggtctcaccaaaaagcaatccatcctgtagtataggtaatggagttgggggaagcagcttccattctgnatntttggaaccctttagctttgttttggaatggcccaccattctcatctggaaaacagtgttctgctgtgaaaggccagctctcggcagcccctgtggtttcanggtgccgcnnctgtgtcattncaggtggtgcacattgtttttctt

SEQ ID NO: 348005 - DNA, 788 bp, Homo Sapiens
gctccagatggattgtcttcccactcctgactaactacaggaggattcttttgtgaacccttcttccctgtgcaattttgcattatttccctcccccgatcttaaagctatatggcgtccagggagaagtgcagcctgatgcagctttggccatcactgtgatgcaagctggagcagaaggcggcccgttcacttcaagccagatccactgtgtcgtcccacctcggttgttgtacccagggctgtacttgcggcccggcagctctctgaactgatgtaagacacggtcagtctgatgagctccaatggtgacttccgggagaaagataggaatgcttgtgtaattcagcacctcaaacttatcctgaaccagtaatcgcaggtggtataaagtgcgattgtcctgcttgagccacggccctttatcgaacttcaggtattcaatgtcctctaccaccttttttgaatcttgagcttccccttgcagaatattgtaaaacctcacatttttcactcatctcagggagaaaggttttcttataggcattctcaatgtcctgtagataggcagaggtgatcttcatttcatgtggatctcctttcttctgaatccgcctctggacctctggaacgggcacatcgatgtaaatcaccaggtgggggggcaggtaatcgcagatggtgacgcttcttcacctcgttgtagtggtccacacactgctttcggatgaatcctgggtgtacatcgcctccaggacacagaccacccagcctcgtacctagcctag

SEQ ID NO: 348006 - DNA, 893 bp, Homo Sapiens
  misc_feature (48)..(80): n is a, c, g, or t
tgatcactcactataggggactcggactctccgcggtggcggcgcatnnnnnnnnnnnnnnnnnnnnnnnnnnnnnnnnnatcaggccaaatcggccgagctcgaattcgtcgagagcggggggtccttgatcctgagctgaccgggtagccatggccttgcggctcctgaagctggcagcgacgtccgcgtccgcccgggtcgtggcggcgggcgcccagcgcgtgagaggaattcatagcagtgtgcagtgcaaactgcgctatggaatgtggaccatctgcgattacctgcccccccacctggtgatttacatcgatgtgcccgttccagaggtccagaggcggattcagaagaaaggagatccacatgaaatgaagatcacctctgcctatctacaggacattaagaatgcctataagaaaacctttctccctgagatgagtgaaaaatgtgaggttttacaatattctgcaagggaagctcaagattcaaaaaaggtggtagaggacattgaatacctgaagttcgataaagggccgtggctcaagcaggacaatcgcactttataccacctgcgattactggttcaggataagtttgaggtgctgaattacacaagcattcctatctttctcccggaagtcaccattggagctcatcagactgaccgtgtcttacatcagttcagagagctgccgggccgcaagtacagccctgggtacaacaccgaggtgggagacaagtggatctggctgaagtgaacgggccgcttctgctccagctgcatcacagtgatggccaagctgcatcagccgaactctcctggacgccatatagctttaagatccgggggacggtaaaatatgcaaaaattgccagtggaagaaagg

SEQ ID NO: 348007 - DNA, 477 bp, Homo Sapiens
aggtggtcgcggcgatgtactttatccacgaggagatgggaagcccctcgccaccgactataatggcaactgtagttatggagaaatatttacgatgatccgagaagcaatgatggcaacagttaccgactgcagtcctggttgtacagcagtcgcctgctgcagtactcagatgcctgggagcacttgctgaccacaagacaaggtgtagtgttggaacgctccatcttcactgactttgtgttcctggaagcgatgtacaaacaggaattcatccgaaaacagcgtgtggaccactacaacgaggtgaagagcgtcaccatctgcgattaactgcacccccacctggtgatttacatcgatgtgcccgttccagaggtccagaggcggattcagaagaaaggagatgtaatgcagtctacaatcaaaggccaagcatctctattttgaatgtagatcagcactaaaagccctgtg

SEQ ID NO: 348008 - DNA, 1730 bp, Homo Sapiens
taaaattcacccattttaagggtacgactgaatgattttgggtaaatttaccaagttattgccactcttgccataatccagttttagaatgttttcatcattttgtaggttgaaaccgcaggcctattcatttctttcttccttcctctctctcctgtaagtgttgattgagcatccaccctgtcctagaccctgcttggtgctagggacataccagtgagcagggtggatgaggtcctcacccgtgagctcatatgctgatgggggagacctacagcaagcaaggagataaataaatacatcaaatagaggtaaatgatgtgaagaaaacaaaacgggctgagaagatagtgtgagactgtaaggagttttaaattttaaaacttgctactcataattagatattcaagtttctgaaattcgcatagtgcatttcagatgatgagagaggtgacagccgtagaaagtgggagaagtggttgcggggagatgggtgagcgatggaggtggcgagcaagttggagagatgcagggagagtcaggtgacaagaagagagtgtgctgaggacagatggcggacagacaggccgctgcccccaatttttggtgctctttcattcctgcactcaggcacgaggcagacaggaaagacaggcagtgctgcttcgtaacaggcatctttcttgccctaagtatacatcttagaatgtgtggagaaagtcacgctatgggagcacttgggcaggctcaggtgttcactgtagtagaaggagaatgactctagctgatgttgggaccctttgctgtcaccccgcagtccccacagtgcccggtgtgagttgtaagaaaatggtggtcagtgattgtcttcgcattttatatacgcacaggtcaaagagaatgaactctaaatgtttcccagtttgatttttctgcttctgtttagccacatgaaatgaagatcacctctgcctatctacaggacattgagaatgcctataagaaaacctttctccctgagatgagtgaaaaatgtgaggttttacaatattctgcaagggaagctcaagattcaaaaaaggtggtagaggacattgaatacctgaagttcgataaagggccgtggctcaagcaggacaatcgcactttataccacctgcgattactggttcaggataagtttgaggtgctgaattacacaagcattcctatctttctcccggaagtcaccattggagctcatcagactgaccgtgtcttacatcagttcagagagctgccgggccgcaagtacagccctgggtacaacaccgaggtgggagacaagtggatctggctgaagtgaacgggccgccttctgctccagctgcatcacagtgatggccaagctgcatcagccgcactctcctggacgccatatagctttaagatcgggggagggtaaataatgcaaaaattgcacagtggaagaaggggtctcacaaaaagcaatccatcctgtagtataggtaatggagttgggggaagcagcttccattctggatgtttggaaccctttagctttgttttggaatggcccaccattctcactggaaaacagtggtctgctgtgaaaggccagctctcggcagcccctgtggtttcagcgctgccgctctgtgtcattcaggttgtgcacattgtttttcttctgacttccagaaataaaagtgtttccatgggaaaaaaaa

SEQ ID NO: 348009 - DNA, 467 bp, Homo Sapiens
  misc_feature (382)..(382): n is a, c, g, or t
gccgggcccgcaaattacaacccccgggtaacaaaaaccgaggtgggaaaacaaatggaaactggcctgaaatgaaacgggcccgccttcctgctcccagctgcatccacagtgatggccaagctgcatcagaccgcactctcccggacgcccatatagctttaagatcgggggagggtaaataatgcaaaaattgcacagtggaagaaggggtctcacaaaaagcaatccatcctgtagtataggtaatggagttgggggaagcagccttccattctggatgtttggaaccctttagctttgttttggaatggcccaccattctcactggaaaacagtggtctgctgtgaaaggccagctctcggcagcccctgtggtttncagctgccgctctgtgtcattcaggttgtgcacattgtttttcttctgacttccagaaataaaagtgtttccatgggaaaaaaaa

SEQ ID NO: 348010 - DNA, 1218 bp, Homo Sapiens
ggatcatttccttcactatctagaaaaacgctattctactttggaagagaatagtagttattttcaagtctcctgacagtcactgggagtacaaggtttgctaatgtgctctctggacgttattaatggccagtattagttgctgctgtattactgactcgcttagctgtagaaagggtaatactctcctgattttgtatgattggactcttaagtagctgctgttagtcagaattaaaacccatctcagactaagaatataatgaataagattaataggccaaaatatgtatctaatcacattgataaaaattaatataactgacacaataaaacacatttcccccatctgtacaataaatacagcttcaaattcagtggagtctgtagggcagataactttaatcatcactactgtagtcagtataagaaatgctgaaaaaaatccaggagggcttgtctctttgtgggtggtcactgtgatgttgggccagctcctgttcaggtccagagctgctaacgtgggttctactcagtcccagtgacttggccagaatagagctttgccaggtaactgccctgtgctaggtgaaaggggaaaagcagtagctggatatatttcaaatgaggttttgaacaagttcagaaagtggaacttgattgaaaagtgaacaagtgtagtagtgtgtgagaaaattcagatggtgtcggatgcagaagttaatattccacttaatgttatctgagcattaaaaatcatcagcatttaactgagaccccactatagagtttccttatcaagactttttggttttaaagttgtttttaatgcattgcaagttacaatagctattttgcttttagatttttcccagcactttgtatttattagctttcattaacttgcctccagtatacattccacttcgtgcttttcttaggtcatttctacatcccttattccttgttttcctgcagtgtaatggccctgaatgtcctctgagccttcagctccattatggacccaaactagactatacttggataagttaagctcttcttcgtgtactggtctataattagaaaaactgttttaaattagatgttcccattatttatttaaacagctttttgctgagaaagcttagtggattaatgaggcagagggtgttttgaaatccaataaatagttcccacaggctgggtgtggtggcttat

SEQ ID NO: 348011 - DNA, 973 bp, Homo Sapiens
  misc_feature (615)..(615): n is a, c, g, or t
  misc_feature (619)..(619): n is a, c, g, or t
  misc_feature (625)..(625): n is a, c, g, or t
  misc_feature (628)..(628): n is a, c, g, or t
  misc_feature (646)..(646): n is a, c, g, or t
  misc_feature (652)..(653): n is a, c, g, or t
  misc_feature (656)..(656): n is a, c, g, or t
  misc_feature (673)..(673): n is a, c, g, or t
  misc_feature (678)..(678): n is a, c, g, or t
  misc_feature (707)..(707): n is a, c, g, or t
  misc_feature (735)..(735): n is a, c, g, or t
  misc_feature (737)..(737): n is a, c, g, or t
  misc_feature (742)..(742): n is a, c, g, or t
  misc_feature (758)..(758): n is a, c, g, or t
  misc_feature (764)..(764): n is a, c, g, or t
  misc_feature (770)..(770): n is a, c, g, or t
  misc_feature (772)..(772): n is a, c, g, or t
  misc_feature (777)..(777): n is a, c, g, or t
  misc_feature (794)..(795): n is a, c, g, or t
  misc_feature (800)..(800): n is a, c, g, or t
  misc_feature (816)..(816): n is a, c, g, or t
  misc_feature (829)..(829): n is a, c, g, or t
  misc_feature (834)..(834): n is a, c, g, or t
  misc_feature (847)..(847): n is a, c, g, or t
  misc_feature (854)..(854): n is a, c, g, or t
  misc_feature (891)..(891): n is a, c, g, or t
  misc_feature (893)..(893): n is a, c, g, or t
  misc_feature (898)..(898): n is a, c, g, or t
  misc_feature (902)..(902): n is a, c, g, or t
  misc_feature (908)..(908): n is a, c, g, or t
  misc_feature (913)..(913): n is a, c, g, or t
  misc_feature (960)..(961): n is a, c, g, or t
  misc_feature (965)..(965): n is a, c, g, or t
atgtcattctgtgttcgggcttaatagctccaacgaatgatgacgtggaaaaatgactctcacgagtttacgctgggatcttagttccagtaacggaagaaaaggagaggtttctgtgctcaaaggaagccacaaaacatgactgaaattgagactcagcccgaagtgacaggaagttgaaaaagtcttaaagggaagaaggaataagccttgaaacacaaattctgtgacttgtcactgccacagacactggtttgtgagagccatgagttccttccgagggaggaatcaaactgctcccattccaaaatcccaatggcaccccagccaccaccagatgcaaaatctggaccgataacaaaatgcaaggcacatataccttttctctttcaaattaaggaggctttttggggattggaggttggataataacgtaactgtgtacctattacaggtacagaggatccaggcagactctcacgaggaccagtccacagctgtggccttgcttctgaggtggttccaagatgcccacgacggggcagagcagatcagaagagaaagaccatgagagagccaacccctagaggaccacttacgtttgacggaaaagangtanacaagnganggagggaagaaatgtggnactttnnttngctgagtcctcaggtcngcttngtacccatgtcccttgttcaatgtccctnacaagttaccacagttccacgtgaaatntngcagnacaggaaccagacctntacctnaaaggngntcatncctttgctggattctgnnttctngaaagttcttacgctnaccccaaatcaanatatntctccagcaactnttatttntttgcagtcagggcccatgaggaggcagggaggcctnangcagngcanacactnatctnattccagaaccccagacccccggtttctagagaggaggaggggccanntgancaagatgc

SEQ ID NO: 348012 - DNA, 463 bp, Homo Sapiens
tatatatggagagaatgatatttaagacaaaaagatgttctttctacctatttagattgtttaatcttcaattagcgtgtttggaaaagcacataagcatgatgatatgaggtgctgaagtaaacatgtagataaatataactaaactctaaaaatgccacctcctccacaaaaatcttcatcagcaccctagaaagaggtgtgattcttttcacttgcaatccattacatgttcaaacatgtaagcaatagtcacctaggctctgagcctcattcattgagtatgagggcaccattttaaaataaatttgggtggaacagagtcatagtccatacacttacagttcattcattgattaattcatgcattgaacaaatatctagtaagtgcataccctgagccaagtcctatcttagatgctaagaacactatagtgaacaaggtacagtccctgccctgata

SEQ ID NO: 348013 - DNA, 753 bp, Homo Sapiens
  misc_feature (22)..(22): n is a, c, g, or t
gataagacaccttaatcctganagagaaaattaagtactgtatataggtgtactttgcttctcacaatgattgtgcaaaaagtcacgtgtaaattgaacttttgtaaatcaaattgtattttaaatgcattaggggagctgccatttagaggaaacttgtgaattctttcataaagcagaaaaccattttataatacaaataaccattctctgatttatctcttttgtatgtttggattttcaatatcgactttgcttaaaacagagcccacctgcatagtaactgtgttatgccaaggctgcttgtgctaccagtttgcaggtggcgtaacggcttgtgcttgaaagtcttctgaagtctgatgtgaattgagctatcaagcaatgctatcatagcacagtagcagtcctgaacagtctgagcagccaacccatttcaacaaaattgaacacaggactcttctgctcagcagcatctcttttctcagatgtggccatgttacagtagagggtattccataagcacatattccataaagtgctcagagtcacaggttttataataaattatgttattatgtaaacgaattgcatgcatgttgaaattttttagcagtactttagcttgaaagtactcgtacaaatactgttagatttagttgcaaataattgttctcaagttattgcaataaatgtcaaatgaaacaagctcttgtgtaaatagacttctgtgcctaatagtgacattgtttc

SEQ ID NO: 348014 - DNA, 1056 bp, Homo Sapiens
atacatttcagcagtcctcactgcagcacaaatcaaagaagaaaaacaaaggtcctatagcaggcaagagcaaaagacgaatttcttgcaaagatcttggccgtggtgactgtgagggctggctttggaaaaagaaagatgcgaagagttacttttcacagaaatggaaaaaatattggtttgtcctaaaggatgcatccctttattggtatattaatgaggaggatgaaaaagcagaaggattcattagcctgcctgaatttaaaattgatagagccagtgaatgccgcaaaaaatatgcattcaaagcctgtcatcctaaaatcaaaagcttttattttgctgctgaacatcttgatgatatggaacaggtgggctttaacagaattaatatgctgactgcaggatatgcagaaagagagaggattaagcaggaacaagattactggagtgagagtgacaaggaagaagcagatactccatcaacaccaaaacaagatagccctccacccccatatgatacatacccacgacctccctcgatgagttgcgccagtccttatgtggaagcaaaacatagccgactttcctccacggagacttctcagtctcagtcttctcatgaggagtttcgccaggaagtaactgggagcagtgcagtgtctcccattcgcaagacagccagtcagcgccgctcctggcaggatttaattgagaaggccactgaacaagttcaggcttacactatcttcagactctgccccctggaggattcctgtccttcctcctgactccgcggcccatctcccccagaagcacaggcggcagtcctaccctgcccaactcagaaatgcccacctgccaggatcactatgggcccataccccttagctgagagtgagaggatgcaagtgctaaatggaaatgggggcaagcctcgaagttttactctgcctcgagatagcgggttcaaccattgctgtctgaatgctcccagtagtgcctgtgacccacaggatgacgtgcaacccccagaggtggaggaagaagaaggag

SEQ ID NO: 348015 - DNA, 873 bp, Homo Sapiens
  misc_feature (66)..(66): n is a, c, g, or t
cgcctcccccctgcggcggccccgaggacgtggccctggcgccctgcaccgccgccgccgcctgcnaacgggcccctccccggtctacgtcaaggtcaagagcgcggagccggctgactgcgccgaggggccggtgcagtgcaagaacggcctcttggtctccagcccacactgtgaagagccttgtgcccacagctgtgcacatcctgggcttcctccacaccttgtccataaactgcccctcagctaccttcagacccaggatacagacgcagcctccagaagaataaatgctccattagcagctggctggagctggctgaggctctggctggtgactctggcctctggtgtagacttccctcaggtgagtccatggatgagagctctaccttctcctgactgcccaggcctcaggacaacaggagaacagatgcaaaaactattgctcaaggaaaataaagtgaaaacgaggaaaagcaaaagaagatctggagagggctctcacctgaccacaagcatcctggagcaatgagtttcaggcaggaagactcatcctgagctgagctgcttttcttgaagttgtgcaagaacgtcctgttggctggggcaaattcagtatttcttttcctggccactgtgctggagcgtgaggaaagactctccaccctcactcccagatcctgcaggaggcgtgagagcggatggagatggtgaggatgtctattaatatggtgtttcctgcaaaacggtgcccatctcaaccatgggttgtcaaccatcctcggtgtctacaactgcaatttacctttgagggccatgaactctgattactgaaagtccttaggccagaaagagaaacccggtccccac

SEQ ID NO: 348016 - DNA, 1915 bp, Homo Sapiens
  misc_feature (1238)..(1238): n is a, c, g, or t
  misc_feature (1302)..(1302): n is a, c, g, or t
  misc_feature (1319)..(1319): n is a, c, g, or t
  misc_feature (1321)..(1321): n is a, c, g, or t
  misc_feature (1377)..(1377): n is a, c, g, or t
  misc_feature (1461)..(1461): n is a, c, g, or t
  misc_feature (1467)..(1467): n is a, c, g, or t
  misc_feature (1471)..(1471): n is a, c, g, or t
  misc_feature (1476)..(1476): n is a, c, g, or t
  misc_feature (1492)..(1492): n is a, c, g, or t
  misc_feature (1516)..(1516): n is a, c, g, or t
  misc_feature (1595)..(1595): n is a, c, g, or t
  misc_feature (1651)..(1651): n is a, c, g, or t
  misc_feature (1744)..(1744): n is a, c, g, or t
  misc_feature (1793)..(1793): n is a, c, g, or t
  misc_feature (1795)..(1795): n is a, c, g, or t
  misc_feature (1875)..(1876): n is a, c, g, or t
  misc_feature (1902)..(1903): n is a, c, g, or t
  misc_feature (1911)..(1911): n is a, c, g, or t
cggcggccccgaggacgtggccctggcgccctgcaccgccgccgccgcctgcgaagcgggcccctccccggtctacgtcaaggtcaagagcgcggagccggctgactgcgccgaggggccggtgcagtgcaagaacggcctcttggtgagaacagatgcaaaaactattgctcaaggaaaataaagtgaaaacgaggaaaagcaaaagaagatctggagagggctctcacctgaccacaagcatcctggagcaatgagtttcaggcaggaagactcatcctgagctgagctgcttttcttgaagttgtgcaagaacgtcctgttggctggggcaaattcagtatttcttttcctggccactgtgctggagcgtgaggaaagactctccaccctcactcccagatcctgcaggaggcgtgagagcggatggagatggtgaggatgtctattaatatggtgtttcctgcaaaacggtgcccatctcaaccatgggttgtcaaccatcctcggtgtctacaactgcaatttacctttgagggcccatgaactctgattacctgaaagtccttaggccagaaagagaaacccctgtcccccacctctcactttcacctatttctagaccttttcttacagcaatgccttggccctcaggaagcatcagatctcaaactgcagggtctggggctgaagctgatgctggcatgggtgactcagagttcctctattagttcaaatatgtaatatcttttagagcctaggactcaggctggaggcaattccttggtgccagttggttaatactttatgaatagtggtacgggaagggaatgccttggactattaatgtccccatgaatctggatcctggagaacttccagtgtcctggatggaatgttctgcttggctcatcttgcccagagaagagccaggatatgagaagatgggagagggaaggggaggtgtgaaacgtgctggtgcttcctgtcctcatggtgtgatggctgcccaggctgctccttcgaggcaggacaggattcccatgggagatatgaggaccatggtgatttccaggcaccagttatgtcccagagcatcgtgtgcctgtgcagtggggttactgatagtccaggcatcagttcatattgtcctttatggcagatcctgcacaagggggttctctgtctctggacccactctgtcagcatggacatcctttttctttttccctggtaancacatcagaaagaaagttacccctccagtgtttggagtcttggaatccttggcctgcctgcagncctctgaatcctcagtntnttagcccaaggtcaccttaggtaaaggaacatttctcctggtcttccaacaccctngaaagggaggctcttcaagaataggaaattcttcctagtatctaaccttggcctgcaactatgccatacatttaattgtagaangtatgnaaanttagnactgtggtggacccanttaaatcactggacagaagccatnaggcagagccagaaccagcttctggactccctgcatggagctttctactatcccaggttgttgggtcccttctcagtgnccaaagatgctattttatgagccttgaggacatgacactaagtgaaaaaagcctgnccaaagggccacatagtgtatagttctatttatatgaaatgtccaggaaagacaaaagcatagaggcagaaagcagactagtgctgtgggagnaatgggggatttgggaggtgatggctaaggggttatggggttttggggnangtaatagaaatgttttaaaattggttgtgaaggtggatgcccaactctgcgaatacactaaaaggcatcgaattgtatgnntttaaatagtgaattgtatgatatannaattaatntcaa

SEQ ID NO: 348017 - DNA, 774 bp, Homo Sapiens
  misc_feature (602)..(625): n is a, c, g, or t
agctggggaatactgattgacattgtctcagaaatacattttctgtcctttaaaaattctgaaataatatcaaatttttctcccctcagaagcctacgccaaataagtgctgtaatcttagtacaactttgtagtacagtcagactcatttgttgatgtctgactggctgagtttttaaaacctattattcccccttccgccccatatctggacatgccagtaagaaagctcaaatgcttccacctttgtgcctggtggaagttcaaaccacctaagaatcctcactgcagccctacctccaagccactaggaaaagccaggctcctctactttccctgctcaagccatttctggacctgcttgagaactcgctgctctctgtaaaagcctcgtgtgagtgataaaccttttcatatctatttggtcctaatgtaacatcagtcctaacacctaaaccaagttttgggtaaggggttcaacctctcctctgtgggatgactaaacactttatgcaacaagcagagggtctaggagatgaccactaccactgcagggctctcctcttgctttagtttgctaactgactcttgctggctagaannnnnnnnnnnnnnnnnnnnnnnngtcactgctggcaagctcatgctttgtgctgtgctgctttgtactgcgttcactgagccttaccaagcttctgttatagatgtgctcagctaagttggaatttttgataattggcatttaagaacaagaataaagtggcatttaagaac

SEQ ID NO: 348018 - DNA, 471 bp, Homo Sapiens
ctgttctcgaattttccaagcaattactggcctaatacaacactacatgaaacttcatgaaatgactcctgaagaaattgaaagtatgactgcttcagtggatgttgggaagtttccatgagaccagttagagtgtaaatcttcatttactacatatttgaactatgttgttcatctagaggcagaccacgggattggactaagggcaagtaaaacagaagaagatggtgtatacaaatgtgattgtgaaggctgtgaccgtatatatgcaacccggtcgaatctcctccgacacatttttaataagcataatgacaaacataaggctcatttgattcgtccaagaagattaacaccaggccaggaaaatatgtcaagcaaggcaaaccaagaaaaatcaaagtctaaacatcgggggaccaagcacagcagatgtggaaaggaaggaataaaaatgcccaagaccaaacg

SEQ ID NO: 348019 - DNA, 614 bp, Homo Sapiens
cattggtcagtgtcagaactaggattggaatttagattgttaatctcttgccacaagataggaaaatggagcaagatgaggagaaaaaagcatttaatgggagagaacacccttgtctgaggtcagggacctgggaagcaagcacgactttgccactgtcactgtgtgttacttggacagtgccttattttcccatctgtgaaataaaagagctggataagaaccttagttttgagatcctgtctcccttaaaagctgaagacaaaggtaactgatccaagggcagacaagggatggtaccatcatctccagcttggactcccactgctgacaaaatttgtcccttcaaagttgagatagctaccatggggaagagcacttagttctatactgaatggctccaggcattttcatgaaagctctttcagctttggggaagaatattcatccatatctttaccccatcatattagtgtctaagccctgcaatcaggcatgtcagccacgtgatggaatgggagggctgcagggcagcactgtccagtagaaacgaaatgcaagccacatatgtcattttaagttttctttttttgagatggagtttcactccatca

SEQ ID NO: 348020 - DNA, 1679 bp, Homo Sapiens
ttcagttgggcatattttcccacgtgaaaatattgttcccccaagtagccatgctagaatttcttccagccaggtacaccacacaaatggtgacacagctaaatgtgtggtcagtgtgtgccacgttttctgcactatacccaggtttgatggcttgatgttaacttctgaaaatgtagctacagtgttcttcattataaacagaaacagaaaagaattactcctaataattcctgtatcaaactgtaactttatgaatataaatttagaaatgaacagatggcaagcatgaatattttcccgaagcgttctagtgcaaaatgcattagcactactgacattttcttcctatgccctgctcccagattaaaaacttaacacttacatgctcaccactagcagaaagggatttccagggaccagaatctcagagaaaaggagggttcattcaaacataactggtgctgaatccttgcagctgaaaattatcttgcaagtatatatgctggcccttcctttaaaatgaacttgcagtttattaaaagcgatcaaagagctctggaaccttattttccaagaacccagaatatggcacacattttaaatttgggacagacttctagcggacagttacttctcaagaattttcctatacaaaagctgtgcccaggcatatattttctcacccaggacacatggggcagcggacccctggtgtcagtaagaacacacccagaatgatataaccggatatttttcagtttctaaattaaggcatattcaaaaaattccatgtacaagtttacaccacttttctaagttactcaccaggtaattaaagcagattcacagatgaattactctcagtttaactatatgcaacaaccatgccaataacttttcttctaaattttgcataataatggttaaaaaaagtggtagtttaactatcatgttcacaattgtcatttttcaaggcagtagaagaccaagacattttaaaatgatataaaatttaagctttataataaacaccagaggaagtcacctttcctcccactccccacccccatttcacctcttcaatttcaagaaagactgcccaagaaacacaagcttacacgctacattcaggaccatgataaatgtaggcaattatgaaataagttgaactttgcttcttggtgaagccatattaatttctttttaaagtaaatttgactttcattgcagttccaattcatgcttttagtgatatacaacaatttccaaaatgttaaagtaatttcagtcaattaagccttcaatggcaatgcttataaattatatttattagtatggtcaagataagaaaggagtttgggctttgattataaaatgcagcatctttctctgattctcttggctaaacttttcctcttcttttttccattcttttctttgctgtcttccatctttctcgctcgaatttctctcattaaatcaaaaaataccttgtcaacattagctcgtgttttagcagatgtttccacgtagttaacattccactgctcagctctgttttttgcctcttctacagaaacctgtcttttatcttctaaatctgatttgttaccaaccagtagaaatggaacattctcatcttcttttactcttaaaatctgctccctgaagtcagc

SEQ ID NO: 348021 - DNA, 1170 bp, Homo Sapiens
  misc_feature (96)..(134): n is a, c, g, or t
  misc_feature (857)..(906): n is a, c, g, or t
  misc_feature (982)..(982): n is a, c, g, or t
ggggccccgctccccagcgccccggaagtgatctgtggcggctgctgcagagccgccaggaggagggtggatctccccagagcaaagcgtcggagnnnnnnnnnnnnnnnnnnnnnnnnnnnnnnnnnnnnnnnagccgcccaggctcccccgccacccgtcagactcctccttcgaccgctcccggcgcggggccttccaggcgacaaggaccgagtaccctccggccggagccacgcagccgcggcttccggagccctcggggcggcggactggctcgcggtgcagattcttcttaatcctttggtgaaaactgagacacaaaatggctgcaaataagcccaagggtcagaattctttggctttacacaaagtcatcatggtgggcagtggtggcgtgggcaagtcagctctgactctacagttcatgtacgatgagtttgtggaggactatgagcctaccaaagcagacagctatcggaagaaggtagtgctagatggggaggaagtccagatcgatatcttagatacagctgggcaggaggactacgctgcaattagagacaactacttccgaagtggggaggggttcctctgtgttttctctattacagaaatggaatcctttgcagctacagctgacttcagggagcagattttaagagtaaaagaagatgagaatgttccatttctactggttggtaacaaatcagatttagaagataaaagacaggtttctgtagaagaggcaaaaaacagagctgagcagtggaatgttaactacgtggaaacatctgctaaaacacgagctaatgttgacaaggtattttttgatttaatgagagaaattcgagcgnnnnnnnnnnnnnnnnnnnnnnnnnnnnnnnnnnnnnnnnnnnnnnnnnntttagccaagagaatcagagaaagatgctgcattttataatcaaagcccaaactcctttcttatcttgaccatacntaataatataatttataagcattggcattggaggcttaattgactgaaattactttaacatttttggaaattgttgtatatcactaaaagcatgaaattgggaactgcaatgaaagtcaaattttacttttaaaaaagaaaattaattatgggctttcacccaagaaagcaaaagttcaaactttatt

SEQ ID NO: 348022 - DNA, 649 bp, Homo Sapiens
  misc_feature (127)..(138): n is a, c, g, or t
  misc_feature (180)..(193): n is a, c, g, or t
tggaccggtccggaattcccgggatcacacattaggctgtgtcaccattgtgtggtgtacctgctggaagaattctagcatgctacttggggacataatttcagtgggaaatatgccactgaccgannnnnnnnnnnncctctttgcagtggggctaggacagttgattcaacaaagtannnnnnnnnnnnnnctcagtcctaatttgaacaggtcaaagatgtgttcaggcattccaggtaacaggtgtgtatgtaaagttaaaaataggctttttaggaactcactctttagatatttacatccagcttctcatgttaaatatttgtccttaaagggtttgagatgtacatctttcatttcgtatttctcataggctatgccatgtgcggaattcaagttaccaatgtaacactggccagcgggcccagcaatctccatgtgtacttattacagtcttatttaaccaggggtcctaaccactaacattgtgactttgctttgagacctttcctctcctgggtactgaggtgctatgaagccaactgacaaagatgcatcacgtgtcttaggctgatgccactacccgatttgtttatttgcaatttgagccatttaaagaccaataaacttccttttttaaaatgtt

SEQ ID NO: 348023 - DNA, 441 bp, Homo Sapiens
  misc_feature (373)..(373): n is a, c, g, or t
aagtgttccgggcaaccccgggtaacaggtgtgaaatgtaaaagttaaaaaataggccttttaaggaaactcaccctttagaatatttaacagccaagccttccccatgttaaatatttgtcccttaaagggtttgaagatgtacatctttcatttccgtatttcctcataggctatgcccatgtgcggaattcaagttaccaatgtaacacctggccagcgggcccagcaatctcccatgtgtacttattacaggccttatttaaccaggggtcctaaccactaacattgtgactttgctttgagacctttcctctcctgggtactgaggtgctatgaagccaactgacaaagatgcatcacgtgtcttagnctgatgccactacccgatttgtttatttgcaatttgagccatttaaagaccaataaacttcctttttt

SEQ ID NO: 348024 - DNA, 1163 bp, Homo Sapiens
  misc_feature (620)..(713): n is a, c, g, or t
  misc_feature (1089)..(1089): n is a, c, g, or t
  misc_feature (1117)..(1117): n is a, c, g, or t
tacataaatgtaattatacattttgtacacataaactgctggcgggaatgtcaaaaggtacaattaacttgaaaaagacttttagcagttccttaaaaatttaaatatacacttatcatatgatttagccatcccagtcctaggtatttgcccaagagaaatgaaagcttatgtccacataaagacttgtaaatgaatgctcatagcagctttacataatagcccaaaactggaaccaacaaatgtccatcaacaggtgaatggtataaacaaactgttatattctataccatgcagcactactcagcgataaaaaataatgaatgattgatacataaaacaacatggaagaacctcaaagaagccagggcatctgggtctggagatttcttttatcaggagattttaaattatgaatttaattctttaatggttataggatattcagattatttcatcttggttgagttttaatagtttgtggttttcaagaatcagattatttcttctaagttgtcatgtgtataagccgaaagttacagtatttcctcattatctttttaatgactgcctgatttatagtgatactcttcatttcattcttgataataatgatttgnnnnnnnnnnnnnnnnnnnnnnnnnnnnnnnnnnnnnnnnnnnnnnnnnnnnnnnnnnnnnnnnnnnnnnnnnnnnnnnnnnnnnnnnnnnnnncagtttcattgatttctgcttttggttatttcctttcttttgcctgcttcgggcttattttgctattctttttcttgtttcttgtggtgggaacttaggttattgtgctgagacctttcctcatttctaatatgctatcttcctaggtattccctgggatgtaggagacagctcttggagacacatggggttggctatctggcttttggagagactttgtctaccacaagaatagagtaaaagcagactctttcaggaagggaagaggacggctgcctctttcatctttataagtagggaaaattaattttccctgtcccttgcctatgcagtatttggccacttacatagccaaaatcccatgagttcttatcangttgctctgggggatatggacgagtgcnaaggtgggcaggtgcacttgtttaccctgagtaataagaaatctat

SEQ ID NO: 348025 - DNA, 1018 bp, Homo Sapiens
  misc_feature (66)..(89): n is a, c, g, or t
  misc_feature (809)..(846): n is a, c, g, or t
  misc_feature (923)..(963): n is a, c, g, or t
cccacaacccttatctggttctgaccagtgtgcgtgtaactttatgatctgaggggaaaaatggcnnnnnnnnnnnnnnnnnnnnnnnngataatgactggacatcagaagaggaaaaaaactcaaaacaaaagcgagagagactattgccatatgaactcaaaagctatcatggtgttcactctacatatcaggttatggtgtctctagaatctgttgtttgtttcctataagatgctttgctgaacacatagcaaaattcatgtgacggatgataaattgattcgaaaagctggtcccccaggatctaatttcagaatttaccacccaaacccggaacagatgggtttagggctggtgttatcagagctattggctttacgtaacaatattgttcctgtccattcacccagccaaattgtgttaaagaggaaagccccacaaactaaaacagcctttcctagggaagaggaaggggaggtgggctggatctgtgactgattgaaatgcatgcaaataaaaaagacaatattaaagtctgttatcaaaccagacagtaggggagttcaactcgtgatggaaccacaaaaggtcacacaagccaaccatgtcatgccagagtacaaaacacatagttctttccccgccccgaatgtgacaatggttttcatagtggtttaattttgtagcctgacatttatggataactctgtccttccatttgctcacttctctcttcacccatcttttttaaaaacaaataaatgaataaagctgctgtgacacacacacaaaaggaatttaatagnnnnnnnnnnnnnnnnnnnnnnnnnnnnnnnnnnnnnnttatcatggtatgtttgatgggatgactgacacaggaaatctgttaaagtcttaaaatggaatgagaatgttgtttnnnnnnnnnnnnnnnnnnnnnnnnnnnnnnnnnnnnnnnnntgtgaagaaagtgtgaattttagttttgtcacagttaactgtgtcaaagagaatt

SEQ ID NO: 348026 - DNA, 1161 bp, Homo Sapiens
  misc_feature (61)..(85): n is a, c, g, or t
  misc_feature (264)..(274): n is a, c, g, or t
  misc_feature (1086)..(1103): n is a, c, g, or t
tctttttaaaccaataaatgattatgctgctttaaaaacccacaaagggatttaatggttnnnnnnnnnnnnnnnnnnnnnnnnncagatttttttatcatgtatgtttgatggatgactgacacaggaaatctgtaaagtcttaaaatggaatgagaatgttgttttaaaagaaaatagcaaaacaacaaaaaagcaaaccttaaaatgtgaagaaagtgtgaattttagttttgtcacagttaactgtgtcaaagagaattnnnnnnnnnnncttcagattttgttcacatattttactacatttttgctggtataattccttagccacctatgtacatactgctttaagaaatgtttttttcctgtttatttctgtttggtttatattctggttgtctttttctttttgtaaagaggaaacaatgtacagaaaaacaataaactggttgtatggccatagctatccgaaaagcaagagacaaagcaagacaaatattcacacaaaaatgaagtgtgtcctctggagggtcatatatacaatttcttttgtacagatgaaaatcaatcagctgcttagatttagaaatctactcttgctggtctttgtaagttgcatgaatatttgactttgaaaaaatatcttaacgacatggggcaaaaagtgcaatctaaatggtagcctttactaatgtgtgtggaaagaggtgttcctcattatctaatatttcaatgtgttaagagtttaatttttttgttatcattaaaaaagacaggattataaagagatatcaaagcacgattttagataacctaaacggcccagcctatacgaagttgattatatctcgatgtctgtaaaagattgctgttcttggagtcttgaggtcttgtgaattgatttcctgctttctttcatttttttcaatttaagtaataatacatttgttatattcctttcagtgtaagtttctatttggacaattttatgggaacatgtgcattctctatgtgagcttctatcatattcctgttttattagcagaacctaaaggaatttatttaatgatgttgtgacattactgnnnnnnnnnnnnnnnnnncttagttcatatttgcattttcgttcaaggatatgcttagcaataaaatgttcttccc

SEQ ID NO: 348027 - DNA, 464 bp, Homo Sapiens
ctacaatcccctactcaccacacctagcataaacctacagtcccctacccatgttccctggagtaaccctacagtcccctagtcactacacctagtgtaactaaccatacagctccctatccatgacctctggcggaaccctacactcccctactcacaacccctagtgtaaccctacactctcctacccatgacccctggcggaaccctacaggcccctactcacgacccctacactctcctacccatgacccctggcggaaccctacagtcccctactcacgacccctacagtctcctacccatgacccctggcggaaccctacagtcccctactcacgacccctacactctcctacccatgacccctggcagaaccctacagtcccctactcacaacccctacagtctcctaaccatgacccccggcagaaccctacagtcccctactcacgaaccctaca

SEQ ID NO: 348028 - DNA, 1452 bp, Homo Sapiens
  misc_feature (117)..(175): n is a, c, g, or t
  misc_feature (196)..(436): n is a, c, g, or t
  misc_feature (1202)..(1276): n is a, c, g, or t
cccacgcgtccggaaacgagcgaagactttggaaacctcgcggtaacgcggtggtttcgggggccagccaaggccagtggagtgctgtggggtcccacctcgacccctcctcctccnnnnnnnnnnnnnnnnnnnnnnnnnnnnnnnnnnnnnnnnnnnnnnnnnnnnnnnnnnngacggagtcttggtctgtcgnnnnnnnnnnnnnnnnnnnnnnnnnnnnnnnnnnnnnnnnnnnnnnnnnnnnnnnnnnnnnnnnnnnnnnnnnnnnnnnnnnnnnnnnnnnnnnnnnnnnnnnnnnnnnnnnnnnnnnnnnnnnnnnnnnnnnnnnnnnnnnnnnnnnnnnnnnnnnnnnnnnnnnnnnnnnnnnnnnnnnnnnnnnnnnnnnnnnnnnnnnnnnnnnnnnnnnnnnnnnnnnnnnnnnnnnnnnnnnnnntgaggcaccgcgcccggcccctcctccctttcaatccctactcccagaagccgggattcgtggcaacccctagtttttagttccaaagcctcctgccggcaggaaccaaatccttctgtcctcccacccccaccccacttctggccagttggagtccagcccggtgcctggggcgcctttcagctccgcgctcagattttcctgttttcgttgttttcaaagacagcgacatttcgggtctggtgctaacacccccttcccagcctctgggaaaatcgagtgtgtgtgtcggggggtagggagggaatgcgttttctgtcgtctctctcctaacttaaagcgccgcaggaccgcgcgccccttggcggctgagcctgtggacttggtcgcgggccaatttcgttgtccgtgtgttgggctttccggaggtctgtgcgcccaacagcgccgctcccgcggctccacccgacccagaccctagctggaaagcgccggaggcggaggaagctgactgtggcctcccgggccgcggctctctggagggctcgcgccctagttcgcacaaagcctgctcgtgactgtgcgactgtgcgacgggatccggatggagccgagcccctccgtcctcgcgtctcggtcctcgcgtcgccccgccccacccgcccctgcttcggcgggaatcgtgtttgcccggcgtgtagtccctgacaagcgtgccctgtaggagaaaagtctgtgtcctgtgaagtgtgaccgtgtagtgtannnnnnnnnnnnnnnnnnnnnnnnnnnnnnnnnnnnnnnnnnnnnnnnnnnnnnnnnnnnnnnnnnnnnnnnnnnttcttttttccattttgaaagaaagcgtcggggttggggtggggggagtttcagtcctcgggatcagccctctccgcgaagcgcagcacaagcgcgggcctgggacggagtagccccccggagcccgtgcccttttctaaacgcgtctgtatgcagtcaataaaacaatcgatttg

SEQ ID NO: 348029 - DNA, 600 bp, Homo Sapiens
caggaaaaaaatatacatgcttactcaggctttcttaaaaataaatttttatagagatccttgagtaaagacattttgcttaatttcttttttcttattccccacttgtatatcccctaccagtaccgggatctgcacacatctttttgcagttacctcttcatagccatgaaccaaaacgttctatgaggagcatgcaagtaagtcaagcctcctattctgttagtacttattagaggaggagatggttttcattgcatagtgacattttcttagccttaacgttctgatagtagcttactactcacttctctttttcagttttcataataagtattcattttttttgccataatgcttcctgtaaagccaattttatatactaataaaacatgaactgcccactcttcatgcctgccaaacttggggcaattgatgctaaatggtatttttaaaataaatgtttttattctttactcttgactaaacttgtttattttcaactccaatgaagattgtggaagagtgttttgaaatgaagcatcgatttgtacttcatagagcaccagacacaatgtctcacccaatttggagtccata

SEQ ID NO: 348030 - DNA, 919 bp, Homo Sapiens
  misc_feature (49)..(98): n is a, c, g, or t
ggtagataccagagtttttgctatgttggcccagggctggcattgaagnnnnnnnnnnnnnnnnnnnnnnnnnnnnnnnnnnnnnnnnnnnnnnnnnnctgtaatccacgcagccatgagctgcagcacccagccctgactctttaatcagaagtgaatttgttacatgcatacagtggattactactcagcaataaatggaaaaacaaatacatacaataactagaagaaactcaaaaatattatgctgagcaaagattgccaaacacgaaagagtgcatactgtatgattccacttatctgaagttctaggagtaggcaaaacaaatctatagtaatagaactcagcagtgattgcttctggtgaagacagagggaataactgagaaagggcatgaagggacttaccttctggggtgacagaaatgttctacatcagaccaaaatatgggttacacttttgtatacgtttgtcaacactgatcgaactgaataattaatctgtacatttccctgtatataaattataccctaattttaaagagaatgctctttttctagttaattaaactttttattacttaaaaatgtgaactaatactaggtctctagaaagtacttagtattttgtaaaatatattaccattgctaacctatactgaatgcaacttaacttacccatggaaaaaatagctgaaaatcatacatatgagaaactatggactgaggtggaaataagcactggcaatgatattgatttttctagtacttttcaaggtaccagatctaaaaatgctttacaaaaaatatttttaaaagtcccgtgctacaattcacaggttttatctgctatgaagggaattgctactttcatttgatctcagcataccacatagtcaccaaaacacaggaatagaaa

SEQ ID NO: 348031 - DNA, 1262 bp, Homo Sapiens
  misc_feature (1161)..(1161): n is a, c, g, or t
  misc_feature (1188)..(1189): n is a, c, g, or t
  misc_feature (1228)..(1228): n is a, c, g, or t
  misc_feature (1242)..(1242): n is a, c, g, or t
  misc_feature (1249)..(1249): n is a, c, g, or t
ggggcacttggcttcaaagctggctcttggaaattgagcggagagcgacgcggttgttgtagctgccgctgcggccgccgcggaataataagccgggatctaccatacccattgactaactatggaagattataccaaaatagagaaaattggagaaggtacctatggagttgtgtataagggtagacacaaaactacaggtcaagtggtagccatgaaaaaaatcagactagaaagtgaagaggaaggggttcctagtactgcaattcgggaaatttctctattaaaggaacttcgtcatccaaatatagtcagtcttcaggatgtgcttatgcaggattccaggttatatctcatctttgagtttctttccatggatctgaagaaatacttggattctatccctcctggtcagtacatggattcttcacttgttaagagttatttataccaaatcctacaggggattgtgttttgtcactctagaagagttcttcacagagacttaaaacctcaaaatctcttgattgatgacaaaggaacaattaaactggctgattttggccttgccagagcttttggaatacctatcagagtatatacacatgaggtagtaacactctggtacagatctccagaagtattgctggggtcagctcgttactcaactccagttgacatttggagtataggcaccatatttgctgaactagcaactaagaaaccacttttccatgggggattcagaaattgatcaactcttcaggatttccagagctttgggcactcccaataatgaagtgtggccagaagtggaatctttacaggactataagaatacatttcccaaatggaaaccaggaagcctagcatcccatgtcaaaaacttggatgaaaatggcttggatttgctctcgaaaatgttaatctatgatccagccaaacgaatttctggcaaaatggcactgaatcatccatattttaatgatttggacaatcagattaagaagatgtagctttctgacaaaaagtttccatatgttatatcaacagatagttgtgtttttattgttaactcttggctatttttggcctatatatatttctttggtatcaaacttcagctgtacttcgtcttctaatttcaaaaatataacttanaaatgtaaatattctatatgaatttannatatattctgcaaaatgtgtgtaggtctcactggtaacnactatttgttactnatataanactattatattgg

SEQ ID NO: 348032 - DNA, 586 bp, Homo Sapiens
caactatgaatttcaactatttccgaggcagtcgttcagaatttgaatataattacactctttgggtgaaaattgtggtttttgctacataaaaaactaatggaaatgatctgcctgttcctgtagtttacagattatatgcttcagaactgacgatatatatttaggctgcttttctgtgtggcacatttaaatgaaaatgaactcggggtgagccaccatggttgctaggcaatagagcgggttgatagagcacggtattaaactgaacccacattggtgttttacttaacatctatttgcttagcacctttatcatctgtggtgtcatagaagggaaaggaggaggagacaggcagagtctggttatctgcagagactcaaacaagtaggagaaataatcatcccaaacaccaaagtgacatgagcattttcaaaaatttgaggttgcagcacagtcaactcatttaatgaagaacatgcaagacctgaagaaatgcataagcatagcagacatattcatggatgtggtagcaagaggaactaaagagattccccaggctgggttttgctctggtggttccag

SEQ ID NO: 348033 - DNA, 764 bp, Homo Sapiens
ggcttctgggggctgctggtggtattttcagttccttggtgtgtggatacttcgccccatctctgccttcacctgtgtcctccctgtgtgggtgctggtgtccaaaatttccccttttcgtagtgacaccagctgtgttggattggggcccaccctgctccagcatggcctaatcttaactaattacatttgcaaggatcttatgtccacaaaagtcacagtctgaggtgctgggggttaggacttcaatatataaattttgcggttacacaattcaatccatgacagaatccaaaggtttactctggttataaaaacagtacaataaaatattgtttatagccttccctgtaaggaataggagagctattttttattcttcccaagattgtatttgatgtaaacatattttctgtagaagccatggcccttcagttcatatagttagaaaatttccttatgggccactgcacccggccggaggtgcagcttttgctataggtgaggggtaattaacacatcaggaagccacataaaagcacagaagtaaatactgggaaatcctaagtaaactattacctactactaccagacaacaaaaagatactccatgataatctaccagtccgaaagaatcacagcatttgttaaaggtagaaaaggatatttctgaggtttaatgttgccgtcagagcttgaaaatgttcctgaagttcctgaaatagattttctgcctgaaaaaataaaccgtaagacaattgaat

SEQ ID NO: 348034 - DNA, 1274 bp, Homo Sapiens
  misc_feature (518)..(518): n is a, c, g, or t
cgagctcagtcccggccctcactgcacccaccaagtcaagcagagctgggtgggctgagaccagcatcccagctggactgagcctggggggaggggctggagccaaggagcccccctgggtgggggcatcaggagcaggggcagggcctgaggactgctccccctgcatggagggcaggccaggatggagcccagggtagactttgaggaaggctcagtgggctcagcagaaggaaggctcttctcatagttgtggtttttcacagatggatttgggtgatctgagtgtggtcaggccctgccgttggggaatgaatgccacacggggtttgtctgtaagctgcagtgtctgtgattctgtgtgaactgacagcagggagctgaaggacaggccccggccttgagagaggacacgggcatgggctgctggatgcagggctcccagggctgtgaaggcagaggggtctctggaggcagacagagtgggctgggggccagcagcagggggcagagcccangccagggcagctgcttcctgcacatagacattcctcctgcgcagggccaagtggccatgagcacagccccagacagacacggtggggagcttggagccctccgctcacctagaggagccctgggacacgcactggaaagtattctaggggcttcctgccttatccttctgtttgttcatacacttagtgaaagcagatcctgtactaggatgtgaggatatctgtcacctgcgtggtccattccataaacaccagattccatttcagttgccacacattttggggctagacttccctaaacaacatgccattgtgaaataatgcatatatttgtatttttaaatttccctgaaaatttaatctattctgttccatatgaagtctgtttcactaccttaaaaaatagatactccactagaggctgtgcttaattcaaatccatgtgtgtgcctgcattacatgtgtgaacacgtgtttctgtcgtgtgtgtcatgcacatctgtgtgttgcatagcataagccaaatgaaaatcatttgttcatgggattcatatgaggaacaaaattaaatttgaatacagtcagataactgccacgcagggcatttggggaaccatccccgaatgccctgatgtgatttccctcagaaaatccttgttattagaggagaaggtctgggcaggggcagcagcatctcagacatcaagtcaactttatcatctactacatcagcactgaagtccaggggcattgagc

SEQ ID NO: 348035 - DNA, 841 bp, Homo Sapiens
  misc_feature (385)..(385): n is a, c, g, or t
tttgcctccttccttccttatccaagcaagggtgtggtgacaatgacctgatcggggtttaacgccggctctgtctgctcaccagacctggggtgctgagctctgaccagcctgggcagcccaacccacaggaactgcggtttcatagctgggtcttcaggaaggggtggaggctttgggagtggcagctccccgcctcccaccaccccaagccaggagaatggggcaaaatttgtatgcatggcttatctctaaattactaatctgcttcggaccagactcatctctacagtatagagttagagttattgcttctatgacaggtgttccagaagccctgggtggctttaaagtttgggaaacacgggttggcaacttgggttgntgggtctgtaggggcgtcctcttgcaggatacagacaccccgcaggcatggaccacccgggccggcatggtcccttgcaagcaactggaagcattccggggctgtgttctactctacggcatcaggcatgaaaggcatgcaagggtcgcgaggggagcacacagggtcatttccaaagggccacagcatggccaagcaagggctgaggtgggtgtggggcttgtcttcatttttccagtgcgtgtcccagggctcctctaggtgagcggagggctccaagctccccaccgtgtctgtctggggctgtgctcatgggcacttggccctgcgcaggaggaatgtctatgtgcaggaagcagctgccctggctggggctctgccccctgctgctggcccccagcccaccctgtctgcctccagagacccctctgccttcacagccctgggagccatgca

SEQ ID NO: 348036 - DNA, 896 bp, Homo Sapiens
  misc_feature (48)..(48): n is a, c, g, or t
  misc_feature (548)..(778): n is a, c, g, or t
  misc_feature (801)..(814): n is a, c, g, or t
aaagctccttccccacgccttagaaccatgtccttccagaaaccttanaatgtgaaaaatcctacacactgggaagaatgcctgtgaagccccccaaggttttgattggagtttgccttggaaatccctcttgacttcatgccacattgacgtgaactttgatgtataataagcagcagcaacttcatgtgaaaatatggtcaggtagttatatgtaaggttacgtggtccagtaatgtcttagattgataaattaggtatggaatccatcagtgttacgtgatgagaataggtgaacacaccttgtcagtgatgatgtaaacttctctccttggcaggacatgggcaaacatgctgattggtgcaaatgtggtgccgagctgtccatagctgcagtgaaagatgaagagcaagaccttctctaggttttctagctttcattaaatgtatttttttccccagagctaatttgaaagttgattggaccactgtggatggggtctcattaagaatgtgggaaataggggccgagtgcggtggctcacacnnnnnnnnnnnnnnnnnnnnnnnnnnnnnnnnnnnnnnnnnnnnnnnnnnnnnnnnnnnnnnnnnnnnnnnnnnnnnnnnnnnnnnnnnnnnnnnnnnnnnnnnnnnnnnnnnnnnnnnnnnnnnnnnnnnnnnnnnnnnnnnnnnnnnnnnnnnnnnnnnnnnnnnnnnnnnnnnnnnnnnnnnnnnnnnnnnnnnnnnnnnnnnnnnnnnnnnnnnnnnnnnnnnnnnnagacagagcgagaccctgtctcnnnnnnnnnnnnnngaacgtgggaaatatgaacctttgaaagttaatctgtgaattgaaagtttaacaataaaagtagttgtttgtttcctttgga

SEQ ID NO: 348037 - DNA, 1139 bp, Homo Sapiens
  misc_feature (1014)..(1022): n is a, c, g, or t
gagcactgaaaaaacacctttaatttgtcatcattaacactatagaaccaatgaatgtacttgtatgtcaaacacagcaatgagatattaacagctttaaaacttgttgaaatcggttcataatataaaaacatttaagcacgaagtggttgattttaagttacttttctgaggcattagacagttcgaagtcattttgggtacattttatcatgtcctcaaataaggcaggcatattaattgttgcacacactttaaaaaaggatgaaaactattaaatttatgttctcatctattagaaacaatctttactaggtaattaaacttttcaagtaattaaaatataatgtgaaattttaagattttaatctaaaagtcagcaaaaccttaacatctcctgtatttcacagtgttggccacatcttagctggattaaaataattgttcaaactgtagggctaaaccctacagaggaagcggagtgctaaaaattataccattggactgagagaagaaattctttcacaccaagtccttctcttcttgttaaagcagaaaactaaaaggataattttagccccacttagcctttcagaagaaaaaggctgcagagcacaaaggtttcgtttcctgatgacaataaaaaaattctctccctagaagggcctaactccaggaaagctcagaatagatcattctggaaaggattaacaacaacctttctccacagagagatttaaaaagcaaaacttaagtgtgttatatctaaattacaatgccacacagtacacattatgtgtttaaaaagtaaagtcaatcccagtgataacagttggaaattccattgaaaatgggaccttcacacctacacttaaaagagctgcccatcattgttttggttttaacagtctcttctgaaatcagagacttgtgtaaactctcacaattagctggcaaaaggattttcagcagtaatgcggattcagtactttatagatttttatgcagagttgnnnnnnnnnctggtcccgaaatgaaaacagggagagaacaatttgcattccccaaactacatggtacatcatggcattcaggttctgaatttgaaatcggctttggagtgtgtgtggaacttcctt

SEQ ID NO: 348038 - DNA, 848 bp, Homo Sapiens
  misc_feature (637)..(688): n is a, c, g, or t
  misc_feature (734)..(766): n is a, c, g, or t
ctctctccacactgggccttctgggtataattgtataattggatgcactgggtccctctgaattccctacctggacatacctactttcttggctggtggtctcagggcagtgacggtagctccctccacaaggagcaaggaacggctttccttgtgagcttgtgttggatgagagtctgataaccgagccagcaacgctgaagtcagtggtgggctgctcacctgaggggccctcccccagcatccagtgaggaattaatcgcactcctgggcaaaggatctgggtgttggtctccaaagcgctgcagggatcctccggccatgcggctggtgagaggcaccctcctcacagaaatgacagccgccaaaaggtttaaatgttgctttaagagccttgcagctgttgtgactcattcctcaatccggtgggatgcaaaggatctatccatagagaccagtggcttgaggtttgaggaaaaggggaaggggtgggacactttgttcccactcccctgagacctgcagaagcccctgagctacgtgagcctgtaaccaccccccaccagtgtgcctgggcactctgaacaccctgcctgtcaacatgctgggaccgcctccttccaactaaattgccacnnnnnnnnnnnnnnnnnnnnnnnnnnnnnnnnnnnnnnnnnnnnnnnnnnnnacattaaaggtaactaaatagactgtgtatttatgcgtgtgagtgnnnnnnnnnnnnnnnnnnnnnnnnnnnnnnnnngcagataggctattttaacgcaaatatataataaattgtacatgtatatgtacatatgcagctaaacggaaggtccctaatc

SEQ ID NO: 348039 - DNA, 2939 bp, Homo Sapiens
  misc_feature (110)..(110): n is a, c, g, or t
  misc_feature (525)..(583): n is a, c, g, or t
tacttggtctacgatgtcgttgctcactctgttattctatgtatctctgatctatatctctgttctagcttcgtgtgctttcgttttgtctgcgtacgtgtgtatgactntgttaaatgagcagacgccgggaaaaaagtatcacaaatcactcccgtggccaaatttttttcccccaccgacattatttgcctcgtgtgggtcaccaccttagtacatcgctcatggttttgaattgttcgccctcagggccgcttatacatctctcgtttggggaggtggtggttcccgacagcctgtcccagcccaccccggagggtggggttcttttcccaaagtggcttcctcgggccaacgtgtgtcccgcaccagggccgttgtttaaagtccctccggccgtgctgcctgcctttttattatcgcctctcctatggggccgccctgtttaccacaaaacgggggttcgggcatcatatcttgtggggcccctccggggggtaatttttttgtcgcgccgcccccccnnnnnnnnnnnnnnnnnnnnnnnnnnnnnnnnnnnnnnnnnnnnnnnnnnnnnnnnnnnaggagcagcggcccatgcatggaatttattgtgtgctactgtttataaaatactcgaatagtcctgcacatgcataatatttccaacttagacaggagaccatacagggtgcactttctggcaaacaaaacaatagatggttccgctgcctggagctctgagttgtattccagggcatgagggaagcaggccaccaaagtaaagggaaataccaaactacagtggcaatcaatacaggtcaataattgtgaaaaattagcacatggttccatttagtttaaccaagcagttcagtaactatcaaaagaaaggtttcaacatgcagtcttgacttttatgcttccactaacatctgaatgattgaacagaaccattgcttctaggctgcattgcttaatcaaaaacacttccagaacattttaaaatttcctttgcattaaaacataaaaatgatagaaagccagcagcaaatcaccctggtggctctctaagcaacttgagtactcacaataaactaaaatttctcataacatctaggtaacctatacatgtcgtacctgtacatcataggtctatatattaaatatttgcaaaatgaaaacatgcatacacaaaatacgtcaagttttacagacatgatttgaattaaaatttactttgacaatgtacaaacttcttttaaagtaccttaaatgagtaattctgtaattcttcataattttgaaatttagaggttttcttcttaaatctctggggtgtaagtcttaaaagatctgggcaaaaaagactctaaattagtttttggatttgtgttcaagtaagagagcctgcctggaaataggatatgcattcataattaaaaaataccaagactatgttacagaattagccacatttaagaactatagacctgaggtcaacattttgtataaatgccaactgggtttctcggcattttgctcacaattcaaaatacagctagtaacctcagaaatgtattttaagaccatgctaattcatcctttaaagacatttcatggaaaaagaaaagtccacattagctcttaggattgcatttgaaatcatgattgaaaaacaaaatctaattctactgaaggggaaaagaaatctgatttgtaaacttaaatgtgtgaaccacaagcataaaatggaggtgtggatgccctccactggaaattgccccaagccccttgctcactgctctccaccttggcagcgatgacccaatcttatcagatagcacatgtcccagggccctcaagcctccatccaggaagggggctagggtctcagaagcacaatggtttcttcagagagactgtgaaatttacagtcagcttggccgacccctccagctcctcgggtgatctgtccatttggggcccgagatgtgagagtccctgggaagtagtgggtcactgggcagtatggttgcccgtcccgtggttctcagtggcatgtgcggtgttcagagaattgaaaccatcttgctgtacagcatctttccgaggtggcattctctcattgatcctatccaaaccctttgcctcttcaaaactgcagattctatgtggtggagagaatcctcgtattgctttttcagcctcaatagcctcaactgtggcactttgcagggtctgccgtcctccagctaacactccactaggcaacatccctgtgggagtcaggcccttgagtgtcagcacactttcactctcctccctgagaacagagaagactcttgccatcttgccaattgctcgaattttgtttcttatgatttctttccgggctgcagctgaacctacatcaaactggtcttcaccttcagtcattagttcatcatcagagcaaatactcagaacatttaccaacatttctgtcactttttctccaacaaacggtaaagaccacgtgaagacatccataaaattaggcaaccagtaaggatgtggagaacagttaaactgtcgaatattcatcacattattttcatactttaatacagcagctttattattgtagacatctaagtaattaggtgccgaaaaaattgttattaatgaagggaaccctgtagtttgactttttctgtacattctatagcctgcatcttgagcttcatgagctctaataatcgataacaaattattgttttgcaaaaattcacacactgctggatagttataaaaataagaacatcctcgaactgtattgtgactaaaatgttcctgtgatttttcatttccaaaatcttcagaaggatcggaccataacaagtcacacattgtccaaatgcaggtggctctttgaatctatcatccgcaggaattcc

SEQ ID NO: 348040 - DNA, 2337 bp, Homo Sapiens
  misc_feature (42)..(78): n is a, c, g, or t
  misc_feature (2029)..(2029): n is a, c, g, or t
gcagacaataattggggaatggactttacgcggtggcggcgnnnnnnnnnnnnnnnnnnnnnnnnnnnnnnnnnnnnnatcaggccaaatcggccgagctcgaattcgtcgagagcggagctgtccctttccccccaacacatcgcttgacatctgaagaagtatttgatttggatgggatacccagggttgatgttctgaagaaccacttggtgaaagaaggtcgagtagatgaagaaattgcgcttagaattatcaatgagggtgctgccatccttcggagagagaaaaccatgatagaagtagaagctccaatcacagtgtgtggtgacatccatggccaattttttgatctgatgaaactttttgaagtaggaggatcacctgctaatacacgatacctttttcttggcgattatgtggacagaggttattttagtatagagtgtgtcttatatttatgggttctgaagattctatacccaagcacattatttcttctgagaggcaaccatgaatgcagacaccttactgaatattttacctttaagcaggaatgtaaaattaagtattcggaaagagtctatgaagcttgtatggaagcttttgatagtttgcctcttgctgcacttttaaaccaacagtttctttgtgttcatggtggactttcaccagaaatacacacactggatgatattaggagattagatagattcaaagagccacctgcatttggaccaatgtgtgacttgttatggtccgatccttctgaagattttggaaatgaaaaatcacaggaacattttagtcacaatacagttcgaggatgttcttatttttataactatccagcagtgtgtgaatttttgcaaaacaataatttgttatcgattattagagctcatgaagctcaagatgcaggctatagaatgtacagaaaaagtcaaactacagggttcccttcattaataacaattttttcggcacctaattacttagatgtctacaataataaagctgctgtattaaagtatgaaaataatgtgatgaatattcgacagtttaactgttctccacatccttactggttgcctaattttatggatgtcttcacgtggtctttaccgtttgttggagaaaaagtgacagaaatgttggtaaatgttctgagtatttgctctgatgatgaactaatgactgaaggtgaagaccagtttgatgtaggttcagctgcagcccggaaagaaatcataagaaacaaaattcgagcaattggcaagatggcaagagtcttctctgttctcagggaggagagtgaaagtgtgctgacactcaagggcctgactcccacagggatgttgcctagtggagtgttagctggaggacggcagaccctgcaaagtggtaatgatgttatgcaacttgctgtgcctcagatggactggggcacacctcactcttttgctaacaattcacataatgcatgcagggaattccttctgttttttagttcctgtctcagcagctgacctagacagggtactgtattagctagtgtctcattaatacctgatcagggcagaaaactgatagaatgggtattcctttcaattgaaaataatggtcagttcctcagcttttcatgaaatgatatgggagcagctcatatcataatgtctgaaatatttatttattcatctgtctaattcacccttttcttttaaaagccccagtttcagaatgtgaatcagggatattcctgttactaaaatggaaatgtaattccaagtttcttttttaattttttaaatttatgtcattgtattggactatgcttatatttaaaactacttaatttagagttaactacctgcttaggccccagaacatgacttatgcccttcagttaccaaaagatttgtgcaaggttttgtaccctggtaaatgatgccaaagtttgttctcctgtggtgtttgtcaaatgtcctatgtataattaactgtctgtaacatgctgtttccttcctcngcagatgtagctgctttcctaaatctgtctgtctttctttaggttagctgtatgtctgtaaaagtatgttcaattaaataactccatcagacacttgtctgtcttgcaatgtagaagcagctttgtagcaccttgttttgaggtttgctgcatttgttgctgcactttgtgcattctgaacatgaatgtaacattagatattaagtcattgttataaggggttgaatttaaatcctgtaagtcaaaattgaaagggtgttattaagtgtgcctttattttgcatgaaaataaaaagaattatacgcaa

SEQ ID NO: 348041 - DNA, 619 bp, Homo Sapiens
tgaatgtttatacagtgttgaccctgccacgtttgacgcttacaaaaaaaatgataagaaaaatacagaagagaagaagaacagcaaacagatgagcacctctgtaggagttggatgaaatgccagtgccggattctgaaagtgtattcattatccctggaagcgttcttctatggcgaatagccccacggcctccaaattctgcccagatgtataattttactagttttgcaatggttttgaatgaagtagacaaagacatggagagtgtgattcccaagacagactgcaggttacggcctgacatcagagccatggaaaatggagagatagatcaagctagtgaagaaaaaaaacgacttgaggaaaaacaaagagcagcccgcaaaaacaggtccaagtcagaagaggactggaagacgaggtggttccatcaaggtcctaatccctacaatggagcacaggactggatttactctggcagctactgggacagaaattacttcaatttgcctgacatttattaaaatgcatacaagtcagggtgtttggctaatctacaaataagtcttaaacctatgtttttaaatttttttcccttggtttctacttatctttt

SEQ ID NO: 348042 - DNA, 2626 bp, Homo Sapiens
  misc_feature (2104)..(2116): n is a, c, g, or t
ttttttttcactaagaaagccagtaactttactgaattgtctgcaaaatacaaattataccttatttccagcaggagaaacttttgaaaatttcccacttttattcactacagacagctgaattaagtcccttgagatacacagatgtggtttaacttagttataacatcttgtcatctagtggcgacaaagtccagcttatgccgctgtgagcctctatttgaatatttgttgcaaatgcttgtatgccctcatttacaagcgattttaattactctcatttaatggaaacaagtccccaggaaaagaaaaagaagaaaaatgatacagcaaaccatctgaagcaatccaagtcctatgcctacagtgacccaggtctactttgctcgaagagaacactggtactgcattcaaaccacaacagaatccgtcacttaactgacctctctgaattaaactgaggtatgaatcaatttgaggtatgaacagggaaggcaaaatgcaataccagattatgaaaataaccaaaatggaaaaatttgatgtagaagatatgtggcttggattgctccacatctttggttaaaacatattaagaaaagcctttaattacatctgtagtctgaagcattctaacagacaccagtattccagcaatcttcaaaagatctgtagtggcaggaaattaacgccataaaagtgacgacatcacggcagatggcacaaatgagaacagatgaagtatgccatgcttaggcaacagcctttattgagggttcaagtggcttcttcttctttaaaaaaaatgttttttaaagaaagaactacaaagcgtttactctctggagaaacaaacaacaaaataaagagggcaaaaaatgctatctctaagttaaaagatgggtatgtaagaaaaacaaatccataaaagtgtgtgagggcagacattcttttaaaaagtgtcttggaattttgttttttcattctcactttagttaacttttaaatgatctggggatgacaggtatttttatattcatcattacaaaatgctaaattccacctttgggaaaaaataagccattttactaaaaaacacaatttttaaaaaggttgaaataaacagcctccacgcagcaatgcatacaatatacaggttgtgcagcttgcgtatattgcatcactgttaccagtattcaagcttcatattaccaaaaatcttttaaaataggattagatataacaatactcgcagccgtgtaaaatgccacttatggatcttttacttgcaatgaagaatgttgcctaaaatgttactctaggacgggttatgtaaaataatactccctcagggctctgccctaaagtctggaatacaaaggatttactgtgattaaaaaccatactagctttgcaaatacaataaatggtaaattacagataaggtataagggtaaagatagaccaagattgtttacagaaagtgactcatcacaatcaaaattgtgcttcttctcattaaatcatcttttaaaaattctcagattatcccttccctatcttgccaccactttataagaattcagtagtgggaacaagagatgactggcatccattttcaagtgattctgttctcttcatgttcttataaaactattgtcagaactgctataaatagccaaggcttctgctggtactttagcttactttatcttcagcattaaaaattcactttttctttgttgctgaggcaaattgcaggttaaaaaactaatatggctatttcttcatattttcatgtaatgaccctttcccacccactggtatctactgatattgatatactaaagtattttgaaatgacaaagaacatttgtgaaatgtttgcatattttatacacatcaagttagaaggatgggttgtaaggatgggatcaagtctatggtgaggaaaatggttttcttattttattcccctgtgcgtgtgtgtgtatgagtgtgtatattttcagggatgtttttgtttttcctctgcataaatgttattctttcatgttccatggataccttgagtagtgggatatatatgaaatggttgatagannnnnnnnnnnnnaatatataaaacattagtacaaggcaggctagcatcctttatggatacaaccaaaggtgcattgtggtctaattgtggatttcagatcaagttaagaaaaatatagcctagttaataaggtctcttggcttctgccacccagcggcagccttttacaatgagaaacacatagcaactatgcaagtaaaagagaaaaaatggataagaaatgtcctacacatgatatagcagtgttgatattactgcctatatcttctttgctgtgtatgtcaatgcatatgattggagatgaatcgacagatcttcacattccaagagaaggaaaatctttcctagactgaaatatcttttaaacaatatatattgactttcttatggcactcacttattaaagggtctgaaaattaatcccttatagacgaatattagacaagagtcattttttttaaattaaaaaaagggacatagagaggttctttatgggatttcttgaaatggctattaaatctc

SEQ ID NO: 348043 - DNA, 629 bp, Homo Sapiens
ggggtggttcctggatctgactgcctgtgcacagctttggcactagttaggattcccaggaaaccagctcctgctagtcttgggagggggtaatcaacccttctggaatagggggtcgggtccctggggcaagggcttatggagtcactgggctagaggacactggtgtgaccgaggctatagagtttaaggtattgaggcgactggggagaaaggagttttagtcccttgggtgggagtactgggacgactgaggggccctgaggggatgtggtttggtttgaggtgagtggggtcagggtcttggagtgaaccgggaatggaagtatccgggcctgggtgtggggtgatacggctgtcaggggcctggagtcctagtttggagctttctggggtcttgatattggggttatctaaaagagagaaataggacatcctggagttggagtatgggcgtacaggaacctgaggtcatggtgtgactggggtgttgaggtctgccctggggatatggcagaaggtgagcgctccctgctctgccgcttgacctggccatgcccgcagagactgatgagtgcccgactgaacctagaacatctgtgccacggagagtgcgtccggccctccga

SEQ ID NO: 348044 - DNA, 1976 bp, Homo Sapiens
  misc_feature (1699)..(1717): n is a, c, g, or t
  misc_feature (1719)..(1791): n is a, c, g, or t
ggtgggggtcagcccaatatcaccaagttgattattaccaaacaaatgttgccctcttctattactatgtctcaaggagggatggttactgttatcccagccacagtggtgacctcccgggggctccaactaggccaaaccagtacagctactatccagcccagtcaacaagcccagattgtcactcggtcagtgttgcaggcagcagcagctgctgctgctgctgcttctatgcaactgcctccaccccgactacagccccctccattacaacagatgccacagcccccgactcagcagcaagttaccattctgcagcagcctcctccactccaggccatgcaacagcctccacctcagaaagttcgaatcaatttacagcaacagcctcctcctctgcagatcaagagtgtgcctctacccactttgaaaatgcagactaccttagtcccaccaactgtggaaagtagtcctgagcggcctatgaacaacagccctgaggcccatacagtggaggcaccttctcctgagactatctgtgagatgatcacagatgtagttcctgaggttgagtctccttctcagatggatgttgaattggtgagtgggtctcctgtggcactctcaccccagcctcgatgtgtgaggtctggttgtgagaaccctcccattgtgagtaaggactgggacaatgaatactgcagcaatgagtgtgtggtgaagcactgcagggatgtattcttggcctgggtagcctctagaaattcaaacacagtggtgtttgtgaaatagtccttcctgttctccaagccagtgaagagttatctgctgggaaagtgtccaagagcctgtttttgaaacacaagctgggcttctggtagtgcctcatcacaacccatgatggctgttcatgtttcaccccttttcttccttcagcagaggccaggctatggagcagggccactgaatttgctgtaatctggagatgctttttactttcaaccataagcggtaatagcagaggaaagggtgaagggagtctgggcaagcaaagcatagagatggtggggtggtggtggggttgaagaaacttgttggtataattgtcataggacttgcctaaaatattattaaaattacgggagtgtactcagctttgagcctaggagaaaatgccactgtgtgcatccattttaaagggttccctcataaaaaaatgttattccccattatcacatcaggacactgctttgaaaacaaaacttttcaacatgggcatactgggctacatggaaaatgacatcacccaggagggatttctctttatatatattatttctgcagtaaccatccttatctgagttatcacagttcatgaatctaagaggcggaactctacatcattagtaagaggttccaccaaagactaaagttgtattcacttgtgtttgatgaactatctttaaaagaccataggtctatcattatttcttagacataatctaaagaaaaacagactagagaagccacctggttgtaacagaataagcagaagtttacagcatgatagtccaagtggtgataactttaaataaaactcaaatttttactgtttgtagacaggaatgctgtcctagagaacctcctcctcaaccagctacgtacatagttttatcctatgcattcctgttttctgtgnnnnnnnnnnnnnnnnnnngnnnnnnnnnnnnnnnnnnnnnnnnnnnnnnnnnnnnnnnnnnnnnnnnnnnnnnnnnnnnnnnnnnnnnnnnngggattcaagcgattctactgcatcagcctcccgagtagctaggattacgggcgcccgccactacgcccagctaattgggggtttttttagatgagacagggttttcaccatgttagtccaggcttgatcttgaactactgaactctatgaaccccagccgcgttgacctaccaaagaggctggt

SEQ ID NO: 348045 - DNA, 1506 bp, Homo Sapiens
agcggagtgacggcagttccgagtccagtgggggcggtgggagcgatgagggtctgaggcggtgggagcggttgtgtgaagatggagtttcccggaggaaatgacaattacctgacgatcacagggccttcgcaccccttcctgtcaggggccgagacattccatacaccaagcttgggtgatgaggaatttgaaatcccacctatctccttggattctgatccctcattggctgtctcagatgtggttggccactttgatgacctggcagacccttcctcttcacaggatggcagtttttcagcccagtatggggtccagacattggacatgcctgtgggcatgacccatggcttgatggagcagggcggggggctcctgagtgggggcttgaccatggacttggaccactctataggaactcagtatagtgccaacccacctgttacaattgatgtaccaatgacagacatgacatctggcttgatggggcatagccagttgaccaccattgatcagtcagaactgagttcccagctgggtttgagcctagggggtggcaccatcctgccacctgcccagtcacctgaagatcgtctttcaaccaccccttcacctactagttcacttcacgaggatggtgttgaggatttccggaggcaacttcccagccagaagacagtcgtggtggaagcagggaaaaagcagaaggccccaaagaagagaaaaaagaaagatcctaatgaacctcagaaaccagtttcagcatatgctttatcctttcgtgatacacaggctgccatcaagggacagaatcctaatgccacttttggtgaaggtttccaaaaattgtggcctccatgtgggatagtcttggagaggagcaaaaacaggtatataagaggaaaactgaggctgccaagaaagttcgaatcaatttacagcaacagcctcctcctctgcagatcaagagtgtgcctctacccactttgaaaatgcagactaccttagtcccaccaactggggaaaagtattcttgagccggcctatgaacaacaggccctggaggccccatacattggaaggcaccctttctccctggagaactattctggtgagaatgaatcaccaggaatggtaagtttcctggaagggtttggagttccttcctctttcccccagaaaggggaacggctcggaaattttggttgaaagtgggggttcttcctgtgttggggaagctttcttaataccccaaagcccttcgaatagtggttgaaagggccctggggttggcgtaagaaaaccccctcctccattgtggtgaaagttagagggagtgggggggaaccaatggaaattaccttgcccgcccaatgtaaaattgtgtttgggtataaaagccaccttgtcaagggggaaggtaatgtccctgggcccccgggggcaaacacccttctcagagaatttttccaaactcacacatggggcgtttttttgtgtgaa

SEQ ID NO: 348046 - DNA, 880 bp, Homo Sapiens
caaaggtatttatggaattccactgagtggtaatggatgatgcagttcaaataactaaggacacatgttcaaagagcataattaactttttaaaagaagctaataagcatggattcctggatcattcttggtctgctcggcagtggtctgatatgtgtcagtgccaacaatgctaccacagttgcaccttctgtaggaattacaagattaattaactcatcaacggcagaaccaggtaaagaagaggccaaaacttcaaatacaacttcttcactaacttctctttctgtggcaccaacattcagcccaaatataactctgggacccacctatttaaccactgtcaattcttcagactctgacaatgggaccacaagaacagcaagcaccaattctataggcattacaatttcaccaaatggaacgtggcttccagataaccagttcacggatgccagaacagaaccctgggaggggaattccagcaccgcagcaaccactccagaaactttccctccttcagatgagacaccaattattgcggtgatggtggccctgtcctctctgctagtgatcgtgtttattatcatagttttgtacatgttaaggtttaagaaatacaagcaagctgggagccattccaattctttccgcttatccaacggccgcactgaggatgtggagccccagagtgtgccacttctggccagatccccaagcaccaacaggaaatacccacccctgcccgtggacaagctggaagaggaaattaaccggagaatggcagacgacaataagctcttcagggaggaattcaacgctctccctgcatgtcctatccaggccacctgtgaggctgcttccaaggaggaaaacaagg

SEQ ID NO: 348047 - DNA, 1281 bp, Homo Sapiens
  misc_feature (44)..(76): n is a, c, g, or t
  misc_feature (122)..(142): n is a, c, g, or t
ggggggttaaacttggggactgcgttacgcggtgcggcggcatnnnnnnnnnnnnnnnnnnnnnnnnnnnnnnnnnatcaggccaaatcggccgagctcgaattcgtcgagagcggagtgannnnnnnnnnnnnnnnnnnnntcggaccccggccgctgccgccatcactgtcgcccgcccagtcgcccctcagccgcttcccctcgccatggaggcgaggccgccgccgccgccgcggggctcggagcctgcgggccgggcggcggccctgagggctagtggctggcccgaaacgccgccgcggagccgaggcggagccgctgtcctcgtccccagcggtcccgcccaacgcccgactctgtgacacaactaaaaaaaaccaaaggtatttatggaattccactgagtggtaatggatgatgcagttcaaataactaaggacacatgttcaaagagcataattaactttttaaaagaagctaataagcatggattcctggttcattcttgttctgctcggcagtggtctgatatgtgtcagtgccaacaatgctaccacagttgcaccttctgtaggaattacaagattaattaactcatcaacggcagaaccagttaaagaagaggccaaaacttcaaatccaacttcttcactaacttctctttctgtggcaccaacattcagcccaaatataactctgggacccacctatttaaccactgtcaattcttcagactctgacaatgggaccacaagaacagcaagcaccaattctataggcattacaatttcaccaaatggaacgtggcttccagataaccagttcacggatgccagaacagaaccctgggaggggaattccagcaccgcagcaaccactccagaaactttccctccttcaggtaattctgactcgaaggacagaagagatgagacaccaattattgcggtgatggtggccctgtcctctctgctagtgatcgtgtctattatcatagttttgtacatgttaaggtttacagaaatacaagcaagctgggagccattccaattctttccgcttatccaacggccgcactgaggatgtggagccccagagtgtgccacttctggccagatccccaagcaccaacaggaaatacccacccctgcccgtggacaagctggaagaggaaattaaccggagaatggcagacgacaataagctcttcagggaggaattcaacgctctccctgcatgtcctatccaggccacctgtgaggctgcttccaaggagga

SEQ ID NO: 348048 - DNA, 2174 bp, Homo Sapiens
  misc_feature (944)..(1001): n is a, c, g, or t
ataaatgtatggcatcatttagggatgcctgagatggcagttcatgaagcacagaagataaagaagaagtctttcatctttactgctgagatccttgggaacactgttgtcatgggggctctgccaagaccctcatctctgggctacacggtgattcagattgagcaccaacttgtttcctcccctcaaagttctgcctaagccgttcagttctaacatggtctcagttaatctggtaaatggcatctttaccatcttagttctgacttctcagtttaatgtgggattaagagccaagaaaagcctagagagactggatatcacaattttttttaattttataaactgaagtagttccttgaatgtctgttgatgaaatagtcactgtttaaggaaaaaagtaattatgaggtgtagcagattgtcagaaaaacaggattagaaacacacttaaaaagaacacacatttagagtctctcttcctcctcagcgaaccactaggccccctttttaaaaacacctttagagcctaattactccaataaaagtaactagaggtttggagtctggttaaataaattctgagtaaaattcttaagccaaatggaaattcttaatgcaatcatgaggacttctattgtctcttactgttgtattagatcctataaattgaactgatttttccataaggaaaatgcttcttttgagattaattctaataacgtatttgctattgcagtgcagagcccactgcaactgctaggactgaaagcagaggctgggtgccagagcacgtgattcttaacatcatttccacagacccctctgccctgaccctctgcattggatgcaggaagctgggaaagactgatgttgatttggaaacatgggctgaaaatgaaggccccatagtgcataggaacagtaaagccagggtgctgacnnnnnnnnnnnnnnnnnnnnnnnnnnnnnnnnnnnnnnnnnnnnnnnnnnnnnnnnnntcgtgcaccctacacatgtgtggtacctcactgctgctgtttagggaacttgagggacgcgtttcaaggggttgggtattactgacgagctttggctcaaaatatagcaggaccaggtcttttgttgataagtactgtttgtttattaatatgtcattaatggtatttcttttttacactctacaagtgaattagggagtctcttgttgacccctttgttgcaggaatgtgcgtcgggctaggttatccatgagtttctttattcctaatgcagttagaaagacctttctccttgagctctttgactcccagaaggtaccccagtccccagtgtacttagaaaggatctcgaacattgctggacgtcctcatagtactcacaaagggctagccttgaatgtcactcgcccagtcttcagtctcctgacttagagatacaatcacgtcacaggtctcttggcctcaatctgaaaactgctgccgccgcgccgaggagactcgcatgccgccaccacctcactgggagggcgccgagcccaccgtcgccccctagaccctgacagctgcagctgccttgccttgccgccgcctccctgcagggcccctgttccaatgaaaaacagaacacaaaagagcagagcacctaagcctgtctctgcctccctgtctaccggactggccagggcccaagacccccgctgctccactgcggggctgggcgggctgactccctgcttcctccaagctgctgactcccctgcagccagggtctgggcagggtgcagccggtcctcggggcacgcagcttccttcaaggacactgtgtgtgccttaccgaacctgcggcgatgccacgggcctgcctttttctattgcgcctaactagcttaccaccctgtgcaggaaatgcaactgactttgactaatcagtctttttgttttccctgccaccctttatttataaagcgtaatgtttcactttaaaggacaggcaattagaactttgtggaattcccaccaggactttgctaacaataatggttgagaaaataagaaatgccctgtaaaaatttcactcccccaaataggttatgggggcaactgtgttcacacgcatgggccccacacccccagtttggagggtcttatattaattatagcggtattgcttgg

SEQ ID NO: 348049 - DNA, 858 bp, Homo Sapiens
  misc_feature (618)..(618): n is a, c, g, or t
  misc_feature (718)..(756): n is a, c, g, or t
agaaacaattcccggaaccggttcttgtggcctcaattcttaaaacttcctgcctccggcaccaaagaaaatttggaatgccgcctccccctcactgggagggcgcagaggcccccgttagccccttaaaccttgacagctgcagtatgccttgccttgccgcagcctacatgcagggcccctgttccaatgaaaaccagaacacaaaagagcagagcacctaagcctgtctctgcctccctgtctaccggactggccagggccaagacccccgctgctccactgcggggctgggcgggctgactccctgcttcctccaagctgctgcctcccctgcagccagggtctgggcagggtgcagccggtcctcggggcacgcagcttccttcaagtacactgtgtgtgcttcccggacctgcggcgatgccacgggcctgccttttctatgcgcctcactagcttaccaccctgtgcaggtaatgcaactgactttgtctcatcagtctttttctttccctgccaccctttatttatcaagcgtaatgttacaatttaaaggacagcaaattaagaactttgtagaattcccaccagggacttggctaacaataatgtttnggaaataaagaaatgctctgaaaaaatattcagccaccaaaatagttatgttggcactgtgttcacacgcatggtccccacacccccaggttgggtgggnnnnnnnnnnnnnnnnnnnnnnnnnnnnnnnnnnnnnnncatgttacatccatatctgtatttatatcttatttgtttcactttcaagtgtatcatggcaaatgtacagatttttttgttaataatgtgctaggatttgct

SEQ ID NO: 348050 - DNA, 743 bp, Homo Sapiens
  misc_feature (38)..(38): n is a, c, g, or t
  misc_feature (56)..(56): n is a, c, g, or t
  misc_feature (540)..(579): n is a, c, g, or t
gcttcttgcgcgctcctgaggccctgtccatgaaaacngacacaaaggcgagcacnaagctgtctctgctcctgtctacggactggcaggcccaagacccccgctgctccacgcggggctgggcggctgactccctgcttcctccaagctgctgcctcccctgcagccagggtctgggcagggtgcagccggtcctcggggcacgcagcttccttcaagtacactgtgtgtgcttcccggacctgcgcgaatgccacgggcctgccttttctatgcgcctcactagcttaccaccctgtgcaggtaatgcaactgactttgtctcatcagtctttttctttccctgccaccctttatttatcaagcgtaatgttacactttaaaggacagcaaataagaactttgtagaatcccaccaggactttgctaacaataatgtttggaaataaagaagtgctctgaaaaaatatcagccaccaaaatagttatgttggcactgtgttcacacgcatggtccccacacccccaggttgggtgggnnnnnnnnnnnnnnnnnnnnnnnnnnnnnnnnnnnnnnnncatgttacatccatatctgtatttatatcttatttgtttcactttcaagtgtatcatggcaaatgtacagatttttttgttaataatgtgctaggatttgctaaaaaagaaaacgaaaaggaaacccttttgagtttgccctagaataaatgagacttaattca

SEQ ID NO: 348051 - DNA, 762 bp, Homo Sapiens
  misc_feature (32)..(32): n is a, c, g, or t
  misc_feature (37)..(37): n is a, c, g, or t
  misc_feature (46)..(46): n is a, c, g, or t
ctggcctcaaacagccacgaggtgtagctctnagccntccttcttnccctgagctttccggggaggagccttggagtgtaattacctgtcatctgggccaccagctccactggcctgcccgttgccggcctggactgtcctaggtgaccccatctctgctgcttctgggcctgatggagaggagaacactagacatgccaactcgggagcattctgcctgcctgggaacggggtggacgagggagtgtctgtaaggactcagtgttgactgtaggcgcccctggggtgggtttagcaggctgcagcaggcagaggagagtacccccctgagagcatgtgggggaaggccttgctgtcatgtgaatccctcaatacccctagtatctggctgggttttcaggggctttggaagctctgttgcaggtgtccgggggtctaggactttagggatctggggaaggaccaacccatgccctgccaaacctggaacccctgtgttggggggcaaggtgggggagcctggagcccctgtgtgggagggcgaggcgggggagcctggagcccctgtgtgggagggcgaggcgggggatcctggagcccctgtgtcggggggcgagggaggggaggtggccgtcgagttgaccttctgaacatgagtgtcaactccaggacttgcttccaagcccttccctctgttggaaattgggtgtgccctggctcccaagggaggcccatgtgactaataaaaaactgtgaaccctg

SEQ ID NO: 348052 - DNA, 455 bp, Homo Sapiens
  misc_feature (246)..(246): n is a, c, g, or t
  misc_feature (253)..(253): n is a, c, g, or t
ccccctaaaaacaatatgggggaaaaaccttgctgtcaatgtgaaatccctcaaataccccctaattatctggctgggtttttcaggggctttggaaaactctgttgcaggtgtcccgggggtcctaggactttagggatctggggaaggacccaacccatgccctgccaaaccctggaacccctgtgttggggggcaaggtgggggaaacctggaacccctgtgtgggagggcgaggcgggggancctggancccctgtgtgggagggcgaggcgggggatccctggagcccctgtgtcggggggcgagggaggggaggtggccgtcgagttgaccttctgaacatgagtgtcaactccaggacttgcttccaagcccttccctctgttggaaattgggtgtgccctggctcccaagggaggcccatgtgactaataaaaaactgtgaaccctg

SEQ ID NO: 348053 - DNA, 618 bp, Homo Sapiens
gttgggtgcgggcatggtggttgcaggtgagtgttgggtgtaggcgtggtggtgtgtgcaggtgagtgttgggcgtaggcgtggtggttgcaggtgagtgttgggcaagggcgcggtggtgtgtgcaggtgagtgttgggcgcgggcgtggtggtgtgtgcaggtgagtgttgggcgcaggcgcggtggtttgtgcaggtgagtgtggtcctgttctgctcacccagcacatccctgtgtgtctctgtcccagtgggaagctgacggtgttcactgtgctgtgtgagcagtaccagccatccctccggcgggaccccatgtacaacgaggtgagagcttggggctggggagggaggaggggaccccacggtctgggtccaccccctctgagcccgctgcctgtgccttgcagtacctcgaccacataggacagctgttcttcggcgtcccgcccaagcagacgtcttcctacgggggcctgctcggtaagccggggcgcccttgtcacacccactccagccctgggtcggtgtggggtcatcatctctgcccaggcaggtccagtgcggtccttcacgtggaagtggttttctcgtacggaattttaggtgattaatg

SEQ ID NO: 348054 - DNA, 1662 bp, Homo Sapiens
atcaggccaaatcggccgagctcgaattcgtcgagagcgggcgcctgcgacagcgtcagccctgcgcggagcgccggcccgatggcggcggcggcggcgatggccgagcaggagagcgcccggaacggcggccgcaaccgcggcggcgtccagcgtgtggagggcaagctgcgcgccagcgtcgagaagggcgactactacgaggcgcaccagatgtaccggaccctgttcttcaggtacatgtcccagagcaagcacacggaggcccgggagctcatgtactcgggagccctgctcttcttcagccatggccagcaaaacagtgcagcagacttgtccatgctggtcctggagtccctggagaaggcggaagtggaggtggctgacgagctgctggaaaatctggctaaagtgttcagcctgatggaccccaactctcctgagcgcgtgacctttgtgtccagagccctgaagtggtccagtgggggctccgggaagctgggccacccccggctgcaccagctgctggccctcaccctgtggaaagaacaaaactattgtgagtcgaggtatcattttctgcactcagcggacggggagggctgtgccaacatgctggtggagtattccacgtcccgcggcttccgcagcgaggtggacatgttcgtggcccaggccgtgctacagtttctctgtttaaaaaacaaaagtagcgcatcggtggtcttcacgacgtacacccagaagcacccgtccatcgaggacgggcctccgtttgtggagccgctgcttaacttcatctggttcctgctgctggctgtggacggtgggaagctgacggtgttcactgtgctgtgtgagcagtaccagccatccctccggcgggaccccatgtacaacgagtacctcgaccgcataggacagctgttcttcggcgtcccgcccaagcagacgtcttcctacgggggcctgctcgggaaccttctgaccagcctcatgggctcctcagagcaggaggatggggaggagagccccagcgacggcagccccatcgagctggactgaactggccaggccacgtggagacaccacggtcgacgacggctggagggacgtttcagaggcgagtcctgggtggctcctcgccttgggggctcctggccctgaggctggcggtggccgcatgccggcgcgtgtctgtttctgtgcggcggctcagggtggcgcggctgctgctcactgtgctgctgggacccaagagtggggcgtcgcccctgctggccgccgcgtcccccgagattgacccacaataaagcacaggccttaccgcggcgtcaccctctcccactcctttgttctgggtcctttcgggagggctgatgggcagcacaggaggcccgtcctcgggggggttgcgcacataaccctgattggcgggcggccgcgcacagctgcggtcacccaatgaagccgctgcgcccccagacccggaagaccccacccagcgtccaccctcagctctgccactggggcaacgcccttgctccccaacacacacagagcatagttcggttggctatggccgcaccgcggttctccccgccgtcaagaagaaatgacgcatgttttcattatagcgcacaaagtcgcttctaggaacat

SEQ ID NO: 348055 - DNA, 978 bp, Homo Sapiens
  misc_feature (913)..(913): n is a, c, g, or t
  misc_feature (944)..(944): n is a, c, g, or t
cggcgggcgtggttcgagagcgcgcagagtccagactggcggcagggcccgaggggccgacccgcagcgtccctggtctctccagccctcactcggaaccgcacggtacaggtgaaagggggcagacccctcatcatgctttccaggcatctgccacttcccaggaattgtctccctggataaacaaggcgaagtccctggctgtgcagaagcagtagctgtgtggtggcacagtcaggaaaactcgggggccctgttgacagtgacaataccctcccctcccttgggctggacccctctctacagctaggagccaatggcagaagacaaaaccaaaccgagtgagttggaccaagggaagtatgatgctgatgacaacgtgaagatcatctgcctgggagacagcgcagtgggcaaatccaaactcatggagagatttctcatggatggctttcagccacagcagctgtccacgtacgccctgaccctgtacaagcacacagccacggtagatggaaggaccatccttgtggacttttgggacacggcaggccaggagcggttccagagcatgcatgcctcctactaccacaaggcccacgcctgcatcatggtgtttgatgtacagaggaaagtcacctataggaacctgagcacctggtatacagagcttcgggagttcaggccagagatcccatgcatcgtggtggccaataaaattgatgcagacataaacgtgacccaaaaaagagctttcaacttttgccaaagaagttctccctgcccctgtatttcgtctcggctgctgatggtaccaatgttgtgaagctcttcaatgatgcaattcgattagctgtgtcttacaaacagaactcccaggacttcatggatgagattttcaggagctcgaganttcagcttggagaggagaggaggacgtgcanaccaggacagagcacagatcgagaccctcagagg

SEQ ID NO: 348056 - DNA, 2035 bp, Homo Sapiens
  misc_feature (1055)..(1071): n is a, c, g, or t
  misc_feature (1137)..(1157): n is a, c, g, or t
  misc_feature (1159)..(1159): n is a, c, g, or t
  misc_feature (1271)..(1271): n is a, c, g, or t
  misc_feature (1283)..(1283): n is a, c, g, or t
  misc_feature (1329)..(1329): n is a, c, g, or t
  misc_feature (1332)..(1605): n is a, c, g, or t
  misc_feature (1643)..(1643): n is a, c, g, or t
  misc_feature (1654)..(1654): n is a, c, g, or t
  misc_feature (1748)..(1748): n is a, c, g, or t
  misc_feature (1855)..(1863): n is a, c, g, or t
  misc_feature (1900)..(1900): n is a, c, g, or t
  misc_feature (1951)..(1951): n is a, c, g, or t
  misc_feature (1985)..(1986): n is a, c, g, or t
  misc_feature (1994)..(1994): n is a, c, g, or t
  misc_feature (2020)..(2020): n is a, c, g, or t
  misc_feature (2022)..(2022): n is a, c, g, or t
  misc_feature (2025)..(2025): n is a, c, g, or t
ccgggatggagtgcgctgcggcgcgagctgggccggcgggcgtggttcgagagcgcgcagagtccagactggcggcagggcccgaggggccgacccgcagcgtccctggtctctccagccctcactcggaaccacacacagtgacaataccctcccctcccttgggctggacccctctctacggctaggagccaatggcagaagacaaaaccaaaccgagtgagttggaccaagggaagtatgatgctgatgacaacgtgaagatcatctgcctgggagacagcgcagtgggcaaatccaaactcatggagagatttctcatggatggctttcagccacagcagctgtccacgtacgccctgaccctgtacaagcacacagccacggtagatggcaagaccatccttgtggacttttgggacacggcaggccaggagcggttccagagcatgcatgcctcctactaccacaaggcccatgcctgcatcatgcagacataaacgtgacccaaaaaagcttcaattttgccaagaagttctccctgcccctgtatttcgtctcggctgctgatggtaccaatgttgtgaaggtgtggttgactgcagaggtagctagcaagctcttcaatgatgcaattcgattagctgtgtcttacaaacagaactcccaggacttcatggatgagatttttcaggagctcgagaacttcagcttggagcaggaagaggaggacgtgccagaccaggaacagagcagcagcatcgagaccccatcagaggaggtggcctctccccacagctgaggggctggggctaggggtgggtggagcccttttaaaatacccttcccttcaacaactctccagctctgaatggagaaactctctaggccatcccctcttctacctcctgcaacccacccatcctattagcctcccacattcaaggcccgtgatacagggatgaggtcagcaccagcaaactctggactggtggaagaattccccaccagatctccttgaagcagaattagggatcagcatcattaacaccttnnnnnnnnnnnnnnnnnaggcagacagtgaagagaatcagaaaacatgattatgtgtcactttaatacaggaaatttaggtgnnnnnnnnnnnnnnnnnnnnngntttctttccaaagctcacctcggggacaattccttgggcttctcctgaggtaatgattacccccccacccacagctgagtctgtgaggccccatccttaccctacgttttcncccatctttttncctcttcagtctcccagtcatctggtttgtttgtttctttgttcgnccnnnnnnnnnnnnnnnnnnnnnnnnnnnnnnnnnnnnnnnnnnnnnnnnnnnnnnnnnnnnnnnnnnnnnnnnnnnnnnnnnnnnnnnnnnnnnnnnnnnnnnnnnnnnnnnnnnnnnnnnnnnnnnnnnnnnnnnnnnnnnnnnnnnnnnnnnnnnnnnnnnnnnnnnnnnnnnnnnnnnnnnnnnnnnnnnnnnnnnnnnnnnnnnnnnnnnnnnnnnnnnnnnnnnnnnnnnnnnnnnnnnnnnnnnnnnnnnnnnnnnnnnnnnnnnnnnncatctgtttttaaacaattgtttttgagcagatagctnttcattccagntttcccgtgtacccactctgtttcaggagctcttctaggtaaagctgagatcacaggaacagcaggtgacaggcctagctatagttaggaatanacaagcggtaaaatcgagtccttacagccataccacaaggtacgtccatttggactacaagaagagcttcctttaaagttcctatttcagcataaagaggctggccnnnnnnnnnaggaatagtttggaccttgtgcctcctgtgggagggngaggactgcaagaggagagctagcagatatgcctgttcacccctctctggnacttgtggcttgctagtatgattttatgataatnncgggcatngtttgcattgtgtttattaatagggntntgnttttattgtt

SEQ ID NO: 348057 - DNA, 1347 bp, Homo Sapiens
  misc_feature (451)..(451): n is a, c, g, or t
  misc_feature (465)..(730): n is a, c, g, or t
  misc_feature (897)..(932): n is a, c, g, or t
  misc_feature (1335)..(1335): n is a, c, g, or t
atgtcattcagcctctactgtaaaaaaggaaacaataaaaacaaaaccctattaataaacacaatgcaaacaatgcccgagattatcataaaaacatactagcaagccacaagtaccagagaggggtgaacaggcatatctgctagctctcctcttgcagtcctcagcctcccacaggaggcacaaggtccaaactattcctcaaaaaaaaggacagcctctttatgctgaaataggaactttaaaggaagctcttcttgtagtccaaatggacgtaccttgtggtatggctgtaaggactcgattttaccgcttgtgtattcctaactatagctaggcctgtcacctgctgttcctgtgatctcagctttacctagaagagctcctgaaacagagtgggtacacggaaatctggaatgaatagctatctgctcaaaaacaattgtttaanaacagatgattggnnnnnnnnnnnnnnnnnnnnnnnnnnnnnnnnnnnnnnnnnnnnnnnnnnnnnnnnnnnnnnnnnnnnnnnnnnnnnnnnnnnnnnnnnnnnnnnnnnnnnnnnnnnnnnnnnnnnnnnnnnnnnnnnnnnnnnnnnnnnnnnnnnnnnnnnnnnnnnnnnnnnnnnnnnnnnnnnnnnnnnnnnnnnnnnnnnnnnnnnnnnnnnnnnnnnnnnnnnnnnnnnnnnnnnnnnnnnnnnnnnnnnnnnnnnnnnnnnnnnnnnnnnggaacgaacaaagaaacaaacaaaccagatgactgggagactgaagaggaaaaaagatgggagaaaacgtagggaaaggatggggcctcacagactcagctgtgggtgggggggtaatcattacctcaggagaagcccaaggaattgtccccgaggtgagctttggnnnnnnnnnnnnnnnnnnnnnnnnnnnnnnnnnnnncacctaaatttcctgtattaaagtgacacataatcatgttttctgattctcttcactgtctgcctgcggggagggggtggggaaggtgttaatgatgctgatccctacttctgcttcaaggagatctggtggggaattcttccaccagtccagagtttgctggtgctgacctcatccctgtatcacgggcctagaatgtgggaggctaataggatgggtgggtcgcaggcagtaaaagaggggatggcctatagagtttcttctttcacagctggagaagttctgaagggaaggtcatttaaaagggctccccccactctttacccagcccctcactggggggggaggccgcttcttttgaggggcttccatgttgtggttttccctggttggcacgccttanttcctgttcaag

SEQ ID NO: 348058 - DNA, 1202 bp, Homo Sapiens
agcgggcggttgcgtagcagctgcgaggacgcgggccgagccggaagtggagtgcgctgcggcgcgagctgggccggcgggcgtggttcgagagcgcgcagagtccagactggcggcagggcccgaggggccgacccgcagcgtccctggtctctccagccctcactcggaaccgcactgacaataccctcccctcccttgggctggacccctctctacagctaggagccaatggcagaagacaaaaccaaaccgagtgagttggaccaagggaagtatgatgctgatgacaacgtgaagatcatctgcctgggagacagcgcagtgggcaaatccaaactcatggagagatttctcatggatggctttcagccacagcagctgtccacgtacgccctgaccctgtacaagcacacagccacggtagatggaaggaccatccttgtggacttttgggacacggcaggccaggagcggttccagagcatgcatgcctcctactaccacaaggcccacgcctgcatcatggtgtttgatgtacagaggaaagtcacctataggaacctgagcacctggtatacagagcttcgggagttcaggccagagatcccatgcatcgtggtggccaataaaattgatgcagacataaacgtgacccaaaaaagcttcaattttgccaagaagttctccctgcccctgtatttcgtctcggctgctgatggtaccaatgttgtgaagctcttcaatgatgcaattcgattagctgtgtcttacaaacagaactcccaggacttcatggatgagatttttcaggagctcgagaacttcagcttggagcaggaagaggaggacgtgccagaccaggaaacaaagcagcagcatcgagaccccattcaaaggaggcggccctctccccacagcttgaaggggctggggcctaaggggtgggacggacccccctttgagaagtacccttcccctggaacaattcctctccggtgtggaatgggggaaacctgccttaggcccaacccctcttatcaagcctcttgggaaccaaccctatcgtcattagaccccccccatttcaaggcccctctaaaacacggacatgatggtcttttacccaccaattttccgggtatgggtgggcaaacgacttccatgggagcactcttataacctttcacttgccgcagcgt

SEQ ID NO: 348059 - DNA, 882 bp, Homo Sapiens
ggaccggtccggaattcccggtctagcagctgcgaggacgcggggcgagccggaagtggagtgcgctgcggcgcgagctgggccggcgggcgtggttcgagagcgcgcagagtccagactggcggcagggcccgaggggccgacccgcagcgtccctggtctctccagccctcactcggaaccgcacacagcgacaataccctcccctcccttgggctggacccctctctacggctaggagccaatggcagaagacaaaaccaaaccgagtgagttggaccaagggaagtatgatgctgatgacaacgtgaagatcatctgcccgggagacagcgcagtgggcaaatccaaactcatggagagatttctcatggatggctttcagccacagcagctgtccacgtacgccctgaccctgtacaagcacacagccacggtagatggcaagaccatccttgtggcagacataaacgtgacccaaaaaagcttcaattttgccaagaagttctccctgcccctgtatttcgtctcggctgctgatggtaccagtgttgtgaagctcttcaatgatgcaattcgattagctgtgtcttacaaacagaactcccaggacttcatggatgagatttttcaggagctcgagaacttcagcttggaacaggaagaggaggacgtgccagaccaggaacagagcagcagcatcgagaccccatcagaggaggtgggcctctccccacagctgaggggctggggctaggggtggggtggagccccttttaaaaataccttcccttcaacaagtctccagctctgaatggacgaaactctctaggccaacccctcttctacttcctgcaaaccgaacatcctattagcctacca

SEQ ID NO: 348060 - DNA, 692 bp, Homo Sapiens
  misc_feature (369)..(499): n is a, c, g, or t
cgcgagctgggccggcgggcgtggttcgagagcgcgcagagtccagactggcggcagggcccgaggggccgacccgcagcgtccctggtctctccagccctcactcggaaccgcacgtgagggcaaatccgccccggttggctggcttagcacgcggggacagcccctccgaggcctccctagcggtgtgggcgagagggcgtccgggtcgggggaagcacggaaaggtggcttcgcgaggctgttgtggggggcgggacgggcagcctggcgatgcctggacatggttggtggccaaaaacatttatcgaaagatagcttacccacttagatggcaaggacacggacaagcaagtcttcgcccgtaannnnnnnnnnnnnnnnnnnnnnnnnnnnnnnnnnnnnnnnnnnnnnnnnnnnnnnnnnnnnnnnnnnnnnnnnnnnnnnnnnnnnnnnnnnnnnnnnnnnnnnnnnnnnnnnnnnnnnnnnnnnnnnnnnntctacaacaaacagacacgaacgtcttcaagcatggagccatgaagctggatttggctttctgtcgctctctctacagggtacagacagtgacaataccctaccctcccttgggctggagccctctctacagctcggagccaatggcacaagacacaaaccaaaccgagtgagctggaacacgggacgtctga

SEQ ID NO: 348061 - DNA, 722 bp, Homo Sapiens
  misc_feature (119)..(119): n is a, c, g, or t
gggtggattgtcaggggatgatagaaaggattttaataagtcatcctgaggaaatttcacctagtgagagccacatccatctgcacagccttaggctgcgtgaaccgaggtgaggctgngctcctgtgaaagccaagacctcctggtccaggactttgtagagtaaaaagaaccaccaacacaaaaggggttgagggggctacaatctggagacctggggtctcctactaacttgctatatgatctttggtagagttaattttctgagtatcaattttcttatctgtgaagtgaagagggggatcatctggccaccaagtttaaaattctatacttctcacctgccaaaaccaaaaaacaacttgaggtgaggaaagtgttgggcccagaaaccagggaggaactgaaagtgactcgcgttgaagtggttatgtgtatgacaatgctcttggagaactgccagtcctctatggttacccttgatttgggagaggcagcagagtcatgtccagggcatcagaccagtgacatctttgcctttatgcctctagtcatctgagggcggggactaggcctcaagccccatctcacagccaaccacagagcccttaagggtggttgacaattgaatgccccaggttggtgctttagttatttactccctttgtgagctacaggatgtgtaacttttcccccatcttggtgataaaataggagagcgc

SEQ ID NO: 348062 - DNA, 1054 bp, Homo Sapiens
  misc_feature (115)..(115): n is a, c, g, or t
  misc_feature (732)..(785): n is a, c, g, or t
  misc_feature (863)..(863): n is a, c, g, or t
ggggtttgagccaaaggaagggggtgcccttcattccctttccccaaggggttttggggttttcccccagggcttgggaatgggggaatgaaaatgggagaaaggttggaggganattaccaggccagttccccctccttttctttcccttgggaatgcccgggcccagggaacaagttttcagaaaaagggaaaaggggctgagaaacagccttccctccaaattccagcacccaaggccacgggcaagcagccttgctccaaaagactgcaggcttgggagcacaccatcccccccatgcagaccaaaggctgctttagcacagcgtgaaaatgcagggcctgggcattttgcgaggaggcccagaaaaggagagaaaacactgctgtcgaacattccaactccttcccacagagcagagctggacacgtcctcacgtccatcgcagagaggggcggcttccagcaggagaagagagaactcaagtggaagggaactgaaggctgagcactgtgtttgcaggaatgaaaatatattttcttagggaacagacaaaacaaaatcccaggcggaatacctaagaggggcattcattgtttggctcctgcctgactgatgacactggggtgtcaatatataacattgtgatgacaattggactttcacccggcaatattccagaactactattctccaggatttccattttaataagcagtgaacaaagcaannnnnnnnnnnnnnnnnnnnnnnnnnnnnnnnnnnnnnnnnnnnnnnnnnnnnnaactcttgtcttattatgaaattaacaatacttggacatacagcagcatgaaaacaaaacaaggcaaagaggtccatncttaaaaaatgtatgcccaagattaccgaaacatggggagtatcctagaggaaaaaggcttaaggcaaaagtttgctaactggcagaagggttaacactggtaacatactgtggcagacaagtttcttttttaaaaaaacttttgaggttccccccctttaaattaaccctttccggtccatatgccacta

SEQ ID NO: 348063 - DNA, 644 bp, Homo Sapiens
agctgtaccggtccgacaggttaggatcgctgatggcagagcacagcgctggcctggtacatgcccgctgacaaggccctggtggacagcgcggacgacgacaagacgttggcgccctgggagaaggccaaaccccagaaccccaacagcaaagaagcccacgacctccctgcaaacaaggcctcagcatcccagcctggcagccacttgcagtgcctgtcttgtccactgcacagacgacgtgggtgacgccaaggctcgagcctccgtgcccacctggcggtccctgcattctgacatctccaacagatttgggacattcgtggctgccctaacttgaatgacaagaaagatcccctcctctaccaggcccttcctctccccctgtctgtttccttccccctcaaccttaccccacccctctgttaatttgaaagggccactattgctgagtggatgagtttttttgattcctctagtgctcagccttcagttcccttccagcttgagtcctctcttctcctgctggaagccgcccctctctgcgatggacgtgaggacgtgtccggctctgcctctgtgggaaggagttggaatgttcgacgcggtgtttctctccttttctgggcctcctcgcaatggcc

SEQ ID NO: 348064 - DNA, 445 bp, Homo Sapiens
gggggtctcaggttctaatgctggctctggaaagatgctccaggaaggcgactgccaagtcccagaaccagggctcacaggcagtgctcaggatgaagctgccacgggaaaccctaatgttaagtaggcacaagaaacagtgggtctctcatccaagctgggtgcaggataaaacctgggaggagctagtgaggaaagaacatgtttgtggctcaagatttcaattttctttaaagtttctgtcagaggttagttgctgtcaagtttgagttaatttaaacttggtttttaaatatataaatactaaagagaagtctaagttcatgcttgtaaaattgggttgagtataagccagaggccataaagcacagccaaaaagccttgggggtgcaggagcctccatgcctgggccctgccctcactcaggccattcagaagccacgtg

SEQ ID NO: 348065 - DNA, 1722 bp, Homo Sapiens
  misc_feature (1678)..(1678): n is a, c, g, or t
  misc_feature (1693)..(1693): n is a, c, g, or t
agcgtggcagtctgcaagaggctgagctgaggagtcgctgggccgggaggggcggacgtgagaaggacggatgacgaactgatggattgacgcgcgggcggtaggagggaggaccactgccaaacccagacctgccgcctgtcgtgctcctgcctgcagccctggagcctggccgcttcggggccctgtgcctgcctggcctcccagcctgctgttctcctccagccgctcctcctgggcttgcccctggagccctcaggctatcaatatgacggctgaagaaacagtgaatgtaacaagaggttgaaactcattaagctaattttggacttcctgaattcaaagaagcttcacattagtatgctggccctggagaaggaaagtggagtcataaatggcctgttttcagatgatatgcttttcctgaggttacgttatattatcctgaagcagaagttttagaagctttatgtgttaacaacgcgatgtcagcagaagatgagccccagcatctggaaatttaccatgcaagaagctgtgcaacgtttacatgctctagaagaatactgtccttctaaagatgactatagtaagctctgtaagcttttgactttgcctcgtctgaccaatcatgccgagtttaaggactggaatcccagcaccgcacgagttcactgttttgaagaggcttgtgtcatgggttgcagaattcatccctgctgataggaagctaagtgaagctggttttaaggctagtaacaatcgtttatttccagcttgtaatgaaaggcctgctttatgaatgctgtgtagaattttgtcagagtaaagcaactggagaagaaattacagaaagcgaagtgcttcttggcatcgacctcttatgtggtaatggttgtgatgatttggatctgagtttactgtcatggcttcagaatcttccatcttctgtcttctcttgtgcttttgaacagaaaatgcttaatattcatgttgacaaacttctgaaacctacaaaagctgcatatgctgatcttttgactcctcttatcagcaaactctctccctatccatcatccccaatgagaagacctcaatcagctgatgcctatatgacccgctctctgaatcctgctttagatggcctcacctgtggactaaccagtcatgataagagaatttcagaccttggaaacaaaacttctccaatgtcacactcctttgctaacttccattatccaggggtacaaaacctcagtagaagtctcatgcttgagaatacagaatgtcacagtatttacgaagaatcccctgagcgtgatacacctgttgatgcacagaggcctatcggcagtgaaatcttgggccagagttcagtttcagaaaaagagcctgcaaatggagcacagaatccaggaccagctaaacaagaaaaaaatgagcttcgagattcaacagaacaatttcaagaatattataggcaaagattacgctatcaacagcatttagaacagaaggagcaacagcggcagatataccaacagatgttgcttgaaggaggcgtgaatcaggaggatggtcctgatcagcagcagaatcttactgaacagttccttaataggtccattcaaaagcttggtgaattaaatattggaatggatgggcttggtaatgaggnatcagcactcaaccnccaatgtaatgggagcaaagggcaaggga

SEQ ID NO: 348066 - DNA, 1389 bp, Homo Sapiens
gttttactacaccaccccaagactctagtcagagattaacacatgatgcttcaaatattcatacaagcactcctcgtaatcctggatcaacaaatcacataccttttctggaggaatcaccttgtggaagccaaatctcttcagaacattcggtcattaagccacctcttggagattctccagggagtctttcaaggtcgaaaggggaagaggatgacaaatcaaaaaagcagtttgtttgtattaatatcctagaagacacacaagctgttagagcagtggcttttcatccagctggaggtttatatgctgttggttcaaattcaaaaactctgagagtatgtgcctatccagatgtaattgatccaagtgcacatgagactcctaagcagccggtggtacgttttaaaaggaataaacatcataaaggatccatttactgtgtggcctggagtccttgtgggcagttattagcaacaggatcaaatgacaaatacgtcaaagtgctgcccttcaatgcagagacttgtaacgcaacaggaccagatctggaatttagtatgcatgatggaacaattagagacttggcatttatggaaggcccagaaagcggaggagctattttaataagtgctggagcaggggattgtaacatttatacaaccgattgtcaaagaggacagggcctccatgctttgagtggacatactgggcatattttagcactttatacctggagtggctggatgattgcatctggttcccaagataagactgttagattttgggatcttcgagtaccaagttgtgttcgtgttgttggcacaacatttcatggaactggcagtgcagtggcatctgtagctgtagatcccagtggtcgtctcttagccacaggtcaagaagattctagctgcatgttgtatgacataagaggaggaagaatggtacaaagttatcatcctcattccagtgatgttcgctctgttcgattctcccctggagctcactacttgctaacaggctcttatgatatgaaaataaaggtgacagacctacaaggggacctcaccaagcagcttcctatcatggtggtgggggagcacaaggacaaagtgattcagtgcagatggcacacccaggatctttccttcctgtcatcctctgcagatagaactgtcaccctctggacttacaatgggtagagcacaccgcatgtcagtctatgcagcaaaagcacagagacttaagactactgagttgtgaaaattacaaatctgaagagcacagaatccaggaccagctaaacaagaaaaaaatgagcttcgagattcaacagaacaatttcaagaatattataggcaaagattacgctatcaacagcattta

SEQ ID NO: 348067 - DNA, 1709 bp, Homo Sapiens
  misc_feature (1548)..(1570): n is a, c, g, or t
  misc_feature (1572)..(1576): n is a, c, g, or t
tggtcgtctcttagccacaggtcaagaagattctagctgcatgttgtatgacataagaggaggaagaatggtacaaagttatcatcctcattccagtgatgttcgctctgttcgattctcccctggagctcactacttgctaacaggctcttatgatatgaaaataaaggtgacagacctacaaggggacctcaccaagcagcttcctatcatggtggtgggggagcacaaggacaaagtgattcagtgcagatggcacacccaggatctttccttcctgtcatcctctgcagatagaactgtcaccctctggacttacaatgggtagagcacaccgcatgtcagtctatgcagcaaaagcacagagacttaagactactgagttgtgaaaattacaaatctgaagaacatagtgtccaggaaagtggtttagcacgaagaggccccttattaccatgtatcccactgataggaggtgttgggtggtgttattccgcagtgctttcagtcttccatgtgagctcgtgctgctgtgacctgctatatgtagtctcgttgccaaagtctgcagaagagctcttcagttgttggtgtgcactccaagtcaggatggacaatgtgtttacggtttagtattcaatgcattccttggtctttgcctaaataacagttttatatgcacattgaaatggaattatacttcaactatattattaaatgtaatgcaaccaagttcctcccagattaaacttcccaggtgttcagaattacttttgctcttctcacgatcccatattgtattatcacttgtcttctagaggtcagaattccataatatatgtcactcaaaagttacatggttgctttcacttaaggatcattatggagtttaaagatgaatgaaaaactgcttcttagtttactacatggtataggccccttttttcttaaacccaaggatatgaattattttgtcatataattttgtttcaagctaaaaaggtaaatgttgtttgctttcagaaacttgtttaacttcagttttttgaatgcaacaggatacctcccttccaaactgaactgtagaagcagagcagcagcagttatgtgatgcaacacttgatggtacagtaaatttactggcatttttctccttaaaaattaaaatccttgacatagaccatagcatggcttgaaatgctatgtctgcatgataatttaaaatggaagatttaaactttgcactccaaaagcttatttggatttttttcttgcactgttttgtgtaatgcagaataatgattttatttctacagctttgtagattctaacatttatgtatctttattttcatattgtacagtaattttactttaaattatttaaataggctattttatttatttcaaatgcagttgtattagttctcattattgaactgtctgtgcactgtatgtagcaagcatttttcatctgttgtatacaagtggaaagggtattagaagtgtaactgtgctattatttcaataaagacctcttgacatttannnnnnnnnnnnnnnnnnnnnnnannnnnacctggtcggccgccccggccctcaaaagcttttcaaaaccttcctttggcgcccggggcccggaaggaaagggacctgggccttacttgtttctaagaaaacccgggccttggatagggctggaatcccccc

SEQ ID NO: 348068 - DNA, 1856 bp, Homo Sapiens
atgagccagtgcacccggcggaatcttggaatttttatagacagcacctcagtttctgactccagccgcacacctcctgcctctaccagcaggggttgccgccagaccagagccagggccaggtccctgcgtccatcccccccggtaggatggacgtgagccatccttctaggggacttttttcagtgtgcgactcgtctctgttaggtggtaggagccagtttgtgtggcctgtgccacgctccacagtgcgtggctgggctctgtgtgtggcctgtgtcccctgtccctgcaggacccagcaggcatcgtggcgtgacagctgtgtccaagccactgcccgggcatcccatcacccaccagggtgcacggtctctcctgctgggggctttctgtcgcatgtgtgtctcctgtcgactctgcagtttgttctcagagcagaatgtttcctgttctcagtgcacaaagacactggttttcaatcggcgtctaaaaccacgttcctgcctttcattgcaacacggtgtgttcatttgtttaaaacagtttaatgagtaagtttagatgactggtcaatatcttaaaaatgtatattagtaagaagttcttcctggaatttttctttcgattctggcagaataaacaggtgtttttagttttcccactgtctgagccaagcaggaccctgtcccaggagcaagagatgtccccttccatctctgacccttgcctgggacaagctttgatggggggccccagcttcaaggctgtggtgggaacagcacccccaaatgccagcctctcctttcttcccatccaccagtatactgcggggccatttctggtctttgtccaacaggaaacccatttctggtgggatatgccttccagtgccacagggccactcaccccatgcatctctgtcctgcccgtcagtgctgggacggacagcaagggcaagcccagtgtctggcggataggtgggtgggaacgagagaggggacgaatgccgtcctaagcttctgcttggggatcccccacacgacctgggtactgcctgggaaacctgtcctaagtaaaactatggacctcgcctcgcccaccggcctgcaaagccagcatctccgtgaaggtggatggaagcgcctttgtcctcattttgagctgcaagctgggtcagcggctctgaagccctcgagtgactttctaacccaagacccagcccctggcaggaggagggtgggtgcagggctggtgggacaaacaagaggcctcagcaggcctggaagacccttccagtacatcccacagcgtgtcgagcagctgggagaacctgtgtcaagctcgagccgtcataggtccccatgaggtgtctgaagccccttcttggtgatgggaggcagaggtgctgacgttctggagcatggacgtgagtcctcagctggctccgcgtgggcccttggagggtgcccaggtgtgtggtgaccttctggatgcctttaacttcatggctgcgtcattcctgatttagaactttaaccggagcttcatctagtgattgcaaaactggaccaatgggaggacggcggcgcagcccgctccctccgtggaatggagctcagctcttcggaggcatcaaagcacctgtcgcctccgtggtccccctgccgagggagtgcggcctctgcaaggttcgggggtggcttcgtttgcctggagtggccggccctgcttgtgccatgtggatgtttgtgagcctcggtcctacagcactgtgtaggctgcatctgtttcgtgctggtcctgttgacttgtatgatatccacaaataaatattttcatggcggtaaaaaaaa

SEQ ID NO: 348069 - DNA, 454 bp, Homo Sapiens
  misc_feature (14)..(14): n is a, c, g, or t
cagttttccccagnccaataccccagttcttgtgggggaatccccaaaacaaaaaacttaaggacggcaattctccccctctctgttcccaacccacctatccgcccagacactgggcttgcccttgctgtccgtcccagcactgacgggcaggacagagatgcatggggtgagtggccctgtggcactggaaggcatatcccaccagaaatgggtttcctgttggacaaagaccagaaatggccccgcagtatactggtggatgggaagaaaggagaggctggcatttgggggtgctgttcccaccacagccttgaagctggggccccccatcaaagcttgtcccaggcaagggtcagagatggaaggggacatctcttgctctgggacagggtcctgcttggctcagacagtgggaaaactaaaaacacctgtttattctgccagaatcgac

SEQ ID NO: 348070 - DNA, 1407 bp, Homo Sapiens
  misc_feature (56)..(79): n is a, c, g, or t
ccccaacttttagcactgatactacatattgctctgttaaagaattttctctgccnnnnnnnnnnnnnnnnnnnnnnnncgcttaaagctggagtttgacattctgctttcagatgctgtctttttattagtgagtgatgatggtttgctaataatcaataggtaataattttttgtaatcccatcaagtggctccatatgtttctgctctctcgtgactgtgttaatgtttaactgttgtaccttaaagccgaaatcagtaactatgcatactgtaaccaaggtattgggcttacagagttgtttgttgtataaagaaaattttaaatgttgttgcaaactaacgagttacaccattttaaactttctttcctcccccctttttttgcccacaaatggtattataatgcttgcttagtcaaagaagagagactaaacaagggtaaaaattttaacagtacagaatttgccatcatatcattgccttgattctaactgtttgtgtcctaagatgcaaaagaagtcagtggcttttaactgtttacaaatagaatgtgattgtaaaatgtacagtttggttgtgtttgaattatgaaatttcttcagatataataaaccatgactttttggctgctcaacattaattgtctcctttttgtgaatttatttgtaggctcttttttataatgaaagtttcaaagttgctatgtatgagggttctcatagagcaaccgattaaaaatctaagcaaatatttgaacattttatctgaactcatcacaatttcaccctgaaataatgtgagaacaatgggaaactgtagcttgctccttcccaccctctctgagcatctttgggatcttgttgctcaaaactcttctgtgacttcatcttccccaccatttgtgcccatctcaagcctcagcaagaaaccatgtggaacatgaagcttaatgacttgacagtgtactagtgttaaactctcatacctctgttacaaagcgagaaacgccacacccggactggcccttttcttcccccttcacggccctcgcttctccctgcaggagctcgggggcgaaacctgtgtatggatttcagtgtatgacttcagatcatgctccaacttgccaggtgtgagctaatgttgtcggacaccttactataagcaaatgttattcagtgcgttcaatgtatattgacttccatactggtttttccaaaaaccaaaggtagctttgaaaaaccatgtctggaaatgtttggagcgttaagctgattgaccttctgaccttggggctttgagtagtatataattcataactgcgttaattgtattgttaaagtgtttgggagttttttgcgcttgttatgtggaaataaagtgtttgatttaaaatttttaaa

SEQ ID NO: 348071 - DNA, 1352 bp, Homo Sapiens
ccacgcgtccgaaaactgtaaacacgaaattagaggaagagtccagcacctgccatttggccactgtccagacctactgtgtgcttcttggggaaaaactttacagctttgaatggctgagaggtttggaaagaaacagctcagtccccatggcccggatggagagaggatccctgcaggcaggtccccatgctgccaccagattggagccactccttgcttcctttagtcacagtacctgaatgtgcccgcctcctggagagcgtcctggttgcaggcttcccttgccaaccactccagagggtgaaactggctctcttcttgcttctttaaaaagacactgaggcgcatcttggatacccgcaagaaagaggctgtacaaaggcagaaacagacgttcagcatggccgtggctgagctgttggctccggagtgcttctgtcccacctcccccaggaagggaagtccgttggccaggccaattctagagcaaaatctgagagatgctcttagattcccactgtgtcactgcttctgctgagccatggaaacctgagagggtgtcccccaacacacagtgaaatgatgcccactcctcaggaagagcccacgtgggggcagggggcaagaggggtggggaggctcataccgtggcacgcgtcatcctcattcaagaggcccaggaggagcaccaccctccgcatattgcgcgtgcagctctcgttctggtctctgagcatgcccacggcgctctgcacacagcttctcagcagcctggtggtgtccaggatcgacacctgttggtggagacggttgggtcatccgtttctgccactgacacagtgggcaaaagccaaaccgcccgtatgcgatgagggtctcaatgcagcaaacagcacagggcggcggtcctcacggacaaagaagagacgccgacctccgccctgcaccccccaaactgccggtgcagatgcccttgacccccagtaaccagcaacaagaccgtcactgtgtgaggaaagtggggcgccatcctcacccctgcacagcggcggcgactcctctagctcccaatgcaaaagcgttttaaagatgcagctcagaagcatcaccagcagcacaaagggggagtcccaagaaacagaacttacatcactgccctccgagttcagaagttttccttttccaccttctcagaacttttctgtttccatgggcctcctctgccaacctctgccaccctccccctgatgtgctggcccttcggtctcccatcgccctcttcaatggccgtctttccgccccgggtgtttccaagcccactggcagtccaagccaaaccttgaattgcg

SEQ ID NO: 348072 - DNA, 680 bp, Homo Sapiens
actgaccacatcaccaacatgttaattcatgaaacgtgggctagctccattgaggctctcatgcgcaagaacaaaatcattgtggatgatgcagaggaagctgacactgagcctgtttctggtggctctcccctcgcaagcagagaagtgtgcaaatagattagctgcgagcaggatgtgcagtgggccaactctgcttgttcaggagtctctcgattgcccgaggaaagactctgttaccgaatgtaaacagcccccagtgtcatctttgagcaaaactgcttctcttacaaaccacagccctttagattctaaaaaagaaacttcctcgtgccaggaccctgtaccaataaaccacaaaaggcgatcactttgctcgagggaagtgcctttgattcagattgaaacagatcagagagaagcctgtgctggggaacctgaacccttcctttccaaaagcagcctcctagaggaagcagaagggcattcgaatgacaaaaacatcccagatgtggtgagaggtggagacacagccgtgagcgcttgtcaaatccataggtgagtgaatcgtctcagactacatagggtgcatgtgactggagtttgcgtcttaatcagtgtttagtctaaattttagacataaaggatttgattggtgcaagaactaaattttcaagacc

SEQ ID NO: 348073 - DNA, 1052 bp, Homo Sapiens
tagaatgttggcattcggttgatatccaaagcctgttctcccagccgtcctcctgcagctggagccttcaggccgtattctcacgagggaacgtttgccaaggctctgacctcacagaagatgcccagggcccagaagccatcagaattatcagtggagaagcaccttttgactcttcccttccaatgtaatctctgccaacaccatgaggcttaaggtgctctaagtcatgagtgttttggtctcaaatgctgcagttttaataatctgtgactcctgagagcccatggttttttgaccttgtggttctaaaattccttgtctgacccctgtagatcttttccttgccatgtcacctcccttggcctttgatcctggaaaggtggcagagcctccactgagccaggcccagagctccttgcagtgccttcttccttgtttacctgtgggaggaaacactttttttgtcaggggcagcctggttcagagctcagaggtcacactgtatcaaagatctcaaacagcaaagtcagcatttgctgtatagagctgccacccaactctaagcaggagaaactgtacagaaagggctttgctatttttcccttttgggaaaacaatgaagtgttttaagtcctgggtggacttagagatggtttgcctgtccagacttgctctcaagcctcatcctgagaaggacctgccgatgaaggagcccgtacactccctgccaccactaagttgttaaccctgtagctggctgggctgatttcctttttgaaattcatttgcccatccacagccctttacactggcacacacttttaatagtctgggggcttccagtgggggcccccggcctaatttttcttttccccccccaaaaacaagaccctttgcctcttgttcttccacaggcctgggaatggcaatgggcaatgaatcattgggctttactggcaggcccttgtatttttcccagggctttaaagcggaatccgttctgggtcgccaagcctcttcttgtggttagctttaaaaactttgcctgc

SEQ ID NO: 348074 - DNA, 659 bp, Homo Sapiens
gaatgtttccacaactggggacatcacagaccccctctactgctgcaataacagcggcatctagcatctgtgtgctcccctccactcagactacgggcataacagccgcttcaccttctggggaagcagacgaacactatcagcttcagcatgtgaaccagctccttgccagcaaaactgggattcattcttcccagcgtgatcttgattctgcttcagggccccaggtatccaactttacccagacggtagacgctcctaatagcatgggactggagcagaacaaggctttatcctcagctgtgcaagccagccccacctctcctgggggttctccatcctctccatcttctggacagcggtcagcaagcccttcagtgccgggtcccactaaacccaaaccaaaaaccaaacggtttcagctgcctctagacaaagggaatggcaagaagcacaaagtttcccatttgcggaccagttcttctgaagcacacattccagaccaagaaacgacatccctgacctcaggcacagggactccaggagcagaggctgagcagcaggatacagctagcgtggagcagtcctcccagaaggagtgtgggcaacctgcagggtaagctgaagaattcgtcttttaagactaagctctcagtttt

SEQ ID NO: 348075 - DNA, 1837 bp, Homo Sapiens
  misc_feature (1666)..(1666): n is a, c, g, or t
cctgcaggtacggtccggaattcccgggtcgacccacgcgtccgatcgatcaggccaactacttcctcaacttcccatgcaaggtgggcacgaccccagtctcatctcctagccagactcccagaccccagcctggccccatcccaccccatacccaggtacggaaccaggtgtactcgtggctcctgcgcctacggcccccctctcaaggctacctaagcagccgctccccccaggagatgctgcgtgcctcaggccttacccagaaatgggtacagcgtgagatatccaacttcgagtacttgatgcaactcaacaccattgcggggcggacctacaatgacctgtctcagtaccctgtggtatgaaagctttgaggacccagcagggaccattgacaagttccactatggcacccactactccaatgcagcaggcgtgatgcactacctcatccgcgtggagcccttcacctccctgcacgtccagctgcaaagtggccgctttgactgctccgaccggcagttccactcggtggcggcagcctggcaggcacgcctggagagccctgccgatgtgaaggagctcatcccggaattcttctactttcctgacttcctggagaaccagaacggttttgacctgggctgtctccagctgaccaacgagaaggtaggcgatgtggtgctacccccgtgggccagctctcctgaggacttcatccagcagcaccgccaggctctggagtcggagtatgtgtctgcacacctacacgagtggatcgacctcatctttggctacaagcagcgggggccagccgccgaggaggccctcaatgtcttctattactgcacctatgagggggctgtagacctggaccatgtgacagatgagcgggaacggaaggctctggagggcattatcagcaactttgggcagactccctgtcagctggctgaaggaagccacatccaactcggctctcagctgaggaagcagcccatcgccttgcacgcctggacactaactcacctagcatcttccagcacctggacgaactcaaggcattcttcgcacaggttgtcagtgatggtgtacccctggtgctagccctggtcccccaccggcagccccactccttcatcacccagggttccccagacctgttggtgactgtgagtgccagtgggctgctgggcacccacagctggttgccctatgaccgcaacataagcaactacttcagcttcagcaaagaccccaccatgggcagccacaagacgcagcgactgctgagtggcccgtgggtgccaggcagtggtgtgagtggacaagcactggcagtggccccggatggaaagctgctattcaacggtggccactgggatggcagcctgagggtgactgcactaccccgcggaaacctgttgagccacctcagctgccaccttgatgtagtaacctgccttgcactggacacctgtggcatctacctcatctcaggctcccgggacaccacgtgcatggtgtggcggctcctgcatcagggtggtctgtcagtaggcctggcaccaaagcctgtgcaggtcctgtatgggcatggggctgcactgagctgtgtggccatcagcactgaaacttgacatggctgtgtctgggatctganggatgggaactgtggatcatacaccactgtacgccgcggacagtttgtagcggcactacggcctctgggtgccacattccctggacctattttccacctggcattggggtccgaaggccagattgtggtacagagctcagcgtgggaacgtcctggggcccaggtcaccta

SEQ ID NO: 348076 - DNA, 591 bp, Homo Sapiens
atcagccctaggcaccccagtcccggctgccccctccgccaccgccgccgcccgccggcaggttcccccgtcagcgtcccatcccggtcgggagttctctccaggcagcacgatgccgaggaaacagtgaccctgagcgaagccaagccgggcggcaggtgtggctttgatagctggtggtgccacttcctggccttggatgagccgtacgcctctgtaaacccaacttcctcacctttgaaacagctgcctggttcagcattaatgaagattagtcagtgacaggcctggtgtgctgagtccgcacatacaactccggcaatgtcccatcaacctctcagctgcctcactgaaaaggaggacagccccagtgaaagcacaggaaatggacccccccacctggcccacccaaacctggacacgtttaccccggaggagctgctgcagcagatgaaagagctcctgaccgagaaccaccagctgaaagaagccatgaagctaaataatcaagccatgaaagggagatttgaggagctttcggcctggacagagaaacagaaggaagaacgccagttttttgagatacagagc

SEQ ID NO: 348077 - DNA, 908 bp, Homo Sapiens
  misc_feature (38)..(38): n is a, c, g, or t
caacttcaagtctctccaccttctgattcccttccctnaggcacagcaggagctggctcacagttaactcctcatgttcgaagtaattcttggccccatctgcagatctgctcgtgccagtggagactgttctcgtgggcccaggactatgcttgatttcttttactgacccttctgcttctccttcagccatcctaatttcaaaaaaggaatcttctgaggagccgctggagttcagcttgagctgcagttcagacacgatgcccaacaggtctgccttctctgcttgtagcctcaccacctgggtcctgagctggtccttttcctgctccgcttcggccctgggaagcctggagtcatcagtggggtcctcagatgacctttctgatttcccttttagttttccaagctcttccttcaatttctcattctcatgactcaaggccattagacgctcttttgcttctttgctctgtatctcaaaaaactggcgttcttccttctgtttctctgtccaggccgaaagctcctcaaatctccctttcatggcttgattatttagcttcatggcttctttcagctggtggttctcggtcaggagctctttcatctgctgcagcagctcctccggggtaaatgtgtccaggtttgggtgggccaggtgggggggtccatttcctgtgctttcactggggctgtcctccttttcagtgaggcagctgagaggttgatgggacattgcagaagttcctgccgcccggcttggcttcgctcagggtcactgtttcctcggcatcgtgccgcctggagagaactcccgaccgggatgggacgctgaccagggaacctgccggcgggcggcggcggtggcggagggggcagccgggactggggtgcctagggctgat

SEQ ID NO: 348078 - DNA, 402 bp, Homo Sapiens
cagctggcagttctgctgaaagagaatgatgctttcgagacgaagccaggcagtccttgatggagatgcagagtcgtcatggggcgagaacaagtgactctgaccagcaggcttaccttgttcaaagaggagctgaggacagggactggcggcaacagcggaatattccgattcattcctgccccaagtgtggagaggttctgcctgacatagacacgttacagattcacgtgatggattgcatcatttaagtgttgatgtatcacctccccaaaactgttggtaaatgtcagattttttcctccaagagttgtgcttttgtgttatttgttttcactcaaatattttgcctcattattcttgttttaaaagaaagaaaacaggccgggcacagtggctcat

SEQ ID NO: 348079 - DNA, 2228 bp, Homo Sapiens
  misc_feature (2148)..(2148): n is a, c, g, or t
  misc_feature (2158)..(2158): n is a, c, g, or t
  misc_feature (2169)..(2169): n is a, c, g, or t
agcgggggcggggcggggaaattccccggcgcgggcagggagcggctggctgtcagctgagccgcgctgggcggggtcgccaggccgcgcatcagccctaggcaccccagtcccggctgccccctccgccaccgccgccgcccgccggcaggttccctggtcagcgtcccatcccggtcgggagttctctccaggcggcacgatgccgaggaaacagtgaccctgagcgaagccaagccgggcggcaggaacttctgcaatgtcccatcaacctctcagctgcctcactgaaaaggaggacagccccagtgaaagcacaggaaatggacccccccacctggcccacccaaacctggacacatttaccccggaggagctgctgcagcagatgaaagagctcctgaccgagaaccaccagctgaaagaagccatgaagctaaataatcaagccatgaaagggagatttgaggagctttcggcctggacagagaaacagaaggaagaacgccagttttttgagatacagagcaaagaagcaaaagagcgtctaatggccttgagtcatgagaatgagaaattgaaggaagagcttggaaaactaaaagggaaatcagaaaggtcatctgaggaccccactgatgactccaggcttcccagggccgaagcggagcaggaaaaggaccagctcaggacccaggtggtgaggctacaagcagagaaggcagacctgttgggcatcgtgtctgaactgcagctcaagctgaactccagcggctcctcagaagattcctttgttgaaattaggatggctgaaggagaagcagaagggtcagtaaaagaaatcaagcatagtcctgggcccacgagaacagtctccactggcacggcattgtctaaatataggagcagatctgcagatggggccaagaattacttcgaacatgaggagttaactgtgagccagctcctgctgtgcctaagggaagggaatcagaaggtggagagacttgaagttgcactcaaggaggccaaagaaagagtttcagattttgaaaagaaaacaagtaatcgttctgagattgaaacccagacagaggggagcacagagaaagagaatgatgaagagaaaggcccggagactgttggaagcgaagtggaagcactgaacctccaggtgacatctctgtttaaggagcttcaagaggctcatacaaaactcagcgaagctgagctaatgaagaagagacttcaagaaaagtgtcaggcccttgaaaggaaaaattctgcaattccatcagagttgaatgaaaagcaagagcttgtttatactaacaaaaagttagagctacaagtggaaagcatgctatcagaaatcaaaatggaacaggctaaaacagaggatgaaaagtccaaattaactgtgctacagatgacacacaacaagcttcttcaagaacataataatgcattgaaaacaattgaggaactaacaagaaaagagtcagaaaaagtggacagggcagtgctgaaggaactgagtgaaaaactggaactggcagagaaggctctggcttccaaacagctgcaaatggatgaaatgaagcaaaccattgccaagcaggaagaggacctggaaaccatgaccatcctcagggctcagatggaagtttactgttctgattttcatgctgaaagagcagcgagagagaaaattcatgaggaaaaggagcaactggcattgcagctggcagttctgctgaaagagaatgatgctttcgaagacggaggcaggcagtccttgatggagatgcagagtcgtcatggggcgagaacaagtgactctgaccagcaggcttaccttgttcaaagaggagctgaggacagggactggcggcaacagcggaatattccgattcattcctgccccaagtgtggagaggttctgcctgacatagacacgttacagattcacgtgatggattgcatcatttaagtgttgatgtatcacctccccaaaactgttggtaaatgtcagattttttcctccaagagttgtgcttttgtgttatttgttttcactcaaatattttgcctcattattcttgttttaaaagaaaggaaaacagggccggggcacagtgggcttcntgcctgttantccccaggcantttgggggaggttcgaggttggggtgggtccactttgggggttcaggggtttttagacc

SEQ ID NO: 348080 - DNA, 1345 bp, Homo Sapiens
  misc_feature (1285)..(1293): n is a, c, g, or t
gggtggcgaattcggcacgaggagcctgaacggcctccgtccagctccagcagtgacagtgacagcgacgaggtggaccgcatcagtgagtggaagcggcgggacgaggcgcggaggcgcgagctggaggcccggcggcggcgagagcaggaggaggagctgcggcgcctgcgggagcaggagaaggaggagaaggagcggaggcgcgagcgggccgaccgcggggaggctgagcggggcagcggcggcagcagcggggacgagctcagggaggacgatgagcccgtcaagaagcggggacgcaagggccggggccggggtcccccgtcctcctctgactccgagcccgaggccgagctggagagagaggccaagaaatcagcgaagaagccgcagtcctcaagcacagagcccgccaggaaacctggccagaaggagaagagagtgcggcccgaggagaagcaacaagccaagcccgtgaaggtggagcggacccggaagcggtccgagggcttctcgatggacaggaaggtagagaagaagaaagagccctccgtggaggagaagctgcagaagctgcacagtgagatcaagtttgccctaaaggtcgacagcccggacgtgaagaggtgcctgaatgccctagaggagctgggaaccctgcaggtgacctctcagatcctccagaagaacacagacgtggtggccaccttgaagaagattcgccgttacaaagcgaacaaggacgtaatggagaaggcagcagaagtctatacccggctcaagtcgcgggtcctcggcccaaagatcgaggcggtgcagaaagtgaacaaggctgggatggagaaggagaaggccgaggagaagctggccggggaggagctggccggggaggaggccccccaggagaaggcggaggacaagcccagcaccgatctctcagccccagtgaatggcgaggccacatcacagaagggggagagcgcagaggacaaggagcacgaggagggtcgggactcggaggaggggccaaggtgtggctcctctgaagacctgcacgacagcgtacgggagggtcccgacctggacaggcctgggagcgaccggcaggagcgcgagagggcacggggggactcggaggccctggacgaggagagctgagccgcgggcagccaggcccagcccccgcccgagctcaggctgcccctctccttccccggctcgcaggagagcagagcagagaactgtggggaacgctgtgctgtttgtatttgttcccttgggnnnnnnnnncctgcctaatttctgtgatttccaaccaacataaagactataaacggttttt

SEQ ID NO: 348081 - DNA, 664 bp, Homo Sapiens
  misc_feature (585)..(593): n is a, c, g, or t
ctgggaaggtggcttcttgccgagcctccaggtggcccaggtaggtaggccccgagcacaggcacccggctatctgacggtgcctgtgcccatcactgtgggctgctgtctggtacaaggctcagtggagtcactcacttacccagcagctgccttgtgctatgcctggctggcgccagcgtggggaccctggagatggttgtggtctctagtggcagaagacaggcagataggagggcggcactcgagcctcaggtgccacaacgggggtacactcctcggtgcccatcccacccaaccgccctacaggcagggcaggggcgggagggcatcctcacaccgcctttgctgttcccaccagcagcgtacgggagggtcccgacctggacaggcctgggagcgaccggcaggagcgcgagagggcacggggggactcggaggccctggacgaggagagctgagccgcgggcagccaggcccagcccccgcccgagctcaggctgcccctctccttccccggctcgcaggagagcagagcagagaactgtggggaacgctgtgctgtttgtatttgttcccttgggnnnnnnnnncctgcctaatttctgtgatttccaaccaacatgaaatgactataaatggttttttaatgaaaaaagaaaaa

SEQ ID NO: 348082 - DNA, 911 bp, Homo Sapiens
cggtacaaagcgaccaagtacgtaaagcaaaaggcagcagaagtctatacccggctcaagtcgcgggtctcggcccaaagatcgaggcggtgcagaaagtgaacaaggctgggatggagaaggagaaggccgaggagaagctggccggggaggagctggccggggaggaggccccccaggagaaggcggaggacaagcccagcaccgatctctcagccccagtgaatggcgaggccacatcacagaagggggagagcgcagaggacaaggagcacgaggagggtcgggactcggaggaggggccaaggtgtggctcctctgaagacctgcacgacagcgtacgggagggtcccgacctggacaggcctgggagcgaccggcaggagcgcgagagggcacggggggactcggaggccctggacgaggagagctgagccgcgggcagccaggcccagcccccgcccgagctcaggctgcccctctccttccccggctcgcaggagagcagagcagagaactgtggggaacgctgtgctgtttgtatttgttcccttgggtataattttcctgcctaatttctgtgatttccaaccaacatgaaatgactataacatggttatgataatgaagcaacgacaacacaaaggggggcaggaatctagagtttccttggaggggtcaaggattagcggtacccagacttcttgacacaagtggtccctatagggagagatcgacttaataaagcttaggccactgcggtacgatgaagcaaacgttgatgcatgtgggacaaacgtgttaggatggagaacttttggcgaaggacaccgttacatctgtgcgggtgtgaacattatgggcacaaagctacttacgcggattaaaaagttagcaggtaaagtcttcca

SEQ ID NO: 348083 - DNA, 1386 bp, Homo Sapiens
  misc_feature (113)..(148): n is a, c, g, or t
ggggtgtttctattgaaactgtactaaatttttgcctacaatttaccttgttaaatattgtagataaattgctaatactaatagccaaatagataacactaatgctttgtttnnnnnnnnnnnnnnnnnnnnnnnnnnnnnnnnnnnntgagcagtggtgttctaatgaagttatgacatctgtcctaattagtttcttaaatacatttactacttaatggttttgaagcaactgtttaatttttaaaatttttgaaaacttgctaataaccttttgttcagaatttagtagattgtttaatgcaggacatcaactacataatgaaagatgcttgaaatgcttttgttatttcaggcaaatcaaattaaatcagactatcaaactacaagagaaccttagtcttttttgtttttgtctaaacatgttagtttagtgatgtcttggtgaactgtgagtgaactgtattgatttttctaatctttagagaccttcacacagcatgagggctgttggcattttgaaaaaggttaataagtagaagcatacatgttttccttttgtttttgaaacttgtttgtaaacataaataaatatgcccttttattaaataaattcatggcaatgtttttttaaaagacatttcagcttctttactcagttctgcatatacagtgcatcagtctgttctctttgaccacaattggaatacatttcaagatggtaacagccccatgaagtaccgctttaattccttgctggtaatctaatagaatcagattaagaaaattaacacaattttaccatttgacatactcttcattgaatttagtttgtctaaaatagtctcacaggtaaaaaacataacaacaatgaccaccattgtctttgatacatttattttaattcttaagtggccaaataacagattagggtaaaatgagattacatgaaaaggttctaaaatgatatatttagatgcaataattaaccatatgctagaatgcccacctctaagccaattggattctttagctctctttttctttccttcatctaccttcttctcttttttgcctctgtctttaccctttagaaactggcatgtgttagggcccagatttcaccagatacacaatcctcaggctgacataaagtttacgaggactgctactataactgagagtgctgaccaagcaaagaaacatttagttgatggtgcttgatatttttggtgggtgggggaaatctttttctcaccatcaaatctttgcagtaatcctctggcaggtcttaggaaacacattgggctctgttcaggcatttgtaattgtacatttatttcatcagggtatttataggtggaatcatactgttaaaaagggggt

SEQ ID NO: 348084 - DNA, 585 bp, Homo Sapiens
  misc_feature (9)..(9): n is a, c, g, or t
  misc_feature (11)..(11): n is a, c, g, or t
taaactgtntntaaaaaatgtaccttcagaatgattaccttataaatttcatgtaaagcatatatacatattttagttgattttatttactatcagaatagtattagtaaatgcaaaattatttggtttatctttaatattaactactatttgctttcagatttaaaataattattgggactttaatcttttgaacttctctgaagcttctaagtattctttctagtcatgtgaataggtaatttgagaaatacatgctcactgttcaatacttttccattatttttcctcttttttatagagctaatgtcaaaccccgaaattccacaccacctagtttggcaagaaatcctgccccaggtgtgcttacaaacaaaagaaaaacatatactgagagctacatagccaggccagatggggactgtgcatcttcccttaatggtggaaatattaaaggcattgaaggacattcacctggaaacttaccaaaattctgccatgagtgtgggactaaataccctgtagaatgggccaaattttgctgtgaatgtggcattcgaagaatgattctatgaatagaatctc

SEQ ID NO: 348085 - DNA, 1268 bp, Homo Sapiens
  misc_feature (93)..(137): n is a, c, g, or t
  misc_feature (921)..(1156): n is a, c, g, or t
  misc_feature (1182)..(1191): n is a, c, g, or t
cggtaggggccctttaaactttaggcccccggaccctttttcaaagaagaaagtgccggtttcctttgcttaagaattggaaccagtttttcnnnnnnnnnnnnnnnnnnnnnnnnnnnnnnnnnnnnnnnnnnnnnaaggggtaatctggtttaaaggggtttggtgtaagactttcccttatggaatagattttccaaaataatttggggtaatcaaactggtatttttagcattctgggtaagtaacatgttttaaaaatctaaaggctttttttcatgcaaaggagactgatttttgctttcaaaagcataggcaggaaaccttaggttcaaaggtagtaaataatgatgagcaaattgctagtgatgatacagctgcagcttccgttgtgtatttgtttggctcaggtactctagaaatgagaattcttagaattacatagcagaagtgatatgttgcctggataccacactaccagaggaataaaaatgtagttagagtaaggggttttatattttacaatgagacagtgttagtgtaagaagcattccaaatacgccagttctcttaaacccatagcagacatttatatgttaattcctcaatgtctcatttcccaccttttttaagaggaagaaaatactcaggctaaaactttcacccaagcataaaactcctggggactttacaagaattttgttttttgcactatgtgacgacacgattgtgagaattaaatataggagtgaaaaaccagagaaatggggcaaaatcccagattagtctttcctctttaagcatctgcttcccattttagaaacatgctttcatcaccacattcagcatcaatttttttctttcctctaacctgctcttcttttaaaaagtattctgggccgggcatggtggctcacacnnnnnnnnnnnnnnnnnnnnnnnnnnnnnnnnnnnnnnnnnnnnnnnnnnnnnnnnnnnnnnnnnnnnnnnnnnnnnnnnnnnnnnnnnnnnnnnnnnnnnnnnnnnnnnnnnnnnnnnnnnnnnnnnnnnnnnnnnnnnnnnnnnnnnnnnnnnnnnnnnnnnnnnnnnnnnnnnnnnnnnnnnnnnnnnnnnnnnnnnnnnnnnnnnnnnnnnnnnnnnnnnnnnnnnnnnnnncgtgatgagagcaagactgcatctcnnnnnnnnnngtattctgagccaggtgcagtggcttccagcactgtgggaggccaagggtgggtaggtcacttgaggtcaggagctt

SEQ ID NO: 348086 - DNA, 988 bp, Homo Sapiens
cttctccgaacgtgcaccctcatcagccacctcctcccctctttccctgagtgctgtgaacacagcagacctgcacacttctgcagatccagctcctacagcttggggcactaggctgcctttcctagtcctgtcaacaaccatacagtgcgaattgctgaattagctgctattctatgtggagtcacattaagctttttcttatctttttctatggggaagctatagggtgggtaaggaaaaaatgttgaatgcttttactttgctgaaaatattagaactctcttgtgacaggatacagcaaattataattaaatataaattaccagaaccagagctacctctaagtcatacttcctcaagcacaaagctctcaggcatatgagacccaccttaatgaagggtctctgatttcttgagcatcagcgagtttcagaagtgactatttttttgtactcttctagtttccttgtaactatacactttttcccattccacactgtgcttaaatgacaaagactcttctgagaagccaaattctgtccaagtattaactagagatattgttgattaaagaaaatctagaactgaagtgaaagaagagagttccagttctaatagtcttttgattaacaattcttttctgagaaatgatttttataagaaatggggtgattctttaaatgcttttcttaagttgaaggcacaacagttaatggctgtattgttgctattccgttgctgacatgtttttgataaagctttaacattcctgctactaattttggcggagagtgtttgccaggtttcaatgtgggctgcagctttttgtgctccttctctggtttgcagtgtaatgagttcataagctaaattttcagaaagaattttgtttaagattatgcctcttatctacttgagagcaacatgtcttttcaatcatgggattgacacatgaaaaataaagttatttcttaatcaaaaaaaa

SEQ ID NO: 348087 - DNA, 584 bp, Homo Sapiens
  misc_feature (74)..(90): n is a, c, g, or t
gtcaggaaggctgtcctacactaaaccttactgcatctgaaaacatgtttacatcccaacaagccaccttagcnnnnnnnnnnnnnnnnngaaaggaaaatgagattacaagtcaatacctccacagagaggtaactcctaatattcctatgatctctgaaccctatttaaaccctcctaaaataaaaatatcattttggtttttctattatatttaactctaaaggcgggctctgactaatttgcttgggcttgatgctacagtattagcacaagctataagctccctaccaccatataagccttgctcttcggccttccatcattttgaaccctaaacctcatagatttagaacgaaacactgtataaaaacaaacagataaagggttaaaatattacaaataaatagctaaaataatcttccctcccccagtcactcctaagaaacagacaccaaacattacttaagtgtccaaaatgaccaaagtccttcatttgcccatgactcaaacggacaactacctcaaacaaagttgaacaaccttcatgcaaatgcatcaaggaatgtattgctttttcattt

SEQ ID NO: 348088 - DNA, 447 bp, Homo Sapiens
  misc_feature (238)..(357): n is a, c, g, or t
  misc_feature (386)..(386): n is a, c, g, or t
  misc_feature (396)..(396): n is a, c, g, or t
ctctctcagcacagcctggggagggggtcattgttctcctcgtccatcagggatctcagaggctcagagactgcaagctgcttgcccaagtcacacagctagtgaagaccagagcagtttcatctggttgtgactctaagctcagtgctctctccactaccccacaccagccttggtgccaccaaaagtgctccccaaaaggaaggagaatggcagcctccacatctcgggttcaagnnnnnnnnnnnnnnnnnnnnnnnnnnnnnnnnnnnnnnnnnnnnnnnnnnnnnnnnnnnnnnnnnnnnnnnnnnnnnnnnnnnnnnnnnnnnnnnnnnnnnnnnnnnnnnnnnnnnnnnntggaacttcttgaggtgtaaatgatcttnccccaccttntgccttcccaagtgcttgggatttacaaggttttaagccacccgaatccat

SEQ ID NO: 348089 - DNA, 1598 bp, Homo Sapiens
aagttggcagcttcatggaggaggtgcgccaggagctggaggacctggagaggagcctgactgaagagatggcgctgagggagcctgcggctgccgccgctgcactgctgggaggggaagagatttagatctggaccaggctgtgggtagatgtgcaatagaaatagctaatttatttccccaggtgtgtgctttaggcgtgggctgaccaggcttcttcctacatcttcttcccagtaagtttcccctctggcttgacagcatgaggtgttgtgcatttgttcagctcccccaggctgttctccaggcttcacagtctggtgcttgggagagtcaggcagggttaaactgcaggagcagtttgccacccctgtccagattattggctgctttgcctctaccagttggcagacagccgtttgttctacatggctttgataattgtttgaggggaggagatggaaacaatgtggagtctccctctgattggttttggggaaatgtggagaagagtgccctgctttgcaaacatcaacctggcaaaaatgcaacaaatgaattttccacgcagttctttccatgggcataggtaagctgtgccttcagctgttgcagatgaaatgttctgttcaccctgcattacatgtgtttattcatccagcagtgttgctcagctcctacctctgtgccagggcagcattttcatatccaagatcaattccctctctcagcacagcctggggagggggtcattgttctcctcgtccatcagggatctcagaggctcagagactgcaagctgcttgcccaagtcacacagctagtgaagaccagagcagtttcatctggttgtgactctaagctcagtgctctctccactaccccacaccagccttggtgccaccaaaagtgctccccaaaaggaaggagaatgggatttttcttttgaggcatgcacatctggaattaaggtcaaactaattctcacatccctctaaaagtaaactactgttaggaacagcagtgttctcacagtgtggggcagccgtccttctaatgaagacaatgatattgacactgtccctctttggcagttgcattagtaactttgaaaggtatatgactgagcgtagcatacaggttaacctgcagaaacagtacttaggtaattgtagggcgaggattataaatgaaatttgcaaaatcacttagcagcaactgaagacaattatcaaccacgtggagaaaatcaaaccgagcagggctgtgtgaaacatggttgtaatatgcgactgcgaacactgaactctacgccactccacaaatgatgttttcaggtgtcatggactgttgccaccatgtattcatccagagttcttaaagtttaaagttgcacatgattgtataagcatgctttctttgagttttaaattatgtataaacataagttgcatttagaaatcaagcataaatcacttcaactgctcttctgtagttcttggatttcttttcccttttgactttgaataaatgtaaaatcctttcagccagaaaaagtaaaatagaaacaacctgtattaaaaatcttccatagaagc

SEQ ID NO: 348090 - DNA, 396 bp, Homo Sapiens
  misc_feature (26)..(26): n is a, c, g, or t
ttagtaactttggaaaggtaatatgnactgaaccgtagccatacaggttaaccctgccagaaaacagtacctaggtaattgtagggcgaggattataaatgaaatttgccaaaatcacttagcagcaactgaagacaattatcaaccacgtggagaaaatcaaaccgagcagggctgtgtgaaacatggttgtaatatgcgactgcgaacactgaactctacgccactccacaaatgatgttttcaggtgtcatggactgttgccaccatgtattcatccagagttcttaaagtttaaagttgcacatgattgtataagcatgctttctttgagttttaaattatgtataaacataagttgcatttagaaatcaagcataaatcacttcaactgct

SEQ ID NO: 348091 - DNA, 540 bp, Homo Sapiens
  misc_feature (11)..(11): n is a, c, g, or t
  misc_feature (447)..(447): n is a, c, g, or t
  misc_feature (452)..(452): n is a, c, g, or t
  misc_feature (505)..(505): n is a, c, g, or t
  misc_feature (524)..(524): n is a, c, g, or t
tctggaccggntgtgggtagatgtgcaatagaaatagctaatttatttccccaggtgtgtgctttaggcgtgggctgaccaggcttcttcctacatcttcttcccagtaagtttcccctctggcttgacagcatgaggtgttgtgcatttgttcagctcccccaggctgttctccaggcttcacagtctggtgcttgggagagtcaggcagggttaaactgcaggagcagtttgccacccctgtccagattattggctgctttgcctctaccagttggcagacagccgtttgttctacatggctttgataattgtttgaggggaggagatggaaacaatgtgggagtctccctctgattggttttggggaaatgtgggagaagagtgccctgcttttgcaaacatcaacctgggcaaaaatgcaaccaaatgaatttttccacgcantttcntttcccttgggcataaggtaagctgttgcccttcaagctgttttgccagaagnaattgttctggttcaaccntgccattaccaggttt

SEQ ID NO: 348092 - DNA, 606 bp, Homo Sapiens
ctgcctggacgctctgggcaataaaggggagcagagccaagactcccctcacttgatgtgtgctctcctctccaggaacacatccttaggtctcagatctgagagagagagatgcaataaagcgaacgctggcattcaaagtgagcgaggtttggaggctccgatccatacacctaagcagctactggtcctgaatgacatatcaaggtgcatggcatgccactacttagagacagatgccctccttacatttattaatggcatccacttctgtacacagctcataggggatttccagtttatattccctctcattccagtttttttccttcctgttttcttgaccattaaagtaatatatgcttattgtagacaactgagaaaatgaaaacagaaaaaatcctacccatccagaggcaatcactgttaataattagtccaatttcctttcagtcttttttctacccatctattgagatcattctgtagaaattatttaatacctgctttcatttgtttaacatcagaagtatttttccagattatcaaattcttgtaagtaattttaaatggcaacaaaatatcccattatatatcccattgtat

SEQ ID NO: 348093 - DNA, 309 bp, Homo Sapiens
atgagccaccgctcccagcctttgattttttaaggtggattttggttgttataaatggagaaaggtaagagttcaagttcaacccgtgtgtgaaagcaaaacaatggaaaacaggattggcttcttcaaaggctcctcttgtagaactgcctctttgaaacttcgaggtaatctactttggagactctgcctggagagggtcagttcctaagttaaaagcatcgcttaaccttggctcctgtggcattttacaaaggtttaaaggaattgattcctctgaaagggcctgaaaataaaaagtcttaacat

SEQ ID NO: 348094 - DNA, 343 bp, Homo Sapiens
tctatgagcttggttctgctttcctacacagactggaaaggaagagacagctacacccgttctccctaaggaatgggtgaaactctggcaaagacaggccaatattttctagaggtggaccacactctgacaatagttttcaaggtgtagttttcatagcaccagcttctgaaacacagggagtcctgttaacaacacaggatctgggacacccccaccaccctattgattgaatcagaaactctgtgggtaggatctaagaaactgaatttgatacaaaaccctgaagtgattcctatgcacattaacatttcagaagtgggctgggcctggtgggtcacac

SEQ ID NO: 348095 - DNA, 691 bp, Homo Sapiens
  misc_feature (246)..(246): n is a, c, g, or t
gggaacatcctactacttgccctgagcacaacaggctcagctataaggcagcacattaaaaccaagcagcttcttggggctcccaaagcctcaatctcagccaccctctggtaaattcactgaacaaggcaaaagaaataaactacagcaggcaggccttctagcttaggcagcttccttctgtccgaaaggcacccaatgccccctgctgtctgacttggaaacatgagcttccctaagggaagngggcagggaagttcctaccccatccagaagagttagttccagatctagctgctaaagcattttgagtcttttagtgaaaagaggaacacataggaaaggcaccctgccttgcagctggacctatagtccaagaaaacaacttcttttagttctctctggaccaaccacctcccctgcctcacctgcacaggcagagaacagctgaggagaagtcaagggcaggcatggaaaatagagctgacctacagacttcccacttactttgacttccatcttacaaataaacaaatgctcagaaaagactgaagctaagactgagcttatgaataaaacagaaaccccgttctttatctcctcctcccattccacatatcagcctattgtgaagtttatctttgggctcttttaggcagtgcagttaaagtccaatgcctggaatagtatc

SEQ ID NO: 348096 - DNA, 3288 bp, Homo Sapiens
  misc_feature (1448)..(1448): n is a, c, g, or t
  misc_feature (1450)..(1450): n is a, c, g, or t
aaaagcaggctggtaccggtccggaattcccgggatctgccgcacctctcctttcttctgtagctcgcgttgaagccgcacgtccggccccgatcccggcaccatgagcttcggctcggagcactacctgtgctcctcctcctcctaccgcaaggtgttcggggatggctctcgcctgtccgcccgcctctctggggccggcggcgcgggcggcttccgctcgcagtcgctgtcccgcagcaatgtggcctcctcggccgcctgctcctcggcctcgtcgctcggcctcggcctggcctatcgccggccgccggcgtccgacgggctggacctgagccaggcggcggcgcgcaccaacgagtacaagatcatccgcaccaacgagaaggagcagctgcagggcctcaacgaccgcttcgccgtgttcatcgagaaggtgcatcagctggagacgcagaaccgcgcgttggaggccgagctggccgcgctgcgacagcgccacgctgagccgtcgcgcgtcggcgagctcttccagcgcgagctgcgcgacctgcgcgcgcagtggaggaggccagctcggctcgctcgcaggccctgctggagcgcgacgggctggcggaggaggtgcagcggctgcgggcgcgctgcgaggaggagagccgcggacgcgaaggcgccgagcgcgccctgaaggcgcacagcgcgacgtggacggcgccacgctggcccgcctggacctggagaagaaggtggagtcgctgctggacgagctggccttcgtacgccaggtgcacgacgaggaggtagccgagctgctggccacgctgcaggcgtcgtcgcaggccgcggccgagggtggacgtgactgtggctaaaccagacctgacctcggctctgagggagatccgcgcccagtatgagtccctggccgctaagaacctgcagtccgcggaagaatggtacaagtccaagtttgccaacctgaacgagcaggcggcgcgcagaccgaggccatccgggccagccgcgaggagatccacgagtatcggcgccaccggcaggcgcgcaccatcgagatcgagggcctgcgcggggccaacgagtccttggagaggcagatcctggagctggaggagcggcacagtgccgaggtagctggctaccaggatagcattgggcagctggagaatgatctgaggaacaccaagagtgagatggcacgccaccttcgggaataccaggacttgctcaatgtcaaaatggctcttgacattgagatagcagcttacaggaaactgctggaaggcgaggagacacgttttagcaccagtgggttaagcatttcggggctgaatccacttcccaatccaagttacctgctcccacctagaatcctcagtgctacaacctccaaagtctcatccactgggctatcacttaagaaagangnggaggaggaggaggcatctaaggtagcctctaagaaaacctcccagataggggaaagttttgaagaaatattagaggagacagtaatatctactaagaaaaccgagaaatcaaatatagaagaaaccaccatttcaagccaaaaaatataattccattgctttgaaaaagttaatgcttaagagggaatgatatgcatttgacttgttaaacagcctattcctgaactataacacctgccaccactataaaatgtcttcaaggcttcagtctcatatttagtattgaatacttacattctctaataagaaaaccaccccttagattgaagtaaactgcagtcctggagcaatcacagatgagttatctaagaatacagctttctgaccttcagctcacgcttcacagtgatcgatgattcaggtgcagaggaagtacaaactaaggtgctaaatctgcgatcatcgtcatttgctgtgaactgaaattaaaactattcatgctacccagccattacccagctaaataatcttactctagatacctaaaacataagatcactgccagagataaactaatggtccacacccaattccactctgatagaattatttcacaaataataggtgtttgtttaatggacacttttcacctccttcaattccatatatccttttcttctatgtaggaaaaaaatagtctagtgtagtattcttcccttttaaacacattttggttcttctcaaaagaacttacccccattcgcgctctgctcagtgggtaaaattagatgcatgttgaccatgtctatgattcgtgtaattacttatgcctgcccatttcatattctttcaattctgtaggttaaaaaaatggcagtgatgaattttaagggtttcccccaacatataaaataatgcaaagaatccctagactttaggctttcagcttacacaaatctatttaattaggaaaaaaactattaaggatgtagcttttcacctttactttagaagcacagtaaatatcccaaactgtgatgaagccgaccttagatttagtagtgtaagctagaagaagtgagtgtttctatgagtggaaaaagccaaggtgtcatttatgtgtcagttcatttgtggtgatatagaattagctttttcatccccttacccttagaatccacgtattccccttcccactagcctaggtcataaagaggcgttgctttcactctcctatgccttttacgagtgctaagtgtaggatattttgtcaccagaacacaatgctaccgccccaaagtaaaagaaaccacttctggtcaatcaacactaccagcgtatatataagaaagacatctttctcttttctaaaagacttccctaacacttaccccatggctgcacagttggtggggtcctgccggagaggaagagacactcagaccagagaaggggtgtgcatgcgcctactcgcttgctagaagtagattctggacagtcagctcttcatctgcccaactgtgtagcatctgcattgcccagtctttcatgtgtgccaaggctgatgcaggatttgttctctgtccagcagtcacttcggccagagctgaagagttgccccgtctctgttccatgtctcctttaagagctctggtgataaggacatgatgcttttactgaactttcttatcctagcacatgcttcaatagttcaaggaacttgaaaaatacttttccttacctttaccccatccctgtctttactcctcacacttactgtaagacattagtaacataataaattaaaagtcacacgaatctcaccaacataaaaaaa

SEQ ID NO: 348097 - DNA, 1315 bp, Homo Sapiens
  misc_feature (1229)..(1273): n is a, c, g, or t
ggcctgggtggcgaattcggcacgaggggaggccacattgctgcgggacagcgactgcgagcggaagccgcccgcgccgccggccccagagaggcgggcggacaggcgagagccatccccgaacaccttgcggtaggaggaggaggagcacaggtagtgctccgagccgaagctcatggtgccgggatcggggccggacgtgcggcttcaacgcgagctacagaagaaaggagaggtgcggcaggcagggcgcggcggggcggtgcgcccggcttttaaggcgccggggctggggcggcgcgctgggggcggagctcctgctcagagtctggccgggagagggaaggggggcatccaggagtgggggcggggaggcgcagtgactaccgcagctgcgcgcgcgacgacctggggcgccgggacagggccatctgcatcggagtcgcccctttccgcagcgcttctccccaagaatcgactgcttcggaagtgactcgagcggaggggtgcctaaacgactgaggtttcccatccggaaaccacacagctctgtcgcatcccttgaccctatcccctcttctttaaccgactgggaggttaggggtttctgggaggtgtcccctacacccaccctcatcctgaggtgaggcgcacagaaagccttcccgagggcgaggtcgtgtttttccagttacagtgaggacctgcagagcgagcccttgtccccttcctcagggtccccaaggagaaaggtgggagatgctacgtcagaaagcatctctccagctgcccctctgcagctcctggggaggctccgggcggaaagatgttcagcaagtgcctctcccagaagagaggggagatcagtaaagaaagtgaccccgagctgcggagagtggggagaagcggcggtacagaggggaaaagaggccagacttggagaagcaggaggcgctgggaattgctggggctcatcgttagggcactaaagcatggcacaggccaggaccacaagctgctggaaagggggctgcagacttttgtgtatagagcattatattttaaaatatttcgaaaggagcatttttaaaccaggagatttcacctgtaaagaaattggatttctggcttcttctgaaaatgggaagagctgggatgcccacaagtggcagaggcttgagtgcagtggcaccaatctcggtcaatggaacctccgtctcctgggttcnnnnnnnnnnnnnnnnnnnnnnnnnnnnnnnnnnnnnnnnnnnnngtgttagccccaaacctggctgcgtaatgtttcaaggttatc

SEQ ID NO: 348098 - DNA, 415 bp, Homo Sapiens
  misc_feature (403)..(403): n is a, c, g, or t
agaaatcaaatatagaagaaaccaccatttcaagccaaaaaatataattccattgctttgaaaaagttaatgcttaagagggaatgatatgcatttgacttgttaaacagcctattcctgaactataacacctgccaccactataaaatgtcttcaaggcttcagtctcatatttagtattgaatacttacattctctaataagaaaaccaccccttaggattgaagtaaactggcagtcctgggagcaatcacaggatgaggttatctaaggaatacaggctttctggaccttcaggcttcacgctttcacagtgatcgatgattcagggtgcagagggaaggtacaaactaagggtgctaaatctggcggtccatcgtcattttgctgtggaactggaaanttaaaactattt

SEQ ID NO: 348099 - DNA, 433 bp, Homo Sapiens
  misc_feature (24)..(24): n is a, c, g, or t
  misc_feature (47)..(47): n is a, c, g, or t
  misc_feature (77)..(77): n is a, c, g, or t
  misc_feature (90)..(90): n is a, c, g, or t
  misc_feature (120)..(120): n is a, c, g, or t
  misc_feature (183)..(183): n is a, c, g, or t
aagagaacactcaagaacccaganaaaggggtggtggcaagcgcccnaactcgccttggccaagaaagtagattccnggaacagtccagnctcctccatcctgcccccaactgtgtaagncatcctgcattgcccccagtcctttccatgtgttgccaaggctgatgccaggatttgttcctnctgtcccagcagtcacttcggcccagagctgaaggagttgcccccgtctctgttcccatgtctcctttaagagctctggtgataaggacatgatgcttttactgaactttcttatcctagcacatgcttcaatagttcaaggaacttgaaaaatacttttccttacctttaccccatccctgtctttactcctcacacttactgtaagacattagtaacataataaattaaaagtcacacgaatctcacc

SEQ ID NO: 348100 - DNA, 763 bp, Homo Sapiens
atacttaaccaagatgcgaggcctttccatatcaagcaaaatattcctttgcttctttagctgtactagtaccccaatcctttatagtactttattttccaggctttctggttttctatatgttttttccattcgtcaaattcaggaatactgtagaaggaaagttcctgcttatttttgcttgcctttacaataggagtaatgaactcttcaagaaaaccatgcttcaaaagtgatggccaattgtgatggatgaaattaataagcaggccttttatgtgagaaccatcttgatcctgatcggtcataatcataatctttccatagcgtaaggttttcagagattctgcatcatcgtaacttttcttatattgtagaccaactattttaataatattatttatttcagcattttccatgatctgtttatgagaagcttcccgtacattaagaattttgcccctgagtggaaaaactccgtatctgtctcgtccaatcacacctaatccagacacagccagtgatttggcagagtctccctctgttaatatcagtgtacactccagggaatgtttaccaccagcatcattagcatcatccagtttgggaatacctttgattttactgtattttactgatgaacacttcttattcagctgagtctgagccttaaatttcacccagttcaggatactttctacaatgccacaattagaggctgctttaaaaaatttttctgacagctggcatttagacccaaaac

SEQ ID NO: 348101 - DNA, 1584 bp, Homo Sapiens
  misc_feature (570)..(590): n is a, c, g, or t
caagggtgtgaaataataaagtagaaggggaagaaaagagaggcggggtagcggtctatttgttgaaggggaaggaataaggaaggaccacaattggagactaaggagttatgaaaggaaacaggtaatgaaatggtatgaagcacacactgtgggatatatgagagcaggggaatgtaaaagccgttttggggtaagggaaaacccagggtggacagggggtgggttggggtgggggtgctctcgggttgtgtctgtgaccgtgactgcgtacctgtgactgtgcagcgcccgtggtgatctggggtagggggcacccctacagtgggacccctcccccattattctttctgtccagcccctccctcccactggagcagctccagagccattcctcacccccgtgacctctcccagccagggctgagaggattcgaggtggctgggagggtttccaggccccctgccccttccccacaaactgggtgatagggcggacttacctggcccagccctgcctccctcagccaacccagcccttgggctgtctgtgtcagtggtttccggtcnnnnnnnnnnnnnnnnnnnnnctggctaaaatagtttgcaaaggaccaggtaattggggaggggagagaggtgggggcaagggggaaatgcccccccatctccttggaggcagtggtgtgaatcttcttcaacagcaattaaagaggaagtgattttgtccagggggtgagctgctggtctgttcttggaggcaggtcagggcatggccttggtcaagaaggggtactggggttgaacagggacaggcagaggtgcctcccactggggctggtggcagacacagatacccatgggcatggaggtggttccatcatgtacaacagttctgggttcatgtagtggagtacgtgggcaggttggagtcagtggggaccctgggaacagagaaggcactgactcttaagatgatgccagtcctgggagagttgggatatggtacttagaggagaggacaggcccatggagaggggtgggaagatgggacagctttgtttaagagcaggaactttggagacagatctgattttgaaacctgcccctccgctgcacagctaggggaccttggtggcatctgtttatctgtattctgaacagtatctgttcagagggcacctgaaaggcgctccagctctgaggagggctgccccgagccagcctgctctccgtgagcactaggtaccagagtagaacatagagtaggggttcctcccctggcctcgtcagggggtgttccagagggaaggggtgggagacctcctgggaaagatttcccagctagctgcagaggtccctggtgtccacaaactcagtgtcagctgatgcaggcatttatccacctccgtgccatcaaagggacccccaaggccgcagcggcctcaagccggtgctgcctccgtgagctgcagtgccactaggctcagcacatagccaatccagccatttatcgagggcagctgaaagtgtttactcaggtagaggggctggaacagggtaggtgttgggtcagcagcccgt

SEQ ID NO: 348102 - DNA, 1154 bp, Homo Sapiens
  misc_feature (4)..(4): n is a, c, g, or t
  misc_feature (11)..(11): n is a, c, g, or t
  misc_feature (24)..(24): n is a, c, g, or t
  misc_feature (29)..(29): n is a, c, g, or t
  misc_feature (32)..(32): n is a, c, g, or t
  misc_feature (35)..(35): n is a, c, g, or t
  misc_feature (38)..(38): n is a, c, g, or t
  misc_feature (40)..(40): n is a, c, g, or t
  misc_feature (46)..(46): n is a, c, g, or t
  misc_feature (69)..(69): n is a, c, g, or t
  misc_feature (80)..(81): n is a, c, g, or t
  misc_feature (95)..(95): n is a, c, g, or t
  misc_feature (102)..(102): n is a, c, g, or t
  misc_feature (115)..(115): n is a, c, g, or t
  misc_feature (121)..(121): n is a, c, g, or t
  misc_feature (127)..(127): n is a, c, g, or t
  misc_feature (129)..(129): n is a, c, g, or t
  misc_feature (163)..(163): n is a, c, g, or t
  misc_feature (168)..(168): n is a, c, g, or t
  misc_feature (173)..(173): n is a, c, g, or t
  misc_feature (175)..(175): n is a, c, g, or t
  misc_feature (195)..(195): n is a, c, g, or t
  misc_feature (199)..(199): n is a, c, g, or t
  misc_feature (206)..(206): n is a, c, g, or t
  misc_feature (221)..(222): n is a, c, g, or t
  misc_feature (231)..(231): n is a, c, g, or t
  misc_feature (246)..(246): n is a, c, g, or t
  misc_feature (248)..(248): n is a, c, g, or t
  misc_feature (300)..(300): n is a, c, g, or t
  misc_feature (303)..(303): n is a, c, g, or t
  misc_feature (311)..(311): n is a, c, g, or t
  misc_feature (317)..(317): n is a, c, g, or t
  misc_feature (351)..(353): n is a, c, g, or t
  misc_feature (389)..(389): n is a, c, g, or t
  misc_feature (393)..(393): n is a, c, g, or t
  misc_feature (408)..(408): n is a, c, g, or t
  misc_feature (415)..(415): n is a, c, g, or t
  misc_feature (429)..(429): n is a, c, g, or t
  misc_feature (442)..(442): n is a, c, g, or t
  misc_feature (447)..(447): n is a, c, g, or t
  misc_feature (449)..(449): n is a, c, g, or t
  misc_feature (494)..(494): n is a, c, g, or t
  misc_feature (498)..(498): n is a, c, g, or t
  misc_feature (500)..(500): n is a, c, g, or t
  misc_feature (504)..(504): n is a, c, g, or t
  misc_feature (579)..(579): n is a, c, g, or t
  misc_feature (583)..(583): n is a, c, g, or t
  misc_feature (622)..(622): n is a, c, g, or t
  misc_feature (627)..(627): n is a, c, g, or t
  misc_feature (634)..(634): n is a, c, g, or t
  misc_feature (640)..(640): n is a, c, g, or t
  misc_feature (647)..(647): n is a, c, g, or t
  misc_feature (663)..(663): n is a, c, g, or t
  misc_feature (687)..(687): n is a, c, g, or t
  misc_feature (699)..(699): n is a, c, g, or t
  misc_feature (710)..(710): n is a, c, g, or t
  misc_feature (725)..(725): n is a, c, g, or t
  misc_feature (739)..(739): n is a, c, g, or t
  misc_feature (775)..(776): n is a, c, g, or t
  misc_feature (786)..(786): n is a, c, g, or t
  misc_feature (802)..(803): n is a, c, g, or t
  misc_feature (815)..(815): n is a, c, g, or t
  misc_feature (829)..(829): n is a, c, g, or t
  misc_feature (833)..(833): n is a, c, g, or t
  misc_feature (838)..(838): n is a, c, g, or t
  misc_feature (847)..(847): n is a, c, g, or t
  misc_feature (855)..(855): n is a, c, g, or t
  misc_feature (858)..(859): n is a, c, g, or t
gggnccctggnaccgaaaaggcanggctntgnggngangncagtcntgggagagtgggatatggtactngggggagagannagccccatggagangggtggnaagatgggacagntttgtntaagancnggaactttagaaacagatctgattttgaaacctnccccnccacnanacagctaggggaccttgatngcanctgtttntctgtattctgtacnntatctgttnagagggcacctgaanangcgctccagctctgaggagggctgccccgagccagcctgctcaccgtgagcnctnggtaccanagtagnacatcagagtgagggttcctccccctggcctcgnnnagggggtgttcctagaggggaaggggtgggagaacntagntgggaaaagatttcnccagctngctgcaagaggtcncctggtgtctcanaaaantncagtgtcaagctgatgctaggcattttatccactctccgtgcacntctnangggncctgccaaggccacgcgcggcctgaggcgcggtgcgtgcctccgtgggctgctgtgccactaggctctgcacatngccnatcctaccatttctcgagggccgctgaaagtgtttgctnaggtngaggggntggacngggttgngttgggtcagctgccngtgctggttgggcacagccatttnttgttctcttcnttgtggggttngttggtcgccccagnatctttgggtaganttgcttcgtgacccttggtgcctctaccgagccccnngaggttctgntgcaagtgtgccactnnactgaggacacngcaccagacctgantccngttcncatggaggntgcggctntanngggtcctaggctgtgaccacccagcacagcggcgtgacccaggaaaggtggattcaaccagtgctaggtgcagtgacaagtacagaggcagctcgcactcctgtcctcgctcggcgcacaatgtttgctccgcttcttcagaagtttgggagtgtgagagaatatgggaaggaaataaggaccctggagagaatggaattgccttcaaagagcaagtgggaagtgcctttcatttccaaaaagtgaaaaatggtcaaggtgtcagcaaacctcacaacaaatcccaacaccaagt

SEQ ID NO: 348103 - DNA, 825 bp, Homo Sapiens
  misc_feature (89)..(89): n is a, c, g, or t
  misc_feature (214)..(214): n is a, c, g, or t
  misc_feature (221)..(221): n is a, c, g, or t
  misc_feature (258)..(258): n is a, c, g, or t
  misc_feature (299)..(299): n is a, c, g, or t
  misc_feature (304)..(305): n is a, c, g, or t
  misc_feature (310)..(311): n is a, c, g, or t
  misc_feature (320)..(320): n is a, c, g, or t
  misc_feature (335)..(336): n is a, c, g, or t
  misc_feature (342)..(342): n is a, c, g, or t
  misc_feature (352)..(352): n is a, c, g, or t
  misc_feature (392)..(394): n is a, c, g, or t
  misc_feature (403)..(403): n is a, c, g, or t
  misc_feature (428)..(428): n is a, c, g, or t
  misc_feature (436)..(436): n is a, c, g, or t
  misc_feature (441)..(441): n is a, c, g, or t
  misc_feature (443)..(443): n is a, c, g, or t
  misc_feature (453)..(453): n is a, c, g, or t
  misc_feature (471)..(476): n is a, c, g, or t
  misc_feature (487)..(487): n is a, c, g, or t
  misc_feature (493)..(493): n is a, c, g, or t
  misc_feature (505)..(505): n is a, c, g, or t
  misc_feature (509)..(509): n is a, c, g, or t
  misc_feature (520)..(521): n is a, c, g, or t
  misc_feature (524)..(524): n is a, c, g, or t
  misc_feature (538)..(538): n is a, c, g, or t
  misc_feature (568)..(568): n is a, c, g, or t
  misc_feature (576)..(576): n is a, c, g, or t
  misc_feature (579)..(580): n is a, c, g, or t
  misc_feature (586)..(586): n is a, c, g, or t
  misc_feature (591)..(591): n is a, c, g, or t
  misc_feature (596)..(596): n is a, c, g, or t
  misc_feature (599)..(599): n is a, c, g, or t
  misc_feature (640)..(640): n is a, c, g, or t
  misc_feature (666)..(666): n is a, c, g, or t
  misc_feature (672)..(672): n is a, c, g, or t
  misc_feature (674)..(674): n is a, c, g, or t
  misc_feature (676)..(676): n is a, c, g, or t
  misc_feature (712)..(712): n is a, c, g, or t
  misc_feature (720)..(720): n is a, c, g, or t
  misc_feature (723)..(723): n is a, c, g, or t
  misc_feature (725)..(725): n is a, c, g, or t
  misc_feature (727)..(727): n is a, c, g, or t
  misc_feature (736)..(736): n is a, c, g, or t
  misc_feature (746)..(747): n is a, c, g, or t
  misc_feature (756)..(757): n is a, c, g, or t
  misc_feature (766)..(766): n is a, c, g, or t
  misc_feature (768)..(768): n is a, c, g, or t
  misc_feature (772)..(772): n is a, c, g, or t
  misc_feature (795)..(796): n is a, c, g, or t
  misc_feature (802)..(802): n is a, c, g, or t
  misc_feature (806)..(806): n is a, c, g, or t
ctcaaaaaacctgctttattcttagaggcagaaagtaacacttcacattcagatgattcagcatccagcagttctgaggaaagtgaggnaagagacactaagaaaaccaaaaggaaaaagagagagaaaaaagcccatacctctgtagccaacaatgaaatacaggagaggacaaacaaacgcacaaattggaaagtagctacagatgaaaggnctgctgngagctcaaaggatgactaaatgggaaacacttttgtnttccacatgactgtggatatttacagttcttactccttgtngtttnnccagnncctcttgtncagcacggggcctgnngtcagncctgtcttgngccatctgtatgtcctgacagacgtcttgtcttctatttnnncgttaagcntgatccccttttcttgttaaaaggnaatctggnatttngncatgaaggcntcttgaagagattttttnnnnnngggatttattncgtttngtgtagagtgcntttntagcaaatttnnggncccagaaagctggntccaatagtgacctgggtacaccaatcggnatattganttnngggaantcaanggttnggntttatatgtggattggtactaatgccatgtaggttggtttnttttggtaacattgtattgttctttntttatntngnaggtgtcacaactaacttgtttttagccttggtgcnttgatccntcnanantttttcccncaggtgtggnncggtttacnnaaacagganangggnctaagaacaaaccttttccctcnngataantccntagacaactattagaaggg

SEQ ID NO: 348104 - DNA, 2054 bp, Homo Sapiens
  misc_feature (89)..(133): n is a, c, g, or t
  misc_feature (465)..(475): n is a, c, g, or t
  misc_feature (1843)..(1843): n is a, c, g, or t
ctcaaaaaacctgctttattcttagaggcagaaagtaacacttcacattcagatgattcagcatccagcagttctgaggaaagtgaggnnnnnnnnnnnnnnnnnnnnnnnnnnnnnnnnnnnnnnnnnnnnncccatacctctgtagccaacaatgaaatacaggagaggacaaacaaacgcacaaattggaaagtagctacagatgaaaggtctgctgagagctcagaggatgactaaatgggaaacacttttgttttccacatgactgtggatatttacagttcttactccttgtggttttgccagtaactcttgttcagcacggggcctgaggtcagagctgtcttgtgccatctgtatgttctgacagacgtcttgtcttctattttggcgttaagcttgatccccttttcttgttaaaagggaatctggtattttgttatgaaggtttcttgaagagannnnnnnnnnngcaattaattacgtttagtgtagagtgcatatacagcaaattaaaggacccagaaagctggatccaatagtgacctgggtacaccaatcggaatattgaatttggggaagtcaagggctgggatcaagaggtggattggaactaatgccatgtaggatggtatgacaaggcaacactgtattgctctctgtttatatagcaggtgtcacaactaacttgtctttagccttggtgctttgatccttctatattttgaccccacaggtgtggtccggtttacttaatcaggacatgggcctaagaacaaaccttttcccttcatgataacatccatagacaacttattagaagggactagagtttttgcaaatttccctgctggatggggcctatagctatacttagtatatgcctaaacatggtaattggatagtaaatggttttctagttccattgctgtatatttgcctaaatggacttgtgttcaaattatttcttcaattgtcatagataatcctgtaccaaatggggaagaattaggaaataatcatgttgtctaatggtactctggattcagggcagcaactgccatttaaatgttgtcttgttcatttctaaatctgttcatgaagtttaggttttccctgaaactaagttgaattatttccaaaatgaaacaggcttctcagggacatatccacttcttcccagtctgcctttggattaaagcaccaagcagagaccacattaattccctttgctatactgtgatccttagtatgttaattcttaagaaaccaacatatcactgaaagaaggctggcagaacgcaagtgcattttttcactgtgggaagaaagatcaagtgacgtattattttttcctggttgtcacttaatgggctgagtaaaaagcttgaaaactcagactttcggtcttggttctgccactcattggttatgaggaggcccagagcaggtaagttcaccttcctggccttactttcctgatgtgtaatacggaattacttcacagtagcatgacagtataagacaccagcagtagatacaactatgatgacattccatgagttggtatttttagttctaactgctaaatttgttctctttacgggacagatttctaataaagtgcttggtcttaaaatacatggttggacagaggtgccctatcccttaactatgagcaggtgctaccttttgggatatttattttaaattttaatactttggtactcaattgtcagtgttccatggtgtgtatttttatttttgggattagtgggggtctaaagggagaagaatagtctctaattactacctcttaacctaaagcaattattttgtncctggagcaagttaaatctttgttggaaggagctttggccatatattttttagcatgcattgtttctgtgccctgaaagtacctgaaaggttttaagcacagactcaggaaaatgtgccagtagaacaggccatctccaggaaattggctctatttgggtcctgaccttcccttcctcccaagttagcaggcttgttcttttgcaaggaat

SEQ ID NO: 348105 - DNA, 969 bp, Homo Sapiens
  misc_feature (386)..(448): n is a, c, g, or t
  misc_feature (644)..(702): n is a, c, g, or t
gaggaatcagatatgtggaaaataagagaactggaaaaacagatggaagatgcttaccgggggaccaaaaggaaaatgctacccagcagttcaagccggatgcgcagtgatggttttgatgaagaaagtcaaagatactattggaggccaaagaatgaaatttctgggacactggaagatgattttcttaaggctaaatcctggaataaaaagttctatgattatgaagcaaacatgccagacagatggggtcacagtggttataaagagttataccctgaagaatttgaaacagacagtagtgatcagcaagatattaccaacgggaagaaaacatctccccaggtaaagtcatctacccatgaatcccgcaaacacaagaagtnnnnnnnnnnnnnnnnnnnnnnnnnnnnnnnnnnnnnnnnnnnnnnnnnnnnnnnnnnnnnnnaaaggaagccacagatataacagcagattcctcgagtgagttctcagaagaaactggggcttctggtacaaggaaagggaaacaaccacataaacgcaagaaaaaatccaggaaaaagtctctcaaaaaacctgctttattcttagaggcagaaagtaacacttcacattcagatgattcagcatccagcagttcnnnnnnnnnnnnnnnnnnnnnnnnnnnnnnnnnnnnnnnnnnnnnnnnnnnnnnnnnnncccatacctctgtagccaacaatgaaatacaggagaggacaaacaaagcgcacaaattgcgaaagtagctaccgatgaaaaggtctggtgagagctcagaggatgactcaactgggaaacagcttttgttttccacattgactgtggatatttacagttcttacctcctgtgggtttgccagtgaatcttgtcagcccggggccggggtcgacctgtctggtgcctgttgtctgacgacgcttgcctcatttgggttagttgtccca

SEQ ID NO: 348106 - DNA, 1358 bp, Homo Sapiens
  misc_feature (1129)..(1159): n is a, c, g, or t
ccatatagacatcgatccgaatgaaccttatgatgtgtatagtgagatgtactcagtgtgattttaaaccaaattgtcttcctgtagtcacaatatatactgtagccttttaacagcaagtcttgcttacccaaacagaaagccattctgaaaccctacagtatcacaggtgagaaaaggtggttattttttccccaagacaacagcactagtaatcccacttaataagagcttatttaattggatgtcagcctcttaactgctaagcactttgtgggtctcagcgtttttcataaaagaacttttgtatttaatacaaagtttgctttgagacttttcagcatatgatcttttttccataaacttgtacagtgcaaaagacattttgaataccatgatcgatgatgtcccatgcttcgaggaaaaccaaacactttccgcctctcttgcaaaatccattcctcatgctgaccctcctcacgatggctgtgtcagcccagccccttcccttctccaggcccagagaactcttccacaaacaagatgagagccactcgggaaaagagccatagtcaactgggagggcctacatctggatggcggtggaaaaacttgagggtttggggttcaaagtcagcccatcccacctggcaaaatcctcctggaaggaggaccttcaagagcgcatcacctgaatgtcgtgaagaagtatctctgaatgtatccaggagaggaactgcataaccaaaggggtgaccagccctcagatgtgcttattggattccagtacaaacgccaccaaagccagcccactgctctcctacaaggaaggaaagatctgcacgtgtaaaacatggggcagccttggaacatggtgttttttggagtttcctttctcacagttttccatctccccacttctttgatcagtcatgtgtccgtgacctcgttccatgacatcaggatagctgtgtttgcacaccatgctgcatgttcatttggagccaggaggggttctcagtggagcctggcttagggaacagggagcgatggaagaatgccaacattagcgttggtcttctcttgtcaggaatgaaggatgcttgcacacatgcaccccctcactctnnnnnnnnnnnnnnnnnnnnnnnnnnnnnnngaaatggttggtttgtcaaaactcactgtagtacataaagcttgcactctgcgtcctatatctagcagcatggggtacgtttggcagttcactccattagggggtaaataatttatgaccattcatctgtttttatgaatttttttatctagacaataattgtaaataaagaactcaccatctctgttcatttaatact

SEQ ID NO: 348107 - DNA, 447 bp, Homo Sapiens
  misc_feature (85)..(105): n is a, c, g, or t
ccattgactccatgggtgctagatatatggacgcagagtgcaagctttatgtactacagtgagtttggacaaaccaaccatttcnnnnnnnnnnnnnnnnnnnnncaaggtgtgagagtgagggggtgcatgtgtgcaagcatccttcattcctgacaagagaagaccaacgctaatgttggcattcttccatcgctccctgttccctaagccaggctccactgagaacccctccgggctccgaatgaacatgcagcatggtgtgcaaacacagctatcctgatgtcatggaacgaggtcacggacacatgactgatcaaagaagtggggagatggaaaactgtgagaaaggaaactccaaaaaacaccatgtcccaaggctgccccatgttttacacgtgcagatctttccttccttgtaggagagcagtgggctggctttggtgg

SEQ ID NO: 348108 - DNA, 1095 bp, Homo Sapiens
gggagtcctcgaaggctcggaagcccgtcaccatgtcgtgcgagtcgtctatggttctcgggtactgggatattcgtgggctggcgcacgccatccgcctgctcctggagttcacggatacctcttatgaggagaaacggtacacgtgcggggaagctcctgactatgatcgaagccaatggctggatgtgaaattcaagctagacctggactttcctaatctgccctacctcctggatgggaagaacaagatcacccagagcaatgccatcttgcgctacatcgctcgcaagcacaacatgtgtggtgagactgaagaagaaaagattcgagtggacatcatagagaaccaagtaatggatttccgcacacaactgataaggctctgttacagctctgaccacgaaaaactgaagcctcagtactttggaagagctaccctggaaaactgaaacaattctccatgtttctggggaaattctcatggtttgccggggaaaagctcacctttgtggattttctcacctatgatatcttggatcagaaccgtatatttgaccccaagtgcctggatgagttcccaaacctgaaggctttcatgtgccgttttgaggtgacgtttcctgcacctttctcttataaaaacactcacaggctcccctgggacctgcaggatcccatagtggaggattcttccccggcttttgcctaatgggatcaatggttggacacctctagacctttaagtcttgggaagagcctaacttctataccttgaaggcactgtctacaaaaaaatggaggaggtagacgcaggcaacacgtgaatgttgcttttctggtatgcatctgttggactgggttggggtctttataagatttggtgtattttcctttcaggctttggagaaaatcgctgcctacttacagtctgatcagttctgcaagatgcccatcaacaacaagatggcccagtggggcaacaagcctatatgctgagcaggaggcagacttgcagagcttgttttgtttcatcctgtccgtaaggggtcagcgctcttgctttgctcttttcaatgaatagcacttatgtta

SEQ ID NO: 348109 - DNA, 918 bp, Homo Sapiens
agagttaggccaaattaggaagtccaggtctagcttgaattcacatccagccaattggccttcgatcatagtcaggagctgtaagagacggtatttaagtgggaccccaacctccttatacgcccacctgacaagagcaaagatcttaagaaatgacttggtcccatacctcaaattccaggccccaaaagcataaccattgagcctctgagccctatttggttaagcattaagacgggtttgggctatgttaaaaagagaacccctcagttccagataaaggatgttggtctctagtcacccagattggggcaaacgtcccaccccggccttggcgcgacgccaccaccctctgggcgtaagaagaccagggcaggtggagggccaagacttggctgcacgggcacgcggagcggcagtaccttccccgcacggtgtaccgtttctcctcataagaggtatccgtgaactccaggagtcagggcggataggcgtgcgccagctggggaagacagcggttcagcgacgtgcgcagctcccacccattcccaacccccgcccgctaacgttccccggcccggggctgccgagtccctgcgtcctgccggggcggtggataagcggcccctaggcccggctccggcgtggtctcctccgcccctccccacagggcccgcgatcccagaggctgggcaggggtcgacatccgtggctcggcagctcgaaaaggctcccgcgtagagctgctcctgctggagatcgcggacccagagacccgccctctccgcgtcagtctctttgaccgagcggctctaccgttgagacaggcactcaccccacgaaccatcccagtacccgagaaccatagacgactcgcacgacatggtgacgggcttccgagccttcgaggactccgct

SEQ ID NO: 348110 - DNA, 1366 bp, Homo Sapiens
  misc_feature (1117)..(1117): n is a, c, g, or t
  misc_feature (1140)..(1185): n is a, c, g, or t
  misc_feature (1205)..(1262): n is a, c, g, or t
  misc_feature (1284)..(1322): n is a, c, g, or t
gtggtcggtcggaatgtagggatagcccgtcaccatgtcgtgcgagtcgtctatggttctcgggtactggtgatattcgtggggggagtgccgtctcaacggtagagccgctcggtcaaagagactgacgcggagagggcgggtctctgggtccgcgatctccagcaggagcagctctacgcgggagccttttcgagctgccgagccacggatgtcgacccctgcccagcctctgggatcgcgggccctgtggggaggggcggaggagaccacgccggagccgggcctaggggccgcttaaccaccgccccggcaggacgcagggactcggcagccccgggccggggaacgttagcgggcgggggttgggaatgggtgggagctgcgcagtcgctgaaccgctgtcttccccagctggcgcacgccatccgcctgctcctggagttcacggatacctcttatgaggagaaacggtacacgtgcggggaagctcctgactatgatcgaagccaatggctggatgtgaaattcaagctagacctggactttcctaatctgccctacctcctggatgggaagaacaagatcacccagagcaatgccatcttgcgctacatcgctcgcaagcacaacatgtgtggtgagactgaagaagaaaagattcgagtggacatcatagagaaccaagtaatggatttccgcacacaactgataaggctctgttacagctctgaccacgaaaaactgaagcctcagtacttggaagagctacctggacaactgaaacaattctccatgtttctggggaaattctcatggtttgccggggaaaagctcacctttgtggattttctcacctatgatatcttggatcagaaccgtatatttgaccccaagtgcctggatgagttcccaaacctgaaggctttcatgtgccgttttgaggctttggagaaaatcgctgcctacttacagtctgatcagttctgcaagatgcccatcaacaacaagatggcccagtggggcaacaagcctatatgctgagcaggaggcagacttgcagagcttgttttgtttcatcctgtccgtaaggggtcagcgctcttgctttgctctnttcaatgaatagcacttatgttnnnnnnnnnnnnnnnnnnnnnnnnnnnnnnnnnnnnnnnnnnnnnngggcgggcgcgcccaacaannnnnnnnnnnnnnnnnnnnnnnnnnnnnnnnnnnnnnnnnnnnnnnnnnnnnnnnnntattggggcctattataaactnnnnnnnnnnnnnnnnnnnnnnnnnnnnnnnnnnnnnnnaaactgcggcactgggggaattttttggagaagcctctttttct

SEQ ID NO: 348111 - DNA, 886 bp, Homo Sapiens; identical to SEQ ID NO: 15378

SEQ ID NO: 348112 - DNA, 967 bp, Homo Sapiens
cgcccgaaagacccaagagggtgccggggttgtgagcgccctcgttattggggggtccctgtggaagtgagaatccgcatagacccaatgggtttggtgggccgaagttgttttgacctctccctgtgatctacagggccaataattagcgcctcatgttgcgccccccacttcgggggcccgattcaatttgttggtttagaaagtggcgaattctatggccgaggaagcttgatcccaggacctggtaaacgtaagggccaagcgagttttttcttccccaaaagccctcacaaaagcgggcccccatgaagagtcccctttcagggttttggggaagtttcatcccaggccaccttgggggtccaaaatattccggttttggatcccaagataaccatagggtgaaggaaaaaatcccccctaaggggagctttttccccccgggcaaaaacccatggaggaaatttcccccaggaaaccatggaagaattggtttcaagttgtcccaggtagctcttcccaaggtacctgaggggcttcagtttttcgtggtcagaggctgtaaccagagccctttatcagtttgtgtgcggaaatcccaattacttggttctctatgatgtccactcgaatcttttcttctttccagtctcaccacacatgttgtgcttgcgagcgatgtagcgcaagatggcattgcttctgggtgatcttgtttcttcccatccaggaggtagggcagattaggaaagtccaggtctagcttgaatttcacatccagccattggcttcgatcatagtcaggagcttcccccgcacgtgtaccgtttctcctcataagaggtatccgtgaactccaggagcaggcggatggcgtgcgccagcccacgaatatcccagtacccgagaaccatagacgactcgcacgacatggtgacgggcttccgagccttcgaggactccc

SEQ ID NO: 348113 - DNA, 1373 bp, Homo Sapiens
atcaggccaaatcggccgagctcgaattcgtcgagagcggagtcctcgaaggctcggaagcccgtcaccatgtcgtgcgagtcgtctatggttctcgggtactgggatattcgtgggctggcgcacgccatccgcctgctcctggagttcacggatacctcttatgaggagaaacggtacacgtgcggggaagctcctgactatgatcgaagccaatggctggatgtgaaattcaagctagacctggactttcctaatctgccctacctcctggatgggaagaacaagatcacccagagcaatgccatcttgcgctacatcgctcgcaagcacaacatgtgtggtgagactgaagaagaaaagattcgagtggacatcatagagaaccaagtaatggatttccgcacacaactgataaggctctgttacagctctgaccacgaaaaactgaagcctcagtacttggaagagctacctggacaactgaaacaattctccatgtttctggggaaattctcatggtttgccggggaaaagctcacctttgtggattttctcacctatgatatcttggatcagaaccgtatatttgaccccaagtgcctggatgagttcccaaacctgaaggctttcatgtgccgttttgaggctttggagaaaatcgctgcctacttacagtctgatcagttctgcaagatgcccatcaacaacaagatggcccagtggggcaacaagcctatatgctgagcaggaggcagacttgcagagcttgttttgtttcatcctgtccgtaaggggtcagcgctcttgctttgctcttttcaatgaatagcacttatgttactggtgtccagctgagtttctcttgggtataaaggctaaaagggaaaaaggatatgtggagaatcatcaagatatgaattgaatcgctgcgatactggcatttccctactccccaactgagttcaagggctgtaggttcatgcccaagccctgagagtgggtactagaaaaaacgagattgcacagttggagagagcaggtgtgttaaatgggactggagtccctgtgaagactgggtgaggataacacaagtaaaactgtggtactgatggacttaaccggagttcggaaaccgtcctgtgtacacatgggagtttagtgtgataaaggcagtatttcagactggtgggctagccaatagagttgggacaattgcttactcattaaaaataatagagccccacttgacactattcactaaaattaatctggaatttaaggcccaacattaaacacaaagctgttgaaatattgatgaaaatgtaagaatttttgtgaccacggggtaggagaagtttctttaaagacgt

SEQ ID NO: 348114 - DNA, 419 bp, Homo Sapiens
  misc_feature (115)..(115): n is a, c, g, or t
agctacctgcacagctgaaacaattctcattgttcctggggaaattcacatggtttgcaggagaaaagctgacctttgtggattttctcacctatgatgtcttggatcagaaccngtatatttgagcccaagtgtcatggatgagttcccaaacctgaaggctttcatgtgccgttttgaggctttggagaagattgctgcattcctgcagtctgaccgcttcttcaagatgccaatcaataacaagatggccaagtggggtaacaagtgcttatgctgagccagagctcgctgctgctgagccatcttgccctgaggggcccacactcttagctcactgtcaagtcttgttcccatcctgtccctgagggcccccactctgtctcctctgctcctttctaataaacagcagttgcatt

SEQ ID NO: 348115 - DNA, 559 bp, Homo Sapiens
  misc_feature (223)..(400): n is a, c, g, or t
  misc_feature (462)..(486): n is a, c, g, or t
atgagtgaatctgaaaaataactcaacaataatgaatagtaactaatataagccacacaaaatttgggaaaaaagaataaacacacaaagctaagtgtatcagataattttttaaaatagacttactataggtctagaagtcccaaaggaaaccatgatggaagaatttggctttttttgctttagaaagatatatgaaagatggctgggcgcgatggctcannnnnnnnnnnnnnnnnnnnnnnnnnnnnnnnnnnnnnnnnnnnnnnnnnnnnnnnnnnnnnnnnnnnnnnnnnnnnnnnnnnnnnnnnnnnnnnnnnnnnnnnnnnnnnnnnnnnnnnnnnnnnnnnnnnnnnnnnnnnnnnnnnnnnnnnnnnnnnnnnnnnnnnnnnnnnnnnnnccttaaatccaggaggcagggtttgctgctctccagcctaggcgacaaagagagactgtctnnnnnnnnnnnnnnnnnnnnnnnnngaaagatatttgaaagacagtagtttagcagagtgctatgggacaaaagaatgttacaagtgaaatggttcca

SEQ ID NO: 348116 - DNA, 618 bp, Homo Sapiens
  misc_feature (402)..(416): n is a, c, g, or t
  misc_feature (434)..(496): n is a, c, g, or t
  misc_feature (511)..(511): n is a, c, g, or t
  misc_feature (538)..(538): n is a, c, g, or t
  misc_feature (543)..(543): n is a, c, g, or t
  misc_feature (552)..(552): n is a, c, g, or t
cgcctggcggtcacctggtgcctactgtccgacaggatgcctcgatcctcgtgcgacccaccctgtgtatcctccctagactgagttctggcagctccccgaggcagccggggtaccctctagattcagggatgcttgctctccacttttcaagtgggtcttgggtacgagaattccctcatctttctctactgtaaagtgattttgtttgcaggtaagaaaataatagatgactcaccacacctctacggctggggagatcaggcccagccccataaaggagaatctacgctggtcctcaggacgtgttaaagagatctgggcctcatgtagctcaccccggtcacgcatgaaggcaaaagcaggtcagaagcgaatactctgccattatctcaaaaatcnnnnnnnnnnnnnnngagatggggtcttcctcnnnnnnnnnnnnnnnnnnnnnnnnnnnnnnnnnnnnnnnnnnnnnnnnnnnnnnnnnnnnnnnggttcaagtgatttnttcttgcctcagcctcccgagtagctnggggnttacagggnttgcaccaccgtacccagttaatttttgtattttagtagagacggggtttcaccagttggctgggt

SEQ ID NO: 348117 - DNA, 2923 bp, Homo Sapiens
  misc_feature (2140)..(2149): n is a, c, g, or t
taaccccttccctgcccagatgcctgcaattctgagaattcacttcagttttgccagatccaacccctaggcttgagggtggagagccaggcctcctcagggtcccttctaggctcccaggcccaccttaggctttaattgcattggctgtttcttatggtgttagtgaattttgcaaagaaagccctgagcattgcataaatgcttgggggcgtgtcatttaaatggaagttctccaatagtggctgaaggcagagtttactgttatccctccctcttgctggctttgctggagggcttttatcagagagattggaggtgggagagcacttttaaagcacaccccaccccctgcacccgagcggcacctaagcttcccagagaccatgaccttgtatgtggctggaggcctcaggcttagggagcagcctgaagcctttgctgtcaaccctcccaggaaagaagccgggcctcaggctgaggaaaaacagagtttcctctccagagggctcaatgagcagccgggtagtggcctcgggcagtcctcaccagggggacacctccctgctttgcattaactcatcagcaagctcatcgagagctaacgtgggcccagcagtcctgtgcttggaaatgatgccgtcacctccacactcctgctgttccagcctctgcaggtgaagctgcaaggtgagcagaggcaggcgtggggacacactcttcaaggactgcactgccccttctccctcctgagagctctgtgcactgggtttggggatgaggcgccagcctggtcaggggaggtgactgtggtccttctgaccagcttggatctttaaaataatcacaaaaaagctcagcctgagcaggtgggtgcaaggctcaggggcctgtgtttttcatcaatcagttttcttcctgcaagattcttagagctggatgttcacgggatcatggggcatggaggtggtcacgctcagacagtcatgcaccaccctcaatcccaggccctgcagagataggaagaatcccaaccagagggattcttccccaaacgttcccttgtggcccaagagtgagttccggcctgagtgctgttatgactgccggcgtctctccgactgcctctcgcctcagtttaaccatctataggttaggaacaaagaagggcttaggcagccatcgtttccccatttctgtcagagccaagggcttggaggcccagacccaatccgggcaaaggctgtccgctcctgcccaggcctcacctcctcgctgcagctggcaagattctttctagcagaacagaaacactggcccccaattccactctcccctcctgatgctaccgcagagggcagaaaggtgccctgtagcgtccaccatgtgtgtgtcctgagtttccagtgcaagtcatctggatttgcatttagctagggaaactcggccctcaaaccctctccctctctgcctgaatttgccaaaatgccaaccatccgggcaggtgtggatgccacagtccatccccattgcatttcacccccacatggacagaggcacacactcgcacacattcccagcacctttgactgctgggggatgcaggccagggtctgcctggagcctcagggttgggacttatctccaaaggagcccacaccccctcttccaggatgggcactggctggcagcacttttttccctcatcacatccctgacccctgcccagcccacatgcacatgctgtttcctgtctccagggccctagcctgtggatctcttcctcccatgcactcctagggtgaatgggctcagcaccaaacctggctgtgcccattccccacaaccccagcttggcctcctgtgggaaggagaaggcagacctgcccagaggagaggggcagtgttcccacccacctgctccagcacaggaaccagggaggaaagaagggagagggaggttccattcaccgtcttctgggttagcgcttgattggatgtttcaagcaagggacaaggtgatggtggctgtaataggctcctcgtgggcaccgtcaccccagaaggcctgggcacccatgagaacctgtggccagcccttttcattggctgagttccctgctgttgtgcgtggtgccannnnnnnnnnaaacaacatatataaaaacaaaacaactggttctgtgtgtatcaacttaatttgcatatgaatgagtgttgtgttgtgatttgcagtgttttgacaccgtgattggctttgtttgggtctctcttctttctgtgaaattaactgctgtgcgttttcactgttcttagagaagaccctgagctcctggggttttcttgtctcacttctaccctgacctgctgggagcccaccccaccccagtccagccatgagggtatttccagcctattccaatgactgaaacccttcttggaagaaaacgtctaatgtcggggacgtagggacgcttccagacttgccctggccggaaccctgcagcctggggccccagcccgcctgcagctcagctttccccaacaccctcaggacccagccccagccccggcagaccttccctgggagctgcttaggtggtctccacagcgccctctaggggccaagcagggttccagattctccagccttctgccagctttaaaacccttcactcaagcagcattactgtacatgcaatgaaaaatactatatatgacagtcaaaacctgtgtacatatttccatgtacatatttatacatacacacaccttcctattataaatatataaagcatgacatctctttggcattccaagtttgtgtttttttaaatccttggaaatacggctttggaaacctttttcttcctttccctcttttctatgttgtaataaacattcatgtgacctttaaaaaaaa

SEQ ID NO: 348118 - DNA, 1208 bp, Homo Sapiens
  misc_feature (113)..(113): n is a, c, g, or t
  misc_feature (303)..(328): n is a, c, g, or t
  misc_feature (345)..(470): n is a, c, g, or t
  misc_feature (475)..(505): n is a, c, g, or t
  misc_feature (544)..(601): n is a, c, g, or t
  misc_feature (1030)..(1048): n is a, c, g, or t
cgtaaggctttctttgcaagagatctgcattaaataaagttgctaggaaataactaaaattggggaaataatctaataatagcaagatgttaagcatactattattgtatttngggggttggtaataacattcacatggatttatcaatacacactgagaagcaaagcctctcaagctgtcccatatcctccatttcaaaggcacacatacattttaggtaactcataatttagaaaggttatttaatcttttccacatgtaaatatttgaatatgtacaaagacttgatttgactcttgtcnnnnnnnnnnnnnnnnnnnnnnnnnnagacagaggctccgtcnnnnnnnnnnnnnnnnnnnnnnnnnnnnnnnnnnnnnnnnnnnnnnnnnnnnnnnnnnnnnnnnnnnnnnnnnnnnnnnnnnnnnnnnnnnnnnnnnnnnnnnnnnnnnnnnnnnnnnnnnnnnnnaatgnnnnnnnnnnnnnnnnnnnnnnnnnnnnnnnagtagagagagggtttcaccgtgttagccagggtggtcnnnnnnnnnnnnnnnnnnnnnnnnnnnnnnnnnnnnnnnnnnnnnnnnnnnnnnnnnngtgtgagccactgcgcctggccgactcttgtctgtttgaatgcaaagttctcaatagtggtttttgtccataagtattaacttataattttggagagtgataggtatggttgctggttgattagcaataagattatgtagccttaaactagctagaagagtttgcatgggtgaggcaacaggctgttaacaaaaagaaactggaaatacagtttcccctgtttgtttctcctgtttgtacaatctgctttaaaaacaagtgaacatgcaccatgtcagtcatggtgaatcggccaacagccagcccttgccagttgacatcacagtctaagatgggaaactggtacagatagacatgaagagagcttagcagtggttgaggtggtgactaaatatacagtcattgaataaataccgtgtagcaaatgtnnnnnnnnnnnnnnnnnnngtaaagtacaacagaatacaaaagtgccatttaatattttatagctatttctatgcacaagtgctggttttaaatttatataaaagcaaagactgtttctgtgttttcttccagagtatttctgttacagccatagaagtaaagttaataatgtaagact

SEQ ID NO: 348119 - DNA, 1284 bp, Homo Sapiens
  misc_feature (995)..(1039): n is a, c, g, or t
  misc_feature (1176)..(1176): n is a, c, g, or t
  misc_feature (1207)..(1215): n is a, c, g, or t
tggtacggccggaattctcgggatatcgtcgaccacgcgtcgtgtacttggaggtggacaatggacctgcgcagatggggactgtggtgccatctttgacttcatcaggtacctggcagaccttgggaatcagtgatgctcctgttacaggcatggtttctggtcagaattgctgtgaggaaaagaggaatccctcctccagcacgctgccaggcggtggtgttcagaacccttctgcagacaggaatttgctggacctcatctcaccacagccagctccgtgccctctgaattatgtttcgcagaaaagtgtacccaaggaagtgccaccaggtactaagtcctctccaggttggtcctgggaggctggcccgttggctccttccccatcttcacagaatacacctctggctcaagtgtttgtccctttggagtctgttaagcccagcagcctgccgcctctcattgtgtatgaccggaatggattcagaattctgctccacttctcccagacgggagcccctgggcacccagaggtacaggtgctgctcttgaccatgatgagcacggctccccagcctgtctgggatatcatgtttcaagtggctgtgccaaagtcaatgagagtgaagctgcagccggcatccagctccaagcttcctgcattcagtcctttgatgcctccagctgtgatatctcagatgctgctgcttgacaatccacacaaagaacctatccgcttacggtacaagctgacattcaaccaaggtggacagcctttcagcgaagtaggagaagtgaaagacttcccagacctggctgtcttgggcgcagcctaacttttcacaagatggacccttcatttcaagcttaggctggcgttacttttgctgtctagtcaggactaatcacggtgtttcagtgcggagtgccaagagtcctatcctgacgtcaggctctgggtgtcaacctctgacttattctgcagatgctcnnnnnnnnnnnnnnnnnnnnnnnnnnnnnnnnnnnnnnnnnnnnntccgggagagggtggtagcacaggggcttgggatatcggcagtgtgggaaatgcgaagcatttctcatcatcatcatctctgctacagtcatggtttctgcatgtccaccgagcgacactggtccctgccctcaagnttgggagggttttattcagcccaaaaggggnnnnnnnnncattggaatccgtttcgttttcccattttcatcccaacttctggggggccctttggtccaacccccttt

SEQ ID NO: 348120 - DNA, 1880 bp, Homo Sapiens
  misc_feature (137)..(187): n is a, c, g, or t
  misc_feature (1622)..(1622): n is a, c, g, or t
  misc_feature (1657)..(1711): n is a, c, g, or t
  misc_feature (1773)..(1773): n is a, c, g, or t
ggcatttcaagcttaggctggcgttacttttgctgtctagtcaggactaatcacggtgtttcagtgcggagtgccaagagtcctatcctgacgtcaggctctgggtgtcaacctctgacttattctgcagatgctcnnnnnnnnnnnnnnnnnnnnnnnnnnnnnnnnnnnnnnnnnnnnnnnnnnntcggggagagggtggtagcacagggcttgggatatcggcagtgtgggaaatgcgaagcatttctcatcatcatcatctctgctacagtcatgtttctgcatgtcagcgagcgacactgtccctgcctcaaggtggaggttttatcagccaaagtgtttttttcatgtatcgttcgttccattcatccactctgtgccttgtcagcctttgaaaggcttggttgctcccaggctgctgttctcagggaccttaaaagggacctggttagtcttggggcagagagtatctacttgggcactctcttccaagaaagaccttgtctccattttcattagacaatgcttcttgtgtgtgttctggaagatcttctaaatggaatgcttgttgcactgttcccaggcgagtggctgccatgagacctgaggaccacacttgggggaccaatcatgtccttcaccactgtgccttagaatcgcccctggacagagttcctgggcagaggggaaagcagctcccaggccttactcaggcctcaggtccatgggttgggcagccagtctgggcccttctcaggatcctcatctccatcctcatcctcttccttcacagcatttacttggagctctttgtgacacaccatgtcagtcatgatgaatcggccaacagccagcccttgccagctgacgtcacagtctaagatgggaaactgtggtacagatagacatgaagagagcttagcagtgattgaggtggtgactaaatatacagtcattgaataaataccatgtagcaagtgtactttgtggagtgttgagtaagtggaaaatggaaagccagttgcatttagagatgataggcctaaagggaactgtcttctgtcgagaagtaaaggaaacttcatgaaggatgtagaagcttagctgcctcaaagaagagagaacctgaagatctgaggcaagctggacaggagaggtggatatttgttgatggaagaattcaagtttataatcaattcccacttagcacctactgtgtgctaggaacttgaatgtgtatgtttgacaagtcctgcttggcctgatgggtgggagaaggaacctgagcctggctgagatggctaggcggagggctttgaagtccaagcagctgaactggctgggtgggtttctacctttgaaactgcaagacttgtttggagctcttaattacaatatctgatatttttacagtctgatcttttgacttctacatatagtggaaatctgccaatactaattggtggagatgggaactgtaaaagatcaagtatgctaattttaagcaaatgtaaaaactcataaaacaggtaaacagtggggtgatttcatttgccataattcacataagacgaattttaatctaaaagtactttcttgcttgtattctgtgtggcttntttttgttttttgaggccatatctcactctgtcannnnnnnnnnnnnnnnnnnnnnnnnnnnnnnnnnnnnnnnnnnnnnnnnnnnnnnggttcaagcgattctcgtgcctcagcctctcgagtagctggggactacagggcgtgaccagncacgcccaggcttaatttttgtatttttaggtaggagacagggattttcaccatgttgggccagggtgggtcttcgaactcctggacctcaggtgatcccgcctgcc

SEQ ID NO: 348121 - DNA, 1710 bp, Homo Sapiens
  misc_feature (408)..(408): n is a, c, g, or t
  misc_feature (733)..(733): n is a, c, g, or t
  misc_feature (1356)..(1397): n is a, c, g, or t
  misc_feature (1561)..(1561): n is a, c, g, or t
  misc_feature (1646)..(1646): n is a, c, g, or t
gaaccggagctcgagccgcagcggatgggatgtcaggtcgggaaccatccttggaagagctggagaagcagcggctggagcagcagctgctcatcctgcggaacaaggagaagagcaaagagagtgccattgccagcactgaggtaaagctgaggctccaggaattcctcttgtcgaagtcaaaggagcccacaccaggcggcctcaaccattccctcccacagcaccccaaatgctggggagcccaccatgcttctttggaccagagttcccctccccagagcggcccccctgggacgcctccctcctacaaactgcctttgcctgggccctacgacagtcgagacgacttccccctccgcaaaacagcctctgaacccaacttgaaagtgcgttcaaggctaaaanagaaggtggctgagcggagaagcagtcccctcctgcgtcgcaaggatgggactgttattagcacctttaagaagagagctgttgagatcacaggtgccgggcctggggcgtcgtccgtgtgtaacagcgcacccggctccggccccagctctcccaacagctcccacagacaccatcgctgagaatgggctttactggctcagtccccaacatccccactgagatgctccctcagcaccgagccctccctctggacagctcccccaaccagttcagcctctacacgtctccttctctgcccaacatctccctagggctgcaggcnacggtcactgtcaccaactcacacctcactgcctccccgaagctgtcgacacagcaggaggccgagaggaggccctccagtccctgcggcagggtggcacgctgaccggcaagttcatgagcacatcctctattcctggctgcctgctgggcgtggcactggagggcgacgggagcccccacgggcatgcctccctgctgcagcatgtgctgttgctggagcaggcccggcagcagagcaccctcattgctgtgccactccacgggcagtccccactagtgacgggtgaacgtgtggccaccagcatgcggacggtaggcaagctcccgcggcatcggcccctgagccgcactcagtcctcaccgctgccgcagagtccccaggccctgcagcagctggtcatgcaacaacagcaccagcagttcctggagaagcagaagcagcagcagctacagctgggcaagatcctcaccaagacaggggagctgcccaggcagcccaccacccaccctgaggagacagaggaggagctgacggagcagcaggaggtcttgctgggggagggagccctgaccatgccccgggagggctccacagagagtgagagcacacaggaagacctnnnnnnnnnnnnnnnnnnnnnnnnnnnnnnnnnnnnnnnnnnttgcatccaggttaaggacgaggagggcgagagtggtgctgaggaggggcccgacttggaggagcctggtgctggatacaaaaaactgttctcagatgcccagccgctgcagcctttgcaggtgtaccaggcgcccctcagcctggccactgtgccccaccagngccctgggccgtacccagtcctccccgcctggccctggggggcatgaagagcccccccagaccagccccgtcagcacctcttcanccacagggtgtgggtctacgacacgttcatgctaaagcaccaagtgcatgtgcggggaacacac

SEQ ID NO: 348122 - DNA, 1797 bp, Homo Sapiens
  misc_feature (99)..(141): n is a, c, g, or t
ggaggagctgacggagcagcaggaggtcttgctgggggagggagccctgaccatgccccgggagggctccacagagagtgagagcacacaggaagaccnnnnnnnnnnnnnnnnnnnnnnnnnnnnnnnnnnnnnnnnnnnttgcatccaggttaatggacgaggagggcgagagtggtgctgaggaggggcccgacttggaggagcctggtgctggatacaaaaaactgttctcagatgcccagccgctgcagcctttgcaggtgtaccaggcgcccctcagcctggccactgtgccccaccaggccctgggccgtacccagtcctcccctgctgcccctgggggcatgaagagccccccagaccagcccgtcaagcacctcttcaccacaggtgtggtctacgacacgttcatgctaaagcaccagtgcatgtgcgggaacacacacgtgcaccctgagcatgctggccggatccagagcatctggtcccggctgcaggagacaggcctgcttagcaagtgcgagcggatccgaggtcgcaaagccacgctagatgagatccagacagtgcactctgaataccacaccctgctctatgggaccagtcccctcaaccggcagaagctagacagcaagaagttgctcggccccatcagccagaagatgtatgctgtgctgccttgtgggggcatcggggtggacagtgacaccgtgtggaatgagatgcactcctccagtgctgtgcgcatggcagtgggctgcctgctggagctggccttcaaggtggctgcaggagagctcaagaatggatttgccatcatccggcccccaggacaccacgccgaggaatccacagccatgggattctgcttcttcaactctgtagccatcaccgcaaaactcctacagcagaagttgaacgtgggcaaggtcctcatcgtggactgggacattcaccatggcaatggcacccagcaggcgttctacaatgacccctctgtgctctacatctctctgcatcgctatgacaacgggaacttctttccaggctctggggctcctgaagaggttggtggaggaccaggcgtggggtacaatgtgaacgtggcatggacaggaggtgtggacccccccattggagacgtggagtaccttacagccttcaggacagtggtgatgcccattgcccacgagttctcacctgatgtggtcctagtctccgccgggtttgatgctgttgaaggacatctgtctcctctgggtggctactctgtcaccgccagatgttttggccacttgaccaggcagctgatgaccctggcagggggccgggtggtgctggccctggagggaggccatgacttgaccgccatctgtgatgcctctgaggcttgtgtctcggctctgctcagtgtagagctgcagcccttggatgaggcagtcttgcagcaaaagcccaacatcaacgcagtggccacgctagagaaagtcatcgagatccagagcaaacactggagctgtgtgcagaagttcgccgctggtctgggccggtccctgcgagaggcccaagcaggtgagaccgaggaggccgagactgtgagcgccatggccttgctgtcggtgggggccgagcaggcccaggctgcggcagcccgggaacacagccccaggccggcagaggagcccatggagcaggagcctgccctgtgacgccccggcccccatccctctgggcttcaccattgtgattttgtttattttttctattaaaaacaaaaagtcacacattcaaaaa

SEQ ID NO: 348123 - DNA, 357 bp, Homo Sapiens
  misc_feature (76)..(118): n is a, c, g, or t
atttctatgaggggaggtagaagcatcgggaaaatggcccgcgctctgacccaatggtcaaatgccacctgatcannnnnnnnnnnnnnnnnnnnnnnnnnnnnnnnnnnnnnnnnnnttacaggctttgagccattgtgcccaaccacaagcacgtaagattctgaaggaggatccaacatttacatgaatttttaagccagaattgggcttccaagagattttgtccttcctgaggcttggtcctggctacttccccagctcacagagagtggtgtgtgcctctgcctccaccattaggagcagggtttgggaagcacccatggtagcgagagcagagtgctggggccaaaagcc

SEQ ID NO: 348124 - DNA, 736 bp, Homo Sapiens
aaacaaatagaagaggtgaatggagactagctggataaaaataacaaattacttcttctctgatgttgtgaaggtcaggttcaggaagcatcaattcacagttaatccggagtaacaatgatctgaacaccagctgttcccaggtccctctttttcatagcccaaccagcatctaaaatgtaaatttaaattacattgcagtcaccatggggagaagaaacctgttcagtggaagcagaagcattgttccttttttaggttggcgcagctttgcaaaactctacccaggataaaccacttatcaccaccaagtgtacttgaaaataaagtttttaacttaaattacaagcatattgcttataatacaatagtgatcattttttgaaagtcttgccatttataacatgggcagtatttggagcttcatttaaaaaccaacaacaaccgataatgactttgcacgattcactttgggatctcaaagtgcttccaaagcattcagatttacaaacaattcacaagacaggtcatctttgtaatacccatacttacaacgaattaacaaaaggagtgacttaagattctccaggaacacagtggcagctattgatgatctgttttctatctgtttgatagagcatcatgagaaatcacaaaatacaatgctatttttctgatgtgtgctaataaagtcaaagaaaacaaatacatcttgacactttggtccattttcatt

SEQ ID NO: 348125 - DNA, 292 bp, Homo Sapiens
  misc_feature (27)..(27): n is a, c, g, or t
  misc_feature (34)..(34): n is a, c, g, or t
  misc_feature (42)..(42): n is a, c, g, or t
cttcaagaattgaaaacaacctgcccnggcccanccccaganggaattgtgaacatatcactggactcagcccctaggtgaataattaccctattcttctgctttaacgctgcctcacaggggaattgtaacgtatcaccgggccttatatcccaggtgatgtgaatcttctgctttgtccgcctgccacagggggcatttcaacatataactgagccctacacccaaatatgtgactcccttgtctgtgtctggcccatatcagccattgtgacatgttgcttggtctaac

SEQ ID NO: 348126 - DNA, 747 bp, Homo Sapiens
  misc_feature (440)..(489): n is a, c, g, or t
agttaggaaaagatcgaatctgaggctataatggttcaacctacagcatcccttttccatagtggagtaaatctgtgcaaaatatttttccttatctctgaaaaacaaattaagtagaggaaatttaaaaatgcactttagccaatttgcaccaatcataaaagaaataagatattctttcccttaccctcactcaaccattccaatcaggggagaatactgcaaacttttaagaacctcactggctatcatcagaataactacagaacagggtagtgcagggtgaaactatttctctatattccagaaggcagaagcttgggtgctctagctttacaagtaaaatagcacaggcaggcaaaagctcacagtaaatgtataccagaacaggggcctaagtgaaggtgaatttgtctgactgggttacggcttttataagnnnnnnnnnnnnnnnnnnnnnnnnnnnnnnnnnnnnnnnnnnnnnnnnnntttgtcacatttacaggaatctcaaaccttttgtattcccatgctcacaggtagttttgatacacattgtaaatagtttcagtattcaggaagaagaatactatattgttgccaaagaacaagagaattcttcatgcttctgatatctcagatttgctgagtgcaatagccagttctaagtcttcttgttcctgctgatttagtcgggcaagcctctgctcttcctctctctcactttccctcttggcccattcgatc

SEQ ID NO: 348127 - DNA, 1040 bp, Homo Sapiens
  misc_feature (961)..(961): n is a, c, g, or t
  misc_feature (976)..(976): n is a, c, g, or t
  misc_feature (983)..(983): n is a, c, g, or t
  misc_feature (1006)..(1006): n is a, c, g, or t
  misc_feature (1012)..(1012): n is a, c, g, or t
agcggctgacaggtccagttgcagatacaaacttggattttttccagtctgatccttttgtggcagtgatcctttcaaggatgatccttttggaaaaatcgatccatttggtggtgatcctttcaaaggttcagatccatttgcatcagactgtttcttcaggcaatctactgatccttttgccacttcaagcactgaccctttcagtgcagccaacaatagcagtattacatcggtagaaacgttgaagcacaatgatcattttgctcctggtggaacagttgttgcagcaagcgattcagccacagacccctttgcttctgtttttgggaatgaatcatttggaggtggatttgctgacttcagcacattgtcaaaggtcaacaatgaagatccttttcgttcagccacatcgagctctgtcagcaacgtagtgattacaaaaaatgtatttgaggaaacatcggtcaaaagtgaagatgaacccccagcactgccaccaaagatcggaactccaacaagaccctgccctctaccacctgggaaaagatccatcaacaaattggattctcctgatccctttaaactgaatgatccatttcagcctttcccaggcaacgatagccccaaagaaaaagatcctgaaatattttgtgatccattcacttctgctactaccactaccaataaagaggctgatccaagcaattttgccaacttcagtgcttatccctctgaagaagatatgatcgaatgggccaagagggaaagtgagagagaggaagagcagaggcttgcccgactaaatcagcaggaacaagaagacttaggaactggctattgcactcagcaaatctgaggatatcagaagcatgaagaattctcttgttctttgggcaacaatatagtattcttcttcctggaatactggaaactatttaacaatgtgtgtattcaaaanctacctgtggagccnggggggnatacaaaaggttttgaggttccngttaantgttggacaaattttaggggtttttttt

SEQ ID NO: 348128 - DNA, 1395 bp, Homo Sapiens
  misc_feature (678)..(690): n is a, c, g, or t
cgagcggccgcccgggcaggtacgcgggagagaaatagtttcaccctgcactaccctgttctgtagttattctgatgatagccagtgaggttcttaaagtttgcagtattctcccctgattggaatggttgagtgagggtaagggaaagaatatcttatttcttttatgattggtgcaaattggctaaagtgcatttttaaatttcctctacttaatttgtttttcagagataaggaaaaatattttgcacagatttactccactatggaaaagggatgctgtaggttgaaccattatagcctcagattcgatcttttcctaactaaaaatattaaagcctcatgtgtgaaataaatttttaaaaagatttatctggatttagagaattttagatcaacagatacctctcagtgtgtttgctaattaataaaaatcagtttcttacaaataaagtttgtaagaaaatgttcattttaagtgatagatagtggagaaaatttatcacctaaaatatacccatcagtataaggcaagcaaaagtcttaacatggcagccattctgcctttgccgtggccctgtcctgtttagttcttagtgggttaatttttgtacttttgcagaagaaacttcagcaagctagaactggaaggtactttaatttttcatatatatttgnnnnnnnnnnnnnaatgaaggctcatttacttgaaatgtaaaaactttcactgaatacaaatagaaaaagtgatgtgttttatatcatattgctttttgtccatctttgtggtttagtttatttactcacttcatgtttttcacctataaaattgtcaagctagcaaaaaaactcttgtttttttaattgggagagaagagacctgccagattatcagacctcttcatgttaaaagaccatctcctgtaaaactgacctagtggacaagctgaatttgaaatagactgtgaagtaagctgtaacttgtcattttaattttgtttaacacggttactgacttagatgatgtattaaataccaagataaagaaaaatgcacctaaaatctaattagaattctctgggtcaacaagtcaaggtggtattgatctgtgttaatctgagtaacttattgcctagcctataaataaattccaaaatatccaattcatttcttcttgaaatggtgcttgttttgttttctttccattacacaattagactcctacagtttaaaacaaactttaaaccactatcttgcactgctaacttttttctacctttgtaaatagaaacatttctgcataaaagtcatacatatgaagcaagggctgaatcataatcacaaggcttaattttgataaacgaatccagtgacacctgcccgggcggccgctcg

SEQ ID NO: 348129 - DNA, 1218 bp, Homo Sapiens
  misc_feature (822)..(822): n is a, c, g, or t
  misc_feature (1098)..(1098): n is a, c, g, or t
agcggaagtcggcggcggtggcggaggcggtgagtgcgcggctccggggctggccgactccgctagtggcccggccggcctgggctcgggggctccgggctctgggctctgggtgcgcggaccgggccaggctgcttgaagacctcgcgacctgtgtcagcagagccgccctgcaccaccatgtgcatcatcttctttaagtttgatcctcgccctgtttccaaaaacgcgtacaggctcatcttggcagccaacagggatgaattctacagccgaccctccaagttagctgacttctgggggaacaacaacgagatcctcagtgggctggacatggaggaaggcaaggaaggaggcacatggctgggcatcagcacacgtggcaagctggcagcactcaccaactacctgcagccgcagctggactggcaggcccgagggcgaggtgaacttgtcacccactttctgaccactgacgtggacagcttgtcctacctgaagaaggtctctatggagggccatctgtacaatggcttcaacctcatagcagccgacctgagcacagcaaagggagacgtcatttgctactatgggaaccgaggggagcctgatcctatcgttttgacgccaggcacctacgggctgagcaacgcgctgctggagactccctggaggaagctgtgctttgggaagcagctcttcctggaggctgtggaacggagccaggcgctgcccaaggatgtgctcatcgccagcctcctggatgtgctcaacaatgaagaggcgcagctgccagacccggccatcgaggaacagggtggnggagtacgtgcagcccatgctgagcaagtacgcggctgtgtgcgtgcgctgccctggctacggcacccagaaccaacactatcatcctggtagatgcggacggccaccgtgaccttcactgagcgtagcatgatggacaaggacctctcccactgggagaccagaaccctatgagttcacactgcagagctaacccacctctgggcctgggcagtgggctcctggagggtcctgccttgagggcactgtggacaggaaccttctcttgcatactgnatgcactgcccgtgcttggcagcatcccaggataaggccctgggttggcgtgtaccatctgggcccatgccagttaagcctgcttttgccaggaaacacaaatttgtctagtctagaccg

SEQ ID NO: 348130 - DNA, 562 bp, Homo Sapiens
atgtgcatcatcttctttaagtttgatcctcgccctgtttccaaaaacgcgtacaggctcatcttggcagccaacagggatgaattctacagccgaccctccaagttagctgacttctgggggaacaacaacgagatcctcagtgggctgaacatggaggaaggcaaggaaggaggcacatggctgggcatcagcacacgtggcaagctggcagcactcaccaactacctgcagccgcagctggactggcaggcccgagggcgaggtgaacttgtcacccactttttgaccactgacgtggacagcttgtcctacctgaagaaggtctctatggagggccatctgtacaatggcttcaacctcatagcagccgacctgagcacaggaagaaccccgtgtaaagactggaattttgctccacgagccaaggcatcaccagaagctgggagaggggcctgcttcagagcctcttttagagccttcagagggagcagacctgctgtcactctgatcatggacttccagcatccagagctgtgtgacaataaatgtctgttatttt

SEQ ID NO: 348131 - DNA, 2227 bp, Homo Sapiens
  misc_feature (1285)..(1333): n is a, c, g, or t
agcggcttctgccctgtcaggtcaaagcactcagcagggccacctcccgcacccctgctcacatctcctgccaggccccctcactcccggcctccccaaagcccacctctgacatgaagcttccctgagctgagcctgcagattgggtttcttgtgcctgtgggatgtcctgtggtctttcctggacagtaagctctttggtaccatgtcccctcctgtcccctcttgtgtcacccagttgggcctcagcaggcccttgggccccctatggcagtgggtggggggaccgtctgctcccacctgggacctgtgctcagtcccccgcccctccacagcactgcttcatgatgccccagtccctgggcgtcatcggagggaagcccaacagcgcccactacttcatcggctacgttggtgaggagctcatctacctggacccccacaccacgcagccagccgtggagcgcactgatggctgcttcatcccggacgagagcttccactgccagacacccgccgtgccgccatgagcatcgcggagcttgacccgtccatcgctgtggggttttgtctgtaagactgaagatgacttcagtgattggtgccagcaagtcaaaaagctgtctctgcttggaggtgccctgcccatgtttgagctggtggagcagcagccttcacatctggcctgccccgacgtcctgaacctgtccctaggtgagagctgccaagtccaggtggggtccctcggaggtacgatctgtgcccttgcttccccagtcctgggcccccttggttttgaccattaaggtgtgtgtgagcctgagccgtgagcacttggcagtggttcgcctgtgagaccaggtatggagtggagcgtcccctcctccaagcttgcgcccagcagcccagggacccacctcgtcttccccaccagcgctgcctgccggggcgctgtggagctgggcgtgctaccatggagtcctcaggggtctggagcagacagaacatgcaggctctgtggtgacgcagtcctgggtgggggactggttcacttgggcaccactggccatgggtggcgtagacccctcggaccatggcccagcgtgccgcaggagccggcctgggctcgtgcagtgaagtgagtggccgtgagcgcgtcctcctcatctctgtctccctgtggaaaactctacaaacaaggcaatggcaatggaaccactcctgatgaccacgagggtcagacgcgggacagaggcccctcaggcctgagattgtgccggccgcnnnnnnnnnnnnnnnnnnnnnnnnnnnnnnnnnnnnnnnnnnnnnnnnncatattcgcaggtctgcacaacccccggacctgttcacacccgcatggggacagctgtctgtgggctgcagagcaggcactgctcagtctgccccacgccaagggcccttaactcacacccaggtggcccacccaagatgcctgatgcgctatgtcctgttccttctagattcttctgatgtagagcgactggaaagattcttcgactcagaagatgaagactttgaaatcctgtccctttgaaaatcctggggtcgggggtggcacctgtgagagcctggggctcctggtgccgctgcgtttcatccatcccgcccgctcgcctgccgagggctgcgccccgtgctgcctccccccagagggccacccgctgtgctcgtggactgaggctgcgctgcccgggaggccttactgcttggtgtcagactgcccagctcagagtgcccgtcagggcctgtgcatccgcacgcggagccgtctgttaggagcttccagagcgttctctcgacactgccagccccgtgttagcacctgggcctcagtcccacttgctcccagcggccggatctgggggttggttttgaaataaaggtcgggtttgaagtggtccctaaaccgcatcatcctcgacaagaaccggccccggtcgcgataacgcccggaagaggcgccccgcccttaaagatttccctccaggggggccgagcttttcgcgggcccccgttctcttggcacaaaagtagcccccatggcgccatcctcatattaaacgcagagacctggcgccgtctttacttacaaacggcccgacgcggtgcacaacccgtctcgctctgcatacatttttacgacggacaacactatgtcgttgtggggggggcaaacaaaagcggc

SEQ ID NO: 348132 - DNA, 926 bp, Homo Sapiens
cggactgggaagatggacgcagctactctgacctacgacactctccggtttgctgagtttgaagagttttcctgagacctcagaggcccgtttggatactgggtagaaaatacagcattttcacagaaaaggacgagatcttgtctgatgtggcatctagactttggtttacatacaggaaaaactttccagccataggaggttgtcgggacatttcactctccagtaaatgtggcccttggcgttactgagtcctaagaggggggacaggccccacctcggacacaggctggggctgcatgctgcggtgtggacagatgatctttgcccaagccctggtgtgccggcacctaggccgagattggaggtggacacaaaggaagaggcagccagacagctacttcagcgtcctcaacgcattcatcgacaggaaggacagttactactccattcaccagatagcgcaaatgggagttggcgaaggcaagtccataggccagtggtacgggcccaacactgtcgcccaggtcctgaagaagcttgctgtcttcgatacgtggagctccttggcggtccacattgcaatggacaacactgttgtgatggcaggaaatcagcaaggttgtgcaggaccagcgttccctgtgcaggcgccactgcgtttcctgcagattccgaccggcaactgcaacggattccctgccggagctgaggtcaccaacaggccgtcgcccatggagacccctggtacttctcaattcccctgcgcctggggctcacggacattcaacgaggcctacgtggagacgctgaagcactggttcatgaatgccccagtccctgggcgtcattcggaggggaagccaacaggccacttacttcatcgggtacgttggtacagaactcattaacctggacccccaaaa

SEQ ID NO: 348133 - DNA, 1922 bp, Homo Sapiens
atcaggccaaatcggccgagctcgaattcgtcgagagcgggatgctcgggtcagtcggcggccggactgggaagatggacgcagctactctgacctacgacactctccggtttgctgagtttgaagattttcctgagacctcagagcccgtttggatactgggtagaaaatacagcattttcacagaaaaggacgagatcttgtctgatgtggcatctagactttggtttacatacaggaaaaactttccagccattggggggacaggccccacctcggacacaggctggggctgcatgctgcggtgtggacagatgatctttgcccaagccctggtgtgccggcacctaggccgagattggaggtggacacaaaggaagaggcagccagacagctacttcagcgtcctcaacgcattcatcgacaggaaggacagttactactccattcaccagatagcgcaaatgggagttggcgaaggcaagtccataggccagtggtacgggcccaacactgtcgcccaggtcctgaagaagcttgctgtcttcgatacgtggagctccttggcggtccacattgcaatggacaacactgttgtgatggaggaaatcagaaggttgtgcaggaccagcgttccctgtgcaggcgccactgcgtttcctgcagattccgaccggcactgcaacggattccctgccggagctgaggtcaccaacaggccgtcgccatggagacccctggtacttctcattcccctgcgcctggggctcacggacatcaacgaggcctacgtggagacgctgaagcactgcttcatgatgccccagtccctgggcgtcatcggagggaagcccaacagcgcccactacttcatcggctacgttggtgaggagctcatctacctggacccccacaccacgcagccagccgtggagcccactgatggctgcttcatcccggacgagagcttccactgccagcacccgccgtgccgcatgagcatcgcggagcttgacccgtccatcgctgtggggtttttctgtaagactgaagatgacttcaatgattggtgccagcaagtcaaaaagctgtctctgcttggaggtgccctgcccatgtttgagctggtggagcagcagccttcacatctggcctgccccgacgtcctgaacctgtccctagattcttctgatgtagagcgactggaaagattcttcgactcagaagatgaagactttgaaatcctgtccctttgaaaatcctggggtcgggggtggcacctgtgagagcctggggctcctggtgccgctgcgtttcatccatcccgcccgctcgcctgccgagggctgcgccccgtgctgcctccccccagagggccacccgctgtgctcgtggactgaggctgcgctgcccgggaggccttactgcttggtgtcagactgcccagctcagagtgcccgtcagggcctgtgcatccgcacgcggagccgtctgttaggagcttccagagcgttctctcgacactgccagccccgtgttagcacctgggcctcagtcccacttgctcccaggcgccggttctgtggttggtttggaattaaagtcctgtttgaagttgtcagacacagacatgaatttctggggcgctccctgagtcagagtctcagaagacctgtgcaggctggcgtgagaggagcggcaaccacactgcggccccacgcccaaggactgggctgctctcgagggggggcggcgcccaccgctgtgttcttctctgccccggcctggctttaccaaggggctaccttcattgggaagaatgaggtttggaaggaaacaaaagccgaggtttcctcccttggctttggggggagaaaaatatattcccgaaaattggggggtgttggtgggaaaaacccttc

SEQ ID NO: 348134 - DNA, 1016 bp, Homo Sapiens
  misc_feature (69)..(69): n is a, c, g, or t
aaaaaaaccccccccaacaaatggacgggtcaaagcttccgggatggctcatgggggcccggcgggtgntgggcagtgaaagctttggtccggggatgaaagcagcccatcagtggggttccagggctggctgcctggttggggggtccaggtagatgagctcctcacccaaagtagccgatgaagtagtgggcgctgttgggttccctccgatgacgcccagggactggggcatcatgaagcagtgcttcagcgtctccacgtaggcctcgttgatgtccgtgagccccaggcgcaggggaatgagaagtaccaggggtctccatggcgacggcctgttggtgacctcagctccggcagggaatccgttgcagtgccggtcggaatctgcaggaaacgcagtggcgcctgcacagggaacgctggtcctgcacaaccttctgatttcctccatcacaacagtgttgtccattgcaatgtggaccgccaaggagctccacgtatcgaagacagcaagcttcttcaggacctgggcgacagtgttgggcccgtaccactggcctatggacttgccttcgccaactcccatttgcgctatctggtgaatggagtagtaactgtccttcctgtcgatgaatgcgttgaggacgctgaagtagctgtctggctgcctcttcctttgtgtccacctccaatctcggcctaggtgccggcacaccagggcttgggcaaagattatctgtccactccgcagcatgcagcaccagcctgggtaggaggtcaggcatgtccccgcaatggttgcaaagtttttcggggtaggtaaaccgaaagtaagagatgccggcatcagacgaagatatcgtcagtgatgagtgaaaagggcgcaagtatccccagtatccaaccgggctctgaggtctcaggaaaatcttcaaactcagcaaaccggagagtgtagtagctcggagcagttgtgtctatctttccctcgtgccgaattcgccacccaggcc

SEQ ID NO: 348135 - DNA, 743 bp, Homo Sapiens
  misc_feature (16)..(16): n is a, c, g, or t
atgaactccttcaacnaaacttaaccgaatcaaataatgggccgcttgttgggcttcccctcccaatgaacgccccagggaactggggcatcatgaacagtgcttcagcgtctccacgtaggcctcgttgatgtccgtgagccccaggcgcaggggaatgagaagtaccaggggtctccatggcgacggcctgttggtgacctcagctccggcagggaatccgttgcagtgccggtcggaatctgcaggaaaccagtggcgcctgcacagggaacgctggtcctgcacaaccttctgatttcctccatcacaacagtgttgtccattgcaatgtggaccgccaaggagctccacgtatcgaagacagcaagcttcttcaggacctgggcgacagtgttgggcccgtaccactggcctatggacttccttcgccaactcccatttgcgctatctggtgaatggagtagtaactgtccttcctgtcgatgaatgcgttgaggacgctgaagtagctgtctggctgcctcttcctttgtgtccacctccaatcaatggctggaaagtttttcctgtatgtaaaccaaagtctagatgccacatcagacaagatctcgtccttttctgtgaaaatgctgtattttctacccagtatccaaacgggctctgaggtctcaggaaaatcttcaaactcagcaaaccggagagtgtcgtaggtcagagtagctgcgtccatcttcccagtc

SEQ ID NO: 348136 - DNA, 1297 bp, Homo Sapiens
ggctctagcaggccggcttctctgtccaatgcccacccggagctgggaggaggagtctgcgtaatgtgcgtgtgaagagactgggggagctggccggggctcacggtgtttgacccgtcggtcgtgcgtgagaggaaagggaaggaggaggtcccgaatagcggtcgccgaaatgttccggtgtggaggcctggcggcgggtgctttgaagcagaagctggtgcccttggtgcggaccgtgtgcgtccgaagcccgaggcagaggaaccggctcccaggcaacttgttccagcgatggcatgttcctctagaactccagatgacaagacaaatggctagctctggtgcatcagggggcaaaatcgataattctgtgttagtccttattgtgggcttatcaacagtaggagctggtgcctatgcctacaagactatgaaagaggatgaaaaaagatacaatgaaagaatttcagggttagggctgacaccagaacagaaacagaaaaaggccgcgttatctgcttcagaaggagaggaagttcctcaagacaaggcgccaagtcatgttcctttcctgctaattggtggaggcacagctgcttttgctgcagccagatccatccgggctcgggatcctggggccagggtactgattgtatctgaagatcctgagctgccgtacatgcgacctcctctttcaaaagaactgtggttttcagatgacccaaatgtcacaaagacactgcgattcaaacagtggaatggaaaagagagaagcatatatttccagccaccttctttctatgtctctgctcaggacctgcctcatattgagaatggtggtgtggctgtcctcactggggaagaaggtagtacagctggatgtgagagacaacatgggtgaaacttaatgatggctctcaaataacctatgaaaagtgcttgattgcaacaggaggtactcccaagaagtctgtctgccattgatagggctggagcagaggtgaaaagtagaacaacgcttttcagaaagattggagactttagaagcttggagaagatttcagcgggaagtcgaagtcaattacgattatcggtggggggcttccttggtaggcgaaacgggccggtggctcgtagggccggagaagggcttcgaagccgtgggtgcacagaaggtgcatgccaacgtgctgttccccggaaggacaggggaagctatggggcaacgcatcctccccggaaataccctccaggcaaccgggacccacgggacagaggtcagacggagaagggg

SEQ ID NO: 348137 - DNA, 1147 bp, Homo Sapiens
  misc_feature (730)..(730): n is a, c, g, or t
  misc_feature (858)..(858): n is a, c, g, or t
gtggaccggtccggaattcccgggatccggctctagcaggccggcttctctgtccaatgcccacccggagctgggaggaggagtctgcgtaatgtgcgtgtgaagagactgggggagctggccggggctcacggtgtttgacccgtcggtcgtgcgtgagaggaaagggaaggaggaggtcccgaatagcggtcgccgaaatgttccggtgtggaggcctggcggcgggtgctttgaagcagaagctggtgcccttggtgcggaccgtgtgcgtccgaagcccgaggcagaggaaccggctcccagttgtgcagtctcatcacctaggatccccttctagatcactagcatctacaggtgcttctgggaaagatggcagcaacctagtgtacttcttaattgtaggagcaacagtcactggggcaggagtttattatgcctacaagactatgaaagaggacgaaaaaagatacaatgaaagaatttcagggttagggctgacaccagaacagaaacagaaaaaggccgcgttatctgcttcagaaggagaggaagttcctcaagacaaggcgccaagtcatgttcctttcctgctaattggtgggaggcacagctgcttttgctgcagccagatccatccgggctcgggatcctgggggccagggtactgattgtatctgaagattcctgagctgccgtacatgcgacctcctctttcaaaagaaccgtnggttttcagatgaccccaatgtcacaaagacactgcgatttcaacagtgggaatggaaaagagaggagcatatatttccagccacccttctttctatgtctctgctcaggacctgcctcatattgtanaatggggggtgtgggctggtcctccctggggaaaaaaggtagtaacagcctggaatgtgaaaagaaacaccttggtcgaaaactttaattgatgggcttcttcaaaataaaccttattgaaaaagggcctttgatattgccaaacagggaaggtaacctcccaagaaaatcctgggtctcggccctttggaatatgggcgtctgcacgccaagtggcggcaacaaattagaccaccctcgccctttttttcatacaagtattgggcaccactttttttacaaaacttgg

SEQ ID NO: 348138 - DNA, 1828 bp, Homo Sapiens
  misc_feature (524)..(547): n is a, c, g, or t
  misc_feature (555)..(555): n is a, c, g, or t
  misc_feature (602)..(602): n is a, c, g, or t
  misc_feature (613)..(613): n is a, c, g, or t
  misc_feature (1577)..(1577): n is a, c, g, or t
  misc_feature (1716)..(1716): n is a, c, g, or t
taaagcaatgtgagtccactgaggaggaagagaccctgggatttcaccctctgggttagtctctgtctcaccctgttagaatgtcacgagggactgtactgtcccctctgtcaccagggaagccacaatgagagcttgaaagggtgctgtcaagataaatgtcatccttcttaaaatacatatgattgcctttttgggtgcctcacagagccccagagtgtgagacctgaaagaatgttcagcatctagctccatgtccctgcaaccactctctgtttgccttctgcattctgcactctgcggggcctttgcagccagactgctgtgtcaatgttactttcttgtcactttcctaccctgatggtcacactagcccaccccaagctccgacattgaggttttcatctctgcagggagaggttccaatgtccaccccacccccaggtacccgcctcttcccacagaagcaattttagaattttgcaaaattcttttccccttattgagattaatatttaagattnnnnnnnnnnnnnnnnnnnnnnnntgaagttnaaaatagtggaaataatatagaagggaaatctggggtggaggcctanaacttaggggntggaatcacaggtctcacatagagaaatagccagcttgaatttgttagtcgtattccttcacctgatgaataacagtgttttaaaacatatttgaaaggtaagtaaaaaactaccatcttgaaggtgaagggagttaagaaaagtaatcaagacctgctcctaagcatatgagaccagatgtaattaatcaatggcaatgcagaacaggaccttggctctaaattaatggttgaccggaagggattggaggcggcagaaccattaaccctacacaagaacactccagcccaaaaccgtgaggaaggtgatatatctctgcattttcccttgttgttgcttgaagtctgtgattggggatttgcgttataaaatgaatattttaaaaagcaacagccctaatagcctctgtgggaactgagtggtttcggactcctcacaggcggtggaaataattaataccatattttatacatctccagagcctttcatcttgaggatctcaaagaccgtagaagacatttaatttctaaagcttgaagtgccccgaggagcaggtagaatttccagcagggccttggtggattaaccaaggccttggattccagaatgtttcatggtaagcactgtggagaacctacatgtcaggttctggagttggccctgagctctatccaccaagccaggcaccccaccatccctttgcaggggagtcaaagggccagaactccttgggggaccagaacatggttttccttctgccctatcttagtcatggcctcctaaaatggaagctgatatgagccggaagtgcaagggagtccttccaccctgcctttaggttctttttggggaaaggttagaaaaccccaggacattcaccatgtgcacccttccccttcttcggcttggagcctgccctaccaaaatggccctggccttctgatgggggtgtctcccggtgcnctggctatacttggcttcatgggccctcctcgcttgggcccattgggccttccttgcccttcaaggggccatttgggcctccaccccgaaacgccggtgggggccccttgtgtttgtgggcccctagtggttccacatncttctccccccccaattcccctctttcgacctgtggtaccacgcatccctgtggatggtctttccactagtggagacccttagttgacgggcccctttttcccccggtccac

SEQ ID NO: 348139 - DNA, 810 bp, Homo Sapiens
ccgccgccggagccgcgcgcagccatggccgagaaccccagcttggagaaccaccgcatcaagagcttcaagaacaagggccgcgatgtggaaacaatgcgaagacatagaaatgaagtgacagtggaactgcggaagaacaaaagagatgaacacttattgaaaaagagaaatgttccccaagaagaaagtctagaagattcagatgttgatgctgattttaaagcacaaaatgtaaccctagaagctatattgcagaatgccacaagtgataacccagtggtccaattgagtgctgtccaggcagcaagaaaactgttatccagtgacagaaatccaccgattgatgacttaataaaatctgggattttaccaattctagtcaaatgtctagaaagggatgataatccttcattacagtttgaagctgcttgggcattaactaacatagcatcaggaacttctgcacagactcaagctgttgtgcagtctaatgcagtacctctttttctgagacttcttcgttcaccacatcagaatgtttgtgaacaagcagtatgggctttgggaaacattataggtgatggtcctcaatgtagagattatgtcatatcactgggagttgtcaaacctcttctgtccttcatcagtccctccatccccatcaccttccttcggaacgtcacatgggtcattgtcaatctctgcaggaataaggatccccaaccgcctatggcagaccagttcaggagattttgccagccttatgtgtcctcatataccatacagatataaacattcttgtagaca

SEQ ID NO: 348140 - DNA, 569 bp, Homo Sapiens
  misc_feature (447)..(447): n is a, c, g, or t
  misc_feature (474)..(474): n is a, c, g, or t
  misc_feature (541)..(541): n is a, c, g, or t
cttcggaacgtcacatgggtcattgtcaatctctgcaggaataaggatcccccgccgcctatggagacagttcaggagattttgccagctttatgtgtcctcatataccatacagatataaacattcttgtagacactgtttgggctctgtcatacttgacagatggaggtaatgaacagatacagatggttattgattcaggagttgtgccctttcttgtgtcccttctgagccatcaggaagtcaaagttcaaacagcagccctcagagcagttggcaacatagtgactggcaccgacgagcagacccaggttgttctcaattgtgatgtcctgtcacacttcccaaatctcttatcacacccaaaagagaagataaataagggaagcagtgtggttcctttccaacataacagcaggcaaccaggcaacaagtttcaagctgtnattaggatgctgggttaaattcctatngattaattcattcagcttgctaaaggggggacttttgggaccacaataagaagctgctttggggcantcagcaactttaacaataagtggccgga

SEQ ID NO: 348141 - DNA, 1230 bp, Homo Sapiens
  misc_feature (1139)..(1139): n is a, c, g, or t
tatcggtgatatcattcactcaacagagaaaggagactggaataagctgggtatcttggacatgtttctaggatgcattgccaaagcactcactgtacagctaaaagccaaaggaaccaccatcactggaacagctggtaccactgtgggcaaaggagttacaacagttactcttccgatgattttcaattccagttatctccgacgaggtgaaagtcattggtggatgaagggctcaacccctacccagatctcagagatcatcattaaacttatcaaggatatggcagcaggtcatctgtcagaagcttggtcccgagtgacaaaaaatgctattgcagaaaccatcattgccttgaccaagatggaagaagaatttaggtctccagtgagatgtattgcaacaactagactctggcttgctctcgcatccctatgtgttcttgatcaggaccacgtagatcgtctctcctcggggagatggatgggaaaggatggacaacaaaaacaaatgcctatgtgtgataaccatgatgatggtgaaactgcagcaatcattttatgcaatgtctgtggaaatttatgtacagactgtgacagattccttcaccttcatcgaagaaccaaaactcatcaaagacaggtcttcaaagaagaagaagaagctataaaggttgaccttcatgaaggttgtggtagaaccaaattgttctggttgatggcactggcagattctaaaacaatgaaggcaatggtggaattccgagaacacacaggcaaacccaccacgagtagctcagaagcatgtcgcttctgtggttccaggagtggaacagagttatctgctgttggcagtgtttgttctgatgcagattgccaggaatacgctaagatagcctgtagtaagacgcatccttgtggccatccatgcgggggtgttaaaaacgaagaacactgtctgccctgtctacacggctgtgacaaaagtgccacaagcctgaagcaagacgccgatgacatgtgcatgatatgtttcacacgaagcgctctcggcagcaccagccatccagctggatcgtagtcacatattccacttacagtgctgtcggcgagtattagaaaatcgatggcttggcccnaggataacatttgggatttatatcttgttccatttgcaagaacaaaattaattcacctagtactaaaaggacctacttggatcaaataaag

SEQ ID NO: 348142 - DNA, 1520 bp, Homo Sapiens
gagcgaggcctgggtggcgaattcggcacgagggagaacacacaggcaaacccaccacgagtagctcagaagcatgtcgcttctgtggttccaggagtggaacagagttatctgctgttggcagtgtttgttctgatgcagattgccaggaatacgctaagatagcctgtagtaagacgcatccttgtggccatccatgcgggggtgttaaaaacgaagaacactgtctgccctgtctacacggctgtgacaaaagtgccacaagcctgaagcaagacgccgatgacatgtgcatgatatgtttcaccgaagcgctctcggcagcaccagccattcagctggattgtagtcacatattccacttacagtgctgtcggcgagtattagaaaatcgatggcttggcccaaggataacatttggatttatatcttgtcccatttgcaagaacaaaattaatcacatagtactaaaagacctacttgatccaataaaagaactctatgaggatgtcagaagaaaagccttaatgagattggaatatgaaggtctgcataagagtgaagctatcacaactcctggtgtgaggttttataatgacccagctggctatgcaatgaatagatatgcatattatgtgtgctacaaatgcagaaaggcatattttggtggtgaagctcgctgcgatgctgaggctggacggggagatgattatgatcccagagagctcatttgtggtgcctgttctgatgtttccagggctcagatgtgtcccaaacatggcacagactttttggaatataaatgtcgctactgctgttcagtggctgtttttttctgttttggaacaacacatttttgtaatgcttgtcatgatgattttcaaagaatgactagcattcctaaggaagaactaccacactgtcctgcaggtcccaaaggcaagcagttagaaggaactgaatgtccactccatgttgttcatccacccactggggaagagtttgctctgggatgtggagtgtgcagaaatgcccacactttttagaacacgcagatccttggtctacagagagaaaaattgccttcatcccccaagaggatgcggtgaagtttaaactctgctcaggataaggacgggaccccattttaacatccatgaaaatgaacccattccacagtgcaagaaggatacccaaatacccatgtacataattccttgcctatgaaaagtttcccccattattttggtttatcttcttttgaacaaatgacatcaaacttgtgaggtgtttgcatgtggccattaccgtcattggcctgtgaagcattggacatttatagataattgatataaaagaatcgccatgcccatggactaagaacgatgctggctttcaagcaaaaaagaaaaataatcattgtttattgtatactgcctttttgtaatcctgtacaattgcatcacgggtggggataaaaagaggaatattctggtttatttcctagactgttatttaaa

SEQ ID NO: 348143 - DNA, 528 bp, Homo Sapiens
agtctctcccatgtttgggacacatctgagccctggaaacatcagaacaggcaccacaaatgagctctctgggatcataatcatctccccgtccagcctcagcatcgcagcgagcttcaccaccaaaatatgcctttctgcatttgtagcacacataatatgcatatctattcattgcatagccagctgggtcattataaaacctcacaccaggagttgtgatagcttcactcttatgcagaccttcatattccaatctcattaaggcttttcttctgacatcctcatagagttcttttattggatcaagtaggtcttttagtactatgtgattaattttgttcttgcaaatgggacaagatataaatccaaatgttatccttgggccaagccatcgattttctaatactcgccgacagcactgtaagtggaatatgtgactacatccagctgaatggctggtgctgccgagagcgcttcggtgaacatatcgacatgtcatcggcgtctgcttcagcttgtgcccag

SEQ ID NO: 348144 - DNA, 736 bp, Homo Sapiens
ggcattagtactccaagttaattagctagatacaaggcaattcttcttactttgcaaatcagaaacacccttggaaaatctaataggaaagggcacacatcattctgtgcttatgagaacaggctgaaatacaaaaatcctgaacttttatgattaatcttttatttttctaatttccagaaatggcacagctttttatcatttctaggaaataaaatgatcaagctacattttacattgtgagccaacatcattctatctttccaaattcaaaagaatacatggacaattcatcaatgatcatcactgattatacaagctgctttatacctataatggtggctttcaaacacactggacttattggtgagacatttgcatgccagaggatgggaaataaatctaactaaaattcagggaacttctacctcagtaaaatttctaggggtccagtggcatggggccagtcaagatatgccttctaaggtgaagaataagttgctacatttggcccctcctacaaccaagaaagaggcacaatgcctagtgggcctatttggtttttggaggcaacacattcctcatttgggtatgccactccagcccatttatcgagtgacccaaatggctgccagttttgagtggggatccagaacaggagaaggctctgcaacaggcaggtctaggctgctgtgcaagctgctctgccacttgggcccctaaagacccagcagat

SEQ ID NO: 348145 - DNA, 1801 bp, Homo Sapiens
  misc_feature (648)..(648): n is a, c, g, or t
  misc_feature (657)..(705): n is a, c, g, or t
  misc_feature (799)..(799): n is a, c, g, or t
  misc_feature (844)..(845): n is a, c, g, or t
  misc_feature (866)..(866): n is a, c, g, or t
  misc_feature (942)..(942): n is a, c, g, or t
  misc_feature (1594)..(1654): n is a, c, g, or t
ggggctgaaggcggggaaagatgataaaggaaaaaggaaacgaaaaagttctacatctggctcagattttgatactaaaaagggcaaatcagctaagagctctataatttctaaaaagaaacgacaaacccagtctgagtcttctaattatgactcagaattagaaaaagagataaagagcatgagtaaaattggtgctgccagaaccaccaaaaaaagaattccaaatacaaaagattttgactcttctgaagatgagaaacacagcaaaaaaggaatggataatcaagggcacaaaaatttgaagacctcacaagaaggatcatctgatgatgctgaaagaaaacaagagagagagactttctcttcagcagaaggcacagttgataaagacacgaccatcatggaattaagagatcgacttcctaagaagcagcaagcaagtgcttccactgatggtgtcgataaactttctgggaaagagcagagctttacttctttggaagttagaaaagttgctgaaactaaagaaaagagcaagcactctcaaaaccaaaacatgtaaaaaagtacaggatggcttatctgatattgcagagaaattcctaaagaaagaccagagcgatgaaacttctgaagatgataaanagcagagcnnnnnnnnnnnnnnnnnnnnnnnnnnnnnnnnnnnnnnnnnnnnnnnnntaattaaaatggaacaacagtatgaatcttcatctgatggcactgaaaagttacctgagcgagaagaaatttgtcattttcctaagggcataanacaaattaagaatggaacaactgatggagaaaagaaaagtaaaannataagagataaaacttctaanaagaaggatgaattatctgattatgctgagaagtcaacagggaaaggagatagttgtgactcttcagaggataaanagagtaagaatggagcatatggtagagagaagaaaaggtgcaagttgcttggaaagagttcaaggaagagacaagattgttcatcatctgatactgagaaatattccatgaaagaagatggttgtaactcttctgataagagactgaaaagaatagaattgagggaaagaagaaatttaagttcaaagagaaatactaaggaaatacaaagtggctcatcatcatctgatgctgaggaaagttctgaagataataaaaagaagaagcaaagaacttcatctaaaaagaaggcagtcattgtcaaggagaaaaagagaaactccctaagaacaagcactaaaaggaagcaagctgacattacatcctcatcttcttctgatatagaagatgatgatcagaattctataggtgagggaagcagcgatgaacagaaaattaagcctgtgactgaaaatttagtgctgtcttcacatactggattttgccaatcttcaggagatgaagccttatctaaatcagtgcctgtcacagtggatgatgatgatgacgacaatgatcctgagaatagaattgccaagaagatgcttttagaagaaattaaagccaatctttcctctgatgaggatggatcttcagatgatgagccagaagnnnnnnnnnnnnnnnnnnnnnnnnnnnnnnnnnnnnnnnnnnnnnnnnnnnnnnnnnnnnntcaagtcaattctgaatcagattcagattctgaagaatctaagaagccaagatacagacataggcttttgcggcacaaattgactgtgagtgacggagaatctggagaagaaaaaaagacaaagcctaaagagcataaagaagtcaa

SEQ ID NO: 348146 - DNA, 1698 bp, Homo Sapiens
ctgcacctttgggaagaattcctctccagacctggcagagcctggtgtggggtctgagacggccggagaacctcccaggcagggctctgtgttttgtctgttacaacctccgtatgacgccacgccacccgctgttcacgtcccgtcggcctcctgcacagcccacacgctgcgcccggaaggcccctgctgtggagaagccggacccatccccgaggtccccagcgaggacacacactccacgagagcagcccctccactctgcccaggagaggggccgaccctcctcgggaaccggccacccgcgtggctcccagcatccatcaggacaagcccacgtggggtcctccctgcgtgctcagagggtctgtccagccctgggaagcgaccttggcctcagttcacagcctggtgctcatctgctggcaccgggcatccacccatcagcccccgccctgtccctccgaaggacacccagcaggcaccccccggggaggcaggggcagaggtcagaaggggtgtctgggacctggatggccagcagggacaggggcattgtcatctcaaaggcccaacccccagaggccacaccagtcctcccagggagtcctcgagtcgccctgcccagagccctggcaccagagacgccaagagcctgtggggtgactcggagcagcaggtgtggccccgggcgggcggcaccgcgtccagggcagcctccctccgctgagtgacacgggacaccagtgcccggccgacgcgcctttgcaggagaaatgtgcaaacctctgtggataccatttcatttccattcttgtgttgtctccaaggcccctttggagatatacttggtgttggttgtgttttttggttccttttcagagaactgtaaaccgaggctgacgtgctccactgactgtgccgaggggcgggggcaggaggacggcaagacctatttataatatttagcgaactcggtctccctcagatcccccgcgagggaggctgctggacccaccccgctgtcccccatgatagaagtctgtaaataccttggtgaccaatgcccacttcccctcctgggtcacctctgatggctgctgtccactgagaacgtgggcagtgtccaaattcctgtactgtaaagactaaaaggcgtttgctctgagactgacaaggcggaaacttccatgtgtctcctgccaggctctgtccccctacgccatcccgacacgtccccgttcccccgaaacctggctcagtgcaatactcccattgccatggggtccttcaccatggtactgtctccacagccctcagtccccaccccaggagaggcgcctgccacctcctcctcatctccggtggttcaatcgctccgcctgtccccaacccagtcccatttttatggccaaactgattctgaaacaaaatgaaactgcaaacctcgtgtgtcttaactccccccagggatgccactccattcctccgccccgtggtctggtgcgtgacaatccaaagcgccgagacgagggtgctgtgtccctcaaacccagagtggtgggcgcctctgaaaccatacagccactcctggccccaaacactggtttgcatcccaggttcctcgcccacctacccccgccacaccccgtctttttagagatctctctaataaatcgggtaataagacaaaaaaaa

SEQ ID NO: 348147 - DNA, 978 bp, Homo Sapiens
  misc_feature (84)..(84): n is a, c, g, or t
  misc_feature (913)..(913): n is a, c, g, or t
aaggaaactggtgtgggcccttctggggggtttgggcctttggaggatgaacaatgccccctgtcccttgctggcccattccanggtccccagacaccccttctggaacttctgccccttgcctcccccgggggggtgcctgctgggtgtccttcgggagggaacagggcgggggctgatgggtggatgcccggtgccagcagatgagcaccaggctgtgaactgaggccaaggtcgcttcccagggctggacagaccctctgagcacgcagggaggaccccacgtgggcttgtcctgatggatgctgggagccacgcgggtggccggttcccgaggagggtcggcccctctcctgggcagagtggaggggctgctctcgtggagtgtgtgtcctcgctggggacctcggggatgggtccggcttctccacagcaggggccttccaggcgcagcgtgtgggctgtgcaggaggccgacgggacgtgaacagcgggtggcgtggcgtcatacggaggttgtaacagacaaaacacagagccctgcctgggaggttctccggccgtctcagaccccacaccaggctctgccaggtctggagaggaattcttcccaaaggtgcagcttccactccagctcctcacatcctgggcacatcttggaagtgggggattcccacagccatcaccaataagcccctctcaggggtcctggggaagggcagggtgggtgactctgccgagctctggcctccaaccagcaccctctgagcgcagcgggcccaggaagctgccccagggcagtctgggctgagtcccaccactgggagcgctgccctcttggagggtgatgagtcggaaacaaagtcttctctcccctcctcggagacatcacatcacttaaacaagaaagagncgtcggacatccacaccagtcctgaaggagactcctgtggagccgggcctggccccctaggccat

SEQ ID NO: 348148 - DNA, 1748 bp, Homo Sapiens
ctggcggctagggttgagtaacgtgtgggcgcgctgggttatctcaatgtccatcaggcctcaggtgaaagctcatctgccaaaacatcatctagcactcatgtaaaataagaaggagtatgggaggtgactgtgtctacacaatactgtacagcgttgggcttccagtttccctctgtgtgtgtaactattgctagcgactttagagtgtttcgtgaagcattcctttaggacttaaaggacatcattgaaatgtcgcttgccatagtctgcaggatccatttgaagcgtctcgttcttcatcattttgcttcaatttatggaaatcactgactctgtcctttggtagcctgctttagtatatctgtttgaattctgggttcactgtccaagtctgagcctggaattaaacgctgaagaggactggaaggattctgttttgaagtaccggggtttccattgtggtttatgtgtgaatctggaggcatatttggggagagaggttagtccagttggaagatgggagattgcttgatgactttcatgttgagaaactgaaataggaggcttccttaaagcagggggaagatcatcaacttttgctaggtcattctcttctattccaggcatccctgcatcaccacctcttttgatttgttctttcccatgtggaatatgattgcttgagggttcttcattcttatctgcaacattctcagctacttcttggaatatttttaggtactacttgattgtttatatccaattcctttccatcatttgattgaatcttttgggtctcttgcttttgttcctctaaaaactggtctgctgaacttgtgttaatatttgtcttcatgctgtgctctcaatgtcctgtcatctgctgtccacactgaaaacgtgttcatatgtctaacctcttcacaaggtaagtattgttcttcctatagtcctgaagctggtcttcttgtcgaagaaattcctgacgaagctcagcaagttgctcctttaaatgatgtatgtctgccatctgatacgatatgttgttctgtagtttaaccttgtcatcctcgcatctcttcccgaggccctctctggcctgcagccggctgctgaggcggccgtagtcggcctccttctggtcgatctgttttttgtgcgtgtccaccaacagcaagaggtccgaattgcgcttttccagccgcccgcgggccacttcggtgcgctggacctggccctgcagctcggccacctcctcctgaagcaggacgtggcgggaggagatgctccagtagttgaaggcgaggacgacgatcaccaccagcagcaccaccagcacgagagagggcaggcggccagcccgccggttggccccgaaacccaccatggggccaaatcgggctgtaccctaggggcctcgccgcagacacctgcaggcagaagcccaggcctcggctggagttgcccggcggacacggccccagggccggccgagggaggaggcgggcttaccggtcggctgcgagccggagaagggggcggggccgcaagccgcaggtccctccccgcccccctcctcaaatcaggccaaaacgcgttccggaggctttgaacccgaccctgcacctgcccaagggaaccgggagaacccagctgccagcgtcccccaaacccaacacctcacggttgggaggcggggaaaaaaaccggaaaggggcggatgtccatcccgggaattccggacc

SEQ ID NO: 348149 - DNA, 565 bp, Homo Sapiens
  misc_feature (77)..(77): n is a, c, g, or t
ataacagcattctcacaataataacaatgaaaaacgaaaaaccaaacagctgaatgtacatattttggaattccatntatgttccctttcaatttagcaaaataaatgctacattaccatttaaacagatgtctaataaatgcatattggaacctattgcacaaaagcataaaaaatgctcttcatccacataaaaacatacaaattaaaagctactcaaagtaaaaagaagcttgcaaaacatctcacaatttcattttatatgcctgtaaataaagctggaccactgaaaccaaacaattggatgggaaaatatgatagaaggcttaaaatagaataaataattttataaagttaagttttcttttttaaccccccaaatcttaaattcaatattatatattctatttgaattttctatgtccatgaaaactgcatcggtgagaccgtattccgggtaattagccccactgctgttgaaaacgacgcataaggtgatttaacagcatttgttttaccagcataaatagttgtgaaaacttcttcacagtaaccccatctgttt

SEQ ID NO: 348150 - DNA, 1305 bp, Homo Sapiens
  misc_feature (47)..(47): n is a, c, g, or t
  misc_feature (792)..(801): n is a, c, g, or t
taattataggttaaggaatttaccgttataaaaaggtggaaattggngaacccacctggaaacctaatcttatccaggatattatggccatcacccatccaaacaatttcttccagcttcccaaaagagcaaagccatctgagagttagtctaagaatgcatgtactttaacaacacatgtataacagaaaataaagacaacggaaaagctcccttctaatgtagtgtacttttacaacacatatataacagaaaataaagacaatggagaaatgctctcttctaatgtagtaatttagagtactgaaaatgcaatttttgcagcactttaacaagtgagaattatgaaaatctgttcactgaacaggaatataaggaaaaactaaacatgtatcccaacttattaaaatgacacatctataggctacatctatcctgaatctctctataaggccaaattaacttttcacaattttctcttaataaatgattaaaaatatgaaaatacttaaaggaacatagcatttagactgtgaaactgtgttgtaaattttattatagttgtcattttttcttgatgttgaagactgcatcacagtttcataaataacattgcttgtgttttataatatatctgtatgcagaggtacgtttaacaacatctgcatgtatccccagaaattgttgctaattttagaacacatatttttattctgataatgatttaatttttttacttagtacttcagtagaaaacatgtgaatagattgtatgccccatatcagtatttnnnnnnnnnncctgaacaacattcttttaaatgtccatttaacaaaatatatgttaacggttattgttttatcatgattaaattggtatcaaattaataggcataagtgaaaaaactaatcacttactagtcatttagaaaatgcagtaacatcatgcattatgtattactaagaaagttctcacttaacataagcagtagatgaggagaacagtatcatgaaaattctaaatatatctttatgtatatccttaaaaatcactttcctttatataatttccattttaatttaaatgccacatatcatcagctaacatttaaattagtttttattgtaaaacttcagttgttatacatcataaaataccttcaggaacttgcttgaaggtcggaattattctttctattaaataattatatcacattatttattaaatgtcggacgcgtgggtcgacgatatcccggattccggaccgtaccagccgctttttgacaactgtcatatcaaatagc

SEQ ID NO: 348151 - DNA, 1527 bp, Homo Sapiens
tgatatcaccgttgttaaaaagcggctggtacggtccggaatccgggatatcgtcgacccacgcgtccgattcaaatagaatatataatatgaatttaagattggggggttaaaaaagaaaacttaactttataaaattatttattctattttaagccttctatcatattttcccatccaatgttggtttcagtggtccagctttatttacaggcatataaaatgaaatgtgagatgtttgcaagcttctttttactttgagtagcttttaatttgtatgtttttatgtggatgaagagcattttttatgctttgtgcaataggttccaatatgcatttattagacatctgtttaaatggtaatgtagcatttattttgctaaattgaaagggaacatagatggaattccaaaatatgtacattcagctgtttggtttttcgtttttcattgttattattgtgagaatgctgttattggggttgtgtgtgagtgcccgtcagccagtgatgcctcgggccacgctgtggggccacctcagtcctgcctgggtcctggtgccttggaccccacgtgcttgtggccaggctgcccctgggcgggccaatgtggcctcagaccacaagagcggagctgccctggcccaagcactgcagctgcctgcacccccgggctttcgcagccttggcttgtttttctctgaacagcaaacagaacaatgttcacagcgattcaaagggtggcattgggttggacgttctgggtacaagccaacctagtcccacgttgtacgtgaatgtttaatgtgctctcaaaacatgggaaaataagtttaagtgcacattagctaaatcacaaaacattccaatttctctgtttcctcaggaagtcatttactgcggccaccacatcacatgaccttaacatgatcaatgtatttctctgccttgacatttaaatacataaattgagataagtagattagaaaatcattcaaatgataccataatttgtacgggacagggtgcgggcaatggccacgtggccaaggccccgcaggaacgcgccgaggtctccctcaccctccaggtgtccttcgcacccaacagtgcgtctgaggaacgagctgcagtttgagcgttcccctgagatgtgcgtagcctccgtgtaaatgtccactcccatggcttaattgcctatcagacgcattttcccagacgaaagcaatgttgggttggggaagacagtgcagccacccagcctttaccagcagcgtacggcagacgaaggcagtcgaggtgtggaggtgatcacgaagatacatgtgtttgactgtttaatttgaaagtttacattttttatgctttgtgttggtgtgtaatttttgtactcttggtggctagtttttgtcaaatcttttttggaatattgcttaaatgttttgattttatgatagtgaagcttgtattcagtgttttgccaattaatattatatgcttgtaataaaagcaaaagaaaagcttaagtg

SEQ ID NO: 348152 - DNA, 305 bp, Homo Sapiens
  misc_feature (117)..(117): n is a, c, g, or t
  misc_feature (202)..(202): n is a, c, g, or t
  misc_feature (208)..(208): n is a, c, g, or t
taaacagtagaaatcaaaggaagtctcttgccagtaaagtgacacattcaagagtcaaagtgaactacaaacagggttttctcagtgggtgtgttaagcagaaggggatactgacanggttgaaaaagacatgctacaggtcctctaaagccttgggtgagggtaggaagttggtccctggggcagtgagtgggggcggggngtgggnaagcctgtgggacccttatgtcaaactgcgatttgggcaacaccaacttgacttggtcatagggatcaagtcatgtgcaccctctggttgtgtggct

SEQ ID NO: 348153 - DNA, 996 bp, Homo Sapiens
  misc_feature (68)..(68): n is a, c, g, or t
  misc_feature (89)..(89): n is a, c, g, or t
  misc_feature (94)..(94): n is a, c, g, or t
  misc_feature (129)..(129): n is a, c, g, or t
  misc_feature (134)..(134): n is a, c, g, or t
  misc_feature (140)..(140): n is a, c, g, or t
  misc_feature (153)..(153): n is a, c, g, or t
  misc_feature (190)..(206): n is a, c, g, or t
  misc_feature (478)..(478): n is a, c, g, or t
ctttgcccagttaaaagtggaccacatttccaaagagtcaaaagtgaaacctaccaaaccaggggttnttctccagtgggtgtgttaancaggnaaggggatacttgaccaggttgaaaaagacatgcntacanggtccntctaaagccttgngtgagggtaggaagttggtccctggggcaagtgagtnnnnnnnnnnnnnnnnnaagcctgtgggacccttatgtcaaactgcgatttgggcaacaccaacttgacttggtcatagggatcaagtcatgtgcaccctctggttgtgtggctgtggagacagatttctttatactgcccaccacttctagcacagtgcctggcacacgggcttctagcaagggaatgctaaataaatgatcccctgtgcattgtaaactctgatttatttgatctgcaaaaataaatgattattctatggagaaatccaaattgtggctagcatcancatgtctgactaatgccaaatcttgagagactgaacatacattggcaaatcctctggatacaattaagatcatgttgctagagctttctgctaaatgttaagattagctggcaaagagttggaatcagtgccaggatccactctagtcatttcctgatagctttcaaatctgtgactccataaacacggagacccaccagcattttctaccttccttcatacttctccttcctcacagttttaaaccctgagatagaaaggaaggtcgcagtgggcctgatcaacaacttcgtttctgatattcctgttctgttaataattatggctcatgtagcacacgccgaattaatttacaaaagacttctcactcagccccaaggtgacaaccaaaatgatgtaagcagagactttgctgcctgaatggtcggagtaagagagagttcgtggaggctccacttcctccaaaccagaaggacctaaagggactttgaggtaaggaactgtgaggccctcactct

SEQ ID NO: 348154 - DNA, 683 bp, Homo Sapiens
  misc_feature (43)..(43): n is a, c, g, or t
  misc_feature (52)..(52): n is a, c, g, or t
  misc_feature (101)..(101): n is a, c, g, or t
tctttttcaacctgcaagatccctttttgttaacccacccttnaaaaacccntgttgaagtcccttttgattcttgaatgtgtccttttactggcaagagnctccctttgatttctactgtttacaaataaaactcagccagtctcattctatatcccaaacgtactgaatgaaactgattttggttccacaagcagtgtttgggtgttgccttcctgaaggtgaccaagcttccaaagctcgtcccactggcctctgtacatttccctgtggttctccgtccttccctggcgagggagctgggactgaagctttcccgctgtttccctgcctgcaaaagcagccccaagagctgcgcattggcttccctcagcaatctgtcctgtctgtgctcccattcggtccacatagctttctttgcctctctgaggcagacaggaagtgtctaattacgattttgtggcctgggttttgttgcataccacagattgtctatgtaacatgtagcgcacacctctcttggtgctatttcattcctgctgtaagagaatgacaaaaatattcatgtatagccaattgattgtgacgtgcttgtggtctgtgcttgctcagaaaaacaaacaaacaaacagtttttccaattataaataaatgctaaagacgaaaacaaccacacaaacaac

SEQ ID NO: 348155 - DNA, 1112 bp, Homo Sapiens
gggtccggaattcccgggattgaaaaaccaaagcttaaagctacaggccacgtattccaggcattacagtacttacgtaaactgtgcaaccatccagcattagtcttaacacctcaacatccagaattcaagaccactgccgaaaaactggcagttcagaattcttctctacatgatattcaacatgcccctaagctctcagctttgaaacaattgctgttggactgcggtttgggaaatggcagcacttccgagagtggcacagagtctgttgtggcccagcacaggatactgatattctgtcagctgaaaagcatgcttgatatagtagagcatgatctcctcaaacctcacttgccctctgtcacttatttgagattagatggcagcatacctcctggtcagaggcattccattgtttcccggtttaataatgatccatctatagacgttctgttacttaccactcacgttggtggcctgggacttaatttgacaggcgctgacacagtagtatttgtggagcatgactggaatcctatgcgagatctacaagccatggaccgggcccatcgcattgggcagaaacgtgtggttaacgtataccgattgataaccagaggaacattggaagaaaaaataatggggttgcagaaattcaaagatgaacatagcgaatactgttattagccaagagaattctagtttgcagagcatggggactgatcagcttcttgatctgtttactcttgataaggatggcaaagcagaaaaagctgacacctctacttctgggaaagcaagtatgaacatcaattcttgaaaacctgagtgatctttgggatcaagagcagtatgattcagagtacagcctggaaaattttatgcattctctcaagtaactatcaaatattgtaaatgcaattgctgctagttcagttacatttctgctgatattcagcaaatttctaagtttatggtgaacttttaactcaatgtgtaaatagatctggagaatattcagccataatgctggctcttgtttcactgggggaaacatgttattctcaaatatttgcactgtattacatttatatgttaatgtgaatggt

SEQ ID NO: 348156 - DNA, 508 bp, Homo Sapiens
accacgcgtgcgttcctgaatgcttacaggcgtgtgtgcaaagatatgggagtggacgcgtgtgtgtctgtgcccaaggaaaaatgaaagtaaacccatgttctctcactgacattcttttcagacagagctcagccccagctctgcgccccgccgcacgtacctcataagtcgatacgggatgcagcaggtcgggagagagactctgcgggtttcaacttccctggcctcactttaatttggctgccgttcccacgctgcctacctccacccacctccaccctgagacctgacacccagtggcccagggtacctggtggctcccccaaccgatgatggggataggttccgtgtctttcacttcctcttagtaactcattattattgcctgattctcatgtgttctttatcgcattcccagacttactgaccacaaaacatttaaaacattttaccaacaagaacttgtggggtttattgtctgctgaaaggcaactgccaaaaaagg

SEQ ID NO: 348157 - DNA, 1926 bp, Homo Sapiens
  misc_feature (733)..(733): n is a, c, g, or t
cctgaaaggaagcaccccaacccccatcagctgggtaggtggggagcgggaagaatcctgccagcagagagtgatcctggggcatggaagggaggctgcagcgcccgtaggggcaggggctgggcacttccacccagagtcacacacagaatggctccttgggagggaggaccaggcaggacccaggaagcctgggcttgaaccccagttctcctacctctgtgctctgagactccagccagccccttgcccctgcaggcctggagggctctgcgccgctcagacatggcatgcccagctgtgctttggccctgctctgaggtgagcgcacctcaacctgggagcaggggagggcagggaccagcggtgtgggactggtcccacaaggtccccggacactagaggctgtgcagggagacttctaggtggccagctgggctgagtaaaggggaaggggagggcagtagagctattgggacaaatggacatcagaatgaacaggctcagtttatcccgggaagctcccactgggagcaggtgctgggctgacccaccaggacctgcaggacccctgcctccccggagacctggcccagccctgcctgctcaccagcaggcccctctctctgggttctcacctgcctcagggagggaagggaggtgcatggagcctgcaggtaaagtgatttcagtgcttatgtgtgtgtgctggagaggcagcttcagggggatnggggcctgaactcccgtggagccagctagagaaaggagcagggggatgtgaggccaggccctgcccctggatgctgactacaattgtgggcggctgctactgggcagggggccagtgggactgtctggcggtaaggcctgccccgagctctccctggcctgaccccaggactcagaccccgagtcctaggggcagaattgggtgtgctgcttcctccaaccaccaatcccccctccttctcttgagacttgctcctcttcagtgaggtgggggcccacctggagggaaccctgcctacttccaagctgggagagtgccgtccagcggccagtgcagggggccatcagcaacattggcctggcaaaccagtgtgaagatggaaggacactgggtgtcagtggggctgaggtgtgctgctggagcaggatcagttgggtcagtgggtggcctcagcatcggaggggcaatgacagtcttggggaggcatctggctctcagcctggggcctcctgcccactgtcctttgcagcagggaccccatgactatagggggctgcagtcagtccaggccatgcttagccttccctggaacccaggcccagagagcttagtgtttctttggatggctcaagtcttttgctctgaagacaggagacagaagtgaggacctaagcctgcaggtgcaatgatggggcagagggcaggccccactctcttctgctcctggggaaaaggtgtgcaaaagcagaggtcctgttctatgctgctggtgaaataatacaaaacatctcacagaataagaaaggaggacagacgtggggggtggagagagaaagggagggcaagggagaagggaagagagaaacctacagaaaggaagaaacagagcaacaggaattagaaaagaaagaggaactaagaaagagggagacaacaaagacaggaagagagctggctggaggaagcgggagagagggcacagggagccagaggccgtgggtgtcatgtgtctgagggcgatcgtgggactctgctgctccaggccgggtgctcaagggctggtcaatggaaaagtcatgtgggtgggcccctccagtgctggccccattggagtctgcagggaggcctgggtgccgccgttagtacatgtccttgcctcgtgccgaattcgccacccaggcctcgctcctttg

SEQ ID NO: 348158 - DNA, 1574 bp, Homo Sapiens
tctgaggtcctcagttgtttcagtgcttctggctccacatccaccaaacaaactttgtttttggccataacagcctgaatggcctccaggctggttccatacagattttccttatattcaccatgttccaggaacttgttgtgatgtaagtcggcctcaaatgcttgcttagacacaaagtgatattccactccttccttctcatggctctttcggggcctggtggtatgtggaacagcgacgccaaagtgctgtgggttctcagccaccaccttttgcttcagctcgtgcagtcgggctcccagagacccgatcagaaccaccaggcggggccgctctccgggctggtgttggtacctggccacctcttcgtaagtcagcagctccggagactcagctccggaggacatctttccttcctgcgagccacccagtctctccctacagcccagccggaagctcctccgaagaccagccacatagtgccctttgaggtagcccttacagtcacaggtctctttgtcacaaggctgatcataggggggcttcctgaggctctgggggctcggcagggtgcccgcggctctccggtagcttagtcgtctctcctggaaccccttggaggggatgaggccggctcgaaggttggtgtccccgactcgcttggcctgccaccacgtggggtcgtcctggctcaccacctccaggacctgcctgcgctggaagggcaggcccgcctcctggcaagggatggcccggtcctcccgagggttgtagtggaagagggcgcgcatgaacaccttgctctcgctgtaagcgatcttcctcctgggtggcttgggaagatttttacggtgatggatccctgggactgggccagaatctggctgatctcgtcggcccgcttgtgcaggactgcgatcccgttcacttctcggagctcatctccaacgtggaccaggccgctcctgtctgctgcgcctcctcgcatgatcctggccaccacaacagcccctgagtgctcgtcccgccggatggtggcacccaggggttccttgttcttcaccaagcggacgatcttcaccgattcctcatccaaatcctcatcgatattgtcaggcagaggcgggagaacggggtcaaaattcttctgggcaaccgtgtcatgtaccatgagcacagccctcaggtgcggggtggacagcagctggagcagctccctctcatcactgtgcacggaggcggcctgcaactcctccatcacgtcctcagcgagggccacagcgctgtgcagaactggggttggactttgcctttcataatagcgaagcttctcatgaatcttcattaagtaactgaggcttttttcactgaaaacatccctcaggaagcccatctcctccttgtggttggagtcaggtctgagctgggaggtcagcagggccagggtttcatgcaaaccagagtcctccgatagcactggcatgctggcgttgtcacctcccgacctctcctgcagattcctcgggctgctccccgcaggaggccgagcaccgactcccgctcgctctccg

SEQ ID NO: 348159 - DNA, 784 bp, Homo Sapiens
cattccccagcctgtccaagaaggatctggacctcatgctcctggacgactcactgctaccgctggcctctgatccacttctgtccaccatgtcccccgaggcctccaaggccagcagccgccggagcagcttcagcatggaggagggcgatgtgctgtgacccctggctgcccctgtgccagggaacaggggccggcctgggggctgggagggccaggggcacctccctctcacccttcaggctgcactgtgtgtgaagtagccacctgccctgcctccctcctccccgttggcccctgtttggacttagtgcctgtctggcagcctgtggggtcaggagaagcacccccagggcagccctcttgactggcgcagtgggaagaggccttcagcccctctcccggagatggaatcgcggggcagggaggggcagggtgttctagaggtgagaagagggcctggtggagattccctgtcttctgagcccgagcccctcattaccagtgaaggacatgcttgaggggttcgggaagctcctcatctgaggcaactggtcctgggggtgctcaggcctgcctttttgggactcagatggcaggaggtccaccccgcagcctggtcctcggctctcccacaggtgggcaccccccactttggtgctaatagctctccaccaggtggtgtgagcgcgggggctgccagaagcgggaggggtcactgccggaagagcagctgccctccgacccctcactttgtgcctttagtaaacactgtgctttgtaa

SEQ ID NO: 348160 - DNA, 1097 bp, Homo Sapiens
  misc_feature (699)..(707): n is a, c, g, or t
cccctgccctggaatctctgaaaacaggaagtgagcacagaagttctcaaagggaagctgactggtagttgagatgtgctgagctacacctctctacatggctccacggctattctcagagggagggtctacataaggcgcttttctggaacaaaataaaatgccatcttaaaaaagaaaatttaaaatagtagcgttcacacacctggttttattagcctgtgatggaagttgtagttgaaatttgctcacatctaaggaagctggcagtacaacctcagcctccaggcctatttggttttcctccttccagcactagctgttatactgcatgctttccggagggcagctctgcgggcagtgcaggcactgtggtggacactctgctgcctgcaaccagcaactcagtatctcaagactaagactaaatgaagtcagaatcttcccccaaaatacatacggaaacgcagtcagtaaagaagtgtaggagcaaaacaaaataaacaccttacagccaaccacacgagcctaagggtcaccaggaaatggctacttcaccaatcaaagatcaccataaaaaaagagctctgggtccctacaactaagtgagcttcaaaatatgtacaggtatgacttagaaattgtgacttccttcaaaagctataaactcaataagagaacaggatggttgtgccgtannnnnnnnnatacatacttttcatcaatacccaaggctttgtttgctattgagaaaaagaataaacaaaatagtggacactcaagtatttataaacacaaaagacttactgtgatatagaagtgtaacgaaatgctgttaacagaatattcttgacttatagaaaggaccctgttagaaactactttgtacccctgccaataatggcgtggttaagtaatttgaagaataccttactggcccagagctaaataaatatacactccacctccctcaactccttcaaatttaaagtgagcttgttattcaacaacaataaaaactaaatttcttcaaaatacagaagaggaaaagcagtgtttaaacccaaacaccattaaatattttttcttttaagttt

SEQ ID NO: 348161 - DNA, 621 bp, Homo Sapiens
ctttatgatggagaaatgatcatattcatcctatttttttcctttttaccatcttaactcccgaggaaaaacgttttatatttttattatcaatgttataaatccaattctaagactttgcacacaaaaaatacccagggagatagtataatatctcaagcttgtattttccctgaaattattgggaaaaagtagaactagacttaagtagataacaggaaaatacagtattatggtgtttgtatacaaaaaataatccaaaacagataaaaaacacacgctcaagatggcacccacattattccagaataaagttatttacatatatacaaacgattatatgactaaataaatgaacattttcctaaaacatgcatattgtgaagccttttataattaaacctataaaatcaaactaaattgcatattatcaactgtcatgattacagctttctgcacaccaggagagttaacattttaacatctgttctacaaaactgaagataaaatgtcatcaaactcagcatttctctagaaaattttatatacctcagcaacctgtcatactgcctgtcgtcaaataaatggactctaaaatgtacttattcttttcagaaaaaa

SEQ ID NO: 348162 - DNA, 712 bp, Homo Sapiens
accccaccccagagaccgcatcccaggcactcagaggctgagccacatcctccactgctccccgcgggcactaacattgccgatgagacttggataaggaggggaccttgttctccatttcctcacttgatctttcacccgacaccacgtacgtaagtcctgtccgcctgcgtcagggcacactcctccaccttctcatccctgatgactgcacaggacacttggctgtgccaccagcgttctttgtgatgaccctctggtttacacagggacttccggacagtcctgcgatgtgccttggtgagcgcagacctttgtggatctggggggatagttttgtaggaccaaggccctagaagtagagatgctggttggcggtcagtgataactgtatcgatggcccttcagacctgtgtccccttttgctctcccaccagcaaaccatcaacgacccctcgaagtggctggcgcaggagccatcccttctcatgtcagcctgtcggagggtgcaagttgtacctccttgtttgtgtgtgcatttcctggctcgggtgagatggagccgggcgtaaggttaggttggcccttgtgtcctgcagcctgtttgtgtccttcgcccgttgtgacatcgaggcattctgcttttaattaatgatgtgtatgagctcaaaataccaaaaatactaaccatttgtcttttatatgtattgca

SEQ ID NO: 348163 - DNA, 2902 bp, Homo Sapiens
  misc_feature (1834)..(1847): n is a, c, g, or t
ggcgaggcctgggtggcgaattcggcacgaggtgcggggtgtggcggctgagcggagccaggccggatgcggtgccgggcagcggccgccgccgtcccggggcggacgggcgcgggcgggaggatggagctgaactccctgctgatcctgctggaggcggccgagtacctggagcgcagggatcgagaggccgagcacggctacgcctcggtgctgcccttcgacggcgacttcgccagggagaaaacaaaggcggccggcctggtgcgcaaggccccgaacaacaggtcttcacacaacgagctagaaaagcacagacgagccaaactcaggctgtaccttgagcagctcaagcaactggtgcccctgggccccgacagcacccgccacaccacgctgagcctcctgaagcgggccaaggtgcacatcaagaaactggaggagcaggaccgccgggcactgagcatcaaggagcagctgcagcaggagcatcgtttcctgaagcggcgcctggagcagctgtcggtgcagagcgtggagcgcgtgcgcacagatagcacgggctctgctgtctccacggacgactcagagcaagaagtggacatagagggcatggagtttggccctggtgagctggacagtgttggcagcagcagtgacgcggacgaccactacagcctgcagagtggcaccggcggcgacagtggcttcgggccccactgccggcggctgggccgccccgccctctcgtaggcccgtgccctctgctccttggcctgcctgcccgccagccacgcgtgtcagccctccagttctccttcagttgacgccagcctctccacaggcccactgctgtgccattctggaagctccagctgctgctgggctgcctggcactgcccgcttgccggtcagggcctgccgagctgcctgccccttccagctgggcagagtcccctgcaaggaggcagggcccagcttccacatccggagccctggtcagcatagccgcccacggtctgttctcagattcctaatcattccagaagtattaaacgtcattgctgcaaacctcggcaggtgccgtttgaggggcttaatgaccaccacagggagctcagaccccaaccctggatcccaggagaaaggagtggaccgaggaaggaaggaaggcaaggctgtctgtccatccgtccgtctgtccacctacctgtcagtccacataggctcctggcgtggacaaggggtctgtgaagggcgggaactgggtgagcacctggggcaggtgggtggttaaggtccttcccacttcgcaggtgtcagaacctagggctgggctctcggggccaggcaggccagcccagcccacgccgagctgggcagcgtctgctctggtaggactgtcagacgcacacgcgcacgcacctagacacacccactcatgtacatgctcacacatgcagacacacctgggcgtcccgaggtcacatgttctggggatgatggccttcaggggtcatctggcaaacagcccctgggctgtgcctggatccccctctagctcctgctcacccacgcccacccagtagtcctgcctgtctgcacaggagaggggcttctcttcctggctggggctggggtgaactggaggctggttaagttgcagccgctgggtcctcgggggcttactcatctcccttttttaaacaaaaagcaaaaaagtaaaatgctgcactgcccagcagcccggttagggctcctggagccaccttaggaaagggcttctcatgagctctgctgcggcagcttcagctggcagagaggctttcccagnnnnnnnnnnnnnnccatttttaaaaagaagaaagcctaaagactctcggcctagggacgtccgtgtgtgccgcctctgtttcctgtaccagatttttgtattctattttcctagctgttgttgcgtccttgtttgctgaggggtgggagccacccagcgtctcagggacctgtccctccgtcacgtcgtcaaagtgtgccttgtgtcttgtgtcaggccttgcccttcccaccagcatgtccctcgtggctcagggtgccccaggcctgcccagctagtgctgtcctcccatctcctgtgggcagcccctcccggcagccagggcttcctggaggcgatgcagccaggcccctgtgggtggcacggaggggctgtgacctggtccccagtgttgccctccccagtggctggcaggggcctgcttgctcactagagagatggattctcacctgtcacctgactcgagccccctgcttcctggcctaggcgagggttccaggtttcagacactggcagccaatgaagactgtgctccctggggtggtgcaggcctggcaccaggaggcttgcacccgcctttccttcctgacgtcctctgtccttggggctggcccatagcagtgcctgccgtgcctctggtacatctgtagccaattcccatatcatgggggaaaattcggggtctattttcagtcgtacgcatagacgccccaggatggggggcccacttttggcggaagggggtccctgggaaacaactctggcacagaacctgccctgcaggctgtagggggcatggtgcctgggagctgaggggcattccaacgccttgcgggtgggtgggaagaaggcctgtttgattttctttcgggcccaatggggtccagggtgcccaaaaggaatctcccttgcttgctgagttttccccccagtttatttaaaaccggggaactccgacaagggggccggggtaaaattggttcccaccacactgaaggcccgagggggcgggcctccctaattttaaaacattcctgccaccttaatgttgagaatgggggctttttc

SEQ ID NO: 348164 - DNA, 2107 bp, Homo Sapiens
  misc_feature (453)..(453): n is a, c, g, or t
  misc_feature (1764)..(1813): n is a, c, g, or t
  misc_feature (1884)..(1979): n is a, c, g, or t
ctcggttgcacgcggctgttcttggctccgaatgtcaccgggcacagtcgtggcagggcccgccagcaatagggtgagtgcccgggggcgtctgcggcagggtccctctgtcggtcaccgggccagcgcgtcgtccgtgcaggctgcgcgggcgcttcaccgtcgcttcttggcccgtgtgccgtccacctgccagggtgcctcaaccgtccctcagcgagacggtgtaccacgtgctctttggccggtcgcgagaccttgatctccattagggccaagtccgtatgctccacggccaggaccaccagctgcttcctggagtttcttcgtgggagtgatagtctaccagtgccaccagagagaggcacggcacgggagatcgggggcccagagcgcaaaacagcacgccctgtgtctgcggctgggcggatgtgagccacgacttctacttcnccaggttgattcagtcccgacgtccagaggggtccgcatgtagtccaggctgtagaaggcgaagccgctcccggggtagaaagagcctctctccgtcaccgagaagcactgcatcctcgtgttcactttcaccgtttcctggatggtggtgtcttctccgttcagccagttccagctcctcatgcagccatccagacgagggtttataggctgcacgaggtccttctcatggaagggaatacctcccacggtcaggttcagatgatacagtcctcgctccggttggaacaagtccccggccaccgcgattttcatgacagcatccctgttgaccttgatgaccagattccgcgccagctcctcaacagagattgtctgccacatgccatggttgatgaccgggccgctgctggtgacacggccgacaccgttgtagcgcagctgcagctccagccggccggctctcagggccagcacgatccaggtgctgtcctggtggcctccggcaaagaggaggatgccctcggggtcaaaggtccggaagtcaaactcagctaccagcctggtgggctgcagcctcttgaagcgcagtcggatcacgggggtcccactgaacatccggcccaggtacaaggacttcacactcttggccacgctgaagggcacgcacggcaagatgtcctcacaggtgtccatgtcctgggacagcttgaggcccccacgcccgtcacagtggcaggtgtagctccctggggagttcacgcagacctgctcacagcggccctgcagacactcgtccacatctcggcaagccttctcctgggagctgtacgcaaagccctcgtcacagaggcaggagtaggagccgggcaggttcttgcagcgcgcctccccgcaggcctccgagtctgcgcactcgtctatgtcttggcaggtcctgccatcagaggagagctcgaagccgctgtggcaggaacagtggaagctacccggcttgttgtggcagatctggaggcagcccccgttctcctggctgcattcgttgacatctttgtcgcagagccggcccccccagccagctttacacaggcagaagaagttgcccatgaggtcctggcaggcttgggtccccttcctatcgcaggggttgggcgtgcactggtcaggcaggttttgcacgcaggtggcgaagcctgagtttttggtgtacggagacccatacttgttgatgcagtctaagtatcttgggtaaaaataatccgtctcggggtcgttctcgaacacctcccgcgcctcctcgcggctgcacannnnnnnnnnnnnnnnnnnnnnnnnnnnnnnnnnnnnnnnnnnnnnnnnnacctgaaaggcgcggcgctgcctgggccgcaggaactgcgtggcctcgcgcgccggcaacagcgcggcaannnnnnnnnnnnnnnnnnnnnnnnnnnnnnnnnnnnnnnnnnnnnnnnnnnnnnnnnnnnnnnnnnnnnnnnnnnnnnnnnnnnnnnnnnnnnnnngacgcgcggtcagagcgcccgggaggccgaggcgagccgcgggcgccgcggggcggaggctccggtcatcccgtcctggcggccctgaaggtcacatcgcgcctcgtgccgaattcgccacccaggcc

SEQ ID NO: 348165 - DNA, 959 bp, Homo Sapiens
caaccggagcgaggactgtatcatctgaacctgaccgtgggaggtattcccttccatgagaaggacctcgtgcagcctataaaccctcgtctggatggctgcatgaggagctggaactggctgaacggagaagacaccaccatccaggaaacggtgaaagtgaacacgaggatgcagtgcttctcggtgacggagagaggctctttctaccccgggagcggcttcgccgtctacagcctggactacatgcggacccctctggacgtcgggactgaatcaacctgggaagtagaagtcgtggctcacatccgcccagccgcagacacaggcgtgctgtttgcgctctgggcccccgacctccgtgccgtgcctctctctgtggcactggtagactatcactccacgaagaaactcaagaagcagctggtggtcctggccgtggagcatacggccttggcccgaatgggagatgcaaggtctggcgacggccaagagcacgtggtcaccgtctcgctgaaggacggtgaggccaccctggaggtggaacgcaccatgggccataccgaggtgaagcgccacacatctagcaggaaaagctggacccggcctcaagaaggctctagtggaacccattttggcttatattttgtttgaggggtctggccaaaaatgtggtagggggctaatttacctccttgcgaatcctggatctcccatggatgaagacaagagaaaatagcgaagtaatgaacaaaataaactgatattttcgtccaagaagatgacaaaggcagcccgaaattgcgggttgacacctcggcacggtagtgtgcaccagtgtagtgtgaagacaagggttgcgttaaagcggatatcaacggtttaagaagagcggcgggccgccatgaaataacgggtattatgtgcgcgttgaccacacgaaatatctcatgttttta

SEQ ID NO: 348166 - DNA, 885 bp, Homo Sapiens
ggcagtaatccgcggtaataaggtagcgaggactgggtggcgaattcggcacgagggtcgtggctcacatccgcccagccgcagacacaggcgtgctgtttgcgctctgggcccccgacctccgtgccgtgcctctctctgtggcactggtagactatcactccacgaagaaactcaagaagcagctggtggtcctggccgtggagcatacggccttggccctaatggagatcaaggtctgcgacggccaagagcacgtggtcaccgtctcgctgagggacggtgaggccaccctggaggtggacggcaccaggggccagagcgaggtgagcgccgcgcagctgcaggagaggctggccgtgctcgagaggcacctgcggagccccgtgctcacctttgctggcggcctgccagatgtgccggtgacttcagcgccagtcaccgcgttctaccgcggctgcatgacactggaggtcaaccggaggctgctggacctggacgaggcggcgtacaagcacagcgacatcacggcccactcctgcccccccgtggagcccgccgcagcctaggcccccacgggacgcggcaggcttctcagtctctgtccgagacagccgggaggagcctgggggctcctcaccacgtggggccatgctgagagctgggctttcctctgtgaccatcccggcctgtaacatatctgtaaatagtgagatggacttggggcctctgacgccgcgcactcagccgtgggcccgggcgcggggaggccggcgcagcgcagagcgggctcgaagaaaataattctctattatttttattaccaagcgcttctttctgactctaaaatatggaaaataaaatatttacagaaagctttgtaaa

SEQ ID NO: 348167 - DNA, 952 bp, Homo Sapiens
  misc_feature (759)..(759): n is a, c, g, or t
  misc_feature (773)..(773): n is a, c, g, or t
  misc_feature (786)..(787): n is a, c, g, or t
  misc_feature (807)..(807): n is a, c, g, or t
  misc_feature (818)..(818): n is a, c, g, or t
  misc_feature (834)..(834): n is a, c, g, or t
  misc_feature (842)..(842): n is a, c, g, or t
  misc_feature (851)..(851): n is a, c, g, or t
  misc_feature (856)..(856): n is a, c, g, or t
  misc_feature (864)..(864): n is a, c, g, or t
  misc_feature (868)..(869): n is a, c, g, or t
  misc_feature (875)..(876): n is a, c, g, or t
  misc_feature (879)..(879): n is a, c, g, or t
  misc_feature (900)..(900): n is a, c, g, or t
  misc_feature (935)..(935): n is a, c, g, or t
  misc_feature (939)..(939): n is a, c, g, or t
  misc_feature (941)..(941): n is a, c, g, or t
  misc_feature (949)..(949): n is a, c, g, or t
ttgctgcgaatggagaacatctcaggcagccctgatgctccaccgtccttgcagagagaagcttgctcagagtggttactgaaaacaggaacctgcccttctgcaagccctgtgccttcctcgttcctagcagaggaagtatgcggccagtttagcaactgcagttcttctgtgtagcatgggctgcttctccacaaccgcgagaggcccggctgcctgtttattctggagcagcagcagttgacagacggagaggcagtgactctgcacccagcaatccctctgcagacagctcccacaggagtcatgcccagtgtgtgaaggctctgggcatcaccagcggccccagggaaaaagaaagaaatgggaaacagcatgaaatccacccctgcgcctgccgagaggcccctgcccaacccggagggactggatagcgacttccttgccgtgctaagtgactacccgtctcctgacatcagccccccgatattccgccgaggggagaaactgcgtgtgatttctgatgaagggggctggtggaaagctatttctcttagcactggtcgagagagttacatccctggaatatgtgtggccagagtttaccatggctggctgtttgagggcctgggcagagacaaggccgaggagccgctgcagctgccagacacaaaggtcggctccttcatgatcagagagagtgagaccaagaaagggttttactcactgtcggtgagacacaggcaggtaaagcattancgcattttccgtcntgcccaacaactnngtactacatttccccgaggntcaccttccantgcctggaggacctgnttgaacantattctgangtggntgatggcntgtnntgtgtnntcncacgccctgcctgacacaaanacggctgcccagagtgagggctccactcactgtcncttngncaaagatntgg

SEQ ID NO: 348168 - DNA, 1658 bp, Homo Sapiens
  misc_feature (3)..(3): n is a, c, g, or t
  misc_feature (16)..(16): n is a, c, g, or t
  misc_feature (20)..(20): n is a, c, g, or t
  misc_feature (23)..(23): n is a, c, g, or t
  misc_feature (29)..(29): n is a, c, g, or t
  misc_feature (31)..(31): n is a, c, g, or t
  misc_feature (44)..(44): n is a, c, g, or t
  misc_feature (48)..(48): n is a, c, g, or t
  misc_feature (55)..(55): n is a, c, g, or t
  misc_feature (71)..(71): n is a, c, g, or t
  misc_feature (95)..(95): n is a, c, g, or t
gcncccgggatcaggnaccncgntttcgnanatcccagcaatanttgnacttctntccttttgggcatganccattgtgtctgttcttggctagncctcaaagtaaggtggtgatgagaagaatgagatctttctcttgctgccaccatacatcagggagatgcttttcttctttcgatcaaaagcaggtgttgtcctcactggtcagggacaggtaagaggcaatgctctctcgaaggccatagctgaaaagggactcgtctaccccaagcgggttctctgttccctcggggtcctcctgcagtctggacactctcctccagtccacagtcttctgacgcaaggtgacaggtgagctggaggccctcactgctggggcagccgtgctttgtgtcaggcagggcgtggtgagcacacagcacaggccatcagccacctcagaatagtggttcaccaggtcctccaggcactggaaggtgagcctcggggaaatgtagtaccagttgttgggcagacggaaaatgcggtaatgctttacctgcctgtgtctcaccgacagtgagtaaaaccctttcttggtctcactctctctgatcatgaaggagccgacctttgtgtctggcagctgcagcagctcctcggccttgtctctgcccaggccctcaaacagccagccatggtaaactctggccacacatattccagggatgtaactctctcgaccagtgctaagagaaatagctttccaccagcccccttcatcagaaatcacacgcagtttctcccctcggcggaatatcggggggctgatgtcaggagacgggtagtcacttagcacggcaaggaagtcgctatccagtcctccgggttgggcaggggcctctcggcaggcgcaggggtggatttcatgctgtttcccatttctttctttttccctggggccgctggtgatgcccagagccggtggagcatcagggctgcctgagatgttctccattcgcagcaaatgatcttattttctgaagtagcagctttctattgaaattcttcatcagtcgctgtcatggggaatttctcccccttttctctttctttctaactggtgaaattgacagtctgcctacattatccaggcattcatttgcatgatcaaaagcagatttgttccaagatgcaatgttctgccttcccttccaagcacaggcatctccaaggaaggcgagaaaaatcagaaacagagcgcctccgctgtgcccctaagcttggccaggagttggcctcgtctgggagcaggtggagtgggggccctgtgggtagcagtagggggagggcagcccatgtgggagttggaaagcagcacctggcagcccgaggcgctggcacgagccccagcacaggaatatccagtctttggtgacagattatagtaagagaagtatgcaggagtttccagtgtgtgtgtgatttcctgaaaggaggcactgctgccttaaatccccagcactcagggacgggagggtgttagggtctgaacccagggcatcgcggggacctggattcagaaaaatgggtcacaattcttagctttagccacacgatgtaggagagttgctgaactggtctgagctgcagtttctttagccttcaaatggacacag

SEQ ID NO: 348169 - DNA, 731 bp, Homo Sapiens
  misc_feature (90)..(90): n is a, c, g, or t
ccctatggcacaggcatgatgatagggtgtgtagggaagaaaatatcctagcttatactaggctcccagtaagaagtaaaatagccaaantaatgtggatatcatttattagtattcaatgttcagatcagcctattaacaaagtgtgaaaggtttcattttttattcagaactgaagttgaaagtaattaatgctgacaaagggaaagaaagcagaaagagattgagaattagaggaagagaagtggaatcaaaggtagagatacttatatattcaaagtggggatgaaaagatcttcagttaatggaacaagaactagaggattagtgtattgttcaaagctataaaatcaaaccaatagatgtattaaaaagtgatgtaactatcagacatttggagagagatggacaaaggaaagtggcgatagtgtaagttaaatccttatcttttgtaatggggaattattaaagatgttgtaaagtcagtaagtcaagaaattattgctcaaacatattatttaaagttagaaagttaccagacgatctaaaataaatattgttaaaagcattacctctagggaatgggatttagatttaaaaagggtgggatgggaaactgtgtttttcattttaagtccttctgtactatttaattttttaccttgtgcatgtattactttgaaaaaatttttaataaacccaaataaaatctcgtgcgaattctgcagccc

SEQ ID NO: 348170 - DNA, 1335 bp, Homo Sapiens
  misc_feature (45)..(45): n is a, c, g, or t
  misc_feature (54)..(54): n is a, c, g, or t
  misc_feature (122)..(122): n is a, c, g, or t
  misc_feature (450)..(504): n is a, c, g, or t
  misc_feature (591)..(642): n is a, c, g, or t
  misc_feature (691)..(691): n is a, c, g, or t
  misc_feature (794)..(832): n is a, c, g, or t
  misc_feature (1320)..(1320): n is a, c, g, or t
tgcagagagttaggagttgttgctcccggaaaaaaatttctcttntagtggaantaagtgcccttacccccagccggtcagctaattctctactgacagctgagacctcctactcaagtgcntgttgccttcaggtatagaagaggtttcctgaagaaacagacctaactgtacaacagcagaggaaacccatgccaactgttatacaagttaacagttatgttgtttcttaaatgggaatggtgagttagaaattcccagacatgggcgatggggagggaagaggaataagaaaagtcacgaggtagaattagggaccttgaaaatatgacaaactctgagggaaacaaagacaatgtggaaagaataacttaattttaattccatctccagagagatttgaggtgtatttaagatgaaaaacaggatactacaaagaaacggaaaacnnnnnnnnnnnnnnnnnnnnnnnnnnnnnnnnnnnnnnnnnnnnnnnnnnnnnnnatttttaaaaattagccaagcatggtggcatgtgcctgtggtcctagctacttgggaggctgaagtgggaagatcacttgagcccannnnnnnnnnnnnnnnnnnnnnnnnnnnnnnnnnnnnnnnnnnnnnnnnnnnggacagagtgagaccctgtctcttaaaaagcaagaaaagaaagagaagnctgagaataagaagatctctttgaaaataaaataagactgctaaaagtatttggtatacagtctggaaaataaagttgagggaatctctccagataaagagcnnnnnnnnnnnnnnnnnnnnnnnnnnnnnnnnnnnnnnnacatagacaatcaatatgtaatgttaggagttcctggaagagagaacagagacagtgtaggtgaagaaataaaaagaaaaagaattgaagaacagagcaagctaagtctccagattgagagggcccaatacaatctacatctagacacaatattgtaaaattttggaatattaaggatagaaggaagatattaaagtggccagggagaaaacaaatgaggtcatcacgattagctcaacacaaaaatggatgagaaatagactgctaacagatttgtcatcagcaacactgaatgccagaagtcaatggatcaacatcttcagagcttaaggaaaatttttgtacctaggaatttcatagtaaggcagactgtcaagaaggaacatcaaagtgaagacattttctgtcaggcaaattttcaggaaagtctcctttgcacccttacttgagggaagtatctttgagggaaattctcccagccaaaatgngggttgaaaacccgg

SEQ ID NO: 348171 - DNA, 497 bp, Homo Sapiens
  misc_feature (130)..(184): n is a, c, g, or t
  misc_feature (279)..(322): n is a, c, g, or t
tgaaaatatgacaaactctgagggaaacaaagacaatgtggaaagaataacttaattttaattccatctccagagagatttgaggtgtatttaagatgaaaaacaggatactacaaagaaacggaaaacnnnnnnnnnnnnnnnnnnnnnnnnnnnnnnnnnnnnnnnnnnnnnnnnnnnnnnnatttttaaaaattagccaagcatggtggcatgtgcctgtggtcctagctacttgggaggctgaagtgggaagatcacttgagcccagaagttcannnnnnnnnnnnnnnnnnnnnnnnnnnnnnnnnnnnnnnnnnnnggacagagtgagaccctgtctcttaaaaagcaagaaaagaaagagaagactgagaataagaagatctctttgaaaataaaataagactgctaaaagtatttggtatacagtctggaaaataaagttgagggaatctctccagataaagagcaaaaagaaatagatagaaaaatat

SEQ ID NO: 348172 - DNA, 950 bp, Homo Sapiens
  misc_feature (680)..(680): n is a, c, g, or t
  misc_feature (690)..(822): n is a, c, g, or t
  misc_feature (850)..(850): n is a, c, g, or t
  misc_feature (866)..(866): n is a, c, g, or t
  misc_feature (883)..(883): n is a, c, g, or t
  misc_feature (896)..(896): n is a, c, g, or t
  misc_feature (925)..(925): n is a, c, g, or t
gcttcctttccgttggtcagcattaattactttcaacttcagttctgaataaaaaatgaaacttttcacactttgttaataggctgatctgaacattgaatactaataaatgatatccacattattttggctatttaaatacttcttactgggagcctagtataagctaggatattttcttccctacacacccaatatcatcatgcctgtgccatagaaaaggaaatgtacctatcaagcctcttcttattcttcatgaataactcaaaatcatgcctcattttattttgctctataattggacctgaattttttgacatattgttgatttgtctttcttttttcttgactaaataatcttctcaagcatcccagctcttcaatgatactatctatggcactgaatgcacattcttcccagaaagcccgagacagtatgctctcatctgaaattagtctgctggatagctgtcactctagggtgagatacccttttggctgtcactctagaatgagacatcctaagtaaggtccactgttttatggatcccatttcttcttctttcctggttttcatcctcatttggctggaagaattccctcaagatactccctcagtaagggtgcaaaggagactttctgaaaatttgcctgacagaaaatgtcttcactttgatgtncttcttgaannnnnnnnnnnnnnnnnnnnnnnnnnnnnnnnnnnnnnnnnnnnnnnnnnnnnnnnnnnnnnnnnnnnnnnnnnnnnnnnnnnnnnnnnnnnnnnnnnnnnnnnnnnnnnnnnnnnnnnnnnnnnnnnnnnnntgagctaatcgtgatgacctcatttgtnttctccctggccactntaatatcttccttctanccttaatattccnaaaattttacaatattgtgtctagatgtngattgtattgggccctctcaatctg

SEQ ID NO: 348173 - DNA, 599 bp, Homo Sapiens
aaccgtgtgaaaacacaatggagcccacaagatgcaacactggtgccgagatctgcggaaaagtgaagagaattgagaaggaagttgctgggaggactagaaaatctctattaatcagaatccagagcactccactgagagcacaatccagctgctggaaataggatttaagtggaaattcctccctctcagtgaataaaaaatatgatgcgtattttcctgattatggtctttacgtcttacattttccaactcgcttgatatccccattttgaacagtcccggtagagaatcattctcttgaatagtaatctaatctagttgtgatttgggtttgctttggtattgacatttcctagagagctccaacagatacagataaaagctgagctgctgcggttaaatctggggatgtggtgatgggggccctgtatccctcgagactgtccctgagacctgtagctctagaatctagtcctcatgacctcagacgttcctccaaaagtaaactgtgtgtgaacttgtgctcccttgagaagctgcctttaggaagggtttcaattcttttaatattttatcaagtttagtcctcttctaca

SEQ ID NO: 348174 - DNA, 1133 bp, Homo Sapiens
atgaatacgctatggctctgagggacacagaggacaagctccgccggtgccccaagaggaggaaggacatccttgcagagttgaccaagagccagaaggttttctcagaaaagctggaccacctgagccgccgtcttgcctgggtccatgccactgtctactcccaggagaagatgctggacatctactggctgctgcgcgtctgcctgaccattgagcacggtgatcgcacagggtctctctttgccttcatgcccgagttctacctgagcgtggccatcaacagctacaggggctctcaagaattactttggtcccgtgcacagcatggaggagctcccaggctatgaagagaccctgacccgcctggctgccattctcgccaaacactttgccgacgcacgcattgtgggcactgacatccgagactcactgatgcaggccctggccagctacgtgtgctacccacactccctgcgggctgtggagcgaatccccgaggagcagcgaatcgcgcatggggagcacacaccctggcgcactatgagcaccatgcccagcgcccacaccaactcgaccctcctgcggccctcacaggcgtatcgccatggtgaggaacctcctggcgccctatgagcagcggccctgggcccagaccaactggatcctggtgcggctctggaggggctgtggcttcgggtaccgctatacacggctgccacatctgctgaaaaccaaacttgaggacgccaatttgcccagcctccagaagccctgcccttccaccctgctgcagcagcacatggcggacctcctacagcagggtcctgatgtggcacccagcttcctcaacagcgtcctcaatcagctcaactgggccttctctgaattcattggcatgatccaagagatccagcaggctgctgagcgcctggaagcggaactttgtggacaggccggcagctcaaggtatgtgccacctggcttgactctcggtcagcctgctgcgtgtctcggacgcatgactatcacactgggtgccctgagaatattcctgaactggaaccggctaccctctgagattctgctgccgcgctagaacagcctgtaaacaggtgtgaacgggtgaccct

SEQ ID NO: 348175 - DNA, 1583 bp, Homo Sapiens
cgcgcgcttgttaccgctccgccgccttcgagagctgtcgattacgttgctggtaccggtccggaattcccgggatgaccccctattggaggctatgaagagaccctgacccgcctggctgccattctcgccaaacactttgccgacgcacgcattgtgggcactgacatccgagactcactgatgcaggccctggccagctacgtgtgctacccacactccctgcgggctgtggagcgaatccccgaggagcagcgtatcgccatggtgaggaacctcctggcgccctatgagcagcggccctgggcccagaccaactggatcctggtgcggctctggaggggctgtggcttcgggcaccgctatacacggctgccacatctgctgaaaaccaaacttgaggacgccaatttgcccagcctccagaagccctgcccttccaccctgctgcagcagcacatggcggacctcctacagcagggtcctgatgtggcacccagcttcctcaacagcgtcctcaatcagctcaactgggccttctctgaattcattggcatgatccaagagatccagcaggctgctgagcgcctggagcggaactttgtggacagccggcatctcaaggtatgtgccacctgctttaacctctcggtcagcctgctgcgtgtcttggagatgactatcacactggtgcctgagatattccttgactggacccggcctacctctgagatgctgctgcggcgtcttgcacagctgctaaaccaggtgctgaaccgggtgacagctgagaggaacctgtttgatcgtgtggtcaccctacggctgcctggcctagagagcgtggaccactatcccattctggtggcagtgacgggcatcctggtgcagctcctggtgcgtggcccagcctcagagagagagcaagccacatcagtgctcctggcagatccctgcttccagctacgctcaatatgctatctcctgggacagccagagcccccagcacctggcactgctctgccagcccctgaccggaagcgcttctccctgcagagctatgcggattatatcagtgccgatgagctggcccaagtggaacagatgctggcgcacctgacctctgcatctgcccaggcagcagctgcctccctgcccaccagtgaggaggacctctgccccatctgctatgcccaccccatctctgctgtgttccagccctgtggccacaagtcctgcaaagcctgtatcaaccagcacctgatgaacaacaaggactgcttcttctgcaaaaccaccatcgtgtctgtagaggactgggagaagggagccaatacgagtactacctcctcagctgcctagccctcacagcctgtgccatcctggaacctccacctttgaacccagagccaggctgggccctatttatgagctccctttgcccttctcctgtatcccacaccaccacatccaacctccttgcctgcctgtatcctcattggtgggagcccagccatggccctaattgtgcctgagcttgactttcagtcagggccacagtgagcattaaattattattccat

SEQ ID NO: 348176 - DNA, 373 bp, Homo Sapiens
tggcgcacctgacctctgcatctgcccaggcagaagctgcctccctgcccaccagtgaggaggacctctgccccatctgctatgcccaccccatctctgctgtgttccagccctgtggccacaagtcctgcaaagcctgtatcaaccagcacctgatgaacaacaaggactgcttcttctgcaaaaccaccatcgtgtctgtagaggactggaagaagggagccaatacgagtactacctcctcagctgcctagccctcacagcctgtgccatcctggaacctccacctttgaacccagagccatggccctaattgtgcctgagcttgactttcagtcagggccacagtgagcattaaattattattccatac

SEQ ID NO: 348177 - DNA, 588 bp, Homo Sapiens
  misc_feature (496)..(496): n is a, c, g, or t
agtcgacagaggcccaccctgctgcccgccacaggcagcaccccccagccaggctcctcacaacagattcagcagaggatttccgtaccgccaagtcccacgtacccgccagcgggaccacctgcatttccagctggggacagcaagcctgaactcccactgacagtggccattaggcatttcctggctgataaagggtcaaggccacagtctcccaggaaaggaccccagacagtgaattcaagttccatatactccatgtacctccagcaagccacaccacctaagaattaccagccggcagcacacagcgccttaaataagtcagttaaagcagtgtatggtaagcccgttttaccttcgggttcaacctctccatcgccgctgccgtttcttcacgggtcactgtccacgggcacaccacagcctcagccaccttcagaaagtactgagaaagagcctgagcaggatggccccgccgcccccgcagatggcnagcaccgtggagagcctgccacggccactcagccccaccaagctcacgcccatcgtgcattcgccactgcgctaccagagtgatgcagacct

SEQ ID NO: 348178 - DNA, 842 bp, Homo Sapiens
  misc_feature (324)..(334): n is a, c, g, or t
cggttggagtcgattagggagagctggaaggagactgtcagggtgcactcccaattctacgctgaaagccagggcagtcggcctccagtctggatatgacaagcaaaattcccagcgtttgttaaaaggccatcttcagactgttcttgccaagacttgattcccatttttagtaggtctcagaacacaacttaaagatatatcacctttcgtggtgtcagctgtgaaaggggccccacacagaccatacgcacaagaaaataggctaaggaggaagaacacaaagtaacaccccaccccacccccaaatatgttattaactgnnnnnnnnnnntgctactttctaccaagtagtggctagagcgctctgatttttaaaaactgcaccccacacacagggtttcgccatctcagcaggctgtacaagacatgtttcagtatggctcttttctgttcttattccttttgttttgtatgaagactgcaatacaggccttgcttcctttacattcaataccagtaagattctacagaaaagctggaagggaccaaaatactgattgtaataaatatttgtgggcctccttgtactgactgggcagccgatgaagggggtggggaaaggtctctgagaggcaccaccgattgcttctaggtctacacaagagacaggtactgccattagctgtgcgtggagacatcggaggaggagctgctgttgctgttggtggtctgggccctctttatgtataagtttagtagcttcatcttgctccctgtgagctgtgcaaggtgaggtttcaggtcttctccgattacggaataaattgccactaagcaaa

SEQ ID NO: 348179 - DNA, 1241 bp, Homo Sapiens
  misc_feature (888)..(916): n is a, c, g, or t
agcggtttggtagcatgagagatggaatattcattcagacaaatcagaaagggcacttgaaaataaattttgattctgagccaggagaaaaacttgaaatgttgacttaagtgagggggaaataaaacccagagcgagagagagagacatgttactatgaaagacttgtattttttattgtctctgaactttaatcctgtgaaaatgctcaaagttttggcgagagtgatataaaaaaactgactgtggctgaaagaattgcatttaaaaatatttatgtgcaccttgttactttctactctgcaatgatgtattaacaattcatggtatttatttgttattcttcaatgacccttccacatcaacagtatttatcatgtgttaaagtcatgggtcttatgtgcagatttttttaatgcctctaaaattgttttatagattacttatgctgtgtgccaagtgtttaacaggtttatttgccaacaagtatgaagagaaatattgatgtatctgagctgcttaggtttatgaaaggtcacctggatattttcagttgcatcatccctgtatttaaattgagctttaataaattgcttcagtccaaaaattacaggaaaggtgtattcttaattgatgaatgaattgatctcttttttgaaaggggactcctttacattccaaaagggaaaaacatcacagcaatagttgctatacgtaagaacatgctaagcaaatatttttccaggctgtgctgtgcatttttaaaaggtctaatttaattgcttttaatatatatgtacatatatgttattttaactgtggagaattatttaagttaaaagactggtttgatttgcctatggtgtgaaatcctttgttatttttctnnnnnnnnnnnnnnnnnnnnnnnnnnnnnctaaggaagaacaagaagctatttacccaaagtgagctttcagttttagttttgcatggctgtttgactgcctttccgccctatgaaaatcaagaaaatcttttttaaaaatggagtcctgctattttccaccccttgcagataatacaaattcagtttgtcaggttggatggtgagttgggagctgtgatggatctgttggcgggttttggatgtgtaaagaatgatatatatattaaataggtcaatcagactatgacagctatgtacgaccatttgtatgtgtatctatgtcagaaagaatctttattaaaatattttgatc

SEQ ID NO: 348180 - DNA, 593 bp, Homo Sapiens
agtcattaagactgtttacaacttgaacgataagcagattgtgaagcttttcagtcgcatttttaactgcaacccagatgatatggcacgggacctagagcagggtgacgtgtcagagacaatcagagtcttctttgagcagagcaagtctttccccccagctgccaagagcctccttaccatccaggaagtggatgagttccttctgcggctgtccaagctcaccaaggaggatgagcagcaacaggccctacaggacattgcctccaggtgtacagccaatgaccttaaatgcatcatcaggttgatcaaacatgatctgaagatgaactcagggccaaaacatgtgttagacgcccttgaccccaatgcctatgaagccttcaaagcctcgcgcaacctgcaggatgtggtggagcgggtccttcacaacgcgcaggaggtggagaaggagccgggccagagacgagctctgagcgtccaggcctcgctgatgacacctgtgcagcccatgttggcggaggcctgcaagtccgttgagtatgcaatgaagaaatgtccaatggcatgttctctgagatcaagtacgatgg

SEQ ID NO: 348181 - DNA, 819 bp, Homo Sapiens
  misc_feature (42)..(55): n is a, c, g, or t
  misc_feature (391)..(422): n is a, c, g, or t
  misc_feature (449)..(449): n is a, c, g, or t
  misc_feature (559)..(559): n is a, c, g, or t
  misc_feature (576)..(576): n is a, c, g, or t
  misc_feature (641)..(641): n is a, c, g, or t
  misc_feature (667)..(667): n is a, c, g, or t
tgcaggaattggcacgagcaggacacttgtcagaaggatgcnnnnnnnnnnnnnngtagatccaccctcttaatcccaaaagaacaaagtctccccacctttctcggatgcagggccagagtgacacagccgaaaaattgcagtttgtctgtacttctgtttgaactttccacgttgtcctgtttacaagttaacttaagttggggtatccgtcacgggtcttcctgttttgtatttaaataaaaacaacagcagcaggctgtccctgagtagttttgctgccataggttaagtcctcatgtgtacagtgcaggccctgtggcccgcacttcagtaagttatcaactctcaccgctgtgaacctgccaatccgctgtaacaactctgcttnnnnnnnnnnnnnnnnnnnnnnnnnnnnnnnntgtgtgatccagctttctcttgccatnctatgtgcatgccgtaagatcagttggatattaaaaccatcataaagttcacaagattttgaaacaaattcttgagcttcgatacctaagacagacgatagtgatcttgnaaagaagaaagggggangggggaagctctattcagcaaaagcatataaaagtgtctttcaccagactttcttgggtggttangggagggccaaaaggtggttatagcntacttaaaaattttaatcccccacttgaaaacatggtttggaatggtgcctggtgaggtcttaaaggaaccgatttttaaccctttgcctcttccaaggagaaaggattgacccggggttttggaataaatttttccaatgccgccaatttt

SEQ ID NO: 348182 - DNA, 1229 bp, Homo Sapiens
  misc_feature (173)..(173): n is a, c, g, or t
  misc_feature (260)..(291): n is a, c, g, or t
  misc_feature (605)..(605): n is a, c, g, or t
cagtttgtcctgtaacttcctgtttgaactttcccacgttgtcctgtttaacaagttaacttaagttggggtatcccgtcacgggtcttccctgttttgtatttaaataaaaacaacagcagcaggctgtccctgagtagttttgctgcccataggttaagtcctcatgtgtnacagtgcagccctgtggcccgcacttcagtaagttatcaactctcaccgctgtgaacctgccaatccgctgtaacaactctgctttnnnnnnnnnnnnnnnnnnnnnnnnnnnnnnnntgtgtgatccagctttctcttgccatcctatgtgcatgccgtaagatcagttggatattaaaccatcaataaagtttcacaagatttgaaaacaaagtttctgtagcttcgatacctaagacagacgatagtgatcttgaaaagagaaaagggggaggggggagctacttatcagccaaaagcatataaagtgttcttttcaccagacttctttgggtgggtgaggggaggggcaagagggtgttttatagcatcactaagacattctcattcccccacctggaaaacagtgttatggcaatgggtgcctgggntgatgttcttaaaggaaacgaattattaaaacactatgcacatcctccagagggaagaacagagtaggacgcagggggctatggagaataaatttctcccaattggccgccttcagatttcaaaatccagaatttgtattgtgtttcgaatcacaaacatagaattcttactgtgttggttaaagtaaaattcatttgcagttttgattttcatcaatgagctgtactttcccccatgactgtatgtagttttaataaaatcatttagagtgagtgagtgccaaccgatgttgcagaatcttttgtctaggcactccaagatgccaataagtcattttaaaatgtatgtcagagatgtaaacaaacattttggattttttttaaacagtatttatttggaatgttttcatttatctaaataactattgctattatgaattatggaaaattaatattatgtgtggcatatagtgacttcttaacacacacatcacgcaatctgcaaacccaggaaatgtgtatatctgtctttagaaattagtgtttatactcacttacagtggtttgtgaataaagaaaactggtttgtaatatcaaaaaaataaaagcttagtctgaaaaggt

SEQ ID NO: 348183 - DNA, 697 bp, Homo Sapiens
  misc_feature (608)..(608): n is a, c, g, or t
agcgtctttgatttgcactagcactacgatagtgttagatggggaaatactgcaacatgtccagttggccagatcactttccaagggagcgatactaaggcagactgagctttttaaagatgggaggtcaggaggtggaagcgagaggagatcccatctcacacaacacacttccacgtaatgcagaccacacttttccattttgtcctgccctcttgagaggtcatttctcacgtcctaagaacctgatcagaaattttggaagggttctttgaaatagcagcagttgaaacagagacactttgccacagtgtggagcagattttctcactggtatcacatggtcttgcagttttgaactcttcgaccgatttgtgggagtttatgtaattgcgtgcaatgaacctgaaattgtgtaaaggacaaaagaccagtttatagggttgggttttttttccaacttgtgaaaagcagtttagctgcatctgtctccccaacacccccaccccgggaggggcttatgttacaaggtgatcaagtgaaggaaaaacctgagcctatctggctgggatggtggaattaagcaccaaggttcacaattcttctgntgaatcacatgagagggaaggtgatgacttaaatggcaggggtgggattatctggggagaggctgaaaagcacaaagatagtcttcccg

SEQ ID NO: 348184 - DNA, 2337 bp, Homo Sapiens
acagaacacagcacccatggcgcctgcagtggactggccccttaattcccacaggcccccccagcaaggccaaagggaggcccctgggtattgtcctcctacaaggaagatcctctttgtttgttcaaaggaccagttttcctaggccaaagaagtctcttccccatgttagtcctatgccttgaaatatcatgcaccatgacccacagccatctggttatgtcttatttttttcctaaaagataatgtttatttttaaaaaggaaggaaggagcaagtgaagtttcattctgctccagcggtggggaagccgctgaatccacctgcttctcctttgcaaccgacagcaaacagctttctccggcctcagggcagaaaaagggaatggcagggagtaagaggcgctgggctcggagcctgtttccaagaaggaattggttgtcatctggcagtgttgcgcgtcacaagagagcctgtatataaattaaaatagtcaagacaacactgaccttgcacttgtacataactatacagtagtgtccagaatgttcagacattcggagtgtacataaaacagaaaaaatcttcatgtatttttattaaatataacaatgtctgagtttcacctaagatgtttttgtgccatatgctggatatccaggttctcgccaggccccgatacatgaataacaaacccaagaaacgcatccccattgtgtgatgtgttcagatgcatctggcaccaattaggtatttcttaaaacaggactcatctgtcagagtgcacatgaaaaatcaggcagggaatcgaaacgacagcgctggaggagactcaggaagcagaggcgtccctgccgctgcccttggccctgcaagcacatcatgaccctttctggcagcctcttggtgctctgggtagtgagggatgaccagtcttgtcctgagaaatgtttctcttagtctttaagttcaaagactaacctgtagcaatcagactttccaaaagggggttctccattttttgtagttttgtctaaatttttaatgaccatttcctggaatcagtttattatactgaaaactgggggtgggagtagggagctagtttgttgataaatagttcccatttccccgtggagaatttgacataccctggactcctgtgtgcctcctgccatccctgcacacagcctggggagaagcctgtgcctccccgtgtggagagaaggcaaccccagatcccctgagctaacccggaggaaaggcagtcctggacagaagactgtcagcagaaggaaagtactggactacccgtgggtaagtcctgccattcaagactggagacacctgggaaataaaaagagcagggcactgctggtgggaagaggcattttaccttccagtgcaaatcctgctcctttgatttaatggggtgtactggggccaggggctgattcacttccttgggagatggtggtgttttcatgaacatctttgatccttccatttcatttattcatccatccattcaacaagtatttgctaaacactaacttaagctaatgctagggtagtgactgagatgtaaaaatagattttagaattaaaacaaaatccaagtcctcacacccctgtcatcccaggagatctttccttgtggtggtttctgtgagaattggccatcctgaggacacagccaggacggcagaggcctcctggcctcagggcatgccctgcctaccttctgaaatgtttaccccattgaccaaacttggctccagccatttgcggtgggttctagatagcccaggcccaccaagaaaaatttgccccttgatgagaggcaaacaccctgcctacaaggagatgttttgaaatggagaggaaaattggcacctcatcttttaaaggcagtaatggaattgattttcagtaactgaatttgtgcacaaaacattctaaacactagtgaagcctgtttcgttgaactaattctggctctggaaatgtttttgttttatagttatttacgatttccgtttgtttggattccaagccttagtttgttaatatgtataatttagcatctattacactcatgtaaatatggagtaagtattgtaaactatttcattgcggggattgtgggtgttatacatacatttaggactgcaattttttggtattttttgtattgtaaaataacagctaatttaagcaggaacaagagaactaagggaggtctgtgcattttaaacacaaatgtgaagaacttgtatataaacaaaagtaaatactataatacaaacttccttctgaaataaaagtagatctggt

SEQ ID NO: 348185 - DNA, 757 bp, Homo Sapiens
acccagatgcatcagacacagcccccaagatgttcctttctactcggccagctcgggagccagacacagcactcacagcccaggccgtgatccaccctccccaagtccaccagggccagcggcccctcacctctctggtcactggtgagaccttccacaactttcctccagacctgccagcagatgtgcccaccaggggcattaggtatccgccggagcctggccatagggtagtctcgggagccgcgctgagatcttttgccacctgcattttagaagaacatggtctctgtctcctcggcccagccagctgtcccggcaaggcctgctgagggcagttttcaacctcatgaaggaaacacagtcctgccaaggagggggagtggcgcccatggggacaggcctcagtccttagaagccctctgggtagctgtgcccacccagccttcatggctgcaggtacaaggacctttgcttccatagagaaaacgcacagctcagaaagggggccacatgggcagaaacccaaaggaaggacaaaccacgaccaccgtggccatctggcagaatccctggaagaaaacgaaggcagggtggagcggggggaagaccatcatggagagaaggaccacagcatcaggagacgggacacgccacacccagcaggcagcctgtgtgttgcttaattttttaagagcaagaggggtagagaggatcaagctggccctggctggagatggctagcccctgagacatg

SEQ ID NO: 348186 - DNA, 1462 bp, Homo Sapiens
  misc_feature (1318)..(1318): n is a, c, g, or t
gcggacgtggaagaacctcgtctgcggaggaaaaggtagatgttaaatggtaactacgcgcgaggttctgaggagccctgggaacaggaaggagaaaagaataccaaaagtgacaacagttgccaatcgcagtctttaatctgataaagcggttatctcgtcttgagtcccaggtgccgagtcaatccccatacacagccgccgccattgcctcgagtccttgtgtctgactgtctgttcctgctgctgtatgacacagcacctcgaggcaaggaaataagaaaactgcctctgatccaagcagagaaggtctgcctgtagatctgctgtagggcttgtcaccattggaagcaaggtcctacttcagtggcagatctggtggccttggagtggctgaagaccaccaccctccacagggctgggcccatgcacagccatccttccctaccttgagtgagcttcctctgcatgttttctatatcactggcagagcctgtagttggaaaggggacagagtgactactggactttgtgtgaaaacaccaaccgggacaaaacttcagtcaaggctgagacgggtgggggtatataacttgtccttacgttaaacttggaacatggttgactctgggacagaagcaagggctagaggaaaggctgaggctggcctgcaagatggaatcagtggtcctgccactgctaagagtgaatggtaaaacccaggccgaggcagtggctgaggcagaactgaaaacagaatcagtgacccaggccaaagctggtgatggagcaatgaccaggacacatacagtgacctacagggaggctatggctgtgacaagggaagtgatcaaggtggaagatacaactaagactagagtcatggttgagactaagacaaaacccctggcagaacgcagtatagtgccacaaaccaagtcaaaggccatgcctatgtctagggtcagtactgtaaccaagtctgaagtcaaggttgttgctgtcattgaggcaaatattaggtcctatgccaagtcacatgataaggccaatactgggtccagacctgacagaaggaaagagaccagcattggggatgaaatccagtgatgaggatgaagaaaatatatgccccctggtcctggactggagaagagcctagtgtagggtcctggttctggcctgaagaagagacctctcttcaagtttataagcccctacctaagatccaggaaaagcccaagcccacacacaaacccacacttactataaaacaaaagggtatagcatggtcaagggccaggtatattgtcctagntccagttgaaggaggggagcattccttgccttcagaaggaaactggaccctggttgaagaccttgaattgaaactcctctgtgggattcgacctttgacccaagatcccacttaatctggggcctttattaccagactttagct

SEQ ID NO: 348187 - DNA, 1012 bp, Homo Sapiens
  misc_feature (32)..(32): n is a, c, g, or t
  misc_feature (73)..(73): n is a, c, g, or t
  misc_feature (920)..(928): n is a, c, g, or t
  misc_feature (977)..(977): n is a, c, g, or t
gggatcgcggacgtggaagaacctcgtctgcngaggaaaaggtagatgttaaatggtaactacgcgcgagcgntctgaggagccctgggaacaggaaggagaaaagaataccaaaagtgacaacagtttgccaatcgcagtctttaatctgataaagcggttatctcgtcttgagtcccaggtgccgagtcaatccccatacacagccgccgccattgcctcgagtccttgtgtctgactgtctgttcctgctgctgtatgacacagcacctcgaggcaaggaaataagaaaactgcctctgatccaagcagagaaggtctgcctgtagatctgctgtagggcttgtcaccattggaagcaaggtcctacttcagtggcagatctggtggccttggagtggctgaagaccaccaccctccacagggctgggcccatgcacagccatccttccctaccttgaaactcctgtagcctgtaataccagctgtgggtactactctcagtgttggagatcatcaaaatacaattggaccagaccctttggaaataattctgtgtctcaaatgccctgtggagcacacacttaatcagttgatggctatggaattttccaacatcagctaaagagaagggatagagtggtgacttccaagcttcatgcagaaccggacaacagaaattgagagggaaatttctatgacagaagagagaacagaagaaaattgctggaactaatgaccttgaatagaggaaatgggatatcatctggtaaggcaaatagagcaagctggcttcagcatacagagcctggacaattcattcatagaatagcagaaaaggcagaatttatgtccatagatgcaagtggtatagtagatatagtgatgggagtttgtaaaagttaccttctaattgctannnnnnnnnaatgaaataagaaacaaagtcatcaactcaaagtgagtaatatgtaggnggtgattattgtttgaggagagaggagaatgtgtg

SEQ ID NO: 348188 - DNA, 1004 bp, Homo Sapiens
atcaggccaaatcggccgagctcgaattcgtcgagagcgggtcatgggtaacgcggacgtggaagaacctcgtctgcggaggaaaaggtagatgttaaatggtaactacgcgcgaggttctgaggagccctgggaacaggaaggagaaaagaataccaaaagtgacaacagtttgccaatcgcagtctttaatctgataaagcggttatctcgtcttgagtcccaggtgccgagtcaatccccatacacagccgccgccattgcctcgagtccttgtgtctgactgtctgttcctgctgctgtatgacacagcacctcgaggcaaggaaataagaaaactgcctctgatccaagcagagaaggtctgcctgtagatctgctgtagggcttgtcaccattggaagcaaggtcctacttcagtggcagatctggtggccttggagtggctgaagaccaccaacctccacagggctgggcccatgcacagccatccttccctaccttgaaactcctgtagcctgtaataccagctgtgggtactactctcagtgttggagatcatcaaaatacaattggaccagaccctttggaaataattctgtgtctcaaatgccctgtggagcacacacttaatcaagttgatggctatggaattttccaacatcagctaaagagaagggatagagtggtgacttccaagcttcatgcagaaccgggacaacagaaattgagagggaaatttctatgacagaagagagaaagaagaaaattgctggaataatgaccttgaatagaggaaatgggatatcatctggttctggagacagcctgtatttcttggatcttggcttccttccatcttcaaagccaacgatgaccagtgtagactttctatgctgcttcaatctgacatggagtccctgccttccacatctaaagtacccttgcaattacattggccaagataacccagaataatcttaaattaaactcagctgaatagc

SEQ ID NO: 348189 - DNA, 494 bp, Homo Sapiens
ggaagaacctcgtctgcggaggaaaaggtagatgttaaatggtaactacgcgcgaggttctgaggagccctgggaacaggaaggagaaaagaataccaaaagtgacaacagtttgccaatcgcagtctttaatctgataaagcggttatctcgtcttgagtcccaggtgccgagtcaatccccatacacagccgccgccattgcctcgagtccttgtgtctgactgtctgttcctgctgctgtatgacacagcacctcgaggcaaggaaataagaaaactgcctctgatccaagcagagaaggtcagtgagaaggtctgcctgtagatctgctgtaggggcttgttcaccattgggaaggcaaggtcctactttcagtgggcagatctggtgggccttggggatgggcttgaaggaccaccacccttccacagggctggggcccattggcacagccattcctttccttaccttggaaactcctgtaggcctgtt

SEQ ID NO: 348190 - DNA, 735 bp, Homo Sapiens
ccccatcatatattgcatttgacagaattaacccagagtttttacccggtgacactttcattcctttgtacaatgtagtgtaatctccacttcgtattttgtcaaaatactgtctttgtcctttgatcacacacaccccacccggcacaccacaagctaaacagaattcttcattagaggaaatagcagttctgttcaaaatctccgcaaaagctggtcagaaaactcgctatgaaatcacaaagactgatccaaagagctgagctgctacgctcactccattacagtacaatgttatgtcgggaacacgtgctgctaactcactggtgagttcaatggcaacgcttcattcgggaggctgttctgctttacgcatctgagaactacataggagagcaagtgtctgcacctcctaactgcagaagctaccgtcttctcaaagacgaaggtctttgcaaagttcagtgctcggtgttctcggcacaacaatgcagtgtagttcagaaggtattttggcaactcttaatctgaataagaatggggggggcgcttttgaaaaataaggctttaagaaggcttgtcattttagggctaaattttaatagaatgtgagtctgaactcttacatttagaacaaacaaaaccttaaaattactgattggttcaaaaaatggttttatggaaaaattaatctgtaacaaaaagttggcattgagtgcgaaggctccaccgttg

SEQ ID NO: 348191 - DNA, 1226 bp, Homo Sapiens
  misc_feature (1155)..(1172): n is a, c, g, or t
caggctgtacggtccggagtactgggatatcgtcgacccacggcgtccgcacttgctctcctatgtagttctcagatgcgtaaagcagaacagcctcccgaatgaagcgttgccattgaactcaccagtgagttagcagcacgtgttcccgacataacattgtactgtaatggagtgagcgtagcagctcagctctttggatcagtctttgtgatttcatagcgagttttctgaccagcttttgcggagattttgaacagaactgctatttcctctaatgaagaattctgtttagctgtgggtgtgccgggtggggtgtgtgtgatcaaaggacaaagacagtattttgacaaaatacgaagtggagatttacactacattgtacaaggaatgaaagtgtcacgggtaaaaactctaaaaggttaatttctgtcaaatgcagtagatgatgaaagaaaggttggtattatcaggaaatgttttcttaagcttttcctttctcttacacctgccatgcctccccaaattgggcatttaattcatctttaaactggttgttctgttagtcgctaacttagtaagtgcttttcttatagaaccccttctgactgagcaatatgcctccttgtattataaaatctttctgataatgcattagaaggtttttttgtcgattagtaaaagtgctttccatgttactttattcagagctaataagtgctttccttagttttctagtaactaggtgtaaaaatcatgtgttgcagctttatagtttttaaaatattttagataattcttaaactatgaaccttcttaacatcactgtcttgccagattaccgacactgtcacttgaccaatactgaccctctttacctcgcccacgcggacacacgcctcctgtagtcgctttgcctattgatgttcctttgggtctgtgaggttctgtaaactgtgctagtgctgacgatgttctgtacaacttaactcactggcgagaatacagcgtgggacccttcagccactacaacagaattttttaaattgacagttgcagaattgtggagtgtttttacattgatcttttgctaatgcaattagcattatgttttgcatgtatgacttaataaatccttgaatcatacgactggtnnnnnnnnnnnnnnnnnnccgagactagttctctctctccctcgtgccgaaatcgccacccaggcctcgccc

SEQ ID NO: 348192 - DNA, 897 bp, Homo Sapiens
  misc_feature (170)..(178): n is a, c, g, or t
tcaatggccaactttttgttacagattaatttttccataaaaccattttttgaaccaatcagtaattttaaggttttgtttgttctaaatgtaagagttcagactcacattctattaaaatttagccctaaaatgacaagccttcttaaagccttatttttcaaaagcgnnnnnnnnnattcttgttcagattaagagttgccaaaataccttctgaactacactgcattgttgtgccgagaacaccgagcactgaactttgcaaagaccttcgtctttgagaagacggtagcttctgcagttaggaggtgcagacacttgctctcctatgtagttctcagatgcgtaaagcagaacagcctcccgaatgaagcgttgccattgaactcaccagtgagttagcagcacgtgttcccgacataacattgtactgtaatggagtgagcgtagcagctcagctctttggatcagtctttgtgatttcatagcgagttttctgaccagcttttgcggagattttgaacagaactgctatttcctctaatgaagaattctgtttagctgtgggtgtgccgggtggggtgtgtgtgatcaaaggacaaagacagtattttgacaaaatacgaagtggagatttacactacattgtacaaggaatgaaagtgtcacgggtaaaaactctaaaaggttaatttctgtcaaatgcagtagatgatgaaagaaaggttggtattatcaggaaatgttttcttaagcttttcctttctcttacacctgccatgcctccccaaattgggcaattttaattcatcctttaaaccgggttggttctgtttaagtcgctaactttaggtaagtggctttttctttatagaaacccctttcttgacctgaaac

SEQ ID NO: 348193 - DNA, 826 bp, Homo Sapiens
gggaacccggcagtatctcacggttaaaggtagcgaggcctgggtggcgaattcggcacgaggtcttaaagccttatttttcaaaagcgccccccccattcttgttcagattaagagttgccaaaataccttctgaactacactgcattgttgtgccgagaacaccgagcactgaactttgcaaagaccttcgtctttgagaagacggtagcttctgcagttaggaggtgcagacacttgctctcctatgtagttctcagatgcgtaaagcagaacagcctcccgaatgaagcgttgccattgaactcaccagtgagttagcagcacgtgttcccgacataacattgtactgtaatggagtgagcgtagcagctcagctctttggatcagtctttgtgatttcatagcgagttttctgaccagcttttgcggagattttgaacagaactgctatttcctctaatgaagaattctgtttagctgtgggtgtgccgggtggggtgtgtgtgatcaaaggacaaagacagtattttgacaaaatacgaagtggagatttacactacattgtacaaggaatgaaagtgtcacgggtaaaaactctaaaaggttaatttctgtcaaatgcagtagatgatgaaagaaaggttggtattatcaggaaatgttttcttaagcttttcctttctcttacacctgccatgcctccccaaattgggcatttaattcatctttaaactggttgttctgttagtcgctaacttagtaagtgcttttcttatagaacctcttctgactgagcaatatgcctccttgtattataaaatct

SEQ ID NO: 348194 - DNA, 3084 bp, Homo Sapiens
  misc_feature (1473)..(1473): n is a, c, g, or t
  misc_feature (1480)..(1481): n is a, c, g, or t
  misc_feature (1484)..(1486): n is a, c, g, or t
  misc_feature (1493)..(1494): n is a, c, g, or t
  misc_feature (1497)..(1497): n is a, c, g, or t
  misc_feature (2664)..(2676): n is a, c, g, or t
agcggaagctgtcacgcctggacatcctggccatgccccggaagcgggccggctccttcacagggactagtgaccccgaggcagcccctgcccgcaccagcttctctggccgcagtgtggagttgtgctgtgccagccgcaagcccaccatggccgaagcacgggctgtctccaggaaggctgccaacacagccaccaccacgggtccccgccagcccttcagcagggccagctcaggcagtgcccgatacacctccaacacgaggcgccggcagcagggctcggattacacgtccacctctgaggaggagtacggctcccgccacggctcccccaaacacacacgctcccacacctcaacagccactcagaccccgagggctggcagctccagccgggctcgttcccgggcccccggcccccgggacacggacgacgatgaggaggagcctgacccttatggtttcatcgtgcagacggcagagattgcggagattgccaggctgagccagacgctggtgaaggacgtggccatcctagcccaggagatccacgatgtggctggggacggtgacacactgggctcctcggagcctgcccacagcgcctccctcagcaacatgcccagcacccccgcctcgaccatctctgcccgggaggagctggtgcagcgcatccccgaggccagcctcaacttccagaaggtgccgcccggctcgctgaactctcgggactttgaccagaacatgaacgacagctgtgaggacgccctggccaacaagacgcggcctcggaaccgagaggaggtgatcttcgataacctgatgctgaacccggtgtcccagctgtcgcaggccatccgtgagaaacacagaagcaccttgccgagaagatgaagatcctctttcagaacacagggagagcttgggaggacctggaagccaggatcaacgccgagaacgaggtgcccatcctgaagacatctaacaaggaaatcagctccatcctgaaggaactgaggcgggtgcagaaacagctggaagttatcaatgccatcgtggaccccagtgggagcctggacctgctcacaggaaacaggagcttggccagctctgcacagccggggcctggggaagggccgcgtggctgcccagagcccaccctcacccgcctcagccgaggccctgctgccagccctgcccctgaggaatttcccacagcgggccagctgtgggcctcccagcctcccggaccccaccttcctccctgatgccgagaggttcctgatctaggccccagacctggccaggccagcctccctgtgcgtgtgcgtctctgccttccgtccgccgcacacccgcctgcctggccgcaggtggctctccctgaagacccccacatgtgccatatccctgtgggcgggtgcctcccacgcccttgccccctcgtcagctcccagccagcaccctactnacccttnncannnccatggnnaancccacccctgcctcgcaccctacaggcctctgggcccagctcctggccaggctgctgccaaggtcaagccctcaagggcattaccccgcctcctcttcatcactgttatttttgtctttagctttaaaggaaagagttgttggtgccattgcaggtgccccctccaggcctgactggctccgccaggcactaacctgccataaccctttgtgctggcctgcggccaggcagaggaagagaggtcgactgtggggtcatttggtgccaaacatggaggtgggcaggctcacctgttcctgggactgtctgagatggcagggcacttgccctggtggctcccacctgaccccaggccttttataggcaggagccccactgcttccagcctctggtgccaacacagttgccaaacccattgagcttggggctgccctgtggaggcctcctgggtatggaccaggggcttgttgagagctgagccatgcacacaggtgcagacaccccccaactcccatgcacacggctagtccaggcgcctccacgctgcaccgtgaggactgcagggcatgtccccgtgaggggctatgggcctctgtaggtgggcttccaaggtcctgggtgcagccgggtgcatggcagcccttctggcgggggtgagcgcacgaccaaagtcactggaagccgggtttccggaagctcgcagcttggcctgcaccacacgccctccccttttggcttcacgccatcaggcctcaagtgggcatgggggcagggacgggcccaggaactgttgttttctcaggattctttcagctgggaacatggcaggtgagcagagcttggtgcctctgccgtggcccctgctggggcagcccgtgttgccggagcctctaagccaaagagcccgttggccgtggttggtgggggtggacgtgggggtgtcccacctggaccagactggcgtgggtgagctccacaccctgcctggcaatggtatgagagtcggacctggacagggccagctgctgggggagcggcactggggactggaggctggaagcgggtggtgtgtgtcccctgtttacttttagctgagctggggttgggtgtacgggttctgttcctctgagccctgcggcccacctgatgtttacgtgtgtgtgtgannnnnnnnnnnnntggcaggtgtccccccctggtccccgccccaagagcctgctgtctgtatggaggaggtgctagcccggtccaccgggctgctgcccacccctgcatgccccagttgcccaccccgcctgcccctggacatgaagtggtcacgcttcatccacggctccttcccacccctcggcagtggctgtgcaatgttttaagttcacaagttcctgctcctccccacactgagctcctttgttcctccccctccagcctttgcctgggaactggtccttgtttgccgggcttctcggagggttcactgtacattcgttctcaggtggtcttgtggctgtctttcggaaaatggttattttatatgatttgtcatggaatttgttctaataaatcattcttctatcacatggcagc

SEQ ID NO: 348195 - DNA, 1839 bp, Homo Sapiens
  misc_feature (53)..(53): n is a, c, g, or t
  misc_feature (1829)..(1829): n is a, c, g, or t
ttgtggagctgtggttccccagaggtagtgggggtgggaataagaggcagganagaggagcaaaggcactgggcttcccacaggagaatgcaagaaggtcctcgatgccaccccttccccagctcaggccccatcctcttgggcacttggccctctggctgctccctaaaagccttcggcttctttctccagctctggatcagttctggtctctggggctggccgccggtgggccgtgcagcgggaacagcatcgactctccttccccgagccacaggacagtggcagtgaacagtcatcccgctcacagtgaggcacccctgccccacatctgcaggtgatacagctcatctctccaaaagggggcactgaggggtgccagctctgactctctgggaaccactgcccagcaaaacggcagccccggggcccatcagcctgcatggggtcccccagctgggggtgggcccccgaccccactggacactgtttgcagcagtcggtggggttgacacgcacaggctgggcacaggccagccggggacactgcaccttctcacagtgcacctctccagtgccccccttgcaggtgcagacagcacacttaattaagccaaaggggggcacaacggggtgccaccgcgtacccgctgcccgccagctccggtcaccatcaaaatagcagcccttccagctcaccctctcctgggtcccggctccttggcagccctggcaagtctctgacatcttgtttctcagggcaaacagggcagcactggtcgggagcctgcaccgggtgtgggcagctgggcggtgggcacaccaccgggtcacagatcaccgttcgtctctggcaggtgcagagtgagcagagcgggtcgtagttgggcgcccagcgagccccgtgggggcgctgctgcccctcgaagaagcatgtgttggggtctcggggccgcccaggaccaccaggtttggcgggcgctagggccgggagaccaggcaccacaggcggcgcagcagaggctgtatccggagcccccagcgcccgcaccccctcggccccggccgcctccaggcgcagtccgccaacctcacattggttggctatgtgcacctgccctcggagctcccctctggggctacccttggtggtgatcatcagggaggccatgccttttgccaggtgccgcagcagttccggctccaggtccttcaccacaccctgggcctctgagccatagaatcccttcagcagccgccgaggccctggcgttccaggaggcccaaggaggtgggcagtgacagtgccttgttctgagccaccaagcccagccagcagcacttcatagtgcaggtgacagtgggtatccaaggaaagccaggcgtgccctgctgcttggctcttcacagggggtagcaccagggctcctgctaggggcacgggcagcgtgtcatggcgggcgctatgcccacagtagggcagggcagccacgtgcccccgaagctctccgtctgggaagtccttggtgcccacgttcaggaagagctcattctgcagcagcatatgagcccctcgggcacccagcccagggcagatacccacggccgtgtgtcctcctggctggagtccagccatgtggcacaggacagtgcgctgatccctccgctgaggcttggtctccagtgacatggccaccacctcactgcttgtccctaccacttgcacctgatagatcagggaaccatttcctagcagcgtgaggctggctgagccggcagcacccgtctggactgggatcagggcatcagcccctcaaaggacactttgnaggacgtcgc

SEQ ID NO: 348196 - DNA, 423 bp, Homo Sapiens
  misc_feature (8)..(8): n is a, c, g, or t
  misc_feature (19)..(19): n is a, c, g, or t
  misc_feature (25)..(25): n is a, c, g, or t
  misc_feature (41)..(41): n is a, c, g, or t
  misc_feature (46)..(46): n is a, c, g, or t
  misc_feature (56)..(56): n is a, c, g, or t
  misc_feature (61)..(61): n is a, c, g, or t
  misc_feature (78)..(78): n is a, c, g, or t
  misc_feature (80)..(80): n is a, c, g, or t
  misc_feature (87)..(87): n is a, c, g, or t
  misc_feature (90)..(90): n is a, c, g, or t
  misc_feature (105)..(105): n is a, c, g, or t
  misc_feature (109)..(109): n is a, c, g, or t
  misc_feature (111)..(111): n is a, c, g, or t
  misc_feature (127)..(127): n is a, c, g, or t
  misc_feature (143)..(143): n is a, c, g, or t
  misc_feature (151)..(151): n is a, c, g, or t
  misc_feature (159)..(159): n is a, c, g, or t
  misc_feature (167)..(167): n is a, c, g, or t
  misc_feature (175)..(175): n is a, c, g, or t
  misc_feature (190)..(190): n is a, c, g, or t
  misc_feature (204)..(204): n is a, c, g, or t
  misc_feature (217)..(217): n is a, c, g, or t
  misc_feature (237)..(237): n is a, c, g, or t
  misc_feature (343)..(343): n is a, c, g, or t
aagaagcngagggctcttnggagcngcaaggggccaagtgncaaanaggatgggcntgagntgggaaagggtggcatngnggaccanctngcattctcctgtggnaagncnagtgcctttgctcctntgtcctgcctctactncaaccccnactacctntgggaacnacagctcnaaaaggggaagaggnagctgggccaaacngaggtaacagccnctccaagtcctgccctgccnccctcggcctctgtcctggaagccccacccctttcctcctgtacataatgtaactggcttgttgggaattttaatttatcttcactcagcacaaagggcccccganactccactcctgctgcccctgagctgagaagagtcattattggagagttttgtatttattaaaacatttctttttcagtc

SEQ ID NO: 348197 - DNA, 1485 bp, Homo Sapiens
  misc_feature (1328)..(1328): n is a, c, g, or t
  misc_feature (1430)..(1430): n is a, c, g, or t
agcaacaacagaggacttaagttcattttgtgatactgtatggatgttaccccatcctattcagttgtcattccacccaaacccatgtgtaggtttccacatggaaaggagaaggcatccattccacctagacattgaatagtgataataagctaaaagtgggcagattttcagtggagcaagagcagaaatatgcggccaaagaatgtttcctgattggttttgctgctttagactgcagtggggagagcttatgtagattttcaaaactttctccctctttaaggcatcataatgctctcggttttgataacaactgacataaagggaggttgacttaaaatgggaatttctccttccaaaaatgctacactcttcctatccatcctacagcttctttatgaaatgagaggccctcctgctagaatatgaaatgcagaagacctcatgactttcagctgatttttcaaagataaagtgaactgttcagcttcatagaaattcatgcgagtgtgactgaacgtgtgtgcatacacactcgtgcacattggactcatttgggcagttttaaaagcttcacactaaatccaaagcctcgtcctttgggtcgtatgtagtcgtttgtaaaatcaatttctggcttctgagtcatcctggtcatatctctagcaatgtttttcttgaaattctgaaaatgattcacatatgtgtgtacatttaattcacttagatgatctgtaaacttggatggtatttattctaaatggggaaaacaattttatatggaaaaatctatgtaatttataatggttttgttttatatattatattttcatatctctagggcacatctatcctcatctttttgtataccatacttagcaaaaagaaatactaatacttgactaaaatctctaggaaccaaacgtgatacatgtgatatatagcttctagaaatcgctccaaaaatctctgaatgtctcatccatcccaagcattattgtgctgtgtcattatgtccagaatgatttgtcttggatgcttatgagcatttgtttttcacaactaaggttgaaagacctgacatctcacacaatggggttctggaattcccctttcctcctttatctgtttttattgtttgtttcatttttaattgcaccagtctatgttgtcgaaactttgttttgaagggcaaatgtgagataacaagaaagcaatgtgatggaaagactggatgaatttacctatggctatgtaaattattttaatggactgataagatgtttcaagtctcatgcttggatctttatttattggtgatctangatctgctcagctctttagcacatgaagaaaatcaggtacaaaggacatttgcatgtttggaacagcatgctctaagccccgtgcaggcaacacaaattaancttgactgtagaaacaccaattccagctgctgggaagaaatggttttagaaaggc

SEQ ID NO: 348198 - DNA, 672 bp, Homo Sapiens
aatccagagaaagagcttctgctaataggtatcatatcaacgtttcttcacggtccatcctttttggagccaacatagaatatctttggtcatacatgcagcagctggactccaagatatctgcaaatgaaatagaaatgcttttgatgaggctgccacgcatgttcaaacaggaattcacgggtgtgggagccacgctggaaaaaaagatgggaagctgtgtgcctttgaaggaattaaaactacctaactgcgaagagcaaagcatctctggaaatgaaaccatgtgaacctggccagggcggtgcgacggggaagcaggaggtgtggggttggtcccgcacgcaacctttgtggagccatcgaagcctgcctttagttatatctgtggcgttctcttgtaagtggaaatgtaattgtgtaccagtttcttaaaataaacaaagcttcatactgtgacagatctgtttcctatgaaaaccaaacaatgattccacagtcataatgatggcaaaatcttaaaatgtgctacatttgagaatagctcaccaagcaaaatatttaaagttaatgatggtgtagcaatgattgttgctaggctacagagttgtatatgtaatgtatagctgaaatcattaaatgacattttcctgaaagtctttctgttttagt

SEQ ID NO: 348199 - DNA, 486 bp, Homo Sapiens
  misc_feature (26)..(26): n is a, c, g, or t
aagaaaacctttgtccctttgaaggnaattaaaaactcccctaactgcgaaagaccaaagccatctctggaaaatgaaaacccatgtgaaaccctggcccagggcggtgccgaacggggaagccaggaggtgtggggttggtccccgcacgcaacctttgtggagccatcgaagcctgcctttagttatatctgtggcgttctcttgtaagtggaaatgtaattgtgtaccagtttcttaaaataaacaaagcttcatactgtgacagatctgtttcctatgaaaaccaaacaatgattccacagtcataatgatggcaaaatcttaaaatgtgctacatttgagaatagctcaccaagcaaaatatttaaagttaatgatggtgtagcaatgattgttgctaggctacagagttgtatatgtaatgtatagctgaaatcattaaatgacattttcctgaaagtctttctgttttagtaaaaaaaa

SEQ ID NO: 348200 - DNA, 976 bp, Homo Sapiens
aatcgtactcaagatcctatgcgtttcctgagttacaacagtggatacagtgcagagaatctatagaagacgtcagcataggcgctagctgatgtcgaagaaaactttcaacagtgttagcaaaattgacagaatgtccagaatagtttttccagtttagtttggtacctttaatttagtttactgggctacatatttaaacagagaacctgtattaggggtcagtccttgaattgagacccatgttatctttgggatgtatagcaacattaaatttggtttgttttgctatgtacagtctgactaataactgctaatttgtgatccaacatgtacagtatgtatatagtgacatagcttaccagtagacctttaatggagacatgcatttgctaactcatggaactgcagacagaaagcactccatgcgaaaacagccattgccttttttaaagatttaccctaggacctgatttaaagtgaatttcaaatgacctgattaatttcctattcttccaaatgagatgaaaatggggatcctgtacaaccctttgtggacccttttggtttagctcttaagtaggggtattttctactgttgcttaattatgatggaagataacattgtcattcctagatgaatcctttgaagtaacaaacattgtatctgacatcagctctgttcatgagtgctcagagtccctgctaatgtaattggaagcttggtacacataagaaaaactagagatttgaaatcagctatgaattactctatatagtatctatagccatgtacatattacagcatgacaagctcaaataattatgagtcagcccgaaaggatgttaattatgcctacgatgtaataactattggaatgtcatggtcattacatttttagcttcagagtttatttgaaagtaataattgaaatcctacaatttattttaatcattggaaactaccttaattaaa

SEQ ID NO: 348201 - DNA, 786 bp, Homo Sapiens
cccacgcgtccgtgtataatggacaggtgttccttgagtgacagacttacaaagggagtgtttaattgaaatctagcatcttgtctctctgctatcagcattttggctgggtggaaaaagctctcctccacagagagccctcccatgtctgctggtttcagttccccacccaactgactgaagtcttgaccttgataccacctgcctgggcgttctacttggctgcaagggctcttcagaaagcacctagttccttttggctttcatctgcagtgtaggtctccatagctagtgacacacaaagccttatgagagtattccttccctctagggcccaaagaggctgctaaccagcaggaatgtcctgaaccaaaaggagtggtgaccattctctagacagaataaatgtctggtccctaatgggacagataactagggtttgagttcaggctagacacaggagcaatgggcagtgaggtggacagcccagaccctgaaaggacgtgtggagacagcagcagtcctgtggtgcagttactgcctgtgtggccagcttcacaggcagcagataatttgtggaaataaacattattttctttttttgttccctgtaggctacttgatcctggatagtttctctttaaacctttgtctttccctattttgttaagtagtgatgaaagatgggtttaaaatatacagaaatgggagaaaattaattagagaaaatgtgaggattttataattgataacatgttcttaattttaacttgcacaagcagtgtt

SEQ ID NO: 348202 - DNA, 672 bp, Homo Sapiens
tcgtaggtagggttagtggcgcgtctgtgctgcttccacctggtgcttcctgttcccaaatcacaagggcctgaaggtggtccctgctttctctttctctttctctgtgtctcagatggcgattttgctgacagctgccaagaaaatgcttcactcaacagtcctcatgtgcccagagatgtttatagaactgtttgaattgcagccatcccctgccccctcccaggctgaagatctgttctttttaagttgattcgggagtggcattcttttatacccaaagactgtagtgcatcttgaagagctcaaagcacatgaccgcacaaatgcttacagggtttcctcccgagtaatccaatctcactccccttgtaagggaattctggggcagctatggtttgagtatgcagtttgcatcgtgtttctacctttagtaccttgccactcttttaaaacgctgctgtcatttcccatttcttagtactaatgattctttgattctccctctattatgtcttaattcactttccttcctaaatttgttatttgcatatcaaattctgtaaatgttttgtaaacatattacctcacttggtaatacaatactgatagtctttaaaagatttttttattgttatcaataataaatgtgaactatttaaagaaaaaaaa

SEQ ID NO: 348203 - DNA, 775 bp, Homo Sapiens
  misc_feature (273)..(273): n is a, c, g, or t
ggcttctacatcctgcagtggaaattccacagcatgcctgcgtgcgccgccagcagccttccccgggtggacgacgtgcttgcgtccctgcaggtctcttcgcacaagtgtaaagtgatgtactacaccgaggtgatcggctcggaggatttcagaggttccatgacgagcctggagtccagccacagcggcttctcccagctgagtgccgccaccacctcctccagccagtcccactccagctccatgatctcccaggtagtgccgcgctgncctgcacctagtgtgcaagaggggacggccgcccctcctcggaaagccagctgcacccgcccacccagcggcgacattgtacagactcctctcacctctagatagcaaatagctctcagatggtaaacgtagtcgtttgatcccaaaactaccttggcaggtagttttaactctgatcctaacttaactcaatagccatagattttgtatacgttgtgcacaaaatccaaccagagcgcaagggcttctcttgaaaagaaaagtagtttcctgtacccaattaaaaggattgacgtgggtccttttcaaaggacccagaacagaccggggggagagacccttgtcggccccccttcgggtccttcgaagaacctttttcaaaacaatttgctttgggccggccgggcccccggcaagggaaaagtgaaacatgggccataagccggcttcccaaggaaaatcccgggggccatgaactaacggccctgggaattcccccccc

SEQ ID NO: 348204 - DNA, 979 bp, Homo Sapiens
aaacaaagggaatgaaattggaattactcgggaggaaaaccctgttaaaccatttgtgcggtccatgtgcctttgaacctcttcaaagatgcaactaacaatcctttgggtaataaaagaatgcccactccccgaatccaactttaaaaagaacagatcttccagccctgggagggggcaggggatggctgcaattcaaacagttctataaacatctctgggcacatgaggactgttgagtgaagcattttcttggcagctgtcagcaaaatcgccatctggagatcatggagctggagtgggactggctggaggaggtggtggcggcactcagctgggagaagccgctgtggctggactccaggctcgtcatggaacctctgaaatcccccgagccgatcacctcggtgtagtacatcactttacacttgtgcgaagagacctgcagggacgcaagcacgtcgtccacccggggaaggctgctggcggcgcacgcaggcatgctgtggaatttccactgcaggatgtagaagcccggccacctggtcacatgggaaccctgcacgctttctccttctttgcagatcagaggcgactccaccatgctgtagtcgcggcccagctgccagactttgtctatgagctgcacattgttcccacccggagaggtgatgctgtgggctcccagggagtcctttttgggtggttgtggcgacctcttggagtgatagatgttaaacacaatgtcccctttgcacacgtcgaaatcccaagtgatgactgacgaggcatccacaatctgaatgagaatctcatgtggggctcctttgaagacgcttgcagactggtagatggtctcagtccagagcttcaggtcttcgttctccagctcctctgcagtccggtacagagatttggggaccagtccaccctctggcacttcgcacatgcactccccactcaggaaatctggaatacc

SEQ ID NO: 348205 - DNA, 481 bp, Homo Sapiens
  misc_feature (394)..(394): n is a, c, g, or t
  misc_feature (402)..(402): n is a, c, g, or t
  misc_feature (450)..(450): n is a, c, g, or t
  misc_feature (465)..(465): n is a, c, g, or t
aggccaactaccctgagacactgggccgccttctcatcctgcgggcgcccagggtatttcctgtgctctggacgctggttagtccgttcattgatgacaacaccagaaggaagttcctcatttatgcaggaaatgactaccagggtcctggaggcctgctggattacatcgacaaagagattattccagatttcctgagtggggagtgcatgtgcgaagtgccagagggtggactggtccccaaatctctgtaccggactgcagaggagctggagaacgaagacctgaagctctggactgagaccatctaccagtctgcaagcgtctttcaaaggagccccacatgaggattcttcatttcagattgtgggatgccctcgttcagttcattcanttgggggnttttcgacgtgttgcaaagggggacattgtgttttaacatttattcanttccaagaggttcgncacaaccacccaaaaa

SEQ ID NO: 348206 - DNA, 428 bp, Homo Sapiens
ccttttaaaaccccaaagacggtaagtgccaccctggaaagagcctccaaagccacatgaaccgccacaaatgccttaacagggtttccctccccgagtaatcccaatcctcactcccccttgtaaagggaaatcctggggccagcctatggtttgaagtatgcagtttgccatccgtgtttcctacctttagtaccttgcccactcttttaaaacgctgcctgtccatttccccatttccttagtactaatgattctttgattctccctctattatgtcttaattcactttccttcctaaatttgttatttgcatatcaaattctgtaaatgttttgtaaacatattacctcacttggtaatacaatactgatagtctttaaaagatttttttattgttatcaataataaatgtgaactatttaaag

SEQ ID NO: 348207 - DNA, 2255 bp, Homo Sapiens
  misc_feature (1995)..(1997): n is a, c, g, or t
  misc_feature (1999)..(2000): n is a, c, g, or t
  misc_feature (2002)..(2002): n is a, c, g, or t
  misc_feature (2004)..(2056): n is a, c, g, or t
  misc_feature (2112)..(2120): n is a, c, g, or t
agcattatgcgtgattactgacaggcaccagctgctgccgccacagccgtctcaaacgcactatgtggactctccgatctagaggcagattcctgactaatcccagagggctggcccagcctgtgctccccgggctgctaggaagcgatgaccactcttgttagcccaagttgaagaaagccgggctgtgcctgggagccgagagaggcggtaatatttagaagctgcacaggagaggaacatgaactgacgagtaaacatgtatggaaattattctcacttcatgaagtttcccgcaggctatggaggctcccctggccacactggctctacatccatgagcccatcagcagccttgtccacagggaagccaatggacagccaccccagctacacggataccccagtgagtgccccacggactctgagtgcagtggggacccccctcaatgccctgggctctccatatcgagtcatcacctctgccatgggcccaccctcaggagcacttgcagcgcctccaggaatcaacttggttgccccacccagctctcagctaaatgtggtcaacagtgtcagcagttcagaggacatcaagcccttaccagggcttcccgggattggaaacatgaactacccatccaccagccccggatctctggttaaacacatctgtgccatctgtggagacagatcctcaggaaagcactacggggtatacagttgtgaaggctgcaaagggttcttcaagaggacgataaggaaggacctcatctacacgtgtcgggataataaagactgcctcattgacaagcgtcagcgcaaccgctgccagtactgtcgctatcagaagtgccttgtcatgggcatgaagagggaagctgtgcaagaagaaagacagaggagccgagagcgagctgagagtgaggcagaatgtgctaccagtggtcatgaagacatgcctgtggagaggattctagaagctgaacttgctgttgaaccaaagacagaatcctatggtgacatgaatatggagaactcgacaaatgaccctgttaccaacatatgtcatgctgctgacaagcagcttttcaccctcgttgaatgggccaagcgtattccccacttctctgacctcaccttggaaaaccaggtcattttccttcgggcagggtggaataaattgctgattgcctctttctcccaccgctcagtttccgtgcaggatggcatccttctggccacgggtttacatgtccaccggagcagtgcccacagtgctggggtcggctccatctttgacagagtcctaactgagctggtttccaaaatgaaagacatgcagatggacaagtcggaactgggatgcctgcgagccattgtactctttaacccagatgccaagggcctgtccaacccctctgaggtggagactctgcgagagaaggtttatgccacccttgaggcctacaccaagcagaagtatccggaacagccaggcaggtttgccaagctgctgtgcgcctcccagctctgcgttccattggcttgaaatgcctggagcacctcttcttcttcaagctcatcggggacacccccattgacaccttcctcatggagatgttggagaccccgctgcagatcacctgagccccaccagccacagcctccccacccaggatgacccctgggcaggtgtgtgtggacccccaccctgcactttcctccacctcccaccctgacccccttcctgtccccaaaatgtgatgcttataataaagaaaacctttctacacatgaaacttttataggtggacttttgtatagatgttaaaggtaatacgctttgctgtctacagggctgggagactttctggaagttcttgggaaaactaatcaagcctctgtacatacaattggtttaaattattttttcacttgccctggaaagcaaacaaatgagtaataaaataatatgtgtgaaattggcaaaannnannanannnnnnnnnnnnnnnnnnnnnnnnnnnnnnnnnnnnnnnnnnnnnnnnnnnnnggggggccccccctaaaaatccccctaagggggccccagtttttccggtaccccannnnnnnnngtaaaaaagggggccccataaaggggaccgatatttaaaaacttgggccttgggccccctttttttaaaccccctgggacgtgggaaaaaacccccaccctgggggaattttttggaaaaggaaccttttcctcc

SEQ ID NO: 348208 - DNA, 684 bp, Homo Sapiens
tttttttagttgattttttaaagaatacagcccaacacttgttttttacattttaagagttgtagaagttgttcctaacttggggactggacctaccctctaggagggagttgttaatggggctcttttagcccactgatgcttacttaggccggagagcaggggacacggtgctaggttccctcgtgcagtgcctggtgctctcaaattgtctcaaaaggaccaagaggaaaagagtcggaggggtagaccctgcagccctgttgagaagaaagattccagtgaagttgctgatggtatggctgtggtctgggacttgcggtgtctcggcatacccctctcctcttcccacctcctcctggctatgttctgcagcctcccagagtagaaaactactttgttacttaaggttgttcaccttgtaccagtggttatttgagtttgttcctattacaccaatccttacttgaggtggttcggattacagtttccaaatgcattctgggattgcctattccagagagggtacagaaaaagcacacagatggcttgtctcaggagtgttgaatgtgtgccccgctgctgtctggggggatgggagtgggctctggggtcatatgtgaacatccccttggatgatttgcggttgcttagaataaaacttgctactagcaaaagggagga

SEQ ID NO: 348209 - DNA, 839 bp, Homo Sapiens
aagggatagtcgtggaagtgggggataggagtatgttgtctatgcctctgtagagcagcgccatatgtgaatgcgttgcatgtcgcttgactcacctgaggctctccaaggataccttcaatgcctgcactgtaagggagctgctttgcccgggtgcttggcgagaacggaagccttcctttgacgtttgtctaaacatgggatgcagtctgtgcagcctgcagaagcaagaggagcagtacaaattactctatgaagtttgtcaggtcaacggcagagacttatccagagcaactcatgaccaggctgtggaagctttcaagacagccaaggagcccatagtggtgcaggtgttgagaagaacaccaaggaccaaaatgttcacgcctccatcagagtctcagctggtggacacgggaacccaaaccgacatcacctttgaacatatcatggccctcactaagatgtcctctcccagcccacccgtactggatccctatctcttgccagaggagcatccctcagcccatgaatactacgatccaaatgactacattggagacatccatcaggagatggacagggaggagctggagctggaggaagtggacctctacagaatgaacagccaggacaagctgggcctcactgtgtgctaccggacggacgatgaagacgacattgggatttatatcagtgagattgaccctaacagcattgcagccaaggatgggcgcatccgagaaggagaccgcattatccagattaatgggatagaggtgcagaaccgtgaagaggctgtggctctttctaaccagtgaaagaaaaataaaaacttt

SEQ ID NO: 348210 - DNA, 765 bp, Homo Sapiens
agcggggtgagaagtcgctggtggcccagctggccgcggcgcagcttgagctgcagatgaccgcgctgcgctaccagaagaaattcaccgaatacagcgcgcgcctcgactcgctcagccgctgcgtggccgcgccgcccggcggcaagggcgaagaaaccaaaagtctgactcttgtcctgcatcgggactccggctccctgggattcaatattattggtggccggccgagtgtggataaccacgatggatcatccagtgaaggaatctttgtatccaagatagttgacagtgggcctgcagccaaggaaggaggcctgcaaattcatgacaggattattgaggtcaacggcagagacttatccagagcaactcatgaccaggctgtggaagctttcaagacagccaaggagcccatagtggtgcaggtgttgagaagaacaccaaggaccaaaatgttcacgcctccatcagagtctcagctggtggacacgggaacccaaaccgacatcacctttgaacatatcatggccctcactaagatgtcctctcccagcccacccgtactggatccctatctcttgccagaggagcatccctcagcccatgaatactacgatccaaaatgactacattggagacatccatcaggagatggacagggaggagctggagctggaggaagtggacctctacagaatgaacacgcaggacaaggctgggcctcaatgttgtgctaaccggacggaacgatagaagaacgac

SEQ ID NO: 348211 - DNA, 1083 bp, Homo Sapiens
  misc_feature (1043)..(1043): n is a, c, g, or t
  misc_feature (1050)..(1050): n is a, c, g, or t
  misc_feature (1054)..(1054): n is a, c, g, or t
  misc_feature (1061)..(1061): n is a, c, g, or t
  misc_feature (1067)..(1069): n is a, c, g, or t
aaaaactttacggctaggtagcgaggctgggtgtcgaattcggcacgaggcccagttgttgatcttatgcaagacgctgcacgaccccgcgcccgcttgtcgccacggcacttgaggcagccggagatactctgagttactcggagcccgacgcctgagggtgagatgaacgcgctggcctccctaaccgtccggacctgtgatcgcttctggcagaccgaaccggcgctcctgcccccggggtgacgcgcagctcccagccgcccagacacatggccccaggccaagcaccccatcaggctaccccgtggagggatgcccaccctttcttcctcctgtccccagtgatgggcctcctcagccgcgcctggagccgcctgaggggcctgggacctctagagccctggctggtggaagcagtaaaaggagcagctctggtagaagctggcctggagggagaagctaggactcctctggcaatcccccataccccttggggcagacgccctgaagaggaggctgaagacagtggaggccctggagaggacagagaaacactggggctgaaaaccagcagttcccttcctgaagcctggggacttttggatgatgatgatggcatgtatggtgagcgagaggcaaccagtgtccctagagggcagggaagtcaatttgcagatggccagcgtgctcccctgtctcccagccttctgataaggacactgcaaggttctgataagaacccaggggaggagaaagccgaggaagagggagttgctgaagaggagggagttaacaagttctcttatccaccatcacaccgggagtgttgtccagccgtggaggaggaggacgatgaagaagctgtaaagaaagaagctcacagaacctctacttctgccttgtctccaggatccaagcccagcacttgggtgtcttgcccaggggaggaagagaatcaagccacggaggataaaagaacagaaagaagtaaaggagccaggaagactccgtgtcccccgatcttcaggtccgacccaagncctgganatcntcagganagggcnnngagaagaggaaagg

SEQ ID NO: 348212 - DNA, 1112 bp, Homo Sapiens
  misc_feature (201)..(201): n is a, c, g, or t
  misc_feature (715)..(715): n is a, c, g, or t
cagttgttgatcttatgcaagacgctgcacgaccccgcgcccgcttgtcgccacggcacttgaggcagccggagatactctgagttactcggagcccgacgcctgagggtgagatgaacgcgctggcctccctaaccgtccggacctgtgatcgcttctggcagaccgaaccggcgctcctgcccccggggtgacgcgcantcccagccgcccagacacatggccccaggccaagcaccccatcaggctaccccgtggagggatgcccaccctttcttcctcctgtccccagtgatgggcctcctcagccgcacctggagccgcctgaggggcctgggacctctagagccctggctggtggaagcagtaaaaggagcagctctggtagaagctggcctggagggagaagctaggactcctctggcaatcccccataccccttggggcagacgccctgaagaggaggctgaagacagtggaggccctggagaggacagagaaacactggggctgaaaaccagcagttcccttcctgaagcctggggacttttggatgatgatgatggcatgtatggtgagcgagaggcaaccagtgtccctagagggcagggaagtcaatttgcagatggccagcgtgctcccctgtctcccagccttctgataaggacactgcaaggttctgataagaacccaggggaggagaaagccgaggaanagggagttgctgaagaggagggagttaacaagttctcttatccaccatcacaccgggagtgttgtccagccgtggaggaggaggacgatgaagaagctgtaaagaaagaagctcacagaacctctacttctgcctcgtccccaggatccaagcccagcacttgggtgtcttgcccaggggaggaagaggatcaagccacggaggataaaagaacagaaagaagtaaaggagccaggaagacctccgtgtccccccgatcttcaggctccgaccccaggtcctgggagtatcgttcaggagaggcgtccgaggagaaggaggaaaaggcacacaaagaaactgggaaaggagaagctgccccagggccgcaatcctttcccagtttctttgtgtgccg

SEQ ID NO: 348213 - DNA, 497 bp, Homo Sapiens
  misc_feature (45)..(135): n is a, c, g, or t
gatagtgtctcttgctttatcaccctggctggaaagcagtggtannnnnnnnnnnnnnnnnnnnnnnnnnnnnnnnnnnnnnnnnnnnnnnnnnnnnnnnnnnnnnnnnnnnnnnnnnnnnnnnnnnnnnnnnnntcatcaacaaggatcaacaatttttagatggtattgtaagtaaagttcactgccctagaacatttgtggagggagctaagggaatcaatattatctgtattcaggatcgtgtctgtataaccagaagcagggtagttctcactgtggtaactgagataaaatcatgttcttgatatgcatgactcaggggtaaccaacaccaaatttagttaccaaagacttttataaagtgaggactgcctgcatgcatgtttcttctcttctaggaaatgggaagattgcaatatcactgaatgttaagcaaacagcatacattcactccacttgttccatgtgttcttgtaccgggatctgctgctttc

SEQ ID NO: 348214 - DNA, 1118 bp, Homo Sapiens
  misc_feature (1008)..(1008): n is a, c, g, or t
  misc_feature (1011)..(1011): n is a, c, g, or t
gcccggagatttgtgggcggcgagggcgcgaggggccgcgcgccatgctccgggccccgacggcgcggacgccccctcgcgcgccacgtccggcgcgaccccggatcccggtctgcgcattgccccccgacggctgcgctagggagcgcggggcccggcggggggcggccgagctgggcgccctcccccggcgcggagtccccgcaccccggagggatggggcgggcagccgcgggcgcctaagatgccggccatgcggggcctcctggcgccgcagaacaccttcctggacaccatcgctacgcgcttcgacggcacgcacagtaacttcgtgctgggcaacgcccaggtggcggggctcttccccgtggtctactgctctgatggcttctgtgacctcacgggcttctcccgggctgaggtcatgcagcggggctgtgcctgctccttcctttatgggccagacaccagtgagctcgtccgccaacagatccgcaaggccctggacgagcacaaggagttcaaggctgagctgatcctgtaccggaagagcgggctcccgttctggtgtctcctggatgtgatacccataaagaatgagaaaggggaggtggctctcttcctagtctctcacaaggacatcagcgaaaccaagaaccgagggggccccgacagatggaaggagacaggtggtggccggcgccgatatggccgggcacgatccaaaggcttcaaatgccaaaccgcggccggagccgggccgtgctctaccacctgtccgggcacctgcagaagcaacccaagggcaagcacaagctcaataagggggtgtttggggagaaaccaaacttgcctgagtacaaagtagccgccatccggaagtcgcccttcatcctgttgcactgtggggcactgagagccacctgggatggcttcatcctgctcgccacactctatgtggctgtcactgtgccctacagcgtgtgtgtgagcacagcacgggagccncangtgccgcccgcggcccgcccagcgtctgtgacctggccgtggaggtcctcttcatccttgacattgtgctgaatttccgtaccctcgtgccacctcgtgccaagctt

SEQ ID NO: 348215 - DNA, 679 bp, Homo Sapiens
agaggatccctcgcgtatcatcggcacgtatttaagtaacaaattgtattactggtaattatataataagtatgaaattctgtcctagatatgaaagtgcaatgcagcagacacaaactcatggctgcttctgaaggtgaaagtcggcttccttggtcccattgggatggctggatttaggtacagctgtcttcaaaagctgatatactaaaacacaatttttctagagacgcgaggtacaaatacattgaattttagaagtagaaatcagtgtgggagtttctcctctgggatttttttcctagtccattcctagaaatagaactatatggctgtgggaccatggtcagtaataggggacaatgggacaaggagagctgcttaccatgcagaaggaaacaattcttatttctccatgtacctccactgggaaaccggcacacaggcaatttttctcactctattcaatccacatcaaggacacaaaaagactttggtacttttctaaataatacctttcccgaatgtcttgctgcaaagatatctaattgcctgcccagtatctactcttttccttccttactaatagcaccccagtttggtttgggatagtaatgtgcccagctaaaatgtagtatgttctcgtctaatttggaagtaagagaggccaggtgccatc

SEQ ID NO: 348216 - DNA, 291 bp, Homo Sapiens
  misc_feature (21)..(21): n is a, c, g, or t
acgatgcagatggaatgatgngacatgagtaccctgtcaataaaatatataacccaactaaattgtgaaataggaagtggtaccttgtggtacagtgtataaaacaatttcggaacgctgtgcaaaaaacatatatagttttgcttccttctggtgttaagctgtttatatttcagtttcagttttaacttctaagttgccttgtaattgggactgtgtttcagcatcacaaaaaccaaatatttattaatggatgcatctgtatcagcaattaaaaaataaacaagtaaa

SEQ ID NO: 348217 - DNA, 1185 bp, Homo Sapiens
ttttctgaaatatttttgtaacacttttttgtatttttgccatttgaaacggttgtggtgtagttggtctgtaattaagttgcagatttaaaactgctgttagctttgtaaatcaaaatataggtgttttttgtcctggtatatcgtcattccatctgcagctggagctggaatcccattgatcttctagctaccattcattttcttcactgttcacaaaagaagagtgtgaaattcagtgaatgctgttactaatcctgttacgagatgaatctcatttcaccaaaattaaattatgtttttccgctaaaatgatgatacaagttgaagacacatcactctgaaattggaagacctcaccacttaaggctccacagtggcttactcagctgaactctaggttactactctttactttgttcacccattggggggtgcagtttttttaaaatgttgggagatggccattctaactactgttgaatgtctctgttttgggaaggtataacaagaaataaaaaagaatatatatgaagggagagactggttatctcctcccatatggttgtgcttatcctcttatggcttacaaatgaatatttggaggtttgctttcacaatgatttcccatcaacaaatatttttagtaggatttttcctgtttctgttagtccttgcagtactcataaatgttttaagctgagcatactgtaatagtcataagtttaatttcattataataaaaataatcaaacaaaaggactttagaacccaagacaatgagctagctttccctaaagcttgctgaactattaaggaatatgttcttatagcttttgactacaatgagtcatgcgaattctaaaaagggatggcctaaacatttttagctcagttaaaattcagcatttaacgcacgtgaagttcctggggtcggttttccacctaatctgggaacagtctggttcctgactcaaaactggttaaaagcatttattttagggtttcccctttggccagttttttaaagcactttataaaccattgtaaaatcaaagaatgtggaggaacattcctattatgtaaagttattaagtaacaagaaaaattgggtgtgtccccccccaaaaatccaaataaatggtgggttggttcccctgtggggggttgttgggccctgcactt

SEQ ID NO: 348218 - DNA, 965 bp, Homo Sapiens
  misc_feature (909)..(910): n is a, c, g, or t
  misc_feature (929)..(929): n is a, c, g, or t
  misc_feature (937)..(937): n is a, c, g, or t
  misc_feature (956)..(957): n is a, c, g, or t
  misc_feature (962)..(962): n is a, c, g, or t
gttgagtggaagcggtcgccatgtccgcggggagcgcgacacatcctggagctggcgggcgccgcagcaaatgggaccaaccagctccagccccacttctcttcctcccgccagcggccccaggtggggaggtcaccagcagtgggggaagtcctgggggcaccacagctgctccttcaggagccttggatgctgctgctgctgtggctgccaagattaatgccatgctcatggcaaaagggaagctgaaaccaactcagaatgcttctgagaagcttcaggctcctggcaaaggcctaactagcaataaaagcaaggatgacctggtggtagctgaagtagaaattaatgatgtgcctctcacatgtaggaacttgctgactcgaggacagactcaagacgagatcagccgacttagtggggctgcagtatcaactcgagggaggttcatgacaactgaggaaaaagccaaagtgggaccaggggatcgtccattatatcttcatgttcagggccagacacgggaattagtggacagagctgtaaaccggatcaaagaaattatcaccaatggagtggtaaaagctgccacaggaacaagtccaacttttaatggtgcaacagtaactgtctatcaccagccagcacccatcgctcagttgtctccagctgttagccagaagcctcccttccagtcagggatgcattatgttcaagataaattatttgtgggtctagaacatgctgtacccacttttaatgtcaaggagaaggtggaaggtccaggctgctcctatttgcagcacattcagattgaaacaggtgccaaagtcttcctgcggggcaaaggttcaggctgcattgagccagcatctggccgagaagcttttgaactatgtatatttacanngtcacccaaaccagaaggnctggctgntgcaagaagtttgtgagannttttncaa

SEQ ID NO: 348219 - DNA, 1250 bp, Homo Sapiens
  misc_feature (986)..(986): n is a, c, g, or t
  misc_feature (1009)..(1009): n is a, c, g, or t
  misc_feature (1013)..(1013): n is a, c, g, or t
  misc_feature (1033)..(1033): n is a, c, g, or t
  misc_feature (1095)..(1095): n is a, c, g, or t
  misc_feature (1113)..(1113): n is a, c, g, or t
  misc_feature (1185)..(1185): n is a, c, g, or t
atccctccggccggagctggtttttttgccagccaccgcgaggccggctgagttaccggcatccccgcagccacctcctctcccgacctgtgatacaaaagatcttccgggggctgcacctgcctgcctttgcctaaggcggatttgaataatcttatcttggctttggatcttagaagagaatcactaaccagagacgagactcagtgagtgagcaggtgttttggacaatggactggttgagcccatccctattataaaaatgtctcagagcaaccgggagctggtggttgactttctctcctacaagctttcccagaaaggatacagctggagtcagtttagtgatgtggaagagaacaggactgaggccccagaagggactgaatcggagatggagacccccagtgccatcaatggcaacccatcctggcacctggcagacagccccgcggtgaatggagccactggccacagcagcagtttggatgcccgggaggtgatccccatggcagcagtaaagcaagcgctgagggaggcaggcgacgagtttgaactgcggtaccggcgggcattcagtgacctgacatcccagctccacatcaccccagggacagcatatcagagctttgaacaggtagtgaatgaactcttccgggatggggtaaactggggtcgcattgtggcctttttctccttcggcggggcactgtgcgtggaaagcgtagacaaggagatgcaggtattggtgagtcggatcgcagcttggatggccacttacctgaatgaccacctagagccttggatccaggagaacggcggctgggatacttttgtggaactctatgggaacaatgcagcagccgagagccgaaagggccaggaacgcttcaaccgctggttcctgacgggcatgactgtggccggcgtggttctgctgggctcactcttcagtcggaaatgaccagacactgaccatccactcntacctcccacccccttctctgcntcancacatcctcccgtcagccgncattgccaccaggagaaccactacatgcagcccatgcccacctgcccatcacagggtttggngcccagatctgggtcccnttggcagctagttttctagaatttatccacactttctggtgagacccccaccacctcaggttccctttggcncctcagaatttcacaaaaattttcccacaaaattcttgtcccaaaaggaagggctgggcaaggga

SEQ ID NO: 348220 - DNA, 2571 bp, Homo Sapiens
cactgagtaaacacagtttattactgaactgcactttcaccttcacacagactatttcaaagagctggaacaagtgtggggtgggggttgggggaggggcagatgcccctcaggagccaggaccctcggccagcttccctggaccagggcaggggagggagcatcaggccgtccaatctccgggcaccagctctccacgtgcacgcgcactgcaagccagcagctcctcacacataaatacagacacgcttaacaaaaatagtatatcatcttcacaaggaataaaaactagtctcaaatatgtacagcagagagcccggggtggctgggacccctggggatgagacaggccaagggtggagcagaagagagagggaggcctgaagagctcctggccaggccactctggccttggcagcctggctgcccaggctggacaggcatggggcacagatctgcctggccaggcaggactggcccttctagtcagccctaccccaccccatgcagcaggctctccttcctgcccttcctgcctgaggtagggaagaccctggggctcccatagctgttcctgatagctccctttcacctcagggctgagtcccctgaacccaccatgaggagcagcccaaggcaaagatgccacaggctgctcttgtaggaagtgaggcagctgaggccataaacagctctggggcatctgtcttgggcccagttggtccctcagtatggtcatgggagccagggaggggaagggactagggtggtgctgaactgcaagggccaccctagctttggcatggggtgcttcctgtagctatagccccctccctcctgggtggggctggcctctagccagaggcttctggaggacatttggactgggagtgaggactctagccagtccagaggtgaggagggagtcctggtccttgcatctttatcccaagcagcctgaatccctagtcaaaagtggcccctaaatggctcttagggggtagggatggaaggaaagggaacccaggttagtgtggggagagtggggggaaaatgatcaattctgaggccacaaacatcaaaacaaaggcaatctagtctcctttctggggaagaggttctgaaaactttcaagctccctggcagaaaaacattttcagggaggctaaggggtaagggttgcaccaatcaggtagggccctcctgcccccagccacaaacccttccatacctgccagcctcctttggacagattttgtggaaattttgtgaattctgaggccaagggaactgaggtgtgggggtctcacagaagtgtgataaattctagaaaactagctgcaagggaccagatctgggcccaaccctgtgatgggcaggtgggcatgggctgcatgtagtggttcgtcctggtggcaatggcggctggacggagtgatgtgctggagcagagaaggggctgcgaggctagagtggatggtcagtgtctggtcatttccgactgaagagtgagcccaggcagaaccacgccggccacagtcatggccctgtcaggaaccagcggttgaagcgttcctggccctttcggctctcggctgctgcattgttcccatagagttccacaaaagtatcccagccgccgttctcctggatccaaggctctaggtggtcattcaggtaagtggccatccaagctgcgatccgactcaccaatacctgcatctccttgtctacgctttccacgcacagtgccccgccgaaggagaaaaaggccacaatgcgaccccagtttaccccatcccggaagagttcattcactacctgttcaaagctctgatatgctgtccctggggtgatgtggagctgggatgtcaggtcactgaatgcccgccggtaccgcagttcaaactcgtcgcctgcctccctcagcgcttgctttactgctgccatggggatcacctcccgggcatccaaactgctgctgtggccagtggctccattcaccgcggggctgtctgccaggtgccaggatgggttgccattgatggcactgggggtctccatctccgattcagtcccttctggggcctcagtcctgttctcttccacatcactaaactgactccagctgtatcctttctgggaaagcttgtaggagagaaagtcaaccaccagctcccggttgctctgagacatttttataatagggatgggctcaaccagtccattgtccaaaacacctgctcactcactgagtctcgtctctggttagtgattctcttctaagatccaaagccaagataagattctgaagggagagaaagagctgcgagccccgcgagccgtggggggccacatcccccttcatcggcccggtagcttccagacgcaagagctcttcgcggccgagttccgcgccgcggacccgggccggcctacctggctagccggcctacctggctgactgctcgcgccgtctctcccgaacaagccggcctcagtttcccctgaagagacaggggaacttgcaagctcagtcacttccggatcccgggaattccggaccggtcc

SEQ ID NO: 348221 - DNA, 839 bp, Homo Sapiens
aagcaagcgagggggctggttcctgagcttcgcaattcctgtgtcgccttctgggctcccagcctgccgggtcgcatgatccctccggccggagctggtttttttgccagccaccgcgaggccggctgagttaccggcatccccgcagccacctcctctcccgacctgtgatacaaaagatcttccgggggctgcacctgcctgcctttgcctaaggcggatttgaatctctttctctcccttcagaatcttatcttagctttggatcttagaagagaatcactaaccagagacgagactcagtgagtgagcaggtgttttggacaatggactggttgagcccatccctattataaaaatgtctcagagcaaccgggagctggtggttgactttctctcctacaagctttcccagaaaggatacagctggagtcagtttagtgatgtggaagagaacaggactgaggccccagaagggactgaatcggagatggagacccccagtgccatcaatggcaacccatcctggcacctggcagacagccccgcggtgaatggagccactggccacagcagcagtttggatgcccgggaggtgatccccatggcagcagtaaagcaagcgctgagggaggcaggcgacgagtttgaactgcggtaccggcgggcattcagtgacctgacatcccagctccacatcaccccagggacagcatatcagagctttgaacaggtagtgaatgaactcttccgcggatggggtaaacctggggtcgcatcgtggcccttttctccttcggcggggcactgtgcgttgaaagcgtacaacaggcagatgc

SEQ ID NO: 348222 - DNA, 1070 bp, Homo Sapiens
agcggggccgccctcgatccgggcgatggaggaggaagcaagcgagggggctggttcctgagcttcgcaattcctgtgtcgccttctgggctcccagcctgccgggtcgcatgatccctccggccggagctggtttttttgccagccaccgcgaggccggctgagttaccggcatccccgcagccacctcctctcccgacctgtgatacaaaagatcttccgggggctgcacctgcctgcctttgcctaaggcggatttgaatctctttctctcccttcagaatcttatcttggctttggatcttagaagagaatcactaaccagagacgagactcagtgagtgagcaggtgttttggacaatggactggttgagcccatccctattataaaaatgtctcagagcaaccgggagctggtggttgactttctctcctacaagctttcccagaaaggatacagctggagtcagtttagtgatgtggaagagaacaggactgaggccccagaagggactgaatcggagatggagacccccagtgccatcaatggcaacccatcctggcacctggcagacagccccgcggtgaatggagccactggccacagcagcagtttggattgcccgggaggtgatccccatggcagcagtaaagcaagcgctgagggaaggcaggcgaccagtttgaactgcggtaccgggggggcattccgtgaactgaccatccaactccccatcacccccagggacagcataatccaaagctttgaaccaggtagtgaatggaactcttcccgggatggggggaaaactgggggtccgcattgtggggccctttttcctccttcggggggggcaccggtgccggggaaaagcgttaaacaagggaaaagggccggtatttgggggagtccggattccccacccttggaggggcccactttcccctggaatggacacccttaaaacccctgggatctccaggaacaaagagccggcctgggggaaaaactattttgtgggcacttcctcatagggcaaaacaccaggcacctcacgcctagaaaaat

SEQ ID NO: 348223 - DNA, 986 bp, Homo Sapiens
  misc_feature (918)..(918): n is a, c, g, or t
  misc_feature (930)..(930): n is a, c, g, or t
ggagcgaggcctgggtggcgaattcggcacgagggggcgatggaggaggaagcaagcgagggggctggttcctgagcttcgcaattcctgtgtcgccttctgggctcccagcctgccgggtcgcatgatccctccggccggagctggtttttttgccagccaccgcgaggccggctgagttaccggcatccccgcagccacctcctctcccgacctgtgatacaaaagatcttccgggggctgcacctgcctgcctttgcctaaggcggatttgaataatcttatcttggctttggatcttagaagagaatcactaaccagagacgagactcagtgagtgagcaggtgttttggacaatggactggttgagcccatccctattataaaaatgtctcagagcaaccgggagctggtggttgactttctctcctacaagctttcccagaaaggatacagctggagtcagtttagtgatgtggaagagaacaggactgaggccccagaagggactgaatcggagatggagacccccagtgccatcaatggcaacccatcctggcacctggcagacagccccgcggtgaatggagccactggccacagcagcagtttggatgcccgggaggtgatccccatggcagcagtaaagcaagcgctgagggaggcaggcgacgagtttgaactgcggtaccggcgggcattcagtgacctgacatcccagctccacatcaccccagggacagcatatcagagctttgaacaggtagtgaatgaactcttccgggatgggggtaaactggggtcgcattgtgggcctttttctccttcggcggggcactgtgcgtgggaaagcgtagacaaggagatgccaggtattgggtgagtccgatcgccaactgggatggccacttacctgnaatgacacctanagctttggatccaagaagaccggcggctgggggaactttttgggggactcccatgc

SEQ ID NO: 348224 - DNA, 1503 bp, Homo Sapiens
aaagttcttccctttcccggggggaaggagggttttggaaaaacttttcaaagcttcccctggcaaggaaaaaccattttccagggaagggttaaaggggtaaagggtttgcaaccaatcaggttaggggccttccttgccccccagccacaaaacccttcccatacctgccagcctcctttgggacagattttgtggaaattttgtgaattctgaggccaagggaactgaggtgtgggggtctcacagaagtgtgataaattctagaaaactagctgcaagggaccagatctggccccaaccctgtgatgggcaggtgggcatgggctgcatgtagtggttctcctggtggcaatggcggctggacggaggatgtggtggagcagagaagggggtgcgagggtagagtggatggtcagtgtctggtcatttccgactgaagagtgagcccagcagaaccacgccggccacagtcatgcccgtcaggaaccagcggttgaagcgttcctggccctttcggctctcggctgctgcattgttcccatagagttccacaaaagtatcccagccgccgttctcctggatccaaggctctaggtggtcattcaggtaagtggccatccaagctgcgatccgactcaccaatacctgcatctccttgtctacgctttccacgcacagtgccccgccgaaggagaaaaaggccacaatgcgaccccagtttaccccatcccggaagagttcattcactacctgttcaaagctctgatatgctgtccctggggtgatgtggagctgggatgtcaggtcactgaatgcccgccggtaccgcagttcaaactcgtcgcctgcctccctcagcgcttgctttactgctgccatggggatcacctcccgggcatccaaactgctgctgtggccagtggctccattcaccgcggggctgtctgccaggtgccaggatgggttgccattgatggcactgggggtctccatctccgattcagtcccttctggggcctcagtcctgttctcttccacatcactaaactgactccagctgtatcctttctgggaaagcttgtaggagagaaagtcaaccaccagctcccggttgctctgagacatttttataatagggatgggctcaaccagtccattgtccaaaacacctgctcactcactgagtctcgtctctggttagtgattctcttctaagatccaaagccaagataagattctgcgagccccgcgagccgtggggggccacatcccccttcatcggcccggtagcttccagacgcaagagctcttcgcggccgagttccgcgccgcggacccgggccggcctacctggctgccggcctacctggctgactgctcgcgccgtctctcccgaacaagccggcctcagtttcccctgaagagacaggggaacttgcaagctcagtcacttccggtgcgggcaacgcgcgcgagcccgagacgcaaagggagtgcgcg

SEQ ID NO: 348225 - DNA, 444 bp, Homo Sapiens
  misc_feature (311)..(311): n is a, c, g, or t
tgaccagacactgaccatccactctaccctcccacccccttctctgctccaccacatcctccgtccagccgccattgccaccaggagaaccactacatgcagcccatgcccacctgcccatcacagggttgggcccagatctggtcccttgcagttagttttctagaatttatcacacttctgtgagacccccacacctcagttcccttgggcctcagaattcacaaaatttccacaaaatctgtccaaaggaggctgggcaggtatgggaagggtttgtgggctgggggcaggagggcctaacctgattnggtgcaacccttaaccccttaggcctccctgaaaaatgttttttcttgccagggggagctttgaaagtttttcagaaacctttttcccccaggaaagggaggattaggatttgccttttgttttttgaagttt

SEQ ID NO: 348226 - DNA, 844 bp, Homo Sapiens
gacagcttatgactgtgggaagaagcgggcagcagatgatgctgaggtggagattcaggtgaagcccacctgtaaacccagctggcaaggctggaacaaaaggatcgaatatgcaccaggtgctgggagcttggctttgttccctggtatccgcctggagacctgtgatgaaccactctggaacattcaggccaccatagagctgcagaccagccatgtggccaagggctgtgaccgtgacaactactcagagcgggcgctgcggaaactctgtggtgctgccactggggaggtggatctgttgcccatgcctggccccaatgccaactggacagcaggactctcggtgcactacagccaggacagcagcctgatctactggttcaatggcacccaggctgtgcaggtgcccctgggtggccccagtgggctgggctctgggccccaggacagcctcagtgaccacttcaccctgtccttctggatgaagcatggcgtaactcccaacaagggcaagaaggaagaggaaaccatcgtatgtaacactgtccagaatgaggacggcttctctcactactcgctgactgtccacggctgtaggattgccttcctctactggcccctgcttgagagtgcccgcccagtcaagttcctctggaagctggagcaggtctgtgatgatgagtggcaccactacgctctgaaactcgagttccccacagtcacactctataccgacggcatctccttcgaccctgccctcatccatgacaatggcctcatccacccaccccgaagggagcctgctctcatgattggggcctgctggactgaggagaagacc

SEQ ID NO: 348227 - DNA, 1827 bp, Homo Sapiens
cctgcagtagcggggttggggtgggagtgagagagtgaggacgctgggctgggggaaacgggaagccgctgcaagtccaccgcctcagctacccagattgggatctgcccaggcccgctttatggactagtgtgggcggcaggctcctttccgtccctgccctgctgtaccccgctccttggagaccccctgtatccctcccgcaaggtggaatccgcaggctggaggctcccaggggaggcaaacgcctggccctgccctgccccacgccgcaccatgaccctcctgctgctgccccttctgctggcctctctgctcgcgtcctgctcctgtaacaaagccaacaagcacaagccatggattgaggcagagtaccagggcatcgtcatggagaatgacaacacggtcctactgaatccaccactctttgccttggacaaggatgccccgctgcgctatgcaggtgagatctgcggcttccggctccatgggtctggggtgccctttgaggctgtgatccttgacaaggcgacaggagaggggctgatccgggccaaggagcctgtggactgcgaggcccagaaggaacacaccttcaccatccaggcctatgactgtggcgagggccccgacgggcaaacaccaagaagtcccacaaggccactgtgcatgtgcgggtcaacgatgtgaacgagtttgccccagtgtttgtggaacggctgtatcgtgcggctgtgacagaggggaagctgtacgatcgcatcctgcgggtggaagccattgacggtgactgctccccccagtacagccagatctgctactatgagattctcacacccaacacccctttcctcattgacaatgacgggaacattgagaacacagagaagctgcagtacagtggtgagaggctctataaagtttacagtgacagcttatggactgtgggggaagaagcgggcagcagatgatgctgaggtggagattcaggtgaagcccacctgtaaacccagctggcaaggctggaacaaaaggatcgaatatgcaccaggtgctgggagcttggctttgttccctggtatccgcctggagacctgtgatgaaccactctggaacattcaggccaccatagagctgcagaccagccatgtggccaagggctgtgaccgtgacaactactcagagcgggcgctgcggaaactctgtggtgctgccactggggaggtggatctgttgcccatgcctggccccaatgccaactggacagcaggactcttcggtgcactacagccaggacagcagcctgatctactggttcaatggcacccaggctgtgcaggtgcccctgggtggccccagtgggctgggctctgggccccaggacagcctcagtgaccacttcaccctgtccttctggatgaagcatggcgtaactcccaacaagggcaagaaggaagaggaaaccatcgtatgtaacactgtccagaatggtgagccttccctccaggcactagccagagggggaaactggcttcttgtcccgcctctgtcactgcccagtgtgtgactgtgaacaggtcacttcccctctcttcatttgtgaggtgcaagtgccaagtgtgatatgccttgattctgtgctttatccccaacatgacatgtgggatcgtactgctgtcagagtgcaatgggattccttgctgctactcttgttttcagttgcccagtcaacttctctgtgtcccaccatgtgggtaggctgtccccaccccccatctccacctccatttaaagcccctccatttgcaatgggggaaagccctgggg

SEQ ID NO: 348228 - DNA, 699 bp, Homo Sapiens
  misc_feature (119)..(119): n is a, c, g, or t
  misc_feature (251)..(251): n is a, c, g, or t
gtcagatcctagccagtctgcaatgctgtgagagcagcaaggtcaagctgcgcacagacagccaaagcgaggccgtggccatccaggcgatccggaacgccaaggggaattcaatctgngtggactgcggggcccccaaccccacgtgggccagcttgaacctgggcgccctcatctgcatcgagtgttctggcatccaccgcaacctgggcacacacctgtcccgcgttcgctcgctggacttggacgantggcctacgggagctgaccctggtgctgacggctattggcaacgacacggccaaccgcgtgtgggaaagcgacacgcgaggccgtgccaagccctcgcgggactcttcgcgggaggagcgcgagtcgtggattcgcgccaagtacgagcagctactgttcctggcgccgctgagcacctcggaggagccgctgggccgccagctgtgggccgccgtgcaggcccaggacgtggctaccgttctcctgcttttggcccatgcgcgacacgggccgctcgacaccagcgtagaggacccacagctgcgctccccactccacctggcggccgagctcgcccacgtcgtcatcacgcaactgctgctgtggtacggcgcggacgtggcggcccgtgacgcccagggccgcacggcgctgttctacgcccgccaggctggagccagaaggcgg

SEQ ID NO: 348229 - DNA, 915 bp, Homo Sapiens
ccgagtgtggaaacaatggagagggggcgtgttgagctggggtctccatgcctcgttggggagagggagctcacgtacccacagcagcagttgcgtgatgacgacgtgggcgagctcggccgccaggtggagtggggagcgcagctgtgggtcctctacgctggtgtcgagcggcccgtgtcgcgcatgggccaaaagcaggagaacggtagccacgtcctgggcctgcacggcggcccacagctggcggcccagcggctcctccgaggtgctcagcggcgccaggaacagtagctgctcgtacttggcgcgaatccacgactcgcgctcctccctgcaagaccagggatcaacggaaaaggctctagggacccccagccaggacttctgcccctacccacgggaccgtctcaggttcgcacaccctcagcaaccctccccccgctctgttccctcacgcttaccgcgaagagtcccgcgagggcttggcacggcctcgcgtgtcgctttcccacacgcggttggccgtgtcgttgccaatagccgtcagcaccagggtcagctcccgtggccagtcgtccaagtccagcgagcgaacgcgggacaggtgtgtgcccaggttgcggtggatgccagaacactcgatgcagatgagggcgcccaggttcaagctggcccacgtggggtctgcggaaggagcgtagaggtcggctcccagccggggcagcacaggcaccccggaattcactacactccctagcccctccgctgctcctggcactcactgggggccccgcagtccacggcagattgaattcccttggcgttccggatcgctggatggcacggcctcgctttggctgtctgtgcgcagtgcgagaaggtttgggtgggcctgactttggctccaagccc

SEQ ID NO: 348230 - DNA, 713 bp, Homo Sapiens
gagagaggcaccacatttttaactcagaaaggcaatgcaagtacaaagaggaattaagaggaaatgtgctttcactgaagtgcattgcagaaggactgctaccccaattatttactgggcaaaggaagatggaatgctacccaaaaacaggacagtttataagaactttgagaaaaccttgcagatcattcatgtttcagaagcagactctggaaattaccaatgtatagcaaaaaacgcattaggagccatccaccataccatttctgttagagttaaagcggctccatactggatcacagcccctcaaaatcttgtgctgtccccaggagaggatgggaccttgatctgcagagctaatggcaaccccaaacccagaattagctggttaacaaatggagtcccaatagaaagtaagttgccttgagtggttctaattgcagtatattttcagagcatatatacatcccgacagtgaataaatggtgataaaaaaataactcaggttaaggaaggaagccacatgtatgttaaacacaggcaccaaattacctttgcattttattaccattagatatttattatgaatgtgaatagtttatgctgttaacataatggcatgtgatgactggtacttggcaatatttcgtctgctttttacatggataatgggaagaatgacagggtcagaaataaatatcacatcaaagttt

SEQ ID NO: 348231 - DNA, 818 bp, Homo Sapiens
ggaggggtggtgctagacgtttcgggcagagctcggccgctgcggaggacaaggaactctccctctcccactagtctgacttcttccaaaatgagcggcctggatgggggcaacaagctccctctcgcccaaaccggcggcctggctgctcccgaccatgcctcaggagatccggaccgagaccagtgccaagggctccgtgaagaaaccgaggcgacacaggtgatggcgaacacaggtgggggcagcctggagaccgttgcggaggggggtgcatcccaggatcctgtcgactgtggccccgcgctccgcgtcccagttgccgggagtcgcggcggtgcagcgaccaaagccgggcaggaggatgctccaccttctacgaaaggtctggaagcagcctctgccgccgaggctgctgacagcagccagaaaaatggctgtcagcttggagagccccgtggccctgctgggcagaaggctctagaagcctgtggcgcagggggcttggggtctcagatgataccggggaagaaggccaaggaagtgacgactaaaaaacgcgccatctcggcagcagtggaaaaggagggagaagcaggggcggcgatggaggaaaagaaggtagtgcagaaggaaaaaaaggtggcaggaggggtgaaagaggagacacggcccagggccccgaagatcaataactgcatggactcactggaggccatcgatcaagagttgtcaaacgtaaatgcccagtgacggccttcttcacttgaccagttggccctgcgagtccagcaccaagtctacaacagtcgtcgagg

SEQ ID NO: 348232 - DNA, 818 bp, Homo Sapiens
gcccgagcggtgcgcacttcaccggggtgcagccccaccgagaagagccctggctcactggccttgaatagccggtaggagagccaagcattctggcctgagtctctgtccacggccaccacctggtgcaccaggtacccaggctctgcagagcggggtgccagctccacaccagtagaaccatcagtggggaggccagggtacaggatttctggggcattgtcactctggtccaaaacaaacagtctcaatgacacattgccgctaagtggtgggcttccactgtcacttgccgtcacctgcatttgcaaatctctaaactgctcatagtcaaaggagcacagagcatacagcacaccagtgtctgagttaatagagacataggtggagagaggagacccttggatggtatcctcggccaaggagtaaataactctagaattctcattgctatcagggtcataggcaatcacggagaagatggaagtacctctggcgttgttttccgggaggtagactgagtaggaggcttgagagaaagcaggtggattatcattgatgtcagtcacttgcagggtgatgtgaatttctgtggacaggggcggagttcctctgtctgttgcagtcaccgtgatattatattctgaggctttttctcggtcaagaatttgggccgtcaacaatctgtaataatcttcttctgaattttctaatgtaaaagatagattctcctggatagaacagacaacttgaccattcttcccggagtctcggtcatgagcattgaaaagaagaattactgttccctgaggtgcgtc

SEQ ID NO: 348233 - DNA, 743 bp, Homo Sapiens
gcggcaaggggctatttgatgatgaggacgaggagagtgacctcttcatggaagccccccaggatcggcaagctggagcctctgttaaggaggagtcttcatcatccaaacctggaaagaaaatcccagcaggagctgtttctgtatttttaggagacacggatgtgtttggtgctgcctccgttccatcactgaaggagccacagaagcctgagcagcccactccaaggaaaagcccctatggtccccctcccactggcctcttctttttctcggcaccccacagcaaaccttctaaaacacgcaaagtccaatccactgccgatatctttggtgacgaagaaggagatctgttcaaagaaaaagccgtagcatcgccagaagccactgtgagtcagacagatgaaaataaagcaagagcagaaaaaaaggttaccttatcttacagcaaaaatctcaagccctcatcagaaacaaaagactcaaaaaggcttattttcagatgaggaggactctgaggatttgttttcttctcaaagtgcgagtaacttaaaaggtgcatctctgctgcctggcaagctccccacgtcggtttcccggtttgatgatgaagatgaagaggataatcttttggggggtacagctgctaagaagcagacattgtctctacaagctcagagagaagagaaagcaaaagcctccgagctctccaaaaagaaagcatctgccctgttgttcagcag

SEQ ID NO: 348234 - DNA, 1476 bp, Homo Sapiens
  misc_feature (1245)..(1245): n is a, c, g, or t
cccacgcgtccgaaattagcagagcgattggtggagaatgatatctgtcaaaagaaacacttggagagcactgagtttagtaataggtgactgccggaaaaaagggaactttgaatattgtcaagatcgtactgagaagcactccacaatgccagactcacctgtggatgtgaagacgcaatctaggctgactcctccaacaatgccacctcccccaactactcaaggagctccaagaaccagttcatttacaccgacaacgttaactaatggcacgagccattctcctacagccttgaatggcgccccctcaccacccaatggcttcagcaatgggccttcctcttcttcctcctcctctctggctaatcaacagctgcccccagcctgtggtgccaggcaactcagcaagctgaaaaggttccttactaccctgcagcagtttggcaatgacatttcacccgagataggagaaagagttcgcaccctcgttctgggactagtgaactccactttgacaattgaagaatttcattccaaactgcaagaagctactaacttcccactgagaccttttgtcatcccatttttgaaggccaacttgcccctgctgcagcgtgagctcctccactgcgcaagactggccaaacagaaccctgcccagtacctcgcccagcatgaacagctgcttctggatgccagcaccacctcacctgttgactcctcagagctgcttctcgatgtgaacgaaaacgggaagaggcgaactccagacagaaccaaagaaaatggctttgacagagagcctttgcactcagaacatccaagcaagcgaccatgcactattagcccaggccagcggtacagtccaaataacggcttatcctaccagcccaatggcctgcctcaccctaccccacctccacctcagcattaccgtttggatgatatggccattgcccaccactacagggactcctatcgacaccccagccacagggacctcagggacagaaacagacctatggggttgcatggcacacgtcaagaagaaatgattgatcacagactaacagacagagaatgggcagaagagtggaaacatcttgaccatctgttaaactgcataatggacatggtagaaaaaacaaggcgatctctcaccgtactaaggcggtgtcaagaagcagaacgggaagaatgaattactggatccggccgtacagtgacgccgaggaacttaanaaaagtggcggcagtagcagcagccactctaggcagcagagtcccgtccacccagacccagttgcactagacgcgcatccgggattccttcacaagcctgccgtctggataactgcccccaaggagattctggaagaaagcctgaagaagcccgtcaatggaggggaaaccgccacgcccatgaacggaacctgccacaaaggccgtgttcttgaaggcggaacgggaaac

SEQ ID NO: 348235 - DNA, 2016 bp, Homo Sapiens
  misc_feature (154)..(154): n is a, c, g, or t
  misc_feature (259)..(259): n is a, c, g, or t
  misc_feature (314)..(314): n is a, c, g, or t
ggaaatggcattcatatgatgaaatctttacagaaaacaacgctttctgagaaaggcaaagattctagtctcaacaaacttgttcaaattgttcaacaaacaatttgcttttaaataagaatatagtattatagtataagccattttgggaganaacactaacacattatacctttaaccttaaatgtacaacttagaaaagaacgaaaagaatataattgtaatctgggtttccacacaaacagatctaatttctggnttgtaggtactcacaaagcagaatatttcatttcaccttaataataacaacaggnaagactaatatccagaaagttcagaattggggctcatttcagacaaacctttctaggcttctggatacttacttgaaccttatgtgtctgatacagttttaaaaatagatgaaatttcacacaggatctgatcagttatatttctggtgtctcccaaacaaagttctaggaaccagacagaaaggtaaatcctccctggcaaataattaaatcagaggcttccttgagtgctcattttgaaagtgaccttcaaaggggagtgcaaatgaaactttcacatttatcaatctgctaagcccactgttagtataaacttattgagaatccactatgcccaagcaatatgcttacccaagtaaaagggatcttagtaatctgcttttctaccaaaactaccagttattttagtatccatcagtgaattaactacccgctatgctgaataaaaatgttccttctttctcttgtgaactttgtgtttgtttgttttccagttgctttactgaagcggcagcagttggaggagacagaaagctcacagcagagacttaaaaaccatttcgaatcccacacctcaatcagtcctcagccaggcacaccttggacatgtcacttactcccaacttcttcactggcacaaaaggatgacggtctgatcttcccgttaagttgttacaaagataaaattaggaggataaaaaaatcctgaacaactacaaagctcaaccaatcttctgttcactctaaagacaagcaaaatgtaaaataacatatctcatatgaccaaaaaaatgaacaaaacctttattcaaagagacttctaaactcttcttcaaactttacttcttttcaggtaattatttaaaacactccttgtaattttcagactacttaggaaatggtcataaatacaatcgattcagatagttttcatccattaaattaaatcaaagagcccctaaatgtactaaaaaagcacacagttatgacctagcaacaatatggtttaaaatactttacagaccagtgaactgtgcaataccttcaaaaatgggatgacaaaaggtctcagtgggaagttagtagcttcttgcagtttggaatgaaattcttcaattgtcaaagtggagttcactagtcccagaacgagggtgcgaactctttctcctatctcgggtgaaatgtcattgccaaactgctgcagggtagtaaggaaccttttcagcttgctgagttgcctggcaccacagagctgggggcagctgttgattagccagagaggaagaggaagaagaggaaggcccattgctgaagccattgggtggtgagggggcgccattcaaggctgtaggagaatggctcgtgccattagttaacgttgtcggtgtaaatgaactggttcttggagctccttgagtagttgggggaggtggcattgttggaggagtcagcctagattgcgtcttcacatccacaggtgagtctggcattgtggagtgcttctcagtacgatctcggtgagtcctgtctggatagcagaggtgatgggagatagcgtcaaggccaggggtagatgcctcctcctcaccccacacaacaaaaggcagatttctctttctcactctgctaatctttaaatgtaaattctctccgccagctaagaggagcgacagataacatgttacatcttcacttctcctgg

SEQ ID NO: 348236 - DNA, 569 bp, Homo Sapiens
  misc_feature (21)..(21): n is a, c, g, or t
aggagacaatataaagcaaanatatgagaatcttcatccctatcacagatttcaagcctcaagttaagttcagaaataatggtgcaagtcttcaagcacccaatcccgtaagaagtgaacaggtccttcagtcttacccataggtctgtttctgtccctgaggtccctgtggctggggtgtcgataggagtccctgtagtggtgggcaatggccatatcatccaaacggtaatgctgaggtggaggtggggtagggtgaggcaggccattgggctggtaggataagccgttatttggactgtaccgctggcctggggctaatagtgcatgggtcgcttgcttggatgttctgagtgcaaaggctctctgtcaaagccattttctttggttctaaagggggaaaaaacaagagtttgtttccatcatctattcagaaaccagcacagttcagtcactcatatttgagcttggaataaaaacagaatattttttattggccagaaaccttctaaactcagcttcccagaaaacatacgggaattcactgagacctgtgtcgagacctaaac

SEQ ID NO: 348237 - DNA, 1447 bp, Homo Sapiens
  misc_feature (902)..(902): n is a, c, g, or t
  misc_feature (1090)..(1171): n is a, c, g, or t
gatgacggacatcccccgctacatcatccgccagctgggcctcacccgtgacccctttccagacagtggtgcatctggaggaacaggacagtggtggttccaacacccctgagcaagacgatctctctgagggccgcagcagcaaggccaagaaaccgccgggggagaatgacttcgataccatcaagctcataagcaacggtgcctacggcgctgtctacctggtgcggcaccgcgacacgcggcaggctttgccatgaaaaagatcaacaagcagaacttgatcctccgcaaccagatccagcaggcctttgtggagcgcgatatcctcaccttcgccgagaacccgtttgtggtcggcatgttctgctcctttgagactcggcgccacctctgcatggtcatggaatatgtggaaggcggcgactgtgccaccctgctgaagaatattggagcgctgcccgtagagatggcccgcatgtactttgctgagacggtgctagccctggagtatttgcacaactatggcatcgtgcaccgcgacctcaagcctgacaacctccttatcacctccatgggtcacatcaagctcacagatttcggcctctccaagatggggctcatgagcctcaccaccaacttatatgaaggccacatcgagaaggacgcccgagagttcctggacaaacaggtgtgtgtgcgggcatgggggtcgctgagggtggagtgaccctgcaggacctcgggaacccagggcctggtggggggcacagctctcccttgagggccctcctctggctggggcgtgggctgacagcctgcccccaggtgtgtgggaccccagagtacatcgcgcccgaggtcatcctgcgtcaaggctacggcaagccagtggactggtngggctatggggatcatcctctacgagttcctggtgggctgtgtgcccttcttcggagacacaccagaggagctatttggacaggtcatcagtggtacgtggcttggcagtgtacagggcgtagagtgtggtgtgcacggagagatggacaggctcagggttccagggatttcaaaagcgaccccccannnnnnnnnnnnnnnnnnnnnnnnnnnnnnnnnnnnnnnnnnnnnnnnnnnnnnnnnnnnnnnnnnnnnnnnnnnnnnnnnntcctgtgtccaaacaacaacaacaacaaaaagcgcccctaagttccgtttggttttgcagatgacatcctgtggcccgagggggatgaggccctacctacggaggcccaactcctcatatccagcctcctgcagaccaaccctctggtcaggcttggggcaggtaagtccgccatgcagaggagctgagggcccactgatagagagcaggcctccaaaaacccaggcccagcctgtgctgtggccccgggcggaagacatggggggcggggctggg

SEQ ID NO: 348238 - DNA, 1280 bp, Homo Sapiens
tggtcggccgacgtatgggatatgtcgaccaggcgtcgagctggtgcgggaccgcgacacgcggcagcgcttgccgtgaaaaagatcaacaagcagaagcttgatcctccgcaaccagatccagcaggcctttgtggagcgcgatatcctcaccttcgccgagaacccgtttgtggtcggcatgttctgctcctttgagactcggcgccacctctgcatggtcatggaatatgtggaaggcggcgactgtgccaccctgctgaagaatattggagcgctgcccgtagagatggcccgcatgtactttgctgagacggtgctagccctggagtatttgcacaactatggcatcgtgcaccgcgacctcaagcctgacaacctccttatcacctccatgggtcacatcaagctcacagatttcggcctctccaagatggggctcatgagcctcaccaccaacttatatgaaggccacatcgagaaggacgcccgagagttcctggacaaacaggtgtgtgggaccccagagtacatcgcgcccgaggtcatcctgcgtcaaggctacggcaagccagtggactggtgggctatggggatcatcctctacgagttcctggtgggctgtgtgcccttcttcggagacacaccagaggagctatttggacaggtcatcagtgatgacatcctgtggcccgagggggatgaggccctacctacggaggcccaactcctcatatccagcctcctgcagaccaaccctctggtcaggcttggggcaggcggcgcttttgaggtgaagcagcacagtttctttcgagacctggactggacagggctgctgaggcagaaggccgagttcatcccccacctagagtcggaagatgacactagctactttgacacccgctcagacaggtatcaccacgtgaactcctatgacgaggatgacacgacggaggaggagcccgtggaaatccgccagttctcttcctgctctccgcgcttcagcaaggtgtatagcagcatggagcagctgtcgcagcacgagcccaagaccccaagtagcagctgcagggagcagcaagcgggagccgagcaccaagggccccgaggagaaggtggccggcaagcgggaggggctgggcggctgacctgcgtgagaagactggagaggggggtctccggagatcaaagcgatctccgcgtccgagccgttcctggaggggaggccgtccccttttggcgcccgcgcgttctccgggctggttgggcccgcgtta

SEQ ID NO: 348239 - DNA, 635 bp, Homo Sapiens
  misc_feature (603)..(603): n is a, c, g, or t
  misc_feature (606)..(606): n is a, c, g, or t
  misc_feature (618)..(618): n is a, c, g, or t
  misc_feature (622)..(622): n is a, c, g, or t
  misc_feature (624)..(624): n is a, c, g, or t
ctttttttggtccttgctacgaaaaggaatgcgattctgtggtcattcgcactgggttgcattgattccccctctgatggccaatgtggagtggacaaagtgtccggaactcacatcggtgatcgtcccctcgtcttaagacccagcccgctctgtgtgagcctctggggctccctcgctcagtgagcacagttccccgggggttcatgccagagctccggctgaagcaagaagtcctccagctgcgtcgtttgccgcctgtggacgagtgcgccccagtttctgccctggcagctcctggccacaccttctcagagctcacctgtgcacttctaaattgaattggcccacggtgtccaaccaagaaggagcatctgcactccgagaaagatgtgttctgtaactgccccagtgtgaccccgcagtggctctcggtgctagatatgcatgactaagattgatgctgggcaaaatgtagatgatctttcattatgttgtgggcagcgtctttctctgcctttgctatatgcagtcagcagtaagccttttgctaaaagagttttgtttgacttctgagatccaaggctgattgttgttaaaaantanaaaaaaataatntctngnatgggggtcct

SEQ ID NO: 348240 - DNA, 1171 bp, Homo Sapiens
  misc_feature (1034)..(1034): n is a, c, g, or t
ccaataaacagaagaaaaaagcgcggcgagggggccaggagggggctgggcggctggtaccggtccggaattcccgggatcttcccgcgtcgcgacgcacgctgccccggaaggccgcggcgctgtagtgcggcgtgggagccccaggttctttagtggaagaacgcgaagcgaggatgagtgatccgtggaggcagtaacaggcgcggcgagggagaagtgattcccgaagaatcaaggctgggccggacccggtggcctggcaacagggtaataagagaaatgaagccaacaggtacagacccaaggatcttatctatagctgctgaagttgcaaaaagccctgagcagaatgtccctgttatactgttgaagttaaaagaaataataaacatcacacctttaggaagctcagagttgaagaaaatcaaacaagatatatattgttatgatctcattcaatattgcctcttggtcctcagtcaagattattctcgaatccagggtggttggactacaatttcccagcttacacagatattaagccattgctgtgtgggcttggagccaggagaagatgcagaggaattttacaatgaattacttccatcagctgcagaaaattttctagttttggggagacaattacaaacatgttttatcaatgcagctaaggctgaagaaaaagatgaattactacactttttccaaattgtgactgattctctcttctggcttttgggaggccatgttgaacttattcagaatgtactacaaagtgatcatttcttacatttactgcaagctgacaatgtccaaataggatctgcagtcatgactgatgctaccagaatatactacagatcaaaagtggtgatttactcagaataggaagaaaagccctgtattcaattttagatgaagttattttcaagcttttttcaactcctagtccaggtataagaagtactgctacaaaactcctactggtgatggctgaatcccatcagggaaattttgattttactgagacnaagtacctgctaccaaagactcagacgtctactaagtaaacaggaaactgggactgaaatctcgtcaagaacttaaacagcttggtggcctttttaagccaatggggctatccggaagtagaagagcgggaacctcc

SEQ ID NO: 348241 - DNA, 717 bp, Homo Sapiens
ggctcggtccctcttgatgcaagtgtcaagtctgtatcataagcttctctggtcaacataatgaaatgaaagtaactcagctccttgactggtatcaatcttagcagggattaggagacaagaagaaagctggtttctccaacaatcttcctcagattccctagaatcccccctttttgcacagcttctctggagctatgaagttcaaagcattgaatccaaactcgaagtccccattcaacccactcagccttgactgggctgattggatcattgccattttgatgtagaatctttgctctcattttcatgttcaattttctatagtttccaagctaggaagcatttctgtctgtatagagttgtttgcagggatgaaatcaggtattttattttcctggtagacatagtttgaagggacctctgatgtttgagacctctagattcctagcattttgatggcagaaactgtggttttcttatctctgaacttccagtgcactgcaaagttctgggcatatattggtgcttaataaaccctgttaaatgaataaacaaatgattttttctttattacacccccatttcagtagcatggaattatgaggatgattttgccaaattatgagtaggtcctattagattaggtttttctacaggaaatattcttttaaactacagtgtctagacacttgcataaagagggaccgagctcga

SEQ ID NO: 348242 - DNA, 858 bp, Homo Sapiens
ggtaacttactctttcgcggaggacactgttcagggggcacccttatcctcttacatctctatcaactccgacactggagtactctatgcactgcgctcctttgattatgagcagttgcgagacttgcaagtgtgggtgatagcgcgggacagcggggacccgcctctcagcagcaacatgtcactgagcctgttcgtgctggaccagaatgacaacgcgcccgagatcctgtacccggccctccccacagacggttccactggcgtggagctggcaccccgctccgcagagcccggctacctggtgaccaaggtggtggcggtggacagagactcaggccagaacgcctggctgtcctaccgcctgctcaaggccagcgagccgggactcttctcggtggggctgcacacgggcgaggtgcgcacggcgcgagccctgctggacagagacgcgctcaagcagagcctcgtggtggccgtccaggaccacggccagccccctctctccgccaccgtcacactcaccgtggccgtggccgacaggatccccgaaatcctggccgacctgggcagcctcgagccctccgccaaacccaacgattcggacctcactctgtacctggtggtggcggatgggccgcgggtctccttgcgtcttccttggccttcgacatcgtgctgctgggcgctccaggctgcggcgctggcaccaagtcacgccctggtgcagggctaccgcgaggcggttggggaagtacgcccgggtcgaactttgtgggcgttgacggggttcgggcttccctgagacttttccagagggttcccccactggggccccgagaaccctcatttccccac

SEQ ID NO: 348243 - DNA, 2484 bp, Homo Sapiens
  misc_feature (655)..(655): n is a, c, g, or t
  misc_feature (664)..(664): n is a, c, g, or t
  misc_feature (672)..(672): n is a, c, g, or t
  misc_feature (682)..(682): n is a, c, g, or t
  misc_feature (686)..(686): n is a, c, g, or t
  misc_feature (699)..(699): n is a, c, g, or t
  misc_feature (717)..(718): n is a, c, g, or t
  misc_feature (724)..(724): n is a, c, g, or t
  misc_feature (731)..(731): n is a, c, g, or t
  misc_feature (737)..(737): n is a, c, g, or t
  misc_feature (747)..(748): n is a, c, g, or t
  misc_feature (754)..(754): n is a, c, g, or t
  misc_feature (764)..(764): n is a, c, g, or t
  misc_feature (783)..(783): n is a, c, g, or t
  misc_feature (789)..(789): n is a, c, g, or t
  misc_feature (807)..(807): n is a, c, g, or t
  misc_feature (811)..(811): n is a, c, g, or t
  misc_feature (815)..(815): n is a, c, g, or t
  misc_feature (818)..(819): n is a, c, g, or t
  misc_feature (822)..(822): n is a, c, g, or t
  misc_feature (825)..(825): n is a, c, g, or t
  misc_feature (827)..(827): n is a, c, g, or t
  misc_feature (833)..(834): n is a, c, g, or t
  misc_feature (844)..(844): n is a, c, g, or t
  misc_feature (847)..(848): n is a, c, g, or t
  misc_feature (860)..(860): n is a, c, g, or t
  misc_feature (879)..(879): n is a, c, g, or t
  misc_feature (882)..(883): n is a, c, g, or t
  misc_feature (890)..(890): n is a, c, g, or t
  misc_feature (896)..(896): n is a, c, g, or t
ccaaattttactgctcagttcgcttactggtgatctacttctaaatgagaaattggaccgagaggaactgtgtggccccagagagccctgtgtgctgcctttccagttgttattggaaaaaccttttcagattttccgtgctgaactatgggtcagagacatcaatgatcacgctccagtatttctagacagagagatttccttgaaaatattagaaagtaccactccaggggcggcatttctcctagagagtgcacaggattcagatgttggaaccaacagcctgagtaactacaccatcagccccaatgcctatttccatattaatgcccatgatagcggggaggggaatatctatcccgaattggtgctgaatcaagtgctggatcgggaagagataccagagttcagtttaaccctcaccgctttagacggcggctctcctccaagatcagggaccgccctcgtgcgcattctggttctagacgtaaatgacaacgcccctgattttgtgcggtcgctctacaaggtgcaggtgcccgaaaatagccccgttggttccatggttgtctccgtgtcagccagagatttagataccggaagtaatggggaaatagcctatgcattttcttacgccactgaaagaattctcaanacgtttcanatcaatcnaacatctggnagtnttcatcttaaagngcaattgggctatgaggnnattcanacttacncattanctattcaggnnaaaganggcggcgggntttctgggaaatgcactgnagtggntgatgtaacagatataancggnaatnggnncgngcngntcctgnnttcacttacnagnncaattgcagagnactcacccgggacagtcgnggnngtttttngggttngggacagggattccggggacaatggaaagacagtgtgctccatccaggacgatctccccttcatcctgaagccatctgtcgaaaacttctatactctgggaacagagaaacctttggatcgagagaggaacactgagtacaacatcaccatcaccgtcaccgacttggggactccaaggctgaaaaccgagcagaaataaccgtgctggtgtcggacgtcaatgacaacgcccccgccttcacccaaacctcctacaccctgttcgtccgcgagaacaacagccccgccctgcacatcggcagtgtcagcgccacagacagagactcgggcaccaacgcccaggtcacctactcgctgctgccgccccaggacccgcacctgcccctcgcctccctggtctccatcaacgcggacaacggccacctgttcgccctcaggtcgctggactacgaggccctgcaggctttcgagttccgcgtgggcgccacagaccgcggctcccccgcgctgagcagcgaggcgctggtgcgcgtgctggtgctggacgccaacgacaactcgcccttcgtgctgtacccgctgcagaacagctccgcgccctgcaccgagctggtgccccgggcggccgagccgggctaactggtgaccaaaggtggtggcggtggacggcgactcgggccagaacgcctggctgtcgtaccagctgctcaaggccacggagcccgggctgttcggtgtgtgggcgcacaatggggaggtgcgcaccgccaggctgctgagcgagcgcgacgcagccaagcacaggctggtggtgcttgtcaaggacaatggcgagcctcctcgctcggccaccgccacgctgcacgtgctcctggtggacggcttctcccagccctacctgcctctcccggaggcggccccggcccaggcccaggccgacttgctcaccgtctacctggtggtggcgttggcctcggtgtcttcgctcttcctcctctcggtgctcctgttcgtggcggtgcggctgtgcaggaggagcagggcggcctcggtgggtcgctgctcggtgcccgagggtccctttccagggcatctggtggacgtgagcggcaccgggaccctatcccagagctaccactacgaggtgtgtttgaccggagactcaggggccggcgagttcaagttcctgaagccgattattcctaaccttttgccccagggcgctggtgaagaaatagggaaaactgctgccttccggaatagctttggattaaattagagatctcgtgatgacgcgttgttttctgccatttatcccaaactttttcagatctagaattcgagagtgtcatggacaaaaatttcaccttgagattgagcttttatttccctttttaatggatttgtctgttgaacttcatgctgtccaagtgttgaaaagtcaattttatttcattgcatttatttacatagtgtcattccaaatccatgcatgctgttgattttcctgagatttttttctcttcttgttggtatttgttgtgataaaccaccttaataaaatcaagtattaattttattttctat

SEQ ID NO: 348244 - DNA, 827 bp, Homo Sapiens
  misc_feature (12)..(12): n is a, c, g, or t
  misc_feature (115)..(115): n is a, c, g, or t
gtttcatccttnatcagaaaccccaaattattctgaaatgggcgattttctttccacttccctgcctgtgctctggggtagcaggttggggataattggtttcagaaacttgacntcatttgtccgagaccctccagtcaggcacacctcatactggtagctctgggatagggtcccggtgccgctcaagtccaccagatgtcgtgggaaggggccctcaggcaccgagcagcgacccaccggggccgccctgctcctcctgcacagccgcaccgccacgaacaggagcaccgagaggaggaagagcgaagacaccgaggccaacgccaccaacaggtagacggtgagcgagttggcctggtccggggccgcctccgggagccgcaggtagggctgggagaagccgtccaccaggagcacgtgcagcgtggcggtggccgagcgcggaggctcgccattgtccttgaccagcaccaccagcctctgcttggctgcgtcgcgctcgctcagcagcctggcggtacgcacctcgccattgtgcgcccacacgccgaatagcccgggctccgtggccttgagcagctggtacgacagccaggcgttctggcccgagtcgccgtccacggccaccaccttggtcaccaggtagcccggctcggccgcccggggcaacggctcggtgcagggcgcggagctgttctgcagcgggtacagcacgaagggcgagttgtcgttggcgtccagcaccagcacgcgcaccagcgcctcgctgctcagcgcgggggagccgcgggctgtggcgcccaccggaaccgaacgctgcaggg

SEQ ID NO: 348245 - DNA, 1753 bp, Homo Sapiens
  misc_feature (141)..(141): n is a, c, g, or t
tttatgaaaaccaaggagggccaagggcagttcgggttcttggggcggcaacaccaagtagttgacctgggcgttggtgccaagtctcctgtctgtggcgctgaccctgcccaatgtccagggcggggctggttgttctcncgaccgaacaggtgtaagaaggtttgggtaaagtcggggccgttgtcattaacgtcgaagaccagcacggttatggtgtgctcggttttcagactgggtgtccccaagtcagtgacggtgatagtgatgttgtactcggctctgatctctctgtccagcgcgccttctgtaattaggatgtaaaaattctccacagaaggttttagtaggaatggcagattctcttgaatgtagcaaaccatctttccattttctccagagtctctgtcattaatcttaaaaacagccagcggcgtctcaggagaattctcagcaacagagttggaaaatgatgatacgatcagttcagggggattgtcattggtgtccaatacttccactaaaaccctacatcttgcagaaaggcctccaccgtccattgcctgtatatttattttgtaagaatttactaactcataatcaagcaattctctgagaaagatttccccagaaaaaggattgatttgaaaggttgttcgaatattttctgaggcatcaaaaaatgaataggatacttccgcgttgactccagagtctacatcttctgcccataccttaacaataaggaacccaatggggctgttttctggagcctaggtctcatacagagcctgggcaaactgtggggcattgtcattgacgtccaagacaacgatgcgtacagtagaggtcccagacctggatggagacccaccatccagcgctgtgagggttaagctgagctctccctgctcctcccaatccagtgctttgtccaacactagctctggatatatcatgccttcatcaccgcccactaatattaatatggaaaaaagagttggggctgatcgtgtagttttggataccgttaagtcctcccattctggatcctgtgctcttttctagtctaaatgctgtcccttcagctgtattttctgatatttttaagactgtttctttgtcctgaaatactggcgcgtgatcatttatatccctgactctcagctcagcccggtaaatctgaaagggatcatccattaaaatttggaaatacagcatacagggctctttagggccacacagcttctctcggtccagtttctcatttgtgagcaaattcccggtatgtgaatccaggagcaggtattgtttgttatcatcggaaaccaccctggttccccttgcagccagctccccctctgctagtcccagatcctttgccagattgaccacaaaggatcctttctctgtttcctcagtcaccgaataacgtccaaacccagaacctgccaaggacactccccaaaaaagaaaaagaaacaggacttgcctttgtcttgggaagcacaactctctgacagccatagctgctgcatacgttatttcctagttggttacagccacagctcccagcataaaagaacagcagtaggaaaccctgcacctacgccgtgtagcccaggggtcttttttgtcctttccctttcccaatctttggcagcctaaagcttctcttttaagttcatctgtccgtgtcttccggacgcgtgggtcgacgatatcccgtaactccgggcggtaccagcgctgg

SEQ ID NO: 348246 - DNA, 960 bp, Homo Sapiens
  misc_feature (83)..(84): n is a, c, g, or t
  misc_feature (97)..(97): n is a, c, g, or t
  misc_feature (280)..(280): n is a, c, g, or t
  misc_feature (283)..(283): n is a, c, g, or t
  misc_feature (296)..(296): n is a, c, g, or t
  misc_feature (317)..(317): n is a, c, g, or t
  misc_feature (320)..(320): n is a, c, g, or t
  misc_feature (335)..(335): n is a, c, g, or t
  misc_feature (375)..(375): n is a, c, g, or t
  misc_feature (377)..(377): n is a, c, g, or t
  misc_feature (379)..(379): n is a, c, g, or t
  misc_feature (420)..(421): n is a, c, g, or t
  misc_feature (446)..(446): n is a, c, g, or t
  misc_feature (449)..(450): n is a, c, g, or t
  misc_feature (461)..(461): n is a, c, g, or t
  misc_feature (464)..(464): n is a, c, g, or t
  misc_feature (466)..(467): n is a, c, g, or t
  misc_feature (486)..(487): n is a, c, g, or t
  misc_feature (493)..(493): n is a, c, g, or t
  misc_feature (497)..(498): n is a, c, g, or t
  misc_feature (501)..(502): n is a, c, g, or t
  misc_feature (504)..(504): n is a, c, g, or t
  misc_feature (506)..(506): n is a, c, g, or t
  misc_feature (515)..(516): n is a, c, g, or t
  misc_feature (520)..(520): n is a, c, g, or t
gtggcggtgcggctgtgcaggaggagcagggcggcctcggtgggtcgctgctcgtgcccgagggtccttttccagggcatttnntggacgtgagggncgctgagaccctgtcccagagctaccagtatgaggtgtgtctgacgggaggccccgggaccagtgagttcaagttcttgaaaccagttatttcggatattcaggcacagggccctgggaggaagggtgaagaaaattccaccttccgaaatagctttggaggtaatattcagtaaagtctgtngtnagtgtcatatacnggtggtgtgttacatagccangtntctattagtttactnttaaatctcaaatttaagttattatgcaacctcaagcatnantntcaagtagtatacccctggggttttacaatgtttcatcatnntttggcattaataacaactgggccnaanntaatgagtatnccntnnctaaatgatagtgctaagnncctaantccnnccnncngnccaaggaannaatnactattatatctcattacagaaatctgaggttttgatccatttcagagcctgcaccccatgagtctaatcacttctgtctatagtgtacttgctctatttaagaaggcatatctacatttccaaactcattctaacattctatatattcgtgtttgaaaaccatgtcatttatttctacatcatgtatttaaaaagaaatatttctctactactataggctcatgacaaaatgaaacaaagcatattgtgagcaatactgaacatcaataatacccttagtttatatacttattattttatctttaagcatgctacttttacttggccaatattttcttatgttaacttttgctgatgtataaaacagactatgccttataattgaaataaaattataatctgcctgaaaatgaataaaaataaaacattttgaaattta

SEQ ID NO: 348247 - DNA, 972 bp, Homo Sapiens
  misc_feature (745)..(783): n is a, c, g, or t
  misc_feature (812)..(812): n is a, c, g, or t
  misc_feature (820)..(821): n is a, c, g, or t
  misc_feature (892)..(892): n is a, c, g, or t
cgcgctcggccaccgccacgctgcaagtgctcctggtggacggcttctctcagccctacctgccgctcccagaggcggccccggcccaagcccaggccgactcgcttaccgtctacctggtggtggcattggcctcggtgtcttcgctcttcctcttctcggtgttcctgttcgtggcagtgcggctgtgcaggaggagcagggcggcctcagtgggtcgctgctcggtgcccgagggcccctttccagggcatctggtggacgtgagcggcaccgggaccctttcccagagctaccagtacgaggtgtgtctgacgggaggctctgaaagtaatgatttcaagttcttgaagcctatattcccaaatattgtaagccaggactctaggaggaaatcagaatttctagaataatgtaggtatctgtagctttccgaccgtctgttaattttgtcttcctcacttttcaccttagttttttttaaccctttagtaatcttgaattctacttttttttaaatttctactgttgtctttagtaatgttactcatttcctttgtctgattgttagttttcaaattattgtattattataaatattttatatcaggaaagttcatatttctgaataaattaatagtattcattcctgaagggtgatatgaaagttaaccccacctaataaacataactctaattctgaaattacctttcacactatatgacactacataagaatgtatgnnnnnnnnnnnnnnnnnnnnnnnnnnnnnnnnnnnnnnncttattcacacagcttgactttttgacanaagtttgnngtgtaatcatttcatatttatccatgtgtatttcttccaagctcatattttgagttttggtttttcaatanggagcacatggataagttaagctactcttttcaggtcacacttgtgcattagattttcattctcacatatgtcatctcat

SEQ ID NO: 348248 - DNA, 1007 bp, Homo Sapiens
atgctttgatggtgtctagatttaagttacatatataatgacattagctcttaatactttagtttgcatatccaaataattgagaatatggtcttgcataataccattatcacagcaaaaatagcaataactccattaatataacattttggccaaataaatgaaaaaccagaaaacacagattacatttccacgtcattatagccactaataaagatttttaaagaaactgcgagaaaaacaagagctataatcatgcatgcaactacagtacaaccaagaatccacaaaagattatgcaaaaagtaccatcagcttgccaagaataaccaaaaattagacatgtaaaataaatggttgtatggaatgttaagtccaaagctatttcgaaagttctcgatttcccccatattcctaccagtgtcatgaacttgaaaatgggggataatcggcttcagaaatttgaactcatttgtcccggaacctcctgtcagacacacctcgtatgggtagctctgggacagggtcccggtgccgctcacgtccaccagatgccctggaaagggaccctcgggcaccgagcagcgacccaccgaggccgccctgctcctcctgcacagccgcaccgccacgaacaggagcaccgagaagaggaagagcgacgacaccgaggccaatgccaccaccaggtagacggtgagggagtcggcctgggcctggcacggggccgcctcagggagcggcaggtagggctgggagaagccgtccaccaggagcacgtgcagcgtggcggtggccgagcgaggaggctcgccattgtccttgaccagcaccaccagcctgtgcttggccgcgtcgcgctcgctcagcagcctggcggtgcgcacctcgccattgtgcgcccacacgccgaacagcccgcccacgcgtccgcgacgcgtggtcgacgatatcccggaattcggccgtaccagcctgtttaaacaagttatatacgctatagcttt

SEQ ID NO: 348249 - DNA, 294 bp, Homo Sapiens
  misc_feature (11)..(11): n is a, c, g, or t
  misc_feature (24)..(24): n is a, c, g, or t
  misc_feature (34)..(34): n is a, c, g, or t
  misc_feature (81)..(81): n is a, c, g, or t
gatgtgcaggncagggctgttgtnctctcggacnaacagggtgtaggaggtttgggtgaagacggggctcgctgtcattgnacgtcggagaccaggaccgatatgatgtgcacggttttcagcctgggtgtccccatgtcggtgacagtgatggtgatgttgtactcggcttggctctctctgtccagtgttctctgtgtcactagggtgtaaaagttttttaatgtgggcttcaaaagaaaggggagatcattctggatggagcaaatcatcctaccgttgtccccggagtct

SEQ ID NO: 348250 - DNA, 439 bp, Homo Sapiens
  misc_feature (389)..(389): n is a, c, g, or t
  misc_feature (401)..(401): n is a, c, g, or t
tggaagtattggacaccaatgacaatccccctgaactgatcgtatcatcattttccaactctgttgctgagaattctcctgagacgccgctggtgtttttaagattaatgacagagactctggagaaaatggaaagatggtttgctacattcaagagaatctgccattcctactaaaaccttctgtggagaatttttacatcctaattacagaaggcgcgctggacagagagatcagagccgagtacaacatcactatcaccgtcactgacttggggacacccagggctgaaaaccgagcacaacataacggtcctggtctccgacgttcaatgacaacggcccccgccttcacccaaacctccttacaccctgtttcgttcgcgagancaacagccccgncctgacacattgggcagtcgttcggcatccaggaccag

SEQ ID NO: 348251 - DNA, 350 bp, Homo Sapiens
  misc_feature (74)..(74): n is a, c, g, or t
caccatgtcccatctgctactgtctcaagttctatcccttataagccaaagactacttcccacacacaacctcncaacaaacatgaaggagcctaaggcctgcctttaacactgcacatgttcattttaccatttgctgaagttgttttagaaaactgtatgatatgaaatatattgaagctcaaacattaatcacatccaagtgtactattgttagtgacgggatctatacgtcaaatagcaaagcatttacccctgtaatgcttttagattcacagaagaatctagatagaaccaaatacatatactgccatggccatgtgattttcaagtattaaaagttcatttgc

SEQ ID NO: 348252 - DNA, 679 bp, Homo Sapiens
cagctctttataatggtaaatcatttttattgactgaatattcacaccaaacacaaaagcaatgctggttcttctccttaatggactaggataggagaagagagttcagtttagtttcttgctgggctgcatgtactcacatgcaaaacattatctttaagattcagggaaaggtggtttgaaacaaagacttaaataaaaatagcaccagaaggaccaggtaccaataatcacatactccacccattcgggagtttcattttgtgaaatattattgcacttgtaatgtaaaaagtaaatgatagtaaattacccaactcagtaattttaaatacttcgatgtattctgaactaagcagtttcaaaatggttttgagtttctcttcaaaggaaacctggctaagacaactaaatctagccatttactttaaaaagcaaggagagaggaccaagttttgtttctaaactacaactgcactatgagaaaagaggctattttagatagtggtacgaatttggtccacatcaaatacatcgttattataaaaataaacaagtttgttttttgtaaaaaataacattgcattccttgttcaaattgcacagtacaaacaagctgtcttaatactgttataaggtaattagaattacatacagtggatgggtgtttaaagcaatt

SEQ ID NO: 348253 - DNA, 1111 bp, Homo Sapiens
  misc_feature (963)..(963): n is a, c, g, or t
atggaaggaccgtgccgggaccccaacgaggcagtgcgggagtttgccaaggaaattgacatctcctgtgtcaaaattgagcaggtgatcggagcaggggagtttggcgaggtctgcagtggccacctgaagctgccaggcaagagagagatctttgtggccatcaagacgctcaagtcgggctacacggagaagcagcgccgggacttcctgagcgaagcctccatcatgggccagttcgaccatcccaacgtcatccacctggagggtgtcgtgaccaagagcacacctgtgatgatcatcaccgagttcatggagaatggctccctggactcctttctccggcaaaacgatgggcagttcacaagtcatccagctggtgggcatgcttcggggcatcgcagctggcatgaagtacctggcagacatgaactatgttcaccgtgacctggctgcccgcaacatcctcgtcaacagcaacctggtctgcaaggtgtcggactttgggctctcacgctttctagaggacgatacctcagaccccacctacaccagtgccctgggcggaaagatccccatccgctggacagccccggaagccatccagtaccggaagttcacctcggccagtgatgtgtggagctacggcattgtcatgtgggaggtgatgtcctatggggagcggccctactgggacatgaccaaccaggatgtaatcaatgccattgagcaggactatcggctgccaccgcccatggactgcccgagcgccctgcaccaactcatgctggactgttggcagaaggaccgcaaccacctgcccaagttcggccaaattgtcaacacgctagacaagatgatccgcaatcccaacagcctcaaagccatggcgcccctctcctctggcatcaacctgccgctgctggaccgcacgatccccgactacaccaggctttacacggntggaccaatggctgggagccatcaagatggggcagtacaagggagagcttcgccaatgggcggctttcacctcctttgacgtcgtgtctcaaatgatgatgggaggactttcttccggggttgggggtcactttggcctgggcaacca

SEQ ID NO: 348254 - DNA, 2207 bp, Homo Sapiens
  misc_feature (1691)..(1691): n is a, c, g, or t
  misc_feature (1768)..(1768): n is a, c, g, or t
  misc_feature (2023)..(2023): n is a, c, g, or t
  misc_feature (2059)..(2059): n is a, c, g, or t
  misc_feature (2131)..(2131): n is a, c, g, or t
  misc_feature (2133)..(2133): n is a, c, g, or t
ggggcagctgaaaactttccacaggctgcctgctcgcctggattttataagtttgaggcatctgagagcccctgcttggagtgccctgagcacacgctgccatcccctgagggtgccacctccatgcgagtgtgaggaaggcttcttccgggcacctcaggacccagcgtcgatgccttgcacacgaaccccctccggcccacactacctcacagccgtgggcatgggtgccaaggtggagctgcgctggacgccccctcaggacagcgggggccgcgaggacattgtctacagcgtcacctgcgaacagtgctggcccgagtctggggaatgcgggccgtgtgaggccagtgtgcgctactcggagcctcctcacggactgacccgccaccagtgtgacagtgagcgacctggagccccacatgaactacaccttcaccgtggaggcccgcaatggcgtctcaggcctggtaaccagccgcagcttccgtactgccaggtgtcagcatcaaccagacagagccccccaaggtgaggctggagggccgcagcaccaccgtcgcttagcggtctcctggagcatccccccgccgcagcagagccgagtgtggaagtacgagggtcacttaccgcaagaagggagactccaacagctacaatgtgcgccgcaccgagggtttctccgtgaccctggacgaactggccccagaaaaccacctacctgggtccaggtgcaggcactgacgcaggagggccagggggccggcagcaaggggcacgaattccagacgctggccccggagggatctggcaacttggcggtgattggcggcgtggctgtcggtgtggtcctgcttctggtgctggcaggagttggcttctttatccaccgcaggaggaagaaccagcgtgcccgccagtccccggaagacgtttacttctccaagtcagaacaactgaagcccctgaagacatacgtggacccccacacatatgaggaccccaaccaagcctgtgtttgaagttcactaccgagatccatccatcctgtgtcactcggcagaaagtgatcggagcaggagagtttggggaggtgtacaagggcatgctgaagacatcctcggggaagaaggaggtgccggtggccatcaagacgctgaaagccggctacacagagaagcagcgagtggacttcctcggcgaggccggcatcatgggccagttcagccaccacaacatcatccgcctagagggcgtcatctccaaatacaagcccatgatgatcatcactgagtacatggagaatggggccctggacaagttccttcgggagaaggatggcgagttcagcgtgctgcagctggtgggcatgctgcggggcatcgcagctggcatgaagtacctggccaacatgaactatgtgcaccgtgacctggctgcccgcaacatcctcgtcaacagcaacctggtctgcaaggtgtctgactttggcctgtcccgcgtgctggaggacgaccccgaggccacctacaccaccagtggcggcaagatccccatccgctggaccgccccggaggccatttcctaccggaagttcacctctgccagcgacgtgtggagctttggcattgtcatgtgggaggtgatgacctatggcgagcggcccttactgggagttgtccaaccacganggtgatgaaagccatcaatgatggcttccggctccccacacccatggactgcccctccgccatctaccagctcatgnatgcagtgctggccaccaggagcgtgccccgccgccccaagttcgctggacatcgtcagcatccctggacaagctcattcgtgccccctgactccctcaagaccctggctgactttgacccccgcgtgtctatccggctccccagcacgagcggctcggagggggtgcccttccgcacggtgtccgagtggctggagtccatcaagatgcagcagtatacggagcacttcatggcggccggctacactgccatcngagaaagtggtgcagatgaccaacgacgacatcaanaaggattggggtgcgggctgcccggccaccagaagcgcatcgcctacagcctgctggggactcaagggaccngntgaaacactggtgggggatcccccatctgaaccctccgacaggggcctggaagcccccatccggcccagaatac

SEQ ID NO: 348255 - DNA, 480 bp, Homo Sapiens
aaaattagaacccatccctcatcgaagactaagaatggtaacaaataccattgaagagaattttcctctggggactgtgcagtttttgatggactttgtgtcaccccagcattacccaccaagagaaatcgtggctcacatcatccagaaaatcttgctcagtggctctgagactgtggatgtcctaaaggaggcctacatgcttctcatgaaaattcaacagctacatccagccaatgccaagacagtggagtgggactggaaactgctcacctatgtcatgaaggaagagggacaaactctgcctgggcgagtccttttcctgcgttatgtcgttcagaccctagaagatgactttcagcagaccctgaggaggcaacggcagcacctgcagcaatccattgcaaacatggtgctttcctgtgacaagcagccccacgatgtcgcggggtgttatcaagtggtttcttctcctcgaca

SEQ ID NO: 348256 - DNA, 1699 bp, Homo Sapiens
ggatcatttcacctgtaacagaatacccaactcaggcttggcccaacagtcaagttgagccaagccaacagacttggctcaatcagctcgcatgactggaagttcatcagtagagtggacatcatggcggtttgatctagcagcacaggagtcattaaagaaccagtttctctttctctgttttgccatctgtagttttgggtatatcctgaggttgataggttcagtgagagggagagattgacttcccatggctgcctcttaaatcaaatgatctacaatcctagagattccagtagatatctgattgcagcttaggtgttagaaaattataattatctgcagatgcctagatcctttgaacaagtaataatacttaaaaaatggtttctgaaaccttataagggacaaactctgcctgggcgagtccttttcctgcgttatgtcgttcagaccctagaagatgactttcagcagaccctgaggaggcaacggcagcacctgcagcaatccattgcaaacatggtgctttcctgtgacaagcagccccacaatgtcagggatgttatcaagtggctggtcaaagcagtaactgaagatggattgactcagcccccaaatggaaatcaaacgtcttcaggaacaggaatcttgaaagccagcagtagccacccttcttcccagcccaacctgacaaagaacaccaatcagctgattgtgtgccagcttcagaggatgctctccatagccgtagaggtggacaggacccccacctgcagctccaataaaattgccgagatgatgtttgggtttgtgctggacattcctgagaggagccagagagaaatgttctttactaccatggaaagccaccttctgcgctgcaaagtgttagaaatcatattcctccacagctgtgagacacccacccgcctgcctctgtctctggcccaggcccctctactttcctgaataattctacgtcactgctcaagtgtcagtcagataaaagccagtggcagacttgggacgaattggttgagcatctgcagtttctgctgtccagttatcaacatgttttaagagaacacttaaggagttccgtgatcgaccgaaaggacttaataatcaaaaggattaagcccaaaccccagcaaggagatgacatcacagtggtagacgtagagaagcagattgaggccttccgcagccgcctgatccagatgctgggggagcctcttgtcccccaactccaagacaaagtgcacttgttgaagctcctgctcttctatgctgcggacttgaaccctgatgcagagccctttcaaaagggctggagcggctcctgagggcctgccaagcactgaatgccaagaattacctcctgaactctctctccaactgctcagaagctctaaaagcatgaaaagtggttaaaatcttacaggaccaaacctgcattatttaatcagtaggttgtaatttctaactctagtaaatatctttttttaaataatcctatcctagcctgtttctcaaatatgggcttaaaatatacaaaggtatatattattttttaaataaaattactttattctaatacttttttttggaaaccacgtttaaataactccttgttgccaatccacaatgggttttaaaccattctttttccaatttccaacgaaatgggtggggc

SEQ ID NO: 348257 - DNA, 372 bp, Homo Sapiens
  misc_feature (67)..(108): n is a, c, g, or t
  misc_feature (162)..(175): n is a, c, g, or t
  misc_feature (234)..(256): n is a, c, g, or t
cgaaagatataaacatgcaaaacagtgacatttgattcaattgttgagctgtagttagaatactcannnnnnnnnnnnnnnnnnnnnnnnnnnnnnnnnnnnnnnnnnggtttggggagggagaaaagttcttagcacaaatgttttacataatttgtaccnnnnnnnnnnnnnnggaaaggaaagaaaggggtggcctgacactggtggcactactaagtgtgtgtttttttnnnnnnnnnnnnnnnnnnnnnnngcttttaaactggagagacttctgacaacagctttgcctctgtattgtgtaccagaatataaatgatacacctctgaccccagcgttctgaataaaatgctaattttggatctgga

SEQ ID NO: 348258 - DNA, 1020 bp, Homo Sapiens
  misc_feature (30)..(31): n is a, c, g, or t
  misc_feature (454)..(454): n is a, c, g, or t
  misc_feature (472)..(491): n is a, c, g, or t
  misc_feature (494)..(494): n is a, c, g, or t
  misc_feature (502)..(503): n is a, c, g, or t
  misc_feature (506)..(506): n is a, c, g, or t
  misc_feature (518)..(518): n is a, c, g, or t
  misc_feature (523)..(523): n is a, c, g, or t
  misc_feature (533)..(533): n is a, c, g, or t
  misc_feature (573)..(573): n is a, c, g, or t
  misc_feature (659)..(659): n is a, c, g, or t
  misc_feature (670)..(670): n is a, c, g, or t
  misc_feature (678)..(679): n is a, c, g, or t
  misc_feature (736)..(736): n is a, c, g, or t
  misc_feature (746)..(760): n is a, c, g, or t
  misc_feature (777)..(778): n is a, c, g, or t
  misc_feature (801)..(802): n is a, c, g, or t
  misc_feature (814)..(814): n is a, c, g, or t
  misc_feature (816)..(816): n is a, c, g, or t
  misc_feature (819)..(819): n is a, c, g, or t
  misc_feature (868)..(868): n is a, c, g, or t
  misc_feature (875)..(875): n is a, c, g, or t
  misc_feature (877)..(878): n is a, c, g, or t
  misc_feature (921)..(921): n is a, c, g, or t
  misc_feature (924)..(924): n is a, c, g, or t
  misc_feature (927)..(927): n is a, c, g, or t
  misc_feature (939)..(939): n is a, c, g, or t
  misc_feature (966)..(966): n is a, c, g, or t
  misc_feature (985)..(987): n is a, c, g, or t
  misc_feature (999)..(999): n is a, c, g, or t
  misc_feature (1012)..(1012): n is a, c, g, or t
aaatgatttcataatactgaccagagggannaaacagctcacaaaaactttccatataagaagcacgatgttaaaacacagcagaggccatcaaacacagtattaatgagaattttgttagcttctaatgataatcattattgtatcagaatgcaattcacactaattattagtaaaagtttacaaacattaaaaagtgcataataacatttggatctgagagggctgaaaaaagacatgaaaacacaacaccagggctttacttttgtgattggtgtccacatgattgcaaggagattactttctccacctgattcatcttagtgaagataagttgtcctccaaatttaaatagtatcatacagcattgtgagaaatttgattccatagaacaaaatatttccagtccttagtatgatcttggcttttcttttctacctttccaattgtccanaattctcataaattaaannnnnnnnnnnnnnnnnnnntangggggagnngtnctccacttgagnttaanacaaatttgncagattgaattccagtctgtgcagacaccaaacagactgnattcaggtgagattcacattaatggattattttcaaatgttctctataattatatagctatggagttcttgatgtatctgttgagntttatatcatntcattcannatacaatgagcaaggggaaagactgtgttttaaaaaagggtgttctatcctgtgtanaccaccacannnnnnnnnnnnnnnaatgaaaagacagcccnnttaaaaatgagtggtataaaaanncacagtaatgtncntcnttttgtttttcaataagcaaacagagaagggggcagtgctgagcatatnttttttntnntacaaaacagtgttaataacacagcagtaacacacagatacgnaangcnaaaaacagtgcnttctggttctttcttttactgggtganacatgagcagagatatatnnntctgggggcaancaaccatcgcaanagaaaaaa

SEQ ID NO: 348259 - DNA, 1786 bp, Homo Sapiens
  misc_feature (1286)..(1286): n is a, c, g, or t
  misc_feature (1288)..(1288): n is a, c, g, or t
ggaattctccggatcgcggcgggagcggaggctgctgctggcaggtggggcgcgggccggcgcgagctgaccgagcactcggcgggcgcggcgggactgcggcccgtggcggcgtgcgcggggacctgcgctgactaggtccggggaagtccctgctatgtggatatttggtagcaatgactgatgtggaaactacatatgcagattttattgcttcaggaagaacaggtagaagaaatgcaatacatgatatcctggtttcctctgcaagtggcaacagcaatgaattagccttgaaattagcaggtcttgatatcaacaagacagaaggtgaagaagatgcacaacgaagttctacagaacaaagtggggaagcccagggagaagcagcaaaatctgaaagctaacaccccactttgaccctcgaccacacctgaaaatgtctcaaatctccaggagtatctggaatgcatttgtttccatgagtgaaaagaggaaaaagaaaatggctgtgctgcattgcaggaacctgctcattatcatgttaaaaatgagggcagaggctgtggctgcaggcagacttttccctacctctgtcattagcaatggttgaaatcatgtggcttgtgtttgggcgtcatttttgtatggatcctttcacttgatcatatgacgaaatgcttatagagagtagctccgacctagatgatgattcttcctgtagcatctggcccctcacaatgtcagaggatttaattgtgtctaattgcgaagggttgattgaaccccagagtttaaatatctctggctcaagtgttcacccagtaaaagaaagatccagaaagcactgtttttagcattacgtatctgtgtgttactgctgtgttatttacactgttttgtattgtacaatatatatgctcagcactgcccccttctctgattgcttatgaaaaacaaaatgatgtacattactgtgaatttttataccactcatttttaaaagggctgtcttttcattttagttttccatactgtggtggtgtacacaggatagaacacccttttttaaaacacagtctttccccttgctcattgtatgttgatgagttgattaagtctaacagattcatcaagactccattgctttattatagagacatttgaaaatatccattaatgtgaatatcacctgaattcagtctgtttggtgtctgcacagactggaattcaatctgtcaaatttgttttattctcaagtggagaacttctcccacataatatananaaaaatatatattttaatttatgagaattttggacaattggaaaggtagaaaagaaaagccaagatcatactaaggactggaaatattttgttctatggaatcaaatttctcacaatgctgtatgatactatttaaatttggaggacaacttatcttcactaagctgaatcaggtggagaaagtaatctccttgcaatcatgtggacaccaatcacaaaagtaaagccctggtgttgtgttttcatgtcttttttcagccctctcagatccaaatgttattatgcactttttaatgtttgtaaacttttactaataattagtgtgaattgcattctgatacaataatgattatcattagaagctaacaaaattctcattaatactgtgtttgatggcctctgctgtgttttaacatcgtgcttcttatatggaaagtttttgtgagctgtgtaatccctctggtcagtattatgaaatcatttgcagtggtaataaat

SEQ ID NO: 348260 - DNA, 1186 bp, Homo Sapiens
  misc_feature (1084)..(1084): n is a, c, g, or t
  misc_feature (1098)..(1098): n is a, c, g, or t
  misc_feature (1100)..(1100): n is a, c, g, or t
  misc_feature (1115)..(1115): n is a, c, g, or t
  misc_feature (1120)..(1122): n is a, c, g, or t
  misc_feature (1125)..(1125): n is a, c, g, or t
  misc_feature (1165)..(1166): n is a, c, g, or t
  misc_feature (1171)..(1171): n is a, c, g, or t
  misc_feature (1175)..(1176): n is a, c, g, or t
  misc_feature (1184)..(1184): n is a, c, g, or t
  misc_feature (1186)..(1186): n is a, c, g, or t
agcgggtcccggggcggggatgacttcatgcagccggagctccgcggcgggagcggaggctgctgctggcaggtggggcgcgggccggcgcgagctgaccgagcactcggcgggcgcggcgggactgcggcccgtggcggcgtgcgcggggacctgcgctgactaggtccggggaagtttcctgactttctgagaagccctggtttccccaaagaagtgatttctgatagaaatctgaaggtcatctccaagaaaaaagagatctagtatagtcaatgaattaaagacaagaaggtttccaatcagtccctgctatgtggatatttggtagcaatgactgatgtggaaactacatatgcagattttattgcttcaggaagaacaggtagaagaaatgcaatacatgatatcctggtttcctctgcaagtggcaacagcaatgaattagccttgaaattagcaggtcttgatatcaacaagacagaaggtgaagaagatgcacaacgaagttctacagaacaaagtggggaagcccagggagaagcagcaaaatctgaaagctaacaccccactttgaccctcgaccacacctgaaaatgtctcaaatctccaggagtatctggaatgcatttgtttccatgagtgaaaagaggaaaaagaaaatggctgtgctgcattgcaggaacctgctcattatcatgttaaaaatgagggcagaggctgtggctgcaggcagacttttccctacctctgtcattagcaatggttgaaatcatgtggcttgtgtttgggcgtcatttttgtatggatcctttcacttgatcatatgacgaaatgcttatagagagtagctccgacctagatgatgattcttcctgtagcatctggcccctcacaatgtcagaggatttaattgtgtctaattgcgaagggttgattgaaccccagagtttaaatatctctggctcaagtgttcacccagtaaaagaaagatccagaaagcactgtttttagcattacgtatctgtgtgttactgctgtgttatttacactgttttgtattgtacaatatatatgctcagcnctgcccccctctcngnttgcttatgaaaaanaaaannnggncattacgggggattttttacccccctttttaaaggggggnntttcntttnntttcccancn

SEQ ID NO: 348261 - DNA, 591 bp, Homo Sapiens
  misc_feature (55)..(74): n is a, c, g, or t
gaattcaatctgtcaaatttgttttattctcaagtggagaacttctcccacatannnnnnnnnnnnnnnnnnnntttaatttatgagaattttggacaattggaaaggtagaaaagaaaagccaagatcatactaaggactggaaatattttgttctatggaatcaaatttctcacaatgctgtatgatactatttaaatttggaggacaacttatcttcactaagctgaatcaggtggagaaagtaatctccttgcaatcatgtggacaccaatcacaaaagtaaagccctggtgttgtgttttcatgtcttttttcagccctctcagatccaaatgttattatgcactttttaatgtttgtaaacttttactaataattagtgtgaattgcattctgatacaataatgattatcattagaagctaacaaaattctcattaatactgtgtttgatggcctctgctgtgttttaacatcgtgcttcttatatggaaagtttttgtgagctgtgtaatccctctggtcagtattatgaaatcatttgtcagtggtaataaataaggaaccagtaatatgccaatggttcatg

SEQ ID NO: 348262 - DNA, 894 bp, Homo Sapiens
tcatcgctgttccagacagcgatgactcgagagcgggggggcggaggctgctgctggcaggtggggcgcgggccggcgcgagctgacccagcactcggcgggcgcggcgggactgcggcccgtggcggcgtgcgcggggacctgcgctgactaggtccggggaagtttcctgactttctgagaagccctggtttccccaaagaagtgatttctgatagaaatctgaaggtcatctccaagaaaaaagagatctagtatagtcaatgaattaaagacaagaaggtttccaatcagtccctgctatgtggatatttggtagcaatgactgatgtggaaactacatatgcagattttattgcttcaggaagaacaggtagaagaaatgcaatacatgatatcctggtttcctctgcaagtggcaacagcaatgaattagccttgaaattagcaggtcttgatatcaacaagacagaaggtgaagaacgatgcacaacgaagttctacagaacaaagtggggaagcccagggagaagcagcaaaatctgaaaagctaacacccgcactttgaccctcgagcacaccctgaaaatgtctcaaatctccaggagtatctggaatgcatttgtttccatggagtgacacagagggaaaccgaacatggctgtgctgcattgcaaggaacctggctccattatcatgttcaaacatgagggcagaggcctgtgggtgcagggcagaactttttccctgcctctgtcattagcaatggttgaaatcctgtggcttgtgttaggggcgtaattataggtatggatcctttacctgtgatctatgacgaaatgctatagagaagtgctccgactaaatgatgattctcctggtgctttgggcccg

SEQ ID NO: 348263 - DNA, 457 bp, Homo Sapiens
  misc_feature (16)..(16): n is a, c, g, or t
  misc_feature (57)..(57): n is a, c, g, or t
aggacggaaaaattgncccaaggaaaccaaatcccccacaagccgtaaggataccanttaaaattgggaggacaacctaccctccacctaagccgaatccaggtggagaaagtaaaccccctggcaatccatgtggacacccaatccacaaaagtaaagcccccggtgttgtgttttccatgtccttttttcagcccctctcagatcccaaatgttattatgcactttttaatgtttgtaaacttttacctaataattagtgtgaattgcattctgatacaataatgattatcattagaagctaacaaaattctcattaatactgtgtttgatggcctctgctgtgttttaacatcgtgcttcttatatggaaagtttttgtgagctgtgtaatccctctggtcagtattatgaaatcatttgtcagtggtaataaataaggaaccagtaatatgcc

SEQ ID NO: 348264 - DNA, 597 bp, Homo Sapiens
aatgtgaagttaacttggtaaaaatgaaagaaaaattggggaaggaagaagttaagagaaactgggttggtcagtttggaaatatttaaaaacttgcatcaggcaaatgtaggcatagaattccactcacgaactgggagggcagagaaaaagacagtctcgggtaggattactaagaattgaccattctggaaacaaatacagtgcagtctgatctgtaccccagactccacggaagcccactggtggtggtggagggggtggtagtttgtgtcttcactgctgggtggctctttgagtctcttatctctcaggaccatgtaacctactggatctactcactgcatcctggccccatttcagtcttcgtttagttaaatacagttctgctatccctaactcccgcgcaggggaagaaagtacttactctgaacccaacatataagggcgaacccaacatataagagacatttcttagtggggagaaccggtcatcttcaccttgcctggaataattcagccgggcgagacattttccatttctaccttggggcagctcaatttttatacctgaggccaacttctacgccattcccc

SEQ ID NO: 348265 - DNA, 902 bp, Homo Sapiens
ctccactggctgcaccagctgctgaaggaacagcctgggaatctggattctcagcatggatggtaagttttactgtcatctttgctgtcttcagaaggctaataaacttttcaatagggtaaccaacaacaatttcatcatctacagccagtatctgatctccgactttgagtcgtccatccgtggctgctaccccatgctctgttaagctctttatgatgactccactgagtgtatcttcttcgctgatagcaatacccaaacccccctgatccttgggaagctccagatgttgcacatttttaaatgaactgaggtccacagctgcatcagaagtagtaacagttggctctgtctccttattttgaagattttctgagttagaaggcaaaggttctactgcatttccaggacatacggccatctgattcactgcatctttatttctgataaaaattagtgtcactttagaaggggcacatttaatgattgatgaggcattctgatgacttcttgccatataaaatctgaccattgatctctagaagctcatctgcaatttgcaatcgaccatcttttcctgcagctccatttggatcaatccccactatgaagacactcatcctggatcggtctttgttcccagcaagacttaggcccaaaccactatgacctttctccagtcatcataaagagcttaacagagcatggggtagcagccacggatggacgactcaaagtcggagatcagatactggctgtagatgatgaaattgttgttggttaccctattgaaagtttacttagccttctgaagactcgcaagatgacagtcttacttaccatccattgctgagaatcccagacttcccaggctgttccttcgcgctgtgcacgccact

SEQ ID NO: 348266 - DNA, 2263 bp, Homo Sapiens
  misc_feature (22)..(22): n is a, c, g, or t
  misc_feature (80)..(80): n is a, c, g, or t
gcccttccccgctgcgcccgcngcccccgacggcgcagatcccggagaggccccgacgcccccaagcagcgcccagcggnagccagggccacgcccctctgcgcactcgcacgccggctctctgcgccccggcctgagcgcgtcgtggggcgagcccggggggctgcgcgcggcgggcggcggcggcagcaccagcagcttcctgagttccccctccgagtcctcgggctacgccacgctgcactcggactcgctgggctccgcgtcctaggaccgccggcgcctccccacggacgccaggcaggccaggccgctctccggggccgcagcaccaaagacgcccgcctcccccccgcgcgcagacatgcgccacccctcccaggggtgagggggcgttggcctcagcgtttgtcttccggctcctcccagctggccttgtcccaggggcgacggctgccccggacgactgcgctgggcaccgcatgtcccgggccgagtgaggtcgggcctggggagctgagtgacatcccaagcttgggcttgggtagtgagtgacatgtgcacacgtccagctgcgccatcaccagccctgcgcaacaggacgtcgggagcagggaacctgagacagggccactgcgggatcggacaaagccccgctttggagaggctgagctggagccattggcctccccaggggctttccacccacactgcaccataaccgccacacccttcggggtgggggagggtacagagggtctctaagcacaggggtgttcagagcccgaacaagctttgatcaggtttccctgcttccgacctgtcctgcctcagtttccccatctgtgatgagcaggtgaccacgttaactctcagggctgtttgaagtctcttggttgtaggccctcgccactgagtggcccaggtgtgagaggtagtctagagccctctgcggcctttgtggaggtccgttctcagcatgtggcctggtgtggctccctaggcctgaggcctcccactctcagtgccccctgcccccttgggaacccacactccaccccagctaagcacaacactgtggaccaccaccaatggcacctgagccaccttgaccaccattagtgtccccaccctcattactctgccgtcgttgcctgttccccaccacatcatctccctccatggctcccaccatgacgctggcaggtgcaagcggagagcacgagggcagcagggcctggccttccgtgtccctgcgtcatccccagcctcactccccacccgtgcaggcctggccaggaagggatcctggcaggggcttccaggttctcagctcaaggcctggtcccgggcaggcgtccaacccctgggagcaatgtatttctttgccttccatcctgggcagaccccttacaggcctgggcattgccatgggccctgggtcttcccaggctaaggagaaccaggaacagctataaccttgagctagtgaaatagggtagatgagaaggctgtctcctccagacccctacccctacacagtggccccacaatatgaagacctggggtaattccaaggtgagcatagagcctgcctgtgcccagttccttctggccctcaggtggccaagcccatctcttcatccttcagatagggtcccactcccagaagaagctgctggggtgggggtgggaggctgcctaagcctgtctgtgcttcagaggcccctccagtccctggctgtggggtaactgggggtatgagctgtggccacaggtgagcaaggcagggaactgcaatccagccctggccgcgggaggggccatctctggccaatgctgctgtgccttcaaggactgacaagttacgtaggggcagaggtcgccagctagccagtgtctcctccatctggggggcgtctgtccacttgtcaccttaggttttcactcatttgtcaccttggggttttgctctgtgtgtttcatatccaacggcaatacttgcagggggacagagtcctctaaatactccaatcctgcggtttttacaaacataaagggggagaccccaagtggaggaccctgggcctggagctccctcccaaactttgtccagcatccagcctgttccctgggctcactggggagggagttgtcttcatagcacacccagagccagggatccctttgtagttttttgacaacggagcatttctcttctgtacaggacccaataaaaacttccttatgatttgcacctggc

SEQ ID NO: 348267 - DNA, 482 bp, Homo Sapiens
ccaaaccctggcccgcggggaaagggccaactctggccaaaagctgctgtgcccttcaaaggaactgaacaaagttaacgtaagggcaaaaggtcgcccagctaagcccagtgtctccctcccatctggggggcgtctgtcccacttgtcaccttaaggttttcactcatttgtcaccttggggttttgcctctgtgtgtttcatatccaacggcaatacttgcagggggacagagtcctctaaatactccaatctgcggtttttacaaacataaagggggagaccccaagtggaggaccctgggcctggagctccctcccaaactttgtccagcatccagcctgttccctgggctcactggggagggagttgtcttcatagcacacccagagccagggatccctttgtagttttttgacaacggagcatttctcttctgtacaggacccaataaaaacttccttatgatttgcaaaaaaaa

SEQ ID NO: 348268 - DNA, 502 bp, Homo Sapiens
tgctcagataagaccaagaatcagaaagacaatgtaagctttagaggattataatgcaatcaccagcatctcagtaaatgatgggtgagggaagaatcggtaataccccctcatcaatttcacagtagaagcagatgtgtggcaggatgtactaggttaaaggtattctttctgtaagaacggaatgcatgcagcccagaggacaggggacatgaacaggaaacagagccatacctggtactgctcttagttatgggtcataaactgcatcagttagacacaggagaaagcagtgaacagttaatggaaggaactgttggccagtgttaactggtgacacagaaaggaaaggtctagccacctggaggggcagctacagcctagcccagacctgtaacttatcttctgagcagtgccatgcaatccaaaccttgcagccctaaagtatctatctgttcataggaaacaccagggtatggaagaaaggatatggaatttagac

SEQ ID NO: 348269 - DNA, 2255 bp, Homo Sapiens
  misc_feature (780)..(815): n is a, c, g, or t
  misc_feature (2165)..(2165): n is a, c, g, or t
  misc_feature (2171)..(2171): n is a, c, g, or t
  misc_feature (2204)..(2204): n is a, c, g, or t
  misc_feature (2213)..(2213): n is a, c, g, or t
  misc_feature (2241)..(2241): n is a, c, g, or t
acgttgattcgtaaggtggatggagtcagtcctcagttgcccctgctggccttcctggtgcttaccatcagcccaatctttgcacagtccttgttgttcttacttctctgcatgcattccttcagaagatcagtcatcaactttttcttaattcctctgtgacacacaatgggaattcaaaggaagagatcttaaaagtcacaacagttctttatcttaataatcccctccccattcaccttactacatgcagactcacctcacacccttacaacttgaagctgaaaatttaaaagtaatttccctttttgcagcttttcctcaggttaaggctttgatctgcctgagagtaactctaaaaggagggaagataaatatgggataaaatccacaaagtgtagcttctaattcctttggaagtttaaaaaatttccacatatctgatgcttcttttgtcaggtgcagaagcacaaaaacatattccgaagccaactgatagggaatttggggattattgtcagtttggagaatttgctggggtatttcttcatttccatggatagctcatagttggctctttctgggtgagtaattatgtgtaatatagatcaaatcttttactaaggttacagctacatgttaggggaggctatgaaaatactatattattataatttcagtgcagtgattgttgtgagaaataactttcatggtaaccctaggaaaatgggcacctgccaccatcctgagaagtcctcacacaatgccctttctctcttnnnnnnnnnnnnnnnnnnnnnnnnnnnnnnnnnnnnccccgtcactaattcatagagttccttagcaggcatagtcaaggatcctctgggtaatgtcagctgcttagtgataaaacagagccaaaactagtgcatcctgttgaaagtaatgcagaaacagtacctgggtccagatatgctttcctgcggcgctttcctctgttacctcgtttcatcctcacagcagcatggacggtaggtggggtcgcttctacaatcatttctgatgatagcttgggaatagagataggggcagtgacttgcctgatgtcgcacagccctccggctgtcctgctttcccatatggagcagtggtggtgtgggcacctgtgatgcaggagactttaaaaatgtcgtgaggtcacgtgctgcccctcctggtacgtgtggaatgcccctggccagcaaggggtgcttttttatcagagttggcagctggcatgtgggaaccgagcaagtgctgcgtaccaagttacttgttttaaggagaccaagtgctcagcgccaggtggttttcttttttgtcatagttacttgctataactcagcttgacttctgtcatgaatcagtgctctctgggaggatgcaatactctgtttgggcattaattggtagcaggttgtctcaaccaaaaagacaggaaacagcaaaagcctctctgaaattaagaggaaagttactctccccacacccatcagagtctttattggagccaccaggtgagctgtgcagcctggacaggcctgcagctataggccaccttcccagtttaggtcctcagcacaggggagcccaagtcactgggtgccttccgagggctgtcactgggcaggccatatacaagtcagtttgtccgtgggcactgcagtgtgtgcatgccgtagtgttgatgggtgctaggaggggtgtcgtgtgcatgcgcgttgaagaggatctgtattgccgtgacctctgttcatggatgagtgcattgtaatttgttctcaggctgtgctgtgagggccgccttaacccttgctcccttcccttctagagctgccttaagttctccagaacttttcttctgtaaaggatatcttgcctggaagggatatcttgccctgtttctcaaggttttgtgagagttttgactggatgtggccctgcatgaccctccttctcctgtacttcctctttcctttccaaatggggaattaggaactgtgggggcagcaacagtcttcagagccagtgaggagggccagcttaggaggaattgcttcttgagttagtgggggactctgtgttcacaagttaaggcaaatggaatatatggaaaagaaattatggggagataaggttagganttcttngggtaataactttaaaagttctttgcctttccnactaaaccntttggttaacttaaagggtaaaggggtntaactccaactttt

SEQ ID NO: 348270 - DNA, 1643 bp, Homo Sapiens
  misc_feature (995)..(995): n is a, c, g, or t
tgtgctgcgcgttgaagaggatctgtattgccgtgacctctgttcatggatgagtgcattgtaatttgttctcaggctgtgctgtgagggccgccttaacccttgctcccttcccttctagagctgccttaagttctccagaacttttcttctgtaaaggatatcttgcctggaagggatatcttgccctgtttctcaaggttttgtgagagttttgactggatgtggccctgcatgaccctccttctcctgtacttcctctttcctttccaaatgggaattagaactgtggggcagcaacagtctcagagccagtgagaggccagcttagagaatgcttctgagttagtgggactctgtgtcacaagtaagcaaatgaatatatgaaagaaattatggagataagttagattcttggtaatacttaaatgtcttgctttctactaaccttttgttactaaaggtaaagggtataactcaaactttttgtggacattcttttcaaaattttttaagaaccctgtactataaaaggttgagtaaaaacaggaaagcgtgctataagttcaaatctgttgtattaccctaaattagataaaccaacctgaattatagtagatttctcaatagatgaggaactgaaaaatactatgtaaaatatcttccaaaatgctttttatactttttttatttgtaatttggtctatctaaaatgttcgttagcttaacttaatgggcgttattggattcatatgactaacgtttcctcagtattgtaatgcttgaaatatttgaaagaaaaaatgttgttttttagttgaaactggtatatataattcagtgcttggcaggttagtatatttttatgcatttttcagagtcagcagtttcaaatcttattgttatcatgttataaaattttagcccacatttcaggctccgtaaatcatttgagccattattttttcccaacaaatggtgaattttttctttanatgtggatatatatgttgtaatttatgattcctggttatgtatttttgtgggatcctgcagtaaaattgacttttttgtgtctttgggagatttaaattgcgctaacagtgttgcgcaaaaatgagttcatgccatttaacatattgtattttaattattaactgtattaatttactatgaaatggacatccttttaactaaaatggaattgaacattgcagttttcaaatatttttccttgttgggtctggaaaaggaattctactttgatctgcatagaaaattttgatacaattttttgaaagttcctagggtgaaacatttacccattaaaaaggaagcagaaatactgagacatgaaaggcattatcaactaactctagactctagaacccattctagcatatctcacgtgcaatttttaaaaataagttaataattcatctcatatcaacaaaagcctttgaaacatgggttttcactagatatcacctagtgctaagataaaaaccaaaacaatatcagaattacatttatgctctaaatttgtagttgtccattgttgtgcttagtaaatgtgtgtcattaatgctgtattctcctagctattatggaaacttgtttaaataaagatatggatataaaaa

SEQ ID NO: 348271 - DNA, 3366 bp, Homo Sapiens
  misc_feature (45)..(81): n is a, c, g, or t
tatagactcatataggggaactcgcgctctacgcggtggcggcgnnnnnnnnnnnnnnnnnnnnnnnnnnnnnnnnnnnnnatcaggccaaatcggccgagctcgaattcgtcgagagagggagctgcagggcaggcaatgagagctgcactctggctggggaaggcatgagtgacagacccacagcaaggcggtggggtaagtgtggacctttgtgtaccagagagaacatcatggtggctttcaaaggggtctggactcaagctttctggaaagcagtcacagcggaatttctggccatgcttatttttgttctcctcagcctgggatccaccatcaactggggtggaacagaaaagcctttaccggtcgacatggttctcatctccctttgctttggactcagcattgcaaccatggtgcagtgctttggccatatcagcggtggccacatcaaccctgcagtgactgtggccatggtgtgcaccaggaagatcagcatcgccaagtctgtcttctacatcgcagcccagtgcctgggggccatcattggagcaggaatcctctatctggtcacacctcccagtgtggtgggaggcctgggagtcaccatggttcatggaaatcttaccgctggtcatggtctcctggttgagttgataatcacatttcaattggtgtttactatctttgccagctgtgattccaaacggactgatgtcactggctcaatagctttagcaattggattttctgttgcaattggacatttatttgcaatcaattatactggtgccagcatgaatcccgcccgatcctttggacctgcagttatcatgggaaattgggaaaaccattggatatattgggttgggcccatcataggagctgtcctcgctggtggcctttatgagtatgtcttctgtccagatgttgaattcaaacgtcgttttaaagaagccttcagcaaagctgcccagcaaacaaaaggaagctacatggaggtggaggacaacaggagtcaggtagagacggatgacctgattctaaaacctggagtggtgcatgtgattgacgttgaccggggagaggagaagaaggggaaagaccaatctggagaggtattgtcttcagtatgactagaagatcgcactgaaagcagacaagactccttagaactgtcctcagatttccttccacccattaaggaaacagatttgttataaattagaaatgtgcaggtttgttgtttcatgtcatattactcagtctaaacaataaatatttcataatttacaaaggaggaacggaagaaacctattgtgaattccaaatctaaaaaaagaaatatttttaaaatgttcttaagcaaatatatacctattttatctagttacctttcattaacaaccaattttaaccgtgtgtcaagatttggttaagtcttgcctgacagaactcaaagacacgtctatcagcttattccttctctactggaatattggtatagtcaattcttatttgaatatttattctattaaactgagtttaacaatggcaaaatacagtatgtcacagtcatgcacattcaagagagaaaatataacaagttcttttatgagcaatcccttatgcatagactaccttggcaaaagagcattagcaagtgtcactgctcatcagttacttccttccatttatatcacaaatacccaagtttcaattctaacttcatttcatggtatttcttcctcctcaatgcccaaggaaatgtgggactaaagcccagaaatttgaaaagaatattcagaaatccttcccaaatcataagggcacctattgagattcaagacaagcagactcgtaaaatcttgtagaggcagaggcaaagttatcatcatacaaaaatcacaaacaaaaaggagatctgtattcgggtatcaaacggttgatctgttttcagtgcacaccctcaaatgcaccacaccagttttacgatctaagcttttaacccctttaccactttgcttatttttaaaaaatttattggcaaaactggggattttgtttgtaactttggttatctatatttaaacattagatgagacatatttttgataacaagaacttagctagttgagtcctggctttttgttgattattaagctgtgttcactctagaaggtgtaaaggccctgtcccaatctctgctctctcacttctcgtgacatttgttgataatctttactgcaagtgtaatgatatttgagtgaattaaaatgcatgacagacaaggtacaacatggttgcagaataaaagggtgaggacatcagatcactctgtattcaaagcttactagacgaacaatctttcatttctggatatattgtagctaacccaacacatttttaaactatttttgttactgactcacttacttgtcaaaataattggtttttctgtcctgctttgccttttgtcactagaatgttctccagaaaccccagtttctgtcatcttaactgtctagtctagccgttaacttagacaaagaagtgcaaatgtcaatttcactaaacaaaagctattagaagtaaagcagaaacctatcactgcaaggagtgacttgtaaataactgatgatcaagggctgtcttctctcaagcatggttccaactctgtgtcactttttagcgttaatggcagttgtgtgtctgtggcagtgagataatggaccactattaaacctgattctcttcggtgctaggaaagagtgatgtgtgagattcccagagagtcgtcacaccagtgttatgcctgggagtgccactggcataccgcaggtgcctaaatcccaggcccctttctcagggggcgtggccacaccacacactgcgccagtgacacatagttacttcctggctgggacggcacctatagaaactagggtacaaatctcccaaagatggtttggcaccgtcatttcaaatgtttgcacaatataccacctagaggcctaaaatcagggtggttcagttcaaaaggtaatatcaaccgtcagcaaacatgtcagtttaaaaataagttcggttaacaaggaagtgttaagcagattttttgaatacacttacaatatactggcttataatcatttttattctgcccatatggtttatttcatatacactcacttttacactcacttccaattatagcattcaataagttacggttaaagaaaagtgaatggtgtttttgtaatttgttttctagtagctagcagagagcctggcacatagtatgtattcaaaacaagtgtgttaattaataaaaatatataaatctcatttgagatttaagaatat

SEQ ID NO: 348272 - DNA, 2469 bp, Homo Sapiens
  misc_feature (67)..(123): n is a, c, g, or t
aacgcgacggggggtgcgccctgcattctcagggaaaaggttaggtgtggcgccagggcggcaaatnnnnnnnnnnnnnnnnnnnnnnnnnnnnnnnnnnnnnnnnnnnnnnnnnnnnnnnnngcacgatggttgcggaataggcgggttgcaggggttaatgggcggctgtttgcgcgggtctgcctcctcggtgagagacgcggggcaaataatggtggagccgctctgtgggtacaggagggggaggagaggcccctgacccaacggttaggattgaggggggcataaattttgacaatgggataaaccccgtggatagccattcttgtgatttgggggagggttttccttgcaacggggggttgcaagccccctatccttggttccctgcctggcttgaaggaagagcccggccccccggcccacattaaccgtcgttagtttcagccccccaccaggttctgggccacgccaggtgtataagccttgccttttgtggtgtcaccctgcggcagctgccagggtcccctcggggtacacccggtacctcctgcctgcatgggcaggtgtcagtcgaagcccagctggagtgacccaggtagatctcgggttcgggttcggccagtgcccggcaatgcagcaccatgctctctccactggctacctggaggcttggggggaagcttcgtggggagatgaggggcaaacagtggtccgtcatctcccggaagggcacctcacggaccgggaggcgctggaggtccggaggctccgcacacagggtggattgcggctcgatgaagcggacacgggtgcccgtggcattggcccagcggatgacacagtcacagcggatggggttgccgtggagacctacctcctgcaggttgggcagggactccaccgtctgctggtgcaaggcactgagagcgttgttgttgagcatgagggtctccatctggggcaggtggtggaaggcgcgggggtggatgaaggacagccgtgggttattggtgatgtccagcttggtcagctcggggaggttcaccagggcaaacttgtcgatggagaccagctcctccatgttgttcagtcccagctccttaaggtgcagcatgttggcaaagtcccccggccctacccgctggagcgggttcttgttgaggtctaggaacttgagcccgggcacctgttccagtgcccgcctgggcacccgggccagctggttgtcatagaaggagaggctctccaggctttgcagcccctccagggcatagtcggagatctcccgcaggttcatgcctgctagcaccaggctacgcaggttggccaggggccggaagttcatgtccaggatggcatcttaccttgttgccgccaatcatgagtatctccaagttgggcagcatttcaaaccagcggctgtcaatggccctcaggaggttggagttgaggtgcagccgcagcaagttgctgaggccagaaaaggccctgggggtcgatgcggtagagctggttgtggttgagatagagttcctgtaggctggccagccctgcaaagctgtggtcctccagccgggtcagctggttctcctctaggtgcaggctcagcagctggggcagggcatggaaatcacagtctcgggcatccgaaaagctgttctgggacaggtccagctctgtgagattggccaggtagcccagctcactctggtccacacggacaatgctgttgctctgcaggagcagggtctgtgtgcctgcggggagtgccggggggactgccgtcaggaataggtcattgcagtccacagtggtagcctcgcggtaggacgagcggggcgtataccagggccggatctggcaggcacactgaggggggcagggaacatgccagggtaccacgggcacagcggcagtggcaccagccacccaagctagcaagagtggggccacgagaagcctcatggtggagctgcagggcaggggaccattcacaagaagagtctggagtcctgctctttgtgttttgcagggtaagggtcagcaaccctgccagggcccaaggaaccaccctcccagggcagtcattctacaccgggcgtcacttcttgccctcctcaatatgccttctcttccttgtcctctggggctgggcctgctcagtcattgccaggccccatcaggggcagcccccgtgggcgccgggcaccgtctgccgtctgctgcccgcgcgccgcgctccgctcgccttccgcccggggccgggctggggacgctggtccgcgccctcccgccgcgcgcgccgtctgcacagccgggagctcgcggccccctccgctctgacgattgagctcgccgattgctgatccatacttcgtatatgtatgaaatacgagtatcgccgccacccgccgataacgccgtccaaggtttcgccctattatcgaggttcatagtagttct

SEQ ID NO: 348273 - DNA, 1276 bp, Homo Sapiens
  misc_feature (39)..(39): n is a, c, g, or t
  misc_feature (41)..(41): n is a, c, g, or t
  misc_feature (46)..(46): n is a, c, g, or t
  misc_feature (48)..(50): n is a, c, g, or t
  misc_feature (143)..(143): n is a, c, g, or t
  misc_feature (146)..(187): n is a, c, g, or t
  misc_feature (1232)..(1232): n is a, c, g, or t
  misc_feature (1244)..(1244): n is a, c, g, or t
  misc_feature (1250)..(1250): n is a, c, g, or t
  misc_feature (1258)..(1258): n is a, c, g, or t
cttctctgaatttgtgtagcgcacaacgaatggtgatgntntgctncnnnggctgcagtgcaccctttttaaagggaccctgcaatctcattgtttaatttgactctttagtgcttcagtcacatcagcacttccagaggggntgnnnnnnnnnnnnnnnnnnnnnnnnnnnnnnnnnnnnnnnnnngtccttctccccacccccatccctcaattcaggcagtttggggtgggaaaaacttgagcactggttccgacagagctcatctcatataagaaggtttggaagagctgcagtgatcgacagcatcgaccgttctgtaactccttaaatttaagagctgcagggcttcctgaagaatgagaaggacaatgccctgctgtctgccatcgaagagtcccggaagaggaccttcggcatggctgaggagtaccatcgggagtcaatgttggttgagtgggagcaagtgaaacagcgaattctgcacacactgctggcatcaggagaagacgcccttgactttactcaagaaagcgagccaagctacatcagtgatgtgggaccccctggtcgaagctctctggataacatcgagatggcctatgcgcggcaaatttatatctataatgagaaaattgtaaatggacacctgcagcctaacctggtggacctttgtgcttccgtcgcagagctggatgataagagcatttccgacatgtggaccatggtaaaacaaatgacagacgtgttgttgacaccggcaacggatgccctgaagaaccgcagcagcgtggaagtgcgcatggagtttgtcaggcaggccttggcgtaccttgagcagagttataagaattacacccttgtgactgtctttggaaatttgcatcaggcccagctgggcggggtgcctgggacttaccaattggttcgaagtttcctgaacattaaactgccagctcccttgcctggactacaggatggagaggtggaaggccatcctgtgtgggcgctaatttactactgcatgcgctgtggagacctgcttgccgcttcacaggtagttaatcgagcccagcaccagctggaagaggtttaaaacctggttccaggagtacatgaacagcaaggacaagaagattgtccccagctacggaaaacaagctccggcttgcatttaccgtaagggcccctcagggaccaattccaggattcccttaccaagccggggccngtgttacttggnatcaanttgggcanaatttttgacggttaacc

SEQ ID NO: 348274 - DNA, 578 bp, Homo Sapiens
  misc_feature (516)..(516): n is a, c, g, or t
  misc_feature (534)..(534): n is a, c, g, or t
  misc_feature (547)..(547): n is a, c, g, or t
  misc_feature (555)..(555): n is a, c, g, or t
  misc_feature (560)..(560): n is a, c, g, or t
cggccgcgtcctcaagccggcacctgagcggcggagaggcttgtagcacaaggatctgcatctccaatggatactgaggggtttggtgagctccttcagcaagctgaacagcttgctgcttgagactgagggcatctcagagcttccccatgtggaacggaacttacaggagatccagcaggcgggagagcgcctggtgtcccgtaccctaacacgcacgtcccaggagacggcagatgtcaaggcgtcagttctcctcgggtctcggggacttgacatatcccacatctcccagcgattggagagtctgagtgcagccaccacctttgagcctcttgagcctgtgaaggacactgacattcagggcttcctgaagaatgagaaggacaatgccctgctgtctgccatcgaagagtcccggaagaggaccttcggcatggctgaggagtaccatcgggagtcaatgttggttgagtgggagcaagtgaaaaagcgaattctcacacactgttgcanaggagaagacgccttgantttctcaagaaancgagcaantacanagttatgtggacccctgg

SEQ ID NO: 348275 - DNA, 1750 bp, Homo Sapiens
ggcggggtgaaccgtgacagcgcttcggcccgcactaaggccggctcttgtgccggaaggaggaaggcgtggggcattcgcccctcggagctagggagtgtgtgcgacgccgctgcgaggtcacgtgagccactgccggcagagagggaacaggggcggggcccagaacgaagcggggagtgcgccccttgtttccctggggtcacgcgcagccggacagtggcggcttgctgcggagaattggagatggggaccgccctggacatcaagattaaaagagcgaataaagtttatcacgccggggaagtgctctctggcgtggtggtcatatcgagtaaggattcagtccaacaccagggagtgtctttgaccatggaaggaactgtaaacctccagctcagtgccaaaagtgtgggtgtgtttgaagctttttataattctgttaagcctatccagattatcaacagcaccatagaaatggtgaagccggggaaatttcccagcggcaaaacagaaatcccttttgaatttcctctgcacttgaagggtaacaaagttctgtatgagacgtatcatggcgtgtttgtcaacattcagtatacactgcgctgtgacatgaagcggtctctgttggccaaggacttgacaaagacctgtgaatttatcgttcactccgctcctcagaaggggaagtttactcccagtcccgtggacttcacgattacacctgaaaccttacagaacgtcaaagagagagctttgcttcccaaatttctccttcgaggacatctcaactcaacaaactgtgtcatcacgcagccactaacgggagagctggtggtggagagctcggaagccgccatcagaagcgtggagctgcagctggtgcgcgtggagacgtgcgggtgtgcagaaggctatgcccgcgacgccacggagattcagaacattcagatcgccgacggggatgtgtgcaggggcctctctgtccccatctacatggtcttccctaggctgttcacctgccctacactggagaccaccaacttcaaagtggaatttgaggttaacatcgtggtgctgcttcaccctgaccacctcatcacggagaacttcccgctgaagctctgcaggatatagcccggaggagggaagcatagagaacgggagtggccatctggaaatccagctggttatccaaatcctaaggggagctacagccagcggcatatacttgtttttgtgattattctgtatcagaaatgaaacagaccctcaaattaactttccttcctcatttcttgaggcttctgcttccaacaggcacctctaatcagaccttttctttgaaattcaacaagatttcttaatgctatttgccaagaccatttcacagaaaacattgactgtggctcttgccttatctgttcctttttaggtacagtaaaacaattgtgacagcagtttgagcttgctggagagtggcatcatggggacaaaaggaaacctctgacttgctaatggatgtagccagggactccccatagcaaagggtctgtggccagttgacatccaggatggctgcaagcgcacttgatggtcaggaagtttgcagatactcgccaaggcagagcgcaaagtgctagccactggaaatgcatgacttccctccacccctactctattctgtagttttttggttttgtttctgagacggagtctcagtctgtcacccaggctggagtgatct

SEQ ID NO: 348276 - DNA, 1153 bp, Homo Sapiens
  misc_feature (589)..(618): n is a, c, g, or t
ggccatggcggcagggttaggggcaggtgaggagtgggagtcgcagcaccctaggggcctccatccgcagccttgggagactgacgctcctcgaacatgaatagaatgtggagaccacaacccccacacatgtcgttggttcaggtcgccctgctttgcctgcctaatggagcacatcttgctgccagaacctcactggcctctgggggtcggcaggtgcagagccacctggacgcctggagaccacctgggatgtttcctctgtgactgggaatggccttgacaacagagtccagccaagtctacgttattttctcatctcctgacaacactggatgtcatatttattagtcagcctggtctggagtgaaagaccgtccctagcgcatctcccacgcgccctgggctcctggtgtgctgggtgccagcctgggagcccagcgcttctgggtgatgccccagggctcagaggccctggatggctttggtctcgagacagctgggggaggggccctgcttctgattgtcctgggccccagcccccacctctgcaagggatcggtgtgatgtgctccataatcgggtgggnnnnnnnnnnnnnnnnnnnnnnnnnnnnnnatgtatgcatgcgtctggcacatggcaaggcccaagccaacccggcaccccgtagatgggcagctacactgccacccaagcacggagatgtggccgcggcactgggtcccccagtgggtcccatgggggaagaacttccctttgctggggtgggcagcctgccctgagctatcaacactggatttgttgtcttctgcacagctactgtgaagataacgtaaggagaagtggtcagttttcattttataactgacacagttgggacaaaatatatacgtgtacatatatttaagacactaattgtgtgggagagtttagtaaaggcctgtgcagacacaaggcaaacagcgtcagcagcgtgggggtctcctgggccagctcggcacctgtgggtgctctgaccctgggggtggggacagctccgtgctaaccccagcagacagttgttggtgcacagtgtctaggaggcgtgggaatgggtgctgtcttcctcttttcacatcatggcgacagtaataaagcccacctccagtgg

SEQ ID NO: 348277 - DNA, 210 bp, Homo Sapiens
aaggaatataaagctggagactgtggagggtgagaggcagtggggactagctgttgaaagagagaatgtagcagtagtaaagatgaaagactgcaaggattcaaacaaggttatggcaatagaggtgaaaagaaaaggccatataaagattatgagttaagttaacatgggaggtaagggagatggaggggttaaggacagcctcaagtg

SEQ ID NO: 348278 - DNA, 418 bp, Homo Sapiens
ccttatagatgcacaatgatttgtactgtctaataaaaacagtgtatactttgtatgtgtcgtgcattcagtggtcttcatcctgacacagtggttcgagatcaagttgtacaggctgtgcattttaagatactagtttcagtctttcaaagccagccaggctacacacagaaaatgtttactcaatcattcaaaaaagagaaaaggagagaaagtaactttgtttggtaaagcaccagtactccaaccttccagaaagccgattatcttcattgcttttaatgttctattctgtggcatatggttttctgttactttcgttgtcaaaatgccatacccaaatacacagcaatgaatggcacacaagtaatccacataatgcataagccacaccaaaaccagactcaatttaaatctg

SEQ ID NO: 348279 - DNA, 509 bp, Homo Sapiens
  misc_feature (101)..(117): n is a, c, g, or t
  misc_feature (248)..(248): n is a, c, g, or t
  misc_feature (354)..(466): n is a, c, g, or t
ggggtagaaaaacaggatcataaggtgtgatatgggccataaaaatattctactaacatgaggctgatgttcataggaaagaacaattatttccccctaannnnnnnnnnnnnnnnngttgcgggcacagaaaattggggaagaatttatgggggcagtgctatttgaacaagaccttgtaatgttcctgtttcatctctgatggtgtcttaattcttcaggactcaaaaatatgtttttctttctcnctggaatgaagttgctattctgtgctttctagtgtaaaataatttttaaaatatggataacatttcaactcatttaaaatttgtaggccaggtgcagtggctcatnnnnnnnnnnnnnnnnnnnnnnnnnnnnnnnnnnnnnnnnnnnnnnnnnnnnnnnnnnnnnnnnnnnnnnnnnnnnnnnnnnnnnnnnnnnnnnnnnnnnnnnnnnnnnnnnnttatctgggtgtggtagtgcatgcctgtcatctcagccactcg

SEQ ID NO: 348280 - DNA, 799 bp, Homo Sapiens
ctaagtgtctggaagagctacttgctcttccacccctcatctcaaatgagaggagcagaagtttaacttcctcaaatagcccagctctggctaaaacccaaagaagaaaggtcaaaggaagggaaagcatgtcaggggctggtttgtgacttggcaggaccaggaaacagcagccactgacagcccagagaaggtgactaagggctggcagaagattagaatgttaatttggctgctgtccggactaggaggccatgttcaatggcagtcagaatttgtgttctgcgcattgctgggtctataaatatgataagcaagtggtgacagaattatagtataaggtgatgtactacatgcagatcataaaggctttggttttaagacttaagtagaaaatccctctcctagcttattacccaacaatattcagataatgagcttttggagaatatctttttcctatcactagaaagatttacctgggaactgtctaaagtctacacacatatttccaaagcctttaaataccaactgcagcatggagagagaggggtggcagaagctgaaatgcctcaaaagccatttaagtgttacgttgcaggattttcagtccttctcgttatgtaaacagtagataacatatagacgttattctcaacactaccctatagtatcacagttggtccaaatgccagagcttacagataatgtcatcaccagtgcctagaaaactcgaactgtaatatatcgtagcattttcttgggtgttccttaaaggtttctttccaacatttaccag

SEQ ID NO: 348281 - DNA, 1826 bp, Homo Sapiens
  misc_feature (88)..(106): n is a, c, g, or t
  misc_feature (305)..(316): n is a, c, g, or t
  misc_feature (1568)..(1568): n is a, c, g, or t
  misc_feature (1570)..(1570): n is a, c, g, or t
  misc_feature (1630)..(1630): n is a, c, g, or t
  misc_feature (1649)..(1663): n is a, c, g, or t
  misc_feature (1687)..(1696): n is a, c, g, or t
aaaatctcaaccaaagttatgctcatccagacaagctgacctttgagttaatttcagcacaactcattcttcagtgcctcatgactgnnnnnnnnnnnnnnnnnnncgaaagcatcttcacaatgaagcttccagatagcaccgttttgctaaaagatacattctcattgttttccaacagtgatggcttccacataaggttaaacaaactaggtgcttgtaaataatttattacagtttactctatcgcatttctgtaacatgaaatgcatgcccttcttcaggggaagactgtggtcaagttnnnnnnnnnnnncaatattaaacaacatgaaactgcagtctgtttttgaaaatgagaatgtcctaagtgattcagaagagaggagggaagttgtgcactctgaaaatgcatgaaaaacaaaggcaaaaactagtgggaaatgtgtagaactgttaactgagacggcttcgagtcttccttctggaatctgttaaatttcacaaagtcatgagggtaaatggagaaaatatttctgggattacaatgaatgtaagcccaaattgtggaattgccagtaacctggatggggaaaagcatttcccatagcactccatgtaatatgagtgctctgtgagatgttcatcagtgttttatagaaatggtgttgctgggaaaccaagtttgcacctggaaacttacaatgcactttaacgcagtaagggcttggcatccggtaaatgaaaaactgtctaaaccaaaattgcccaaactatttagaaaccaagacctttttctcctttgggatacttatgaacctctcactaatgtcctgtggagaacattttgggaaacactatgttagatagttctttaaggagacaaaacggtaatgaacagatagcactggggcagaatatgcatgcattttgtaacgtccagtgtggcgttgaatagatgtgtatttcctcccctgcagaaaataagcacagaaaattataatgtaggtgatcggagctctttcctttgatagagagaacagccccaatgatcctggctttttcactgaacgtatcagaatacatggatgaattggggtaaataaggttttaattcagatctagaagaaagtattgtacgtttgaatgcagatttttatccacagatagttgtagtgtttagacatgacaggacctatcgttgaggtttctaagacttactatgggctgtaaacctgttttttaaaactattttagaaacctgagacttgccgtctggcattttagtttaatacaaactaatgattgcatttgaaagagattcttgaccttatttctaaacgtctagagctctgaaatgtcttgatggaaggtattaaactatttgcctgttgtacaaagaaatgttaagactcgtgaaaagaattactataaggtactgtgaaataactgcgattttgtgagcaaaacatacttggaaatgctgattgatttttatgcttgttagtgtattgcaagaaacacagaaaatgtagttttgttttaataaacccaaaaattgaacctcncncaacacgacacaacccccacccagacagatctcaccccccacaattcacgactccaattntttttaatgttgtggccgnnnnnnnnnnnnnnngaaaaaatctttccaaaaaaccannnnnnnnnnggccccccgcgggccccccgttaacggaaaatggacaacacgtggccccaaaaccctgtgtttccccatagagaaaaattccctgggctcaaagaaaacaaaggggccttggagaattttctcccccacc

SEQ ID NO: 348282 - DNA, 2357 bp, Homo Sapiens
  misc_feature (743)..(743): n is a, c, g, or t
  misc_feature (2141)..(2159): n is a, c, g, or t
gggttgaaggtgccgtcgcagggtcaggcctgccctgtcccgaagtgatctcctggaagacaagtgccttctccctccatggatctgtgatcttcccagctctgcatcaacacagcagcctgcagataacacttggggggacctcagcctctattcgcaactcataatccgtagactacaagatgaaatctcaataaattatttttgagtttattaaagattgacattttaagtacaacttttaaggactaattactgtgatggacacagaaatgtagctgtgttctggaactgaatcttacatggtatacttagtgctgctgggtaatttgttggtatattatctggttagtggttaatgcttcctttaaaaataattgagtcatccattcactctttttcagttttatctgtcaatagtagctacatttttaatgggagcaccttttatcccaaagtgctttataaattgagtggactgatatatatcacacccaggtatcactgtgctgtcctttgctgtcagatttagaaatgtttttaagagctatgtgaaaacagacaatattagtttaggtcggggaactgagatattgtaatcaaatagttaacatcaggaagttaatttgggctggcaaaattctagggaaacttggccagaaaactggtgttgaaggcttttgctcatataaacaagtgccattgagtttcaaatgaccagcaaatatatttagaacccttcnctgttttatgtctgtacctcgtccacccctcaggtaatacctgcctctcacaggtacagctgtttcttggaaaatcctccaaccaaatagcagttttcctaacttgattagcttgagctgacagactgttagaatacagttctctggccacagctgatgagggctttctgtactgcacacagattgtgtactgcaccccagtccaggtgactggtacccactcgagttgtgccgtgcacaacctgtccagtatatgcatgtggtggccctactgactggtaatggttagaggcatttatggatttttagctttgaggaaaaaccatgacttttaacaaatttttatgggttatatgcctaaacccttatgccacatagtggtaaataattatgaaaaatggtctgttcataattggtaggtgccttttgtgagcagggagcataattactgctttattatggtaattatggtgattttttaaatatcatgtaatgttaaaacgttttctaacagtttactgttgcttatctccaagatattatggaattaagaatttttccagatgagtgttacatagattctttgaatttagtataaaagtactgagaattaagtttgtacttccataagcttggattttaaacactgatagtatctcatgagtaatgtgtgttttgggagagggagggatgctgattgatatttcacattgtatgaaataccatgtttgaaactcatagcaataatgctatgctgttgtgatccctctcaagttctgcatttaaaatatattttttctttataggaattgatgtataccatgaagtcattgtcagttgtagtagctctgatgttgaatgagatatcatgttttagcattccattttactgactagggtagaagaacacttttcttggctacatttggaggatacccagggagtcttgggtgttccttatctggggaagcaaacatttcactagtctctttttttcatcctttaaattgtaaattaaggattactcaagctcaccattattcaagattgggactcgcttcccagtcgacactctgccctgcctgtcattgctgcaaagagctgctgctttgccaacctaagcaaagaaaatacggcttctcttgcattattttcccttttggttggtttgttttctagaagtacgttcagatgctttggggaatgcaatgtatgatttgctagctctctcaccacttaactcactgtgaggataaatatgcatgctttttgtaattaactggtgctttgaaaatcttttttaagggagaaaaatctcaaccaaagttatgctcatccagacaagctgacctttgagttaatttcagcacaactcattcttcagtgcctcatgactgnnnnnnnnnnnnnnnnnnncgaaagcatcttcacaatgaagcttccagatagcaccgttttgctaaaagatacattctcattgttttccaacagtgatggcttccacataaggttaaacaaactaggtgcttgtaaataatttattacagtttactctatcgcatttctgtaacatgaaatgcatgcccttcttcaggggaagactgtggtcaagtt

SEQ ID NO: 348283 - DNA, 562 bp, Homo Sapiens
cccttcctgatcgtttctgctgctgtgtttcagatgggtctgtgaagaaatcccggatctcaagctcgctatggagaattacgttttaattgactatgacaccaaaagcttcgagagcatgcagaggctctgcgacaagtactaccgtgccatcgacagcatccaccagctgtggaagggcaccacgcagcccatgaagctgaacacgcggccgtccactggactcctgcgccatatcctgtagcaggtctacaaccactcggtgaccgaccccgagaagctcaacaactacgagcccttctcccccgaggtgtacggggagacctccttcgacctggtggcccagatgattgatgagatcaagatgaccgacgacgacctgtttgtggacttggggagcggtgtgtgccaggtcgtgctccaggttgctgctgccaccaactgcaaacatcactatggcgtcgagaaagcagacatctcggccaagtatgcggagaccatggatcgcgagttcatgaagtggatgaaatggtatggaaaaaagcatgcagaatacacattg

SEQ ID NO: 348284 - DNA, 367 bp, Homo Sapiens
  misc_feature (344)..(344): n is a, c, g, or t
aagcccccaaatgggcgccgccggatacctcgtctgctccgagcccggctccagggggtcctcggtcggcaggcaactcgggtctttttgttaccccaaaacaatcggcgatgtgcagaatcgccgcacttttagttactctgtgtgtgtgtccccggcgtggatctggatgagtacccgggctgctaaggtgcggagctgcagcgccagggctcccgacgcgacccccaggccggcttccgaatcgcagacggggcggaggagcccgcggtagtttgtgcagtcttcggggagctcacggcggcgactcagtcccaacgcgttagaagccaaacaaaaagagnaaggaaacaagcacgggtctacc

SEQ ID NO: 348285 - DNA, 1362 bp, Homo Sapiens
  misc_feature (97)..(256): n is a, c, g, or t
  misc_feature (319)..(373): n is a, c, g, or t
  misc_feature (534)..(534): n is a, c, g, or t
  misc_feature (981)..(1003): n is a, c, g, or t
gatcttccgggcttcacgaattcggctcgaggaacaccatgctacatattgttacacctctgttaaacatgtattttaccccatatgctcatccatnnnnnnnnnnnnnnnnnnnnnnnnnnnnnnnnnnnnnnnnnnnnnnnnnnnnnnnnnnnnnnnnnnnnnnnnnnnnnnnnnnnnnnnnnnnnnnnnnnnnnnnnnnnnnnnnnnnnnnnnnnnnnnnnnnnnnnnnnnnnnnnnnnnnnnnnnnnnnnnngttgtctagataagtatctagacagattgatatagatatatacagagaatattaggtccatannnnnnnnnnnnnnnnnnnnnnnnnnnnnnnnnnnnnnnnnnnnnnnnnnnnnnncctaatacttttggatcacttgagaataatgtatatacgtcattgccctttagtcctaaatacttcaatgtgtatttcctaggaataagaatatccatttaaaagaatcatgttatacttcttatcttcagttcatttacttagtcactatttcttgaatngaaccaaactattagaacacccattatcctggtctgatctgacccactgctaacggaattacaggagtgaaaaattcaaagtttcatttgcatttcaggttttgtctttgagagtaccatagaatcaagttttgcaaatcagctttgaatttgactcaccatgggtttgtttgattcagttcaactgttctaaaaacctctttgtcaaagaacaatactaatgccaacagtggcaaacactaatctagccttccttgatatgtgtcagacagtgttttaagtactttgtatttaccaatgcatttaatccttacaacaaccttaaggaaaccataattatctcaattttatacattgggaaatgtaggcacagattttaaataacttgtgcatgaatacacagttgataaggggatctcccagatatctttttaaatttgttaatcnnnnnnnnnnnnnnnnnnnnnnnagccttcttacatttcataatgttttctttaaagacgatcccacactatttctagttattgattacttctcattgtgtcatgttcccctaggacagaagcattcattttcttgatgtgttttttcagctgaagaaaaggtgactggtctcatgagccctgaagaatgaactcagaggaggttgtttacatgaggttctcccactcaccagctgttgagagtctgcgattatgaagagcaggatcttattacttcaatgaaagcatgtaacaagtttctcaaaccaccaacagccaagtggatttggtacagtgcggctgtctaataaataatcaaaagcatttgatagacaacaaaaaa

SEQ ID NO: 348286 - DNA, 1025 bp, Homo Sapiens
gtgggggaaactttgcaagggctcgaggaagctgggacaagggccgaaacaggggaccggggccgatggcaggatatagcagcagagagcgggcaggcggggaacaagatgtagcaggaaaaggagggccaggacaccatgtgcagcagaagtcgcgtattcgttaccactaggtacggggcaaaagatcggtcattatcacagtagtcaaattccgcgaagatcctgatgtatattcacagtcagctcaaaggaaaggaaaatgctcgtgccacgatgtgtgctgaaatcttgcatttgttgcctttggtgtcttgaaaagtgcctaaattatttaaatcagaatgcatacacagccacagctatcaacagcaccaacttctgcacctcagcaaaggatgcctttgtcattctggtggagaatgctttgcgagtggctaccatcaacacagtaggagattttatgttattccttggcaaggtgctgatagtctgcagcacaggtttagctgggattatgctgctcaactaccagcaggactacacagtatgggtgctgcctctgatcatcgtctgcctctttgctttcctagtcgctcattgcttcctgtctatttatgaaatggtagtggatgtattattcttgtgttttgccattgatacaaaatacaatgatgggagccctggcagagaattctatatggataaagtgctgatggagtttgtggaaaacagtaggaaagcaatgaaagaagctggtaagggaggcgtcgctgattccagagagctaaagccgatgctgaagaaaaggtgactggtctcatgagccctgaagaatgaactcagaggaggttgtttacatgaggttctcccactcaccagctgttgagagtctgcgattatgaagagcaggatcttattacttcaatgaaagcatgtaacaagtttctcaaaccaccaacagccaagtggatttggtacagtgcggctgtctaataaataatcaaaagcatttgatagaaaaa

SEQ ID NO: 348287 - DNA, 795 bp, Homo Sapiens
  misc_feature (216)..(283): n is a, c, g, or t
ggtacaatgatgggagccctggcagagaattctatatggataaagtgctgatggagtttgtggaaaacagtaggaaagcaatgaaagaagctggtaagggaggcgtcgctgattccagagagctaaagccgatggcttcgggagcaagttctgcttgaacctagccgacggttatggaaacccattgacattccaaaacaatatatacacataacnnnnnnnnnnnnnnnnnnnnnnnnnnnnnnnnnnnnnnnnnnnnnnnnnnnnnnnnnnnnnnnnnnnncacacacacacataaatcagccaaaatcagagaaaaggaacagggatttaataccttttttatgcttatttttgtcaaacatgtactcctttcatacgggtggcttttacaaggcaacttccgtcatttaatgttttcaactgtaattgtcttaatggaaatgttaaaattcatatctgattaacatttttaataacttagaggagaatttaactttatttaaaaataggtaaaattattgtacctaattatgtctaaagtttattcaggggtaatttccctgatgtctgtataaaatcaagatcttatttttactgatgcataaatcctagcgggtccagactaggcatatgctttccgaataataaggaaatacctccaatcaggttttcccccaactcaaaaaagccatggcctttttacttttaagaaacataacaaattgggggcccacaaatggggaaaatatttcccattaaataagctctcacttcacctttgtgtcagctcca

SEQ ID NO: 348288 - DNA, 890 bp, Homo Sapiens
  misc_feature (756)..(764): n is a, c, g, or t
tctaaacacaatgttagtaaaacaaaatttatttgtaaaacaggacctgttatataaaatggcacacaatcaagttatacaaaaatacaaaatttctttctgattacagttctagttgcaaatgataattagaaagcattcctggtagcttccaaatagctgagattgcgagcatatggaacagggagcagcaacagtccatgatgcagggatgtccaagtgagtagaacctaatttccaagttcaggacttccatcaggtcactttggagggacacctcttaaaattgctagctcctggaatgtcttctgttttgatacccatcttctagacttttgccaattctaaatttagttcccaatgtttgtgaaagtccaaaatctgtgcggctatgaaacagatggtattctgaattttctcacatgatttgctctctcatctatttggacaattgttagttatataattatattcatttcaaatgaataaaagagaacagcgatactgtttggtgatactagatattagatgttaacttctggagaattattctttcaaaatagctactctcgcaatgttggtttcccagatcttgctaagacatgagctcttaattgtgtgtatgcacgtgttttttaaaatccagactcttattgcaaatattctgaaaaatcagaaatattacatgaacttttaaaagaaaccaaggcatttagcaaattttagcctagctagagtaaagaacaccaatacttnnnnnnnnntacaatttaccttttgcagcaatttaaaggtccaaccctttgaaaggaagcacattagcaaacggctgcttattaagccctagtgacattacttgtatgcatttccataataccgatctaattccc

SEQ ID NO: 348289 - DNA, 1191 bp, Homo Sapiens
  misc_feature (681)..(682): n is a, c, g, or t
  misc_feature (749)..(749): n is a, c, g, or t
  misc_feature (778)..(790): n is a, c, g, or t
  misc_feature (800)..(800): n is a, c, g, or t
  misc_feature (808)..(1053): n is a, c, g, or t
  misc_feature (1093)..(1093): n is a, c, g, or t
  misc_feature (1112)..(1112): n is a, c, g, or t
  misc_feature (1133)..(1133): n is a, c, g, or t
  misc_feature (1146)..(1146): n is a, c, g, or t
  misc_feature (1163)..(1163): n is a, c, g, or t
caccggcgaacctgcctgggcaggcagctcgcgcaggacggggcgggaccagacagttgcgcgcacagaaggctggcgtagcagagccagacccagggccctccagattaccccaggtttgtggagtctgtggatgaatatcagtttgtggagcgcctgttaccggctaccaggatcccagatcccccaaagcatgaacattatcctacccctagtggctggcagcctcccagagaccccccacccaacctgccttactttgtacgacgctctcggatgcacaacatccccgtctacaaggacatcacgcatggcaaccggcagatgactgtgatccggaaagtggaaggggacatctgggccctgcagaaagacgtggaagattttctgagcccgctgctggggaagacacctgtcacccaggtcaatgaggtgacaggtaccctacggatcaagggctactttgaccaggagcttaaagcctggctcttggagaaaggcttctgaggcccagccgagcagcctgcttgtcagcatgccctgtggatcaagtctagggggcctcaggaggagggaggtgggtgttggagcccctgagacaggggatacagaaactagggctaaaggactttggggtcaggccttgcttgcataaaggagaaaacaactctatgtacatgnnctgggggagagtgcctaatgtgggagacaaaatagggatcaccaggctaatggggggcgtcacagcntttctctccctcctatcttggcctgttcnnnnnnnnnnnnngagacggagntacatccnnnnnnnnnnnnnnnnnnnnnnnnnnnnnnnnnnnnnnnnnnnnnnnnnnnnnnnnnnnnnnnnnnnnnnnnnnnnnnnnnnnnnnnnnnnnnnnnnnnnnnnnnnnnnnnnnnnnnnnnnnnnnnnnnnnnnnnnnnnnnnnnnnnnnnnnnnnnnnnnnnnnnnnnnnnnnnnnnnnnnnnnnnnnnnnnnnnnnnnnnnnnnnnnnnnnnnnnnnnnnnnnnnnnnnnnnnnnnnnnnnnnnnatgagccatgtgcctgggtccaccttgggcctgtttttgntttttcttttccttggggnttcagcaatttcaaatttctnagttggttatttnggttggaagcagttagncccaacccccagttttaggggggaaagg

SEQ ID NO: 348290 - DNA, 1163 bp, Homo Sapiens
  misc_feature (910)..(923): n is a, c, g, or t
  misc_feature (1114)..(1114): n is a, c, g, or t
aggctggtacggtccggaagtttcgggatatcgtcgacccacgcgtgcggcaccggcgaacctgcctgggcaggcagctcgcgcaggacggggcgggaccagacagttgcgcgcacagaaggctggcgtagcaggtaaagatggcagctaccatgttccgggctacgctgcggggatggagaaccggtgtccagcggggctgcgggctacggctgttgagccagacccagggccctccagattaccccaggtttgtggagtctgtggatgaatatcagtttgtggagcgcctgttaccggctaccaggatcccagatcccccaaagcatgaacattatcctacccctagtggctggcagcctcccagagaccccccacccaacctgccttactttgtacgacgctctcggatgcacaacatccccgtctacaaggacatcacgcatggcaaccggcagatgactgtgatccggaaagtggaaggggacatctgggccctgcagaaagacgtggaagattttctgagcccgctgctggggaagacacctgtcacccaggtcaatgaggtgacaggtaccctacggatcaagggctactttgaccaggagcttaaagcctggctcttggagaaaggcttctgaggcccagccgagcagcctgcttgtcagcatgccctgtggatcaagtctagggggcctcaggaggagggaggtgggtgttggagcccctgagacaggggatacagaaactagggctaaaggactttggggtcaggccttgcttgcataaaggagaaaacaactctatgtacatgctgggggagagtgcctaatgtgggagaccaaatagggatcaccaggctaatggggggcgtcagcagctttctctccctcctatcttggcctgttcnnnnnnnnnnnnnngagacgggagtctcactctgttgccccaggttggaatgcagtggcaatgatctttggctcactgcaactttccaccctcttgggaatcaagggattcttcctgccttcaacccttcttgagtaagctggggaattacagggcggcccaaccacccacagcgcctggctaaattttttggaattttttaaanaaaaaagaatggggggttttctccccactggttgggccccaaggccttg

SEQ ID NO: 348291 - DNA, 445 bp, Homo Sapiens
cgcgcacagaaggctggcgtagcaggtaaagatggcagctaccatgttccgggctacgctgcggggatggagaaccggtgtccagcggggctgcgggctacggctgttgaccccccacccaacctgccttactttgtacgacgctctcggatgcacaacatccccgtctacaaggacatcacgcatggcaaccggcaaatgactgtgatccggaaagtggaaggggacatctgggccctgcagaaagacgtggaagattttctgagcccgctgctggggaagacacctgtcacccaggtcaatgaggtgacaggtaccctacggatcaagggctactttgaccaggagcttaaagcctggctcttggagaaaggcttctgaggcccagccgagcagcctgcttgtcagcatgccctgtggatcaagtctagggggcctcaggagg

SEQ ID NO: 348292 - DNA, 802 bp, Homo Sapiens
aaggtctagcttcataaatatttaaggtttactctgtactttcatccctttctatggggaagtaactctcttatttcatccttttatctttgttcagcacacacgtgctctttttattttctctatgtctcacagctctcagagattatcaatttgctccctacgctttaatccattctataagttccatccaactttttgttgcttgctatgacaaaatcgaataatcttaaataatgcagcaaacacacgttgcagcctgtttaagatattttaagagttctttttgatctaggagataaaacacaaagttttcagtacagcaggttcttgtaagcaggttcttaaaatctcctcctggctacatctttagactcatttcctacctctcataaaaatgccctccactaccctacgacacggaagtactcgacatttgctgaacttgcatgctctcttaatctctatacgtggcagtttttaaaatctcttgtctacctggagcactagttctgcacattcattaaaaagcataagctttgctttctctaacaagtattacttgaacaccactatcttcttaaccccaaactcagacccaaatgtgcatgtatatatgcacacacacactcccaatagcttctctctttccctgtgttccttaggtataatgcaaagaactcatagtagtattaaagcacttaaaacattgtattacatttttatatcactctctactccattagactgtaagtaactttgatccagggatcaaaatatatttctccttttatctccagcc

SEQ ID NO: 348293 - DNA, 2137 bp, Homo Sapiens
  misc_feature (1473)..(1515): n is a, c, g, or t
  misc_feature (1699)..(1699): n is a, c, g, or t
  misc_feature (1701)..(1736): n is a, c, g, or t
  misc_feature (1751)..(1797): n is a, c, g, or t
  misc_feature (1927)..(1993): n is a, c, g, or t
cccggggcgtcagtcgatattcccagggccgcttctcctgcagtctgtggagcgtccttgtccccgccgccggaatgaatgagcattctgcagcccgatgtccctgtcccctcctcgccgggccattctgattggacctggcccagtgcaatctgtccagacaagccctgcttgctggaaaactgccacaagcacaattgatctctttttatcgccattccaggggcctcaggtcctactggggaaacttcctataccggagctccagtttctcttaagctgcccaatttcacagagtacaaaatagttgtaggggaaatcaaggtgaaggatctgtccgacagtcaagacggatccacagtaatctttcggtctccttaaactaccaccctcgctgccacccaccccaagctgctgccgcctcaccttccttgaaatttctcagcgggagtctcctcactgccactaaaacccacccagcccactaactgaggagctagtgttaatccagagaaccccccgcaatgtgcttccgagattcagactgcttcattgggaagtatgatttgttcctttctggaattgggctccgtggtggcggcggcacttcaagcaaagacagtttcttgcaagctccagtagctccgcgtgtctcatttgccaggaagatgggttcccacgtagcaaatcgtacattgtgccctgtagctccttagctagttagctcacaagccgtgttttatgactaatccttaataactatggtaaataactgtgactgtggggtttttaatctcttgtcattctcatccaaaagtgaccagcataccagttcttgcaataagatattaccctcagaatattaagcacattattgtagagaacacaacatatgtgtacacatatgaacgcacaacatgcacattcatcctcacatgtggcacgtaaggtctcatttgatattgtgtaggaaatctgaagccttttcctgaggtcatctgtaaaatagtctcattgccaaggcatccccagtgccagctggtgaatccatgatcaaaatgcatacgtattgttaaatgataaggtttagaatgacaggaacccatcactgtgtctcatggtcccacttccccatctgtgtgtgaattcctttagactaagggcaggaagacttccagctttctctttgttcttcaatgtgaaactgagaccaagtctctctaagacaaatgcagtgtatttaatgtttgtaagcaattctaagtgagatgtttggcaagaaatcccctaactgatttccatccaaacctaccttatagagcacaatattaagtgttgtacaattactgtgagaactgtgaatatgtgtaacttttttttagtatttgcccggggggaaaaagatattgtattatcatatatgcttttttgcaataaggatttattctcagaacaccaagtaaatctatctcnnnnnnnnnnnnnnnnnnnnnnnnnnnnnnnnnnnnnnnnnnncagagcctgttttaaaaaatacagtattatttagtaaaattatctgttctatggaccaaatgtaaaatatttataaatgaagatgcattttaaatgtctataaatggtgtcataactagagcacgggcgttatgtaagtttctaagaatttagaggataaataataaaggttctatgatatacnannnnnnnnnnnnnnnnnnnnnnnnnnnnnnnnnnnnattcaattcatccgnnnnnnnnnnnnnnnnnnnnnnnnnnnnnnnnnnnnnnnnnnnnnnnaaattgtccctgtacaacttttctcctaacccgcctcccaatttaacgttcgatctttccccccccattctaccagatttcatacgtgtcaaccacctcccattggaccccccgtaccgcagttttcacnnnnnnnnnnnnnnnnnnnnnnnnnnnnnnnnnnnnnnnnnnnnnnnnnnnnnnnnnnnnnnnnnnntaattgtgaccccgttcccctcggtttaaccacgttttcttccactccttttgcgccgtctggatctcgtctaactccgcaaacacctcttctctttctcacgagcaccccacctcaaccgtatatacaccccctattgacttc

SEQ ID NO: 348294 - DNA, 603 bp, Homo Sapiens
  misc_feature (35)..(35): n is a, c, g, or t
  misc_feature (44)..(44): n is a, c, g, or t
  misc_feature (49)..(49): n is a, c, g, or t
  misc_feature (53)..(53): n is a, c, g, or t
  misc_feature (62)..(62): n is a, c, g, or t
  misc_feature (141)..(141): n is a, c, g, or t
cccacttccccatctgtgtgtggaattcctttagnactaagggncaggnaagnacttccagnctttctctttgttcttcaatgtgaaactgaggaccaagtctctctaaggacaaatgcagtgtatttaatgtttgtaagncaattctaagtgaggatgtttggccaaggaaatcccctaactgatttcccacccaaaccctaccttatagagccacaatattaagtgttgtacaattactgtgaggaactgtgaatatgtgtaacttttttttagtatttgccccggggggaaaaagatattgtattatcatatatgcttttttgcaataaggatttattctcagaacaccaagtaaatctatctctatataaaaaatatatgtaatatatacatattcaaagtatatacagagcctgttttaaaaaatacagtattatttagtaaaattatctgttctatggaccaaatgtaaaatatttataaatgaagatgcattttaaatgtctataaatggtgtcataactagagcacgggcgttatgtaagtttctaagaatttagaggataaataataaaggttctatgatatacaacaaaaaaa

SEQ ID NO: 348295 - DNA, 744 bp, Homo Sapiens
ctgtgagttaaggggctccatacatgtatctgtccagctcatttaggtacctgatatacactatgcagtaaatcaattaatttatcaaacaataaatctatagctttattacttatttaaaaataataaactttaaaaaaatatgtgtggaggtcagagaaaggagtcttcatgtgagctggaaaagtcagggaaggcttcattcactgagaaaggaggctctaagctagcaaagaatgaataggcgttagagaaggtgatggaaagaagaagcttctggaataagaaaaatgtcttattccctcacattcagaagtacctaaaacatgtcttaagcactatctgaaggaacaaaggctgtagatatacaacacgttaagtggccaagagtagatcaagctattatgtaaaaactaaagttggataggtaaggtggtaccagaaaatgcagagacccgtaagtcacatagatatatttagatctaatacagaaaagcaaaaactagtcactgtagatttttaaagcagtaataatatgaaaaaactttaaaaacataaaatacttcattaatttgcatgacgtcccgtacaagggcatcctatatgcatctttttctttttgctgacatggaacagctggctgtatttcatcactaagtacaaatcacaattattaactcactggtagggcagtgatgatcaaaccaatggcattcatccatgctgtaatgttctctctgggca

SEQ ID NO: 348296 - DNA, 1176 bp, Homo Sapiens
gtttggggagagtaacgggccaagggagaatccttttgttacaaaggaggaatatgtttgcggggcccagtggtgcagaaatagatgaaggcggcgagccaacaaagggggttccagtaagaaaaaagccaagtacagtggtgaaaggagggctttactgaggaggtggccctggaaagcccccgcaaacttggggtaagggggggccaaatgcggggttgcattgtttggaaaagttgccctgaaaccgaaggggccaaggcgtgggaggaagaaatcaattagggtccgttttgcaagtttgcgcgggcaggtggtgaagcgggaagtgttagggaccgcaatgggtcctcatgaaccgcaagttgaactggaattatctgggatggggcggatgcggatagccaagtagggtgaatattgcagaatatttccagaagatgaggttggaggttcccaggaaagggtggatgccttcagcattgtgggaaattgtgactgcagagggagctccaggaaaaccaggaatacaagttttaaattcgctgattttgctgaaaggacctatcccgcaaccattgattgcagcaaccctgaatctgtatcctgtgcctggaacaagatcttgtttcttaagcaagctgtagtcaggtacatctgcatttcctacctttgagatgctttgcttcccttttggcagcaaataaaactggctcaccaaagctgtattatttttaaaaattcccacatcacaccattgtcgttctaccgctttcactgtggccactggatttgaaggagtctctttagaaaacggcgttgctgtagcatgtgtctctacacggctgatcttcgttgcaggcagtgcatatgtttcatcaacttcagatttggtactgaatgttgttagtgaagtttcatctttaacaactgccccatttgtactggatgattcagttttaatggtctactgggttaccatagtttgtgtgctggaaacagtactggatacagatgtttcaggaattactgttcttacatccaggcaactacttagaacacctacatttgctgaagtgtgaggaccttcatttttccttagcatatccaccacatgactattatgattagaagcatttgatgccaaagatggatataaaatggcattagaatccg

SEQ ID NO: 348297 - DNA, 1110 bp, Homo Sapiens
  misc_feature (66)..(66): n is a, c, g, or t
caaatatcaatgatacaataaacagcacaaaaactgaacagccagccacaaaagaaacttcagagngaaaaacaaaccagactttaaagcactgacggattctaatgccattttatatccatctttggcatcaaatgcttctaatcataatagtcatgtggtggatatgctaaggaaaaatgaaggtcctcacacttcagcaaatgtaggtgttctaagtagttgcctggatgtaagaacagtaattcctgaaacatctgtatccagtactgtttccagcacacaaactatggtaacccagcagaccattaaaactgaatcatccagtacaaatggggcagttgttaaagatgaaacttcactaacaacattcagtaccaaatctgaagttgatgaaacatatgcactgcctgcaacgaagatcagccgtgtagagacacatgctacagcaacgccgttttctaaagagactccttcaaatccagtggccacagtgaaagcgggagaacgacaatggtgtgatgtgggaatttttaaaaataatacagctttggtgagccagttttatttgctgccaaaagggaagcaaagcatctcaaagaatgttgaaggtatccacctttcctgggaacctccaacctcaccttctggaaatatcttggaatattcagcctacttggctatccgcacagcacagatacaagataatccaagtcaacttgtgttcatgaggatttattgtggtcttaagacatcatgtatagtaactgctgggcaacttgcaaatgcacatattgattatacatccaggcctgccattgtgttcaggatatcagcaaagaatgaaaagggatatggaccagctacacaagttcggtggcttcaaggtaacaataagaaagcacctttaaattgaattggtttttttactgaagctattgtgatgatgattatttattagtaactggttatgaagatttgtcatttaaaagagtattctctggctgtatttccagcagttatgaacttgagtttgtaaattgttcttaaaatgtatttgctgaattatagatccaaataaaagaaaagaagcaaagactctctgtaaaa

SEQ ID NO: 348298 - DNA, 608 bp, Homo Sapiens
  misc_feature (63)..(171): n is a, c, g, or t
  misc_feature (228)..(274): n is a, c, g, or t
  misc_feature (280)..(288): n is a, c, g, or t
aaggtctctagattatctgttctttgaagtcaaagatcttctagactgggcacatggctcatnnnnnnnnnnnnnnnnnnnnnnnnnnnnnnnnnnnnnnnnnnnnnnnnnnnnnnnnnnnnnnnnnnnnnnnnnnnnnnnnnnnnnnnnnnnnnnnnnnnnnnnnnnnnnattagcccaaagaaaacccagctacttggaagtctgaggtaggacagcatgagcccnnnnnnnnnnnnnnnnnnnnnnnnnnnnnnnnnnnnnnnnnnnnnnnagattnnnnnnnnntatatatgtatcccctgaacctctggtctttgggtttgagccatttgcctcatggtgtgttgcttcttcactgcatgaattcccagtgggttaaaggaaccgcaatggctgttcacggtgctgaccttgctctcagtccacactgatttgtcttaccttctgacagagcaatgtgatttgacaagactcaataacaacttttagggggcaaaatattttttcagtctttggtgctggcccagaaggtggcccacaaaccaatgttaattctatgcattgtcaaatctttgctctttgaataaaactttgaataactgggc

SEQ ID NO: 348299 - DNA, 2044 bp, Homo Sapiens
  misc_feature (1772)..(1772): n is a, c, g, or t
gattggcggccagggccagtccgcccggcggctcgcgcacggctccgcggtcccttttgcctgtccagccggccgcctgtccctgctccctccctccgtgaggtgtccgggttcccttcgcccagctctcccacccctacccgaccccggcgcccgggctcccagagggaactgcacttcggcagagttgaatgaatgaagagagacgcggagaactcctaaggaggagattggacaggctggactccccattgcttttctaaaaatcttggaaactttgtccttcattgaattacgacactgtccacctttaatttcctcgaaaacgcctgtaactcggctgaagccatgccttgtgttcaggcgcagtatgggtcctcgcctcaaggagccagccccgcttctcagagctacagttaccactcttcgggagaatacagctccgatttcttaactccagagtttgtcaagtttagcatggacctcaccaacactgaaatcactgccaccacttctctccccagcttcagtacctttatggacaactacagcacaggctacgacgtcaagccaccttgcttgtaccaaatgcccctgtccggacagcagtcctccattaaggtagaagacattcagatgcacaactaccagcaacacagccacctgcccccccagtctgaggagatgatgccgcactccgggtcggtttactacaagccctcctcgcccccgacgcccaccaccccgggcttccaggtgcagcacagccccatgtgggacgacccgggatctctccacaacttccaccagaactacgtggccactacgcacatgatcgagcagaggaaaacgccagtctcccgcctctccctcttctcctttaagcaatcgccccctggcaccccggtgtctagttgccagatgcgcttcgacgggcccctgcacgtccccatgaacccggagcccgccggcagccaccacgtggtggacgggcagaccttcgctgtgcccaaccccattcgcaagcccgcgtccatgggcttcccgggcctgcagatcggccacgcgtctcagctgctcgacacgcaggtgccctcaccgcccgtcgcggggggctcccccctccaacaaggggctgtgcgctgtgtgtggggaaaacgcggcctgccaacactacggcgtgcgcacctgtgagggctgcaaaggcttctttaagcgcacagtgcaaaaaaatgcaaaatacgtgtgtttagcaaataaaaactgcccagtggacaagcgtcgccggaatcgctgtcagtactgccgatttcagaagtgcctggctgttgggatggtcaaagaagtggttcgcacagacagtttaaaaggccggagaggtcgtttgccctcgaaaccgaagagcccacaggagccctctcccccttcgcccccggtgagtctgatcagtgccctcgtcagggcccatgtcgactccaacccggctatgaccagcctggactattccaggttccaggcgaaccctgactatcaaatgagtggagatgacacccagcatatccagcaattctatgatctcctgactggctccatggagatcatccggggctgggcagagaagatccctgggcttcgcagacctgcccaaagccgaccaagacctgctttttgaatcagctttcttagaactgtttgtccttcgattagcatacaggttgcaatgcgttcgtggctttggggaatggattgattccattgttgaattctcctcncacttgcagaatatgaacatcgacatttctgccttctcctgcattgctgccctggctatggtcacagagagaaacggggctcaaaggaacccaagagagtgaaaaaaactgcaaaaacaagattgttaaattgtcctccaaagaccaacgtgaacttttcaaaaaatggggggggtttggaacccgcccccaaaatttattttggtccacaaacttggttgtgggggaaggcctccccccggaaaaatttccgataaccctttttttgccac

SEQ ID NO: 348300 - DNA, 1271 bp, Homo Sapiens
  misc_feature (221)..(259): n is a, c, g, or t
  misc_feature (473)..(499): n is a, c, g, or t
tttgcaaacacacttatcttttagaatttgtaatatttattcataaataggcacaaaataatttaaaaagccaaactgcattgggtaaatttacaagcctttgccttcttcaactcatgccacccacgcaacatttagttttactatatattacagctttctttacagcagaaaactttgaagtcttgttaaagggcaatacttgtgggtccccttaagannnnnnnnnnnnnnnnnnnnnnnnnnnnnnnnnnnnnnnggttacatttgtctgaactgcaacaaccaagcatggccaaacatttcccattataccttatagcaatctttcttctgaacaacaaactgatttttaaactgagaataaaaagtttataccactgtattgtgtgtagtccatgttctaaatccaggatgccccggagccaaaatgccctttcaggttctgcctgcaggttaggaaatagcaacannnnnnnnnnnnnnnnnnnnnnnnnnnagggatcaagggggctaggagggttacagaaatggggggcagcttgagctgagactgctcacacggctatctctgcccatgtgacttgccccctcttgacagtttccattatcattccagttcctttgaagtgcttgggaggaggtcttagaaaggtaaagtgtccaggaaaagtttgtcaattattgctggcggtggcaccaagtcttccaatttcaggtagaaaatgcgctgtagcccctgtgtgcaaagggtacgaagttctgggagcttccccaacagtttggacaaataattggggcggttcaaccccccattgttgaaagtcacgtggtctttgagacaatttacaatcttgttttgcagttcttccactctcttgggttccttgagcccgtgtctctctgtgaccatagccagggcagcaatgcaggagaaggcagaaatgtcgatgttcatattctgcaagttggaggagaattcaacaatggaatcaatccattccccaaagccacgaacgcattgcaacctgtgcaagaccaccccattgcaaaagatgagtttaccctccactgggttggacctgtatgctaatcgaaggacaaacagttctaagaaagctgattcaaaaagcaggtcttggtcggctttgggcaggtctgcgaagccagggatcttctctgcccagccccggatgatctccatggagccagtcaggagatcatagaattgctggatatgctgggtgtcatctccactcatttgatagtca

SEQ ID NO: 348301 - DNA, 533 bp, Homo Sapiens
  misc_feature (34)..(34): n is a, c, g, or t
  misc_feature (266)..(308): n is a, c, g, or t
taaccctcctagcccccttgatccctaaagaaancaaacaaacaaacaaaaactgtgcctaatccctaacctgcaggcagaacctgaaagggcattttggcctccggggcatcccggatttagaacatggactacacacaatacagtggtataaactttttaatcctcagtttaaaaatcagtttgttgttcagaagaaagattgctataatgtataatgggaaatgtttggccatgcttggttgttgcagttcagacaaatgtannnnnnnnnnnnnnnnnnnnnnnnnnnnnnnnnnnnnnnnnnntcttaaggggacccacaagtattgccctttaacaagacttcaaagttttctgctgtaaagaaagctgtaatatatagtaaaactaaatgttgcgtgggtggcatgagttgaagaaggcaaaggcttgtaaatttacccaatgcagtttggctttttaaattattttgtgcctatttatgaataaatattacaaattctaaaagataagtgtgtttgcaaaaaaaa

SEQ ID NO: 348302 - DNA, 660 bp, Homo Sapiens
ggaaatggaagcccctgcaaggtgtggggaacctggcagcacctaatgctgccacatccagtgctgtggaagttaaggtgttgaccactgtgcctgaaatgaaaccacaaggcttgagaatagaaattaaaagcaaaaataaagttcggcctgggtctctctttgatgaagtaagaaagacagcacgcttaaaccgtagaccaagaaatcaggagagttcaagtgatgagcagacgcctagtcgggatgatgatagccagtccaggagtccaagtagatctcgaagtaaatctgaaaccaaatcaagacacagaacaaggtctgtctcctatagtcactcaagaagtcgatcgagaagttccacatcatcttatcgatcaagaagctactctagaagtcggagcagaggatggtacagcagaggccgaaccagaagccggagcagttcctaccggagttacaaaagtcacaggacgtccagcaggagcagatccaggagcagctcatatgatccccacagtcgatccagcaggtcctacacctacgatagctactatagcaggagtcggagtcgaagtagaagccagagaagtgacagttaccaccgaggcagaagttataatcggcggtccgatgtattgcatatcatcctcacaaatg

SEQ ID NO: 348303 - DNA, 2015 bp, Homo Sapiens
agcggggtgctgggatcccgggagggagcggagcggacctgggcttggtcgcctccaagccggcggtgaccgagatgctttaggccgactcgacaagaaagttgctccgacccgggaaaaggagaagatgaaggaagccaaggatgcccgctataccaatgggcacctcttcaccaccatttcagtttcaggcatgaccatgtgctatgcctgtaacaagagcatcacagccaaggaagccctcatctgcccaacctgcaatgtgactatccacaaccgctgtaaagacaccctcgccaactgtaccaaggtcaagcagaagcaacagaaagcggccctgctgaagaacaacaccgccttgcagtccgtttctcttcgaagtaagacaaccatccgggagcggccaagctcggccatctacccctccgacagcttccggcagtccctcctgggctcccgccgtggccgctcctccttgtctttagccaagagtgtttctaccaccaacattgctggacatttcaatgatgagtctcccctggggctgcgccggatcctctcacagtccacagactccctcaacatgcggaaccgaaccctatccgtggaatccctcattgacgaagcagaggtaatctacagtgagctgatgagtgactttgagatggatgagaaggactttgcagctgactcttggagtcttgctgtggacagcagcttcctgcagcagcactaaaaaggaggtgatgaagcagcaagatgtcatctatgagctaatccagacagagctgcaccatgtgaggacactgaacgatcatgacccgcctcttccgcacggggatgctggaagagctacactctggagccaggagtggtccagggccctgttcccctgcgtggacgagctcagtgacatccatacacgcttcctcagccagctattagaacgccgacgccaggccctgtgccctggcagcacccggaactttgtcatccatcgcttgggtgatctgctcatcagccagttctcaggtcctagtgcggagcagatgtgtaagacctactcggagttctgcagccgccacagcaaggccttaaagctctataaggagctgtacgcccgagacaaacgcttccagcaattcatccggaaagtgacccgccccgccgtgctcaagcggcacggggtacaggagtgcatcctgctggtgactcagcgcatcaccaagtacccgttactcatcagccgcatcctgcagcattcccacgggatcgaggaggagcgccaggacctgaccacagcactggggctagtgaaggagctgctgtccaatgtggacgagggtatttatcagctggagaaaggggcccgtctgcaggagatctacaaccgcatggaccctcgggcccaaaccccagtgcctggcaagggcccctttggccgagaggaacttctgaggcgcaaactcatccacgatggctgcctgctctggaagacagcgacggggcgcttcaaagatgtgctagtgctgctgatgacagatgtactggtgtttctccaggaaaaggaccagaagtacatctttcctaccctggacaagccttcagtggtatcgctgcagaatctaatcgtacgagacattgccaaccaggagaaagggatgtttctgatcagcgcagccccacctgagatgtacgaggtgcacacagcatcccgggatgaccggagcacctggatccgggtcattcagcagagcgtgcgcacatgcccatccagggaggacttccccctgattgagacagaggatgaggcttacctgcggcgaattaagatggagttgcagcagaaggaccgggcactggtggagctgctgcgagagaaggtcgggctgtttgctgagatgacccatttccaggccgaagaggatggtggcagtgggatggccctgcccaccctgcccaggggccttttccgctctgagtcccttgagtcccctcgtggcgagcggctgctg

SEQ ID NO: 348304 - DNA, 2129 bp, Homo Sapiens
ttatcagtccaataggaaacagcactattcattctctgggagctgccccagccctattctgggccacagtctagaactttcttttccagctcacaacctgcatgtagctcaggtccctggagaccccagcccagctgagggagagcagtttcctgattcgtgtgacaagcaactcccttcccaccactccccactccctcccaagtacagacaaccttccgtcctgctccagttgaaggggtgacaacgattcctgaagcattctgtctgagtctaatggtggctctagccagacacagggaaatgtggctggctggctgttgggtgatccagttccttgggagccaatgtttgtacccctggtattagctgtttttcccactaaaataagcactgagaggcaagaccgtgtccctctgagctatttgccgaagacttcaggctggaggaaaaagaacagggcttgatagaagtgcaaggtggatccagcaccaactctgccattttctaatcctaggtcctgagtgaacactgactgccagtttacatctcaggtgtgtagggagcgtggaggaggcaaatcctgtttggagaaagccagtgtccaacacagcacttggtaaacatcaggcatgggaatgctgagtgacaggcaccatgggccacgcttgagccccactcgctcatctggctggggtcattcagagggaggcccaaccccaggatctcctgtccattgggctggggagcagcaacagtcaggagccgagggcccagcccacctcccctaggaggtggagggaagggggctgagtggttgtcaggcgtggtcctccccatctgcgacgtggcggtagccaggaggctgggcctgcatccggaagaggacggtgaggagcagcactatgaggaggaagaggatggagccacatacagccaaggccacaatcacctctgtgtctgcaggaccggcttgccagctggccactcctgctgccaatccttggggcacgacgggctctgtgaggcgaaggaagtcctgccagtgggcagcggtgagggcagccaggcaggctgagcggccagggggccttgtcactctcgttccgaaagtacatctccactgagaaattcccagaatcttcctggtacagttcaaatatgtggcaggaggcgtagggggcttgttcaccattgtagacatccagtgccatttgcagggcaaccagggtagtgtcgtgcgcagagtaaaccagcagcttggggagctgggaggtggtcgccattagggtcaggttcttccttatctgagccagcaggactcccccctgaagccgggccttctccgcctgctggtagattccgaagaggaagcggaagctgaagtcctttagccggctgagacgctgcatggtttggggtgaggcccagggcggcaggcgcagcccgtgcgtttgctcacagaagagtgtgtcatagacattccagacggtctccagtgtcaggtctgtaagccctgtctcgttggccaccatgtccagaaattgtgcattccgagaactctcattctgatactctggtgtctgccgggtctcgttctgcagctgctcataacggggacatgggcccaacgggaacttcagcagcctgtcctcagtgatgggcacagtgtgcacaggaataggctgccacgagatgttcgggttgaagcgctgcatcccgttgggagggaagagtccagccaggttggcctcagcactcatgagagtccggtcaaagtctgtgcttcgcacataaacctcttgccggtgataagaggtgtttaggaagccgtgatagcgctgccgcagggcctggcccagttcccagtgctgtagcatcccctccttggttaactgaccaaacccctggggccattcttcttcctgataggggtccttgggatatgtcttcactggtgaacggtctccatggcggtacagcaaggtaacgaagcgcagactccgggcccgggtgggcggcatcaccaccaggttcacgccgagaaggagctggaggagagccgcccggctccagccggaccgcttgcccgccatcaccgttatcccgggaattccggaccggtccag

SEQ ID NO: 348305 - DNA, 1146 bp, Homo Sapiens
ggcacaccgggttagagggcccaccccacgcccaggtttaaacgcgcccccggggggccctttgtccattttgggttcccggaaaggttctttttcccctgggaggaaattccccagaaatcttcccggggtaccattccaaaatattggccaaggagggcgtaggggggttttttccccccttgtgaggacctcccagtgcccattttccagggccaaccaggggttatgttcgtgccccagagtaaaccccgccaccctgggggagctggggagggtggtcccccattaggggtccagggttccttccttatccggagccaggcagggactccccccctgaaagccggggcctttctcccgccttgctggttagattcccgaagaggaagccggaaagctgaagtccctttagccgggctgagaccgctgcatggtttggggtgaggcccaggggcgccaggcgcagccccgtgcgtttgctcacagaagagtgtgtcatagacattccagacggtctccagtgtcaggtctgtaagccctgtctcgttggccaccatgtccagaaattgtgcattccgagaactctcattctgatactctggtgtctgccgggtctcgttctgcagctgctcataacggggacatgggcccaacgggaacttcagcagcctgtcctcagtgatgggcacagtgtgcacaggaataggctgccacgagatgttcgggttgaagcgctgcatcccgttgggagggaagagtccagccaggttggcctcagcactcatgagagtccggtcaaagtctgtgcttcgcacataaacctcttgccggtgataagaggtgtttaggaagccgtgatagcgctgccgcagggcctggcccagttcccagtgctgtagcatcccctccttggttaactgaccaaacccctggggccattcttcttcctgataggggtccttgggatatgtcttcactggtgaacggtctccatggcggtacagcaaggtaacgaagcgcagactccgggcctgggtgggcggcatcaccaccaggttcacgccgagaaggagctggaggagagccgcccggctccagccggaccgcttgcccgccatcaccgatcccgggaattccggaccc

SEQ ID NO: 348306 - DNA, 1032 bp, Homo Sapiens
  misc_feature (65)..(65): n is a, c, g, or t
  misc_feature (581)..(581): n is a, c, g, or t
  misc_feature (597)..(623): n is a, c, g, or t
  misc_feature (946)..(946): n is a, c, g, or t
  misc_feature (948)..(948): n is a, c, g, or t
  misc_feature (953)..(953): n is a, c, g, or t
  misc_feature (982)..(982): n is a, c, g, or t
caattgtctatctgggaaatgtcaaaagattaagtaagggcaaaagaagagagaaaaggaaagancacacatctctgtccaagaaatattcctctattaatggaggtatatcagtagcacataaatccagtgctaaataaataataagtacatttttaaaatcttcaagcaaaatcactaatgaaccataatgcttaaacttccttggtggaaagcagatgaccctctgaagctctgataactaaatgattccttatccaactatcatttggtaacctacccctacatattaagcaatttaaaaagcaaatttaagttgaggaaataattagatatttgaaccaatcatgaatggatccagcatttttgaaaaagaacacatatagtttaattgatactttgccaatacaaaaataagcatccacagaatgtttatttactgtttaaattactccatattttcatatactgtgaacagaaaatatattttaccccacatatagtaaaagcaaacaagtgcaatctttcaaacattaaaatcataatcaaatctgtacaacagataaataaatgtatacctntaacagttagcttgtnnnnnnnnnnnnnnnnnnnnnnnnnnncatctatggcccaaattcaccagtttacttaaaattctacttatggtaatacagctcaatcataacaacttgcatgtttactacactgcacaagtttagactgataaatatttaaaataggaggtgggtaataggaaataccaaatggctataaagagctttccaaatattggaaataatatacgaaaattaattagtggggataacatattaaatggatccacagggtaactggtattacactggtatagcttgaggaaaggaaacaggtgaaccgtttggattggaaaaaaatttggcttttttataaaacggagcaccantnacctnaaccatggccaaaccctgcatggagcctnaaaacttttctttgaaacaaaagggtccaaggatttaagcttgcataccg

SEQ ID NO: 348307 - DNA, 551 bp, Homo Sapiens
aaatgttgatgaattagactccataaatttaaaacttttgctttgtgaaagaccctgtaacgatactgaaaaggtttacctaggagaaaatatttacaagccatatatctggcatacaaccagtatctagaatatgtaaataactcaaaaatcaattatttttaaaaatccaattagaaaatagtcagaagacataaacagacacttcactgaagatatgcagatggcaaataaccatatgaaaacctttaaatgtcatttagccattaagagaaatgggaatacgaaggctttcgttgttcttcgcctcccactagggcgggttgagggtctggctccagtagccccgggtgcctctcactccttgggcgcaatgctactatcctggcagaaccctcgccgaaccctcgcaggacgccccatcgggtccgccagcggctaggaagcccgattgtgtcgttcctttttccctctgcgcctcccaccgccagtcccttttccaaaatgcgcctgcgtctgccctccacatctccgagctccgtctggcttct

SEQ ID NO: 348308 - DNA, 1030 bp, Homo Sapiens
ccaagaaagaagagaagaaaacctcacaaaatgtgcggacgggcccgcccaaaaccggcacgtccaaacaaaggggaccgccgccttacgcaccttcgtcacgtcaaaaggacggagctgcctcatctgttgcaaacaagacaccgcaaagtcccatggccggggcaaaaagggagacacccgggggcccgaagaagggcacgtcgaggagggatcggctctcaggaaaattcacccagaccgatgggaaagtgcaggagctgtttccacatgctgctgaatacaagaaaagcccaccaccggcctccaggaagcccgaggaagaaatcccaagatggcccaacaccactgagaagctgcttgacaagtgcataatcatgtgagccctgggccttaagagccagctcttcctatcctgtagcgtgtagaaaacgtggactcatttcactatgttacatgtacatggttgattttgtgctgttgtttggactgtaacatccatgttgtcaatacgtataccttgtaagtggataacttttctttttcccaggccagagaattcaaattgttaaaacattggcatttgaagaggagaacaaaatgtagcatgatgtatttaaagtaaggcctttagtaatgaatgtaatgagagaaaatgttttgaaaagaacaaaacatcaaaatgaatagaaagaaaaattggaaggcgtccttttggtaacccgattattgtgtattacctttaaatatttcacatcctgtaagtgcttaatcatatcttttaattgtgtatttaagaaaagtgttttcacaacaaaagcttttgataaattgctgcgtgacatatactaaataaaaaaatgaatatgttgatcattaggggtgtgggagcagagaaaattgtgaaagtgactctcactaaagatgttagtagtttctcatgtcatttaaaaatgtttgagtattctgcatagcagtttgtaaaagtgtaacagcttattgacttaataaagcttttcctgcatgcaaa

SEQ ID NO: 348309 - DNA, 3288 bp, Homo Sapiens
tgggtggcgaattcggcacgaggcagctctacagcctctcaggctgcagccgtacacagcagcctgccccactggctgcccctgctgctcaagtctcagtcccagctccctcaggggaaccgcaggcatccactccccgagccactggcagaggtgccaggaaagctgggtctgagccagagacctctcggccatcgcccctgggcagctactcccccatccggagtgttggcccctttgggcccagcactgactcttctgcctccacttcgtgctcccctcccccagagcagcccacagccacagaaagcctgcccccatggagccactcctgtccttctgctgtccggcctgccacctcccagcagccgcagaaggaggatcagaagatactgaccttgactgagtaccggctccatggaacaggaagcttgccgcctctgggctcctggcgatctggcctcagccgagcagagagcctggcccggggaggtggtgagggcagcatggccaccaggcccagtaatgccaaccacctatcccctcaagccctcaagtggcgggaatacaggaggaagaacccactagggccacctggtttgtcagggagcctagaccgaagatcacaagaagctcggctggcccgaagaaaccctatctttgagttccctggctccctcagtgctgccagccatctgaactgccggctgaatggccaagcagtgaagccgttaccactgacctgccctgacttccaggaccccttttccttgacggagaagcctccagctgagttttgtctgtccccagatggcagctcagaggccatttccattgacctgcttcagaaaaaagggctggtaaaagctgttaacatcgctgtggacctcattgtggctcattttggcacaagccggggatcccggggtgaaggcaaagctgggaaacagttctgtgagccccaatgtgggccacctggttctgaagtacttgtgccctgccgtccgcgccgggctggaggatgggctcaaggcctttgtactggacgtcatcatcgggcagcgtaagaacatgccatggagtgtggttgaggcttccacacagctaggcccatccaccaaggtcctgcatggcctctacaacaaagtcagccaattcccagagctcaccagtcataccatgcgcttcaacgccttcatcctcggcctgctcaacatccggtccctggagttctggtttaatcacctctataaccacgaagacatcatccagacccactaccagccctggggcttcctgagtgcagctcataccgtgtgtcccggcctctttgaagagctgctgctgctgctacagcccctggccctgctgcccttcagcctcgacttgctgttccagcaccggctgctgcaaagtgggcagcagcagcggcagcacaaggaactgctgcgggtgtcccaggacctgctgctgtctgcccactccacgctgcagctggcccgggcccggggccaggagggccctggagacgtggacagggcagcccaaggggagcgggtgaagggtgtgggtgcctcagaaggtggagaagaggaagaggaagaagaggagacagaagaggtggcagaggcagccgggggctcagggcgtgccaggtgggcccgaggtgggcaggccggctggtggtaccagctcatgcagagctcccaggtctacatcgatggctccattgagggttccaggttccctcgtggtagcagcaacagcagcagcgagaaaaagaaaggggcaggaggtgggggacctccccaggctccaccaccccgagagggagtagtggagggggctgaggcctgccctgcctctgaggaggccctgggccgggaaaggggctggcccttctggatggggagcccccctgactctgtgctggccgagctgaggcgcagtcgggagagggaagggcccgctgcctcgccagcagaaaatgaggaaagggcctcagagccttcacctggaggcatcaagtggggacacctctttggctcccgaaaagcccagcgggaggcccggcccacaaataggctcccctcggactggctgagcctggacaagtccatgttccaactagtggcgcagacagtgggttcccgccgggagccagagcccaaggagagcctgcaggagccacactccccagccctgccctccagtcctccgtgtgaggtgcaggcactgtgccaccacctggccaccggccctggacagctgagcttccacaaaggagacatcctacgagtgctggggcgagctggaggagactggctgcgctgcagccgtggccccgactctggcctggtgcccctggcctacgtgacattgaccccaactccaagtccaacccctggaagcagccaaaactgaggccctgtgcatgctggtggcctcagggaccctcataacccccagactcagagcccgagagcccttcccaagccattggcttggctgcagagtagactgagagctggggccacgtatccctgtgctggcacctgctccctgtgctcagtattaattacgcccccttaactgtcccagtgaccttgtccagacctccacccaggagagggatgggacacagcactgggctgccaggattcccctggcccgtctgggccaacccttccatgggtgaagacaagcaagtccccctggaggcgggtggcccagaaagccatctacagggttccctaggccaggtggagatgaggatgggtaacagtattggggccagatccctaagccccccagctgtaaataggctgtggccagtgcctggtcatcagaagagggaggaggagcccaggcgtctgtttatgtatttatttatttatttattatacctattaataaaaaaggtgctcagcctccaaaccattttctctttgtgtcccccaccctcccaccctcccacccacctctctcccttccaaaaggatggctgggataggatgaaaagggaagggaacttgatgtccagtggcctaagccaagagctgcttctggaaggtgctgaggcccagagcatcatgggtgagatggccaaatgtgtggccaaactggaacttataccctggcacgtagcccccatagttaggtaaaagacccaggttctgagggtatgttctgggaagtggggggggagatgtttggtcctgggcactgcctggtgagtgcttctgcccaaattcctgcagtgcctggttggtgagcacaggaaagctg

SEQ ID NO: 348310 - DNA, 1878 bp, Homo Sapiens
cgcgcggttccgcattggcgtgctgcagggcgcggtgcactgcgccgccaccgtcaataggtggaccccctcccggagataaaaccgccggcgccggcgccgccagtccctctggctgagacctcggctccggaatcactgcagcccccctcgccctgagccagagcaccccgggtcccgccagcccctcacactcccagcaaaatgggcaaggagaagacccacatcaacatcgtggtcatcggccacgtggactccggaaagtccaccaccacgggccacctcatctacaaatgcggaggtattgacaaaaggaccattgagaagttcgagaaggaggcggctgagatggggaagggatccttcaagtatgcctgggtgctggacaagctgaaggcggagcgtgagcgcggcatcaccatcgacatctccctctggaagttcgagaccaccaagtactacatcaccatcatcgatgcccccggccaccgcgacttcatcaagaacatgatcacgggtacatcccaggcggactgcgcagtgctgatcgtggcggcgggcgtgggcgagttcgaggcgggcatctccaagaatgggcagacgcgggagcatgccctgctggcctacacgctgggtgtgaagcagctcatcgtgggcgtgaacaaaatggactccacagagccggcctacagcgagaagcgctacgacgagatcgtcaaggaagtcagcgcctacatcaagaagatcggctacaacccggccaccgtgccctttgtgcccatctccggctggcacggcgacaacatgctggagccctcccccaacatgccgtggttcaagggctggaaggtggagcgtaaggagggcaacgcaagcggcgtgtccctgctggaggccctggacaccatcctgccccccacgcgccccacggacaagcccctgcgcctgccgctgcaggacgtgtacaagattggcggcattggcacggtgcccgtgggccgggtggagaccggcatcctgcggccgggcatggtggtgacctttgcgccagtgaacatcaccactgaggtgaagtcagtggagatgcaccacgaggctctgagcgaagctctgcccggcgacaacgtcggcttcaatgtgaagaacgtgtcggtgaaggacatccggcggggcaacgtgtgtggggacagcaagtctgacccgccgcaggaggctgctcagttcacctcccaggtcatcatcctgaaccacccggggcagattagcgccggctactccccggtcatcgactgccacacagcccacatcgcctgcaagtttgcggagctgaaggagaagattgaccggcgctctggcaagaagctggaggacaaccccaagtccctgaagtctggagacgcggccatcgtggagatggtgccgggaaagcccatgtgtgtggagagcttctcccagtacccgcctctcggcccttcgccgtgcgcgacatgaggcagacggtggccgtaggcgtcatcaagaacgtggagaagaagagcggcggcgccggcaaggtcaccaagtcggcgcagaaggcgcagaaggcgggcaagtgaagcgcgggcgcccgcggcgcgaccctccccggcggcgccgcgctccgaaccccgaaccggaaaaaaacccgcccccgcgaccgcccgcctccggcgccccgcacccccctccaggcgcatgtctgcacctccgcttgccagaggccctcggtcagcgactggatgctcgccatcaaggtccagtggaagttcttcaagaggaaaggcgcccccgccccaggcttccgcgcccagcgctcgccacgctcagtgcccgttttaccaataaactgagcgaccccag

SEQ ID NO: 348311 - DNA, 942 bp, Homo Sapiens
  misc_feature (23)..(23): n is a, c, g, or t
cactgactcacctcagtgtgatntcactggcgcaaagtcaccaccatgcccgccgcagatgccgtctccacccggcccacggcaccgtgccaatgcccgccaatcttgtacacttccttcagcggcaggcgcaggggctttgtccgtggggcgcgtggggggcaggatggtgtccagggcctccagcagggacacgccgcttgcgttgccctccttacgctccaccttccagcccttgaaccacggcatgttgggggagggctccagcatgttgtcgccgtgccagccggagatgggcacaaagggcacggtggccgggttgtagccgatcttcttgatgtaggcgctgacttccttgacgatctcgtcgtagcgcttctcgctgtaggccggctctgtggagtccattttgttcacgcccacgatgagctgcttcacacccagcgtgtaggccagcagggcatgctcccgcgtctgcccattcttggagatgcccgcctcgaactcgcccacgcccgccgccacgatcagcactgcgcagtccgcctgggatgtacccgtgatcatgttcttgatgaagtcgcggtggccgggggcatcgatgatggtgatgtagtacttggtggtctcgaacttccagagggagatgtcgatggtgatgccgcgctcacgctccgccttcagcttgtccagcacccaggcatacttgaaggatcccttccccatctcagccgcctccttctcgaacttctcaatggtccttttgtcaatacctccgcatttgtagatgaggtggcccgtggtggtggactttccggagtccacgtggccgatgaccacgatgttgatgtgggtcttctccttgcccattttgctgggagtgtgaggggctggcgggacccggggtgctctggctcagggcgaggggggctgcagtgattc

SEQ ID NO: 348312 - DNA, 805 bp, Homo Sapiens
  misc_feature (287)..(287): n is a, c, g, or t
  misc_feature (417)..(417): n is a, c, g, or t
  misc_feature (548)..(548): n is a, c, g, or t
  misc_feature (550)..(642): n is a, c, g, or t
  misc_feature (748)..(749): n is a, c, g, or t
  misc_feature (760)..(760): n is a, c, g, or t
  misc_feature (764)..(764): n is a, c, g, or t
  misc_feature (766)..(766): n is a, c, g, or t
  misc_feature (792)..(792): n is a, c, g, or t
catcaccactgaggtgaagtcagtggagatgcaccacgaggctctgagcgaagctctgcccggcgacaacgtcggcttcaatgtgaagaacgtgtcggtgaaggacatccggcggggcaacgtgtgtggggacagcaagtctgacccgccgcaggaggctgctcagttcacctcccaggtcatcatcctgaaccacccggggcagattagcgccggctactccccggtcatcgactgccacacagcccacatcgcctgcaagtttgcggagctgaaggagaagattnaccggcgctctggcaagaagctggaggacaaccccaagtccctgaagtctggagacgcggccatcgtggagatggtgccgggaaagcccatgtgtgtggagagcttctcccagtacccgcctctcggccnttcgccgtgcgcgacatgaggcagacggtggccgtaggcgtcatcaagaacgtggagaagaagagcggcggcgccggcaaggtcaccaagtcggcgcagaaggcgcagaaggcgggcaagtgaagcgcggngnnnnnnnnnnnnnnnnnnnnnnnnnnnnnnnnnnnnnnnnnnnnnnnnnnnnnnnnnnnnnnnnnnnnnnnnnnnnnnnnnnnnnnnnnnnnnacccccgccaggcgcatgtctgcacctccgcttgccagaggccctcggtcagcgactggatgctcgccatcaaggtccagtggaagttcttcaagaggaaaggcgnnccctcttccangttncngcccatgctcgccacgctcatgcccnttttaccaataaa

SEQ ID NO: 348313 - DNA, 1081 bp, Homo Sapiens
  misc_feature (105)..(167): n is a, c, g, or t
  misc_feature (608)..(608): n is a, c, g, or t
  misc_feature (826)..(826): n is a, c, g, or t
  misc_feature (867)..(867): n is a, c, g, or t
  misc_feature (907)..(907): n is a, c, g, or t
  misc_feature (919)..(919): n is a, c, g, or t
  misc_feature (975)..(975): n is a, c, g, or t
  misc_feature (986)..(986): n is a, c, g, or t
  misc_feature (995)..(995): n is a, c, g, or t
  misc_feature (1007)..(1007): n is a, c, g, or t
  misc_feature (1018)..(1018): n is a, c, g, or t
  misc_feature (1020)..(1021): n is a, c, g, or t
  misc_feature (1027)..(1027): n is a, c, g, or t
  misc_feature (1029)..(1029): n is a, c, g, or t
  misc_feature (1035)..(1035): n is a, c, g, or t
  misc_feature (1048)..(1048): n is a, c, g, or t
  misc_feature (1053)..(1053): n is a, c, g, or t
  misc_feature (1055)..(1055): n is a, c, g, or t
  misc_feature (1061)..(1061): n is a, c, g, or t
  misc_feature (1077)..(1077): n is a, c, g, or t
ggcgggggcgcctttcctcttgaagaacttccactggaccttgatggcgagcatccagtcgctgaccgagggcctctggcaagcggaggtgcagacatgcgcctnnnnnnnnnnnnnnnnnnnnnnnnnnnnnnnnnnnnnnnnnnnnnnnnnnnnnnnnnnnnnnnttcggagcgcggcgccgccggggagggtcgcgccgcgggcgcccgcgcttcacttgcccgccttctgcgccttctgcaccgacttggtgaccttgccggcgccgccgctcttcttctccacgttcttgatgacgcctacggccaccgtctgcctcatgtcgcgcacagcgaagcggccgagaggcgggtactgggagaagctctccacacacatgggctttcccggcaccatctccacgatggccgcgtctccagacttcagggacttggggttgtcctccagcttcttgccagagcgccggtcaatcttctccttcagctccgcaaacttgcaggcgatgtgggctgtgtggcagtcgatgaccggggagtagccggcgctaatctgccccgggtggttcaggatgatgacctgggaggtgaactgagcagcctcctgcngcgggtcagacttgctgtccccacacacgttgccccgccggatgtccttcaccgacacgttcttcacattgaagccgacgttgtcgccgggcagagcttcgctcagagcctcgtggtgcatctccactgacttcacctcagtggtgatgttcactggcgcaaaggtcaccaccatgcccggccgcaggatgccggtctccacccggcccacgggcacngtgccaatgccgccaatcttgtacacgtcctgcagcggcangcgcaggggcttgtccgtggggcgcgtggggggcaggatngtgtccagggcntcagcagggacacgccgcttgcgttgcctccttacgctcaccttccagcccttgancaacggatgtngggggaggntcagcatgtgtngctgtgcagcngnnatgggnanaaaggnaggtggcgggttntgcgntnttttgnttagggctgattcttnagat

SEQ ID NO: 348314 - DNA, 919 bp, Homo Sapiens
  misc_feature (5)..(6): n is a, c, g, or t
  misc_feature (12)..(13): n is a, c, g, or t
  misc_feature (41)..(41): n is a, c, g, or t
  misc_feature (169)..(169): n is a, c, g, or t
  misc_feature (171)..(171): n is a, c, g, or t
  misc_feature (178)..(257): n is a, c, g, or t
  misc_feature (894)..(894): n is a, c, g, or t
  misc_feature (905)..(905): n is a, c, g, or t
tattnntaaacnngcactgagcgtcgcagcgctgggcgcgnaacctgggcgcgggggcgcctttcctcttgaagaacttccactggaccttgatggcgagcatccagtcgctgaccgagcggccctctggcaagcggaggtgcagacatgcgcctggcgggggtgcggngngccggannnnnnnnnnnnnnnnnnnnnnnnnnnnnnnnnnnnnnnnnnnnnnnnnnnnnnnnnnnnnnnnnnnnnnnnnnnnnnnncgcccgcgcttcacttgcccgcttctgcgccttctgcgcgacttggtgaccttgccggcgccgccgctcttcttctccacgttcttgatgacgcctacggccaccgtctgcctcatgtcgcgcacggcgaagcggccgagaggcgggtactgggagaagctctccacacacatgggctttcccggcaccatctccacgatggccgcgtctccagacttcagggacttggggttgtcctccagcttcttgccagagcgccggtcaatcttctccttcagctccgcaaacttgcaggcgatgtgggctgtgtggcagtcgatgaccggggagtagccggcgctaatctgccccgggtggttcaggatgatgacctgggaggtgaactgagcagcctcctgcggcgggtcagacttgctgtccccacacacgttgccccgccggatgttcttcaccgacacgttcttcacattgaagccgacgttgtcgccgggcagagcttcgctcagagcctcgtggtgcatctccactgacttcacctcagtggtgatgttcactggcgcaaaggtcaccaccatgcccggccgcaggatgccgggtctccacccggcccacgggcaccgtgccaatgccgccaatnttgtacacgtnctgcagcggcaggc

SEQ ID NO: 348315 - DNA, 2486 bp, Homo Sapiens
taaatccaggctgtaccggcccgaatttacggatgtttggcatgttaccatcaggagctgtgcctgggcagagggtacccaggagacaccctggtgcccttaacctccaaagcaggcaacattgtgtgtccaggcctgtggaccagaaacacaggatgttttgtgactgacagagtgatccaaaatggagaaggatgaccccccacagttggtgactcccacatcagtgaaagccatcatcctgaggattgaggctgcccagctaactcgggctcaagaggatatttctacccagctctcagacattttggacaatgtcaattgtgtcatcaaccgcttccaggaagaattaggatatgatttaaaagaaaatgccaaatctcagcagagagatccaaagggcaagaagagattcatcttgctggaaaaaattgcctccttctccaaagatgctatgatgaaggagaagcacctgtatgacattctccgctggctgggtgactggggtgacactctgacctatgagattgggcccaggaagagtgaagaggaagcagcagctctggacgaatggattgaagtgacggagaaagtgttaccgctgtccctcattgccaccaaaagaggcatcgagtcactcactgccctttgctccactctcattgaaggacaaaagaaaaggtcacaagtgtccaaacgcaccttctggcagggctggcagggaagaagcccacagacatctccatcccatcctcagccactaagcccagaacagatgctccagggaccagcataccatgaacacgaaggcctcggaggtgacgtccatgctgcaggagctcctggactctaccatgttcagcaaaaaggaggtcagggccatcaggtacatggccactgtggtggagaacctcaacaaggccttgatcctccaacacaaggagaacaggagcctggagaccaaatacaggcacctgcaaatgcaggcgaccaaagagctcagcagccagaggctgcacttccagcagttcatggaggtccttgagagcaggagggatgctctgctgaagcaggtagagatcttagggggaaggtaccatgaccttctcctgatgaagcaggccttggagttccagctgaagaaggctcagaatgctacaggtcaggcagaagacctggctgaggtttctgttgactccccaggtccctctgagagagagaccctcccaaggaaagaaacagtcatggaggaaagccaacaggaaccgatgaaggaggagcagttgttctcgccacttcccccaagtcccatggccatgatacgggacagtggtgctatagctgcagggcaccagccactttccaccatgactgtgcgctcgagggtcgcagatgtgttcggcagcaaggacactgagagccttgagcctgtgcttttacccttagtagatcgcaggtttcctaagaaatgggaaagaccggtggcagaaagcttaggccacaaagacaaagaccaggaggactacttccagaagggaggactccaaattaagttccactgtagcaagcagctgtctctagagagctccaggcaggtgacctctgagagccaagaggagccctgggaggaggaattcggccgggagatgcggaggcagctgtggctggaggaggaggagatgtggcagcagcggcagaagaagtgggccctgctggagcaggagcatcaggagaagctgcggcagtggaatctggaagacctggccagggagcaacagcggagatgggtccagctaaaaaaggagcaggagagcccacggagagagccagagcagctaggggaggatgtggagaggaggatcttcacacccaccagtcgatggagggacttggagaaggcagagctatcattagtgcctgccccaagccggacccaatctgctcaccaaagcaggaggccacacttgcccatgtctcctagtacccagcagcctgccctcccggcgaccacaagtggccccagccgtccaggtggggtccggctgacgggaccaagtcgacactactccttctcgcagggtctcttccttctcagtaaagcggcccacgatcctccatccgctcctcagagagcctctctgccctttctgtccgccacatctccctggctacattatctccccgactagtgcctagcaggcgggcctgatagaagtttctctaaaggctctggaggagtcaaacaatgcataaggtcctgtgcaaccctcagactcctataccctcgtgggaatttggaagtcgaaatccagtccgcggtcccgcccctccccgggtcgcctcaattagccccgctcggtctcgccctaagtctcgcctttccctttaaccaacccctcaagccgggttacctctccggtgcctataatccttaacgtttccctatatgctgtcccaactaggaaagcctttactttccgctattg

SEQ ID NO: 348316 - DNA, 420 bp, Homo Sapiens
gtgtgttgctccattcttcaaatcctggacttctactgctaccactgtgcgagggaaaggcctgtcctcatgagttttttccatctcagtgggaagtaattcaggaggcaaaggggagtacagtgtgtcagtcagcagaacaaactgaaactgcacctgaatagaaagaataaaccattgacaaatggttttcagcaagcaagcttcagagatggagacgatacaaccatacccaatgggaaagagatcgaatgtgctcaacaaatatcttgtgactaactttctactgaaaaatatggccacctgttagcagtcatagggaataaccctaacttcaaattaagctatttaaggactttgttttcctagcctggcagtgtttttgcacatacgaaaatcttcttgaggggaggcacggtg

SEQ ID NO: 348317 - DNA, 470 bp, Homo Sapiens
gatcttacactctgcttttgtccaaataaaatgcaatagtatcaatatcaatttcagaaaaatggactgaatatgcttttttggtgatgaaatctcatgtacgatatttatagtgatgtgcttttattttctccatgagatacttaaatattaattgtgttgtacatttgttcttagcatatattaaagttttgaaccaaatgtgttaaagcttacgctttgccatgtaaatttcccagaagttgttgagctcaaatgtatcctacatccagctgtagaaatttgtcagaaattgtttaaattttgtatataattgtactgtttaattctagccattgcgctgaacagtatttgagttaccatataatatggctttacacaaggaaatgtgtggcttttgttttgtattttttcagtatagaagttcctgtgtcttatttaaataaagttattagtaaaactgaaaaaaa

SEQ ID NO: 348318 - DNA, 512 bp, Homo Sapiens
ggatgagtttgagtttaggggtagcggagcctcttgttcccaactgaaggcactcacgaaacctgaactgcacccacttggaggaaagtgagacggggcttcccagtgagaacccagggagatgcgtcaaaggctacagagggaacaaacaaacaagcaatttagtttagattttttaatgcagaaatgaagtgttccgcttgtttgcttttaaaatggagaacagagaacataaaatgacttcacaaatgaaggaagtaattagaaaaaattcctccagttctatgtgatggccagtaaaggaagagagaccacagaaaagatagaacgggaagggcaaatgggaaggaaggagagtacgacacagagatgatgacgcaaaaaaagagagtgaagaaaagatgaacatggaaccatccccccacacacacacattttgatcttatggaaaacctgctttgtaaaattaaagtttgtcttttgttgtttttacactgtaagagagcgatttg

SEQ ID NO: 348319 - DNA, 641 bp, Homo Sapiens
gtacataagactgtaaaattgtgattcagttaaacatttgagggcattcttgtctaggaatatggtagagataccatttgcctttgtgagagcagtgtgtttatacttgtttatgaaaaaattctacagaagttttagtgttgaaagagtccctttctgaaacccaagtgtccattagatagtttagttcatttgtatatgggcacattaactggtctgtgatgatcttaacactccttaaatagaccatctcagattaatcacatctgaaattaaggataagattaatatgcagggttttggtttacagttttgtacacttaacctttctgagtaattgttaaagtgcctcatcctaagtattgctgaccttttcctatttatacttgatagtttgaaaacccagtgaaacaaatttcgtatttgtaaaggattggacatcagatttatattgtctatgtgactcttctataacaattagttgcagtatgcaagtattacataattcaaattgtaaatagtgaaaaatgaacgtttataggtaactataacgtttcacttaatgggaaatcttactattataaatgtgcataattggcatttaaaatatcaagctgaaatgctgttttctcctaaaacag

SEQ ID NO: 348320 - DNA, 393 bp, Homo Sapiens
tcacaactgcagttgttccaagccagcagccccactacttgctccttgatcctgaccgggatgtgtgcgtagcggggctcaggagcaagatctggcagctcgggcctgcgggggctttgcgggggcgcccacggcgcaagaggtacccggaggccgggcgcgtcccgggtgctcgcgtacaggagccccagcgaggcgcaggcgagcagaaggaccagagcgcacagggcccggcggcccagccacatcctgggccggggtgggctgcggagggcggctccacacctagcctgtcaggaaaaaatgcagaatcatgcccgtgctggcgggcgcccccggcggaggtgacccgatgagtggcctcggcaagcgatcccgggaattccggaccgg

SEQ ID NO: 348321 - DNA, 1405 bp, Homo Sapiens
  misc_feature (1284)..(1344): n is a, c, g, or t
gggcgctcgcattccccgcgcggagccgaagcagccgcaacgagccgggagctgagccgcgctgcgctgcggtgcgaagagccgggcggcggccagagccctccccgcgctgccagtgggacgcggagccaggatccccggctttgccccggggctggggtgcaacagactcttaacttggtcctcgcgccccgccaaccgcccccgggcaggaaacgcccagaaccaccaccgcgccgcgctccacaaaagccccgggagttccaagacgggagggatcgggcgcgctccagaggcaggagggtcccccacaccctcaggctcatgcccagctcccccatcgggcagcccccagccccatgaggaccctcaggccggggcgagagcccggcacagcccggaccgaaattttgccgctgccttagagcgttagacaggatgtggctgggccgccgggccctgtgcgctctggtccttctgctcgcctgcgcctcgctggggctcctgtacgcgagcacccgggacgcgcccggcctccggctacctcttgcgccgtgggcgcccccgcaaagcccccgcaggcccgagctgccagatcttgctcctgagccccgctacgcacacatcccggtcaggatcaaggagcaagtagtggggctgctggcttggaacaactgcagttgtgagtccagtggggggggcctccccctccccttccagaaacaagtccgagctattgacctcaccaaggcctttgaccctgcagagctgagggctgcctctgccacaagagagcaggagttccaggcctttctgtcgaggagccagtccccagctgaccagctgctcatagcccctgccaactccccgctccagtaccccctacagggtgtggaagttcagcccctcaggagcatcttggtgccagggctgagccttcaggcagcttctggtcaggaggtataccaggtgaacctgactgcctccctaggcacctgggacgtggcaggggaagtgactggagttactctcactggagagggtcaggcagatctcacccttgtcagcccagggctggaccaactcaacaggcaactacaactggtcacttacagcagccgaagctaccagaccaacacagcagacccggggccaggccctgggtgggaaaaacgggcaggcttgggcaaacggagaagaacccgaaaagggtgggaaggggcaaatggcacaagggattggggagggcattcggggcttaggggccgaaactgtccccgcccnnnnnnnnnnnnnnnnnnnnnnnnnnnnnnnnnnnnnnnnnnnnnnnnnnnnnnnnnnnnncttttggtctcatctggggggcttgggagccaggcccataaggggaaacccccgaagccct

SEQ ID NO: 348322 - DNA, 1134 bp, Homo Sapiens
  misc_feature (622)..(730): n is a, c, g, or t
  misc_feature (747)..(779): n is a, c, g, or t
aggcactgaacagtaaggtggccggagaaagagggaaaaaaacacagtgttcaataaagtgatatttgtcaaatgcagttctacacacaatctgtgagtgtcaaaaacaagagcagtaaaaataatcctctccctgcagcatccattctcacatttaagaagctataagaggtagtacagagaatgtaggctctagtggccaggagacctgaattccaacctggtacttctacctagtacctactaggtaggatcttaagaaagttatttaacttctttgagcttcactttcctcatttgtaaagtggacataagagaatacaagataatttaaattgattagttcatgtaaagtacttagccaactgcatatcatataacagatgctcaatatatattaatttcctgttcctgcttgcttctctcctctcctccatcacccttggcacgtggctctaatttcttgtggcttcaaactcttcatctataaaagggataagattagatctatgattttcaactgggggggtgacaggtggggagaaaggggccctgcggagaatttcagaatgtgtttgggggtgggccagcatatcttatttatttatcaaaaaggaatatnnnnnnnnnnnnnnnnnnnnnnnnnnnnnnnnnnnnnnnnnnnnnnnnnnnnnnnnnnnnnnnnnnnnnnnnnnnnnnnnnnnnnnnnnnnnnnnnnnnnnnnnnnnnntagtgaaaatttacttnnnnnnnnnnnnnnnnnnnnnnnnnnnnnnnnncttgaagaaccacactgaataatctaatctcaaagtacccttcccactctgatattacaggatacacttggatcctttaaaataaaataatggttttcaatcatttattccatcaacaggatatgtgaattttgttttctgtagtttgtattataaaagtggtttttagttttcatttttccaacataaaatgatattaaatatactcttttcaacatacatgcttcccaaaaaatctgagggtacctctgccccaccccccaagtaagaatgaccccacttggaaacatgtgtgtacacattatgtatgttaaatatttacccatttcttttataccgacaggaaaagggggga

SEQ ID NO: 348323 - DNA, 855 bp, Homo Sapiens
ggattcgtgctctacaggtatgaatgagttcaaacatgatcccagctccacaagatctcacccatctggaatggaagtgacctgaaatccatttcaccaatgcttctcttccctttaaagagacacctgccttcttttagacagctgctgagatgggcagcttatcctctctggcagacagcaggttcttccttacagctattaagtttcactcatgggtcctagttatactcagaggagtgacctgggtctagcaaactgtgcttgacttcatccaagaatctgcagagctatggaagatatggacaccatattctgcctgacccctcagaagcctaactttacatggaatgacaccactctgccctctaagcctccagactgccctgggacctttgacccaaagaacacctgacattattcatcttccatgggagatacagggacagggtggacactgagagtttgttggaccatcatagagaaggcccactgatttgtattcataagcccaaaggcactgaagtaattgtacagagactcaattttgtaattttggtggtttacttcctatgaccctttctcctccacatccaagagtcctgctcactaaggaaccatgaactacattaattaccctgagctccaggcttttatactgatacttttctgtccaacacttcaaggccaccagacactcattctctgaacattccaattaaggatcagagtccacatctcaccacccagagcagttctcagatatagaaggaagccccataatgatcaagcccctaaaactcttcccaatagattttctttcatcctgagcccttgcacttcccttgtatctgc

SEQ ID NO: 348324 - DNA, 1800 bp, Homo Sapiens
  misc_feature (956)..(990): n is a, c, g, or t
  misc_feature (1191)..(1191): n is a, c, g, or t
  misc_feature (1263)..(1263): n is a, c, g, or t
  misc_feature (1546)..(1594): n is a, c, g, or t
accgagtctctgagacctctgcaaagagggccctttgatgcccttgacctggactcaccatggtctgctgggtgatcgggagaagccacacccaacatgcccattagcagaggctgctgctgatgtggcagctgctccctgaccacccgccctggctccccagcttcaggtttgcacaccctcagcctgagaatgtaaaataggccagtgcccagctggggaggtagaggaaagtgctagagtacatggtccgtgtgtggcctagctcattccatgtcagcatttggtgttactcctgtccaaattctgtttgcagacttgtttcatgatgatgctctggaatgcttggggactttgggtggaggaggatgttacttcattttataaagaggaaggggcctgggagacttgggaaaatgtttctggagaggctttcagagtggctggaaaaggctcttgttgctgtaatttagagaggagctctgtgtccttggccagtcaagtaagttcctggatctttggcaaagccagaggaagaaaggagctacctgccctttcctgggcatgcttggtgactcagattgatcttggagtgtgcagtggcccttctaccctgcacctgacctcatgatcccctccacctgcactggtgtgcattactgaagcaagggtcctgtggacatcttgcattttgggcactgctagggggtctgggctgcttggaaggagccatggcctagggttcagggaactagactctatcccagttgggttcagactgctgtgactgtggacacgatgctccttgttctgggctccagttttcccatttgtgagatgaggcaacttccaatgcttctctaggccctgcacgtaagtgatttttccagttcaaagtcaagacaggtaaaagggcattcatcattgtgcctcatatcaggtttagatgaatatannnnnnnnnnnnnnnnnnnnnnnnnnnnnnnnnnnagagggatggacaggatgctgtatattgttccctttcttggaaatggaccttctgtcccttccatattggaccaccacagtggaagctggtggcctggaaggaaggattaggtcatggacaatggaacaaggtgccttgaggcatgatgtatagatgcagtcatatataccttgctggggtggggtgccacctccagtggncagctccagatccaaggagcagccccctggggatggaccccattcattcatcatgactcccaacagttttcnattgtggaagaagaaactttggcattatagagacatcatcacaaaacagtaaaaacaaaatcaaccctgaaccccatgcactgtgctgcttcctgagcctggccctgcatcctcatagaggtgccgggttcctattggttagttggttgtttttccgtctgagtgaatttttgccagtcttgtgagcagatgtacctgatgtattctcaatgttccaagaggttctggccttcagggtcacaggcagtagggggacagcataaggtctatgtaaaacccttcnnnnnnnnnnnnnnnnnnnnnnnnnnnnnnnnnnnnnnnnnnnnnnnnnatgatttgtatatagcccaatgcatctctggaactctgtctaaacaccagccatctacttggaatgggccccaggactgtggtatttgcctgggccaggaaaggataagaaatcctgtcatgtgaagacagcttgagaggcttgagaaaagtggggctggggagaagcaggcttgtcagactccacccctgttgatgatcattcct

SEQ ID NO: 348325 - DNA, 2238 bp, Homo Sapiens
  misc_feature (83)..(131): n is a, c, g, or t
  misc_feature (891)..(907): n is a, c, g, or t
  misc_feature (1409)..(1409): n is a, c, g, or t
  misc_feature (1501)..(1544): n is a, c, g, or t
  misc_feature (1682)..(1682): n is a, c, g, or t
gtattctcaatgttccaagaggttctggccttcagggtcacaggcagtagggggacagcataaggtctatgtaaaacccttcnnnnnnnnnnnnnnnnnnnnnnnnnnnnnnnnnnnnnnnnnnnnnnnnnatgatttgtatatagcccaatgcatctctggaactctgtctaaacaccagccatctactgggaatgggccccaggactgtggtatttgcctgggccaggaaaggataagaaatcctgtcatgtgaagacagcttgagaggcttgagaaaagtggggctggggagaagcaggcttgtcagactccacccctgttgatgatcattcctgggaaggggtttctcgttctatgcaatcctaaaggacgaaactcacccatgggaggccgaattctccttgggatgaagaaatttctctttccctgtcatgagtgtccagccagggagcagggaggcagtgtcagggagggactctcatcctggaggaaatgggattccaagtcaaggatgctgaggctgtcagggagccagagaggggggtccaagtgcgggatgtgggtggctctgtggttcagtggctctgtggtagttcctagcactgcagacttcatgactccccacttaagtccaagtcacattgtctatcccagtgtgtagctctgtcaccctgcttgacacatccagtggcctacagcgactcttctctaaccccaccccctccaagctgggttctttgtggaagaaggacagggagctagagccaagccctaggcttgagagacacctgcatctataatccccgccaaggatgcccactcacctctctcatctgatcctcactctttgtggaagggaaagctcaaagggactctctctctctctcnnnnnnnnnnnnnnnnngagtagtacccttgccctcttcatggccacttcaaagtgaagccagcaaagtgataatactttatcatttagtattatcataaagtattaatactttgtcataaagtcctccttgagcccagggaccatggaagtcagctagaagagccctgagcaaggagcaaggacttgggcttctccacgctttgctcctggcttgtttgaccttgactcattccccatatgtctttgaggaggctcacaaaatactaaagctgggaggaaacttggagatctataggtcaaacctccccattgggctgatgagaaaatacacgcaggcctagcatggtgcctgccaccatggtgggatccagtatgttttataaatctgaatgagtaaatggctcaccaatttatgcatagccctgcacatgagcagaatgtgacactcaaagcatccatgcagtacgcatgtaaccttgcacaggagtggggctctggtgaccgaaagttgtccagngactcttgcaggagaagcaatggagtcaggtgtgggtgtggggagacctactttttaacctgggcttagccacctgctctgtgatccagggnnnnnnnnnnnnnnnnnnnnnnnnnnnnnnnnnnnnnnnnnnnnggacttcattggcattgttagtcccacaggccaaggataaggttgaaatgagacggcttgtgtgtgaaaagattttggaaattacacagatgtgggcttgttattgggatgaagactgctggaagggactccttgctngtttatctactgctttgagccctcctaagttaacctgtgcctcatttgtaaaaccaccagcatcaggagtaagggggaggccagagggctcagatggacacagaattctagctttacctgcatccgctgattcagttttctgttgggatcagagtgaggatacttccatatgggtgatagcagccatgcccctgggagtcaacttcaaggatctgggacattttggtgtgcccattccttcttttcctgaactcacagtcttggggtgtttctgcacttggctatgtgtgtcttgtctgatgtctgtcttctgtagctttgcctctatcagggctggagtggtgcagcccctggcatctcagacatggttcctgcctcacttgtgggagctggaccagcctgggtttcatctcccacagtaaagctaagtaagccccacagaccttactgctactgctgctgccattaatgctgtgctcactatcttgtccaggattttaaggatgtcagactgctgtagatgactcaataaatgttttgccatttttaaaaaaaa

SEQ ID NO: 348326 - DNA, 493 bp, Homo Sapiens
  misc_feature (62)..(62): n is a, c, g, or t
  misc_feature (110)..(110): n is a, c, g, or t
gccaaaaaggcctcaaaaggaacacaaaaatctaactttaacctgcaacccgcctgaatcanttttctgttggggaaacagaatgaggaaaacttcccataagggtgaanaagcaagcccatgcccccggggagtcaaacttccaaggaatctgggaaaattttggtgtgccccaatcccttcttttccctgaaactcacagtccttggggtgtttctgcacttggctatgtgtgtcttgtctgatgtctgtcttctgtagctttgcctctatcagggctggagtggtgcagcccctggcatctcagacatggttcctgcctcacttgtgggagctggaccagcctgggtttcatctcccacagtaaagctaagtaagccccacagaccttactgctactgctgctgccattaatgctgtgctcactatcttgtccaggattttaaggatgtcagactgctgtagatgactcaataaatgttttgccattttt

SEQ ID NO: 348327 - DNA, 1356 bp, Homo Sapiens
  misc_feature (278)..(320): n is a, c, g, or t
  misc_feature (537)..(545): n is a, c, g, or t
  misc_feature (1084)..(1131): n is a, c, g, or t
aaatgggcaagaagtaaataatgtggctggaatacaagttgaacaaactagaagacacaaatctaacatagtttttatggaccaaggaacttgtatattgtataagctttagtaaaaggtacattttcaccatacctttttttatatcacggtattatagtacaccttgttaccaaataggttgttctcttccccacccacctttgagcttttgctctaaaatacattcaggttccaagcctgaccatccttgtttaatctatcatactcttccaggnnnnnnnnnnnnnnnnnnnnnnnnnnnnnnnnnnnnnnnnnnncagctgaagtcttatgacttttcatgagtcaaaattgtttggatttcagcaagtcaaatcttgcaaaggcctgcatattttttttaagattatatgaagtctgtgcaaaagctttaaaaaaatgcctctgccttgcctgcaatacatgcaatgtatgttaacttagtctctcttctcagacactgttggtagttatttctgtgttttcctttttttnnnnnnnnntatggacttattgtggttatctgagaggttctaacattcacatgcaatttggtgtggccatttagctattaatgagttaatggcgcagaacttgttgatatttgaagtgttctctccccttttcccatgacgtaaatacataggtgtgttccaggatttgttcaggtttttcccccctcctaatcttgtacataacttgtattatgtgtaagttaaacattttattttgaacttggaatgttcccagtgatttcattcagcagggtattttctgccttgttggcaagtgacaaaaaatatgggaagtatttgctaccagttggtagatggtgcccttaatggtagaatgaggaaaatgtccgcaaaagcatgttttattatctttacttttttggggggttggagggggtagcctagccagaacatcattgtaatcttaaaacataagatgcttttattagatgatcaactaaaatagctggaagacagtactttagaaacagatagttgtaagattataaaatgcaaatgtaacttannnnnnnnnnnnnnnnnnnnnnnnnnnnnnnnnnnnnnnnnnnnnnnnccagtactgagcatctccacaaatgtctcctaactcagaaaaagtttcttttcttttcatttgagatttggttgcattcagggttgtaagttggcccttgcttgctaaccccgcccggttttaccgtggctttcattcctgaaactttggttatggcctttggttgggtttccttcaaaatggaggcgaaactcattggggccttacatttagtaccagggaccc

SEQ ID NO: 348328 - DNA, 1070 bp, Homo Sapiens
gaaccgttacatctacctggtgtccgagtggacagtggcatccaaccaggaagtgatattagcatttattatgatcctatgatttcaaaactaatcacatatggctctgatagaactgaggcactgaagagaatggcagatgcactggataactatgttgttcgaggtgttacacataatattgcattacttcgagaggtgataatcaactcacgctttgtaaaaggagacatcagcacgaaatgtctctccgatgtgtatcctgatggcttcaaaggacacatgctaaccaagagtgagaagaaccagttattggcaatagcatcatcattgtttgtggcattccagttaagagcacaacattttcaagaaaattcaagaatgcctgttattaaaccagacatagccaactgggagctctcagtaaaattgcatgataaagttcataccgtagtagcatcaaacaatgggtcagtgttctcggtggaagttgatgggtcgaaactaaatgtgaccagcacgtggaacctggcttcgcccttattgtctgtcagcgttgatggcactcagaggactgtccagtgtctttctcgagaagcaggtggaaacatgagcattcagtttcttggtacagtgtacaaggtgaatatcttaaccagacttgccgcagaattgaacaaatttatgctggaaaaagtgactgaggacacaagcagtgttctgcgttccccgatgcccggagtggtggtggccgtctctgtcaagcctggagacgcggtagcagaaggtcaagaaatttgtgtgattgaagccatgaaaatgcagaatagtatgacagctgggaaaactggcacggtgaaatctgtgcactgtcaagctggagacacagttggagaaggggatctgctcgtggagctggaatgaaggatttataacctttcagtcatcacccaatttaattagccatttgcatgatgctttcacacacaattgattcaagcattatacaggaacacccctgtgcagctacgtttacgtcgtcatttattccacacgtcataggggatctc

SEQ ID NO: 348329 - DNA, 1663 bp, Homo Sapiens
  misc_feature (78)..(114): n is a, c, g, or t
taagaacaacacaaaagaaaacaggccgggagtgatagactactatagggcgaatggagctctacgcggtggcggcgnnnnnnnnnnnnnnnnnnnnnnnnnnnnnnnnnnnnnatcaggccaaatcggccgagctcgaattcgtcgagagcgggtggtgatgcaagtcggctctctcctccagcagttggatccctcccatctcacagtacctcacaggtctcttcccccgagcagtgcattgctggagcgaggagaagctcacgaatcagctgcaggtctctgttttgaaaaagcagagatacagaggcagaggaaaagggtggactcctatgtgacctgttcttagagcaagacaatcaccatctgaattccagaagccctgttcatggttggggatattttctcgactgcatggaatcagaaagaagcaaaaggatgggaaatgcctgcattcccctgaaaagaattgcttatttcctatgtctcttatctgcgcttttgctgactgaggggaagaaaccagcgaagccaaaatgccctgccgtgtgtacttgtaccaaagataatgctttatgtgagaatgccagatccattccacgcaccgttcctcctgatgttatctcattatcctttgtgagatctggttttactgaaatctcagaagggagttttttattcacgccatcgctgcagctcttgttattcacatcgaactcctttgatgtgatcagtgatgatgcttttattggtcttccacatctagagtatttattcatagaaaacaacaacatcaagtcaatttcaagacatactttccggggactaaagtcattaattcacttgagccttgcaaacaacaatctccagacactcccaaaagatattttcaaaggcctggattctttaacaaatgtggacctgaggggtaattcatttaattgtgactgtaaactgaaatggctagtggaatggcttggccacaccaatgcaactgttgaagacatctactgcgaaggccccccagaatacaagaagcgcaaaatcaatagtctctcctcgaaggatttcgattgcatcattacagaatttgcaaagtctcaagacctgccttatcaatcattgtccatagacactttttcttatttgaatgatgagtatgtagtcatcgctcagccttttactggaaaatgcattttccttgaatgggaccatgtggaaaagaccttccggaattatgacaacattacagttttaagggaaatacacagatttacaaacatgtcatagttgacttaagcgcatgagacaccaaattctgtggctgccatcagaaattttctacagtacatgacccggatgaactcaatgcatgatgactcttcttatcacacttgcaaatgaatgcctttcaaacattgagactgctagaaccaagcactaccagtatctccatccttaactgtccagtccagtgatgtgggaagttaccttttataagacaaaatttaattgtgtaactgttctttgcagtgaagatgtgtaaataagcgtttaatggtatctgttactccaaaaagaaatattaatatgtacttttccatttatttattcatgtgtacagaaacaactgccaaataaaatgtttacattttctttcaaa

SEQ ID NO: 348330 - DNA, 418 bp, Homo Sapiens
  misc_feature (108)..(108): n is a, c, g, or t
acacgggatttacaaacatgtccaaagttggaccttaagccgccatgagacacccaaattctggggccgcccatccagaaattttcctacagtacatgacccggatgnaactcaatgccatgatgacccttccttatcacacttgcaaatgaatgccctttcaaacattgagactgcctagaacccaagcactacccagtatcctccatccttaactgtcccagtcccagtgatgtgggaagttaccttttataagacaaaatttaattgtgtaactgttctttgcagtgaagatgtgtaaataagcgtttaatggtatctgttactccaaaaagaaatattaatatgtacttttccatttatttattcatgtgtacagaaacaactgccaaataaaatgtttacattttctttcata

SEQ ID NO: 348331 - DNA, 1947 bp, Homo Sapiens
  misc_feature (520)..(520): n is a, c, g, or t
  misc_feature (1272)..(1272): n is a, c, g, or t
  misc_feature (1280)..(1280): n is a, c, g, or t
  misc_feature (1296)..(1296): n is a, c, g, or t
cccgctctcggcgagggctctataccggtatttcggtcgggaaacacggacaaatgacccttgtgacaagaggtgggtgggcaaacgacacactatcttggtccggggcctactttaaagcctcaggggttaatattaaagccacctggcgctgggtgccctatgagcctttggcgcaaatccttgtaggtccggcccagccacacgcttaagggggtagggttccctgggaactgtggttggggggcagatttgggacccttcacttgggacccttgtcaaaaagttgggcgccagggccttggcctttcttcaagaaaggggcccccccggctggacccaatctcaccaggttcgaaggcccagggtgggcttcccacagcccaaaaaaaggggtcccggggggcagggcagcccactccgcttcctcgtcccagggggtgctgcagcaaggatgtggccaggaaggttctcatcgaagtccaaggctgtcggcagccttgctccacccgaaggcccnccaggtggcagggcagtcgatgtggcgcccgtgaatggtaaggtccacggtccacgtgtgaggcggggctcagaggcgggctcagctccagggcctccagtgcacccagctccccgcccaagagtgccggcgtcgaagatggcctcccagtcaaagttgcctttgaggggttccagctcaccctgctcctccggggtgggcagcagggtgctggggggccgcgggaccttggccacccgcttgggcagcggctgtttgcgcttatgccccagcctgccctcgcctgcaccccagcccgcctccccggtggcctcctcgaactcccgcagcagctgctgggcctcggtattcaccgtcagcggcccggcccgggggacagcgctgggctcctgcgcggcctggcgggcaaaggctgggtggatgtggacagggggcagtcgccgcttcttgaaagcgccgctcagtacgccctccgcgtactgggggtcaatgcgccagaagccccccttgcctggtgcgtccttctcccgaggcactttgatgaagcacttgttcagagacaggttgtggcggattgaattctgccaggtgggatctgcgtggcggaagtagcagaagttgtccgtgatccacttgtagatggccgacagggtgatcttggtggccttgctggccctgcatggccatgcagatgagcgtggcatacgagtagggaggcttcacgtgcggattgtgtggcttagtccacgtcntcgggggntgggctctgcagcccngggggcgctccgcgacgtgcacgacgacgtgggcttgcccggcgtctgtgcctgccccaggcaggcggggtcgcccgccaggggggacccgggcgccgctgaacctggcacctggtcgtacccgtggggctcggtgccccccgggggcagggcgggggccttggccttgagaatggagaattcctgcagccactgcaggctggtcaggctgtcatccagggcgtcgggctcctccagcacgccctccggcccggcctcctccgccggcccggctcccgagaggcgcagccagctctccgccatgtctgcggggactctccgagggggcggtcaagcatccacgggctgagccgggggtggcccgccgcgctctctggcccgctgagtcccgcagcttcccgttacacggcctcccggacgcgcgcttccatctcgcgaccccgggggcgcctcctccgaataagtatgtggtgcctggctcagagcgcagcccgggccagaggaaggttctggaagaagttgctcccaccccctgcggctctctgcccccagctcgggggccctgccagcgcctcttgccgcccccccgcccgacggcgcttctctgagctaccgcggccccgggaccggcattaagtagccgctccaaag

SEQ ID NO: 348332 - DNA, 787 bp, Homo Sapiens
  misc_feature (203)..(203): n is a, c, g, or t
agccaccagtgcttgcaaagcaaaggatgaaaatgtaatatgcatgttgacttgaagataatggtagttgaggggcagttagaagaaacaatgctcaaagtcggctgttcaatagtgttaaataatgctatgcatttctcaaactatttctatgactttgaaatattttacaccagagcttcgaataaaaacacgagcttgantttccttcaaaagaagacactgtccttcattaaaaagttcccatggagcctgcaagttgcttgcctttgaaatttgctattggaaagaaaacaaaaatctcacatacatgcattcttcactagcagacctgtggaggtttccacatgacacatggagcctgggcatgggaattcttcatggattcctctggaactctccctttggtgtggattttaggctaagggatgcttctcgggaagatggtcctgggcagtgatctttgtaataagagagagtccgatgacgctggagtggccatgcaatttctgaaggcctggcaggagcattcacagaggagtatcaaattcttttcctgggatgtctcctcccagctcctcactggagggagtcttgtggttcacttttccagggtctgaggacagggagagaggggcagaaccgtgattgctgtcttcactgatctttcctttcatggcttcctgcacgaattccaaaatctcgaggggcagtcttttgaatttgtcttggtattcttgctccagctccacctgcagcttgggcttttcatccaggatctgctgac

SEQ ID NO: 348333 - DNA, 1715 bp, Homo Sapiens
  misc_feature (124)..(200): n is a, c, g, or t
  misc_feature (1650)..(1651): n is a, c, g, or t
  misc_feature (1653)..(1653): n is a, c, g, or t
  misc_feature (1662)..(1662): n is a, c, g, or t
  misc_feature (1671)..(1675): n is a, c, g, or t
ggaccggtccggaattcctgggatgcggggtcgagatggcggcgcctttgaggattcagagcgactgggcgcaagccctcaggaaggatgaaggggaggcctggctgagctgtcatcccccagnnnnnnnnnnnnnnnnnnnnnnnnnnnnnnnnnnnnnnnnnnnnnnnnnnnnnnnnnnnnnnnnnnnnnnnnnnnnntctttgtatggcagcctgacttgtcaaggaattggcctagatggcatcccagaggttacagcttcagaaggatttactgtgaatgaaataaacaagaaaagcattcatatttcatgtccaaaggaaaatgcatcttctaagtttttggcaccatatactactttttccagaattcatacaaagagtataacatgcctggacatttccagcagaggaggtcttggtgtgtcttctagtactgacgggaccatgaaaatctggcaggcttccaatggagaactcaggagagtattggaaggacatgtgtttgatgtgaattgttgcaggtttttcccatcaggccttgtggtcctgagtgggggaatggatgcccagctgaagatatggtcagctgaagatgctagctgcgtggtgaccttcaaaggtcacaaaggaggtatcctggatacagccatcgttgatcgggggaggaatgtggtgtctgcttctcgagatgggacagcacgactttgggattgtgggcgctcagcctgcttgggagtccttgcagattgtggttcttctatcaatggagtggcggtgggtgctgctgacaactccataaaccttggctcccctgagcagatgcccagtgaacgggaggttggaacagaggccaaaatgctgctcttggcccgggaagataagaaacttcagtgcttgggactacagagcaggcagctggtgttcctctttattggctcagacgctttcaactgctgtacttttctctctggcttcttgctattggctgggactcaagatggaaacatttatcagctggatgtgaggagtccaaggggctccggtacaagtcatccacagatcaggagcaccagttctatccctgctaagtgtcagagatggattcattgctagccaaggtgatggaagctgttttattgtccagcaagacttagactatgtcactgagctcactggggctgactgtgaccctgtgtacaaggtagccacatgggagaagcagatctacacatgctgtcgagacggtcttgtacgacgctaccagctttctgacctctgacttcttggaaagagcagtcccggttagtgaaaaggtttgaccctgatcaacaatgagcagaaacatcatcagtccttcccaaggaccatggcgtttaatgtcttgggcaccccttggaaatcacagaaagtcagctgtactggccgtgtggaactctcatcccaagacctactttgaactgagtaagaaggtcattgtgcccactgcatttgttccaacttctccttgtataaactcaccccagcaacacagggcaaggatatagatgcttttagtttgttcttaaaccagttttgttaaatgtttacaaggacctcagtactaaagcctgttctctggaggaaataaagaaatatgttttggganncnccccctgcnaacataaannnnntcccttgttcggccgccttcggcccctcaaaaaacctttc

SEQ ID NO: 348334 - DNA, 956 bp, Homo Sapiens
  misc_feature (408)..(408): n is a, c, g, or t
agcgggctggtggaagcggggtcgagatggcggcgcctttgaggattcagagcgactgggcgcaagccctcaggaaggatgaaggggaggcctggctgagctgtcatcccacgcagcctgtaggctctcatcaagaagctagtatgctgtgtgccgatgcattcattgtacgagttctgctagaactcgggaaacgcatctttgttatgtgctagccatgactttgtcagagggaaattaggtcgtatgatggctgtccctaggtagggttacatgcgttcacggaaggcatttacgtgtgcaatgacaaataaaccaagataaaagcgattccactatttcgatggtcccaagagggaaaagtgcaatcattcctaagagtagtatggcgaccgagtatgactgacnttgtctgtcccagagactctcaatacaagaaggaggtcatacacgatggccctggcaccatgttccagccagaggacggtcattggtcgtgatcttctcaggtagctcgacgaggcacgcatgaaagagtctggtcgaggcttccaactggatgaactcaggagtagtactcggagaggacactgtgtttgatgtgaattgttgcagggtccttcccatcatggccttgtggtcctgagtgggggaatgggatgcccagctgaaggatatggtcacgctgaagatgctagctgcgctggtgaccttcaaaggtcacgacaggaggtatcctggatacagccactcgttggatccgtccggaggaactcgtggttgtcttgactctctcgaagattgcggccacgcaccgactttggggatctgtcgggcgctcatgcctggtctggggaaatcccttgcagaattcgtgggtgctcccctatcgactggacgtgggccaggtggcgtgcttgcttggacaaccttccattaaaccctcttgcgttccc

SEQ ID NO: 348335 - DNA, 765 bp, Homo Sapiens
  misc_feature (348)..(358): n is a, c, g, or t
gaactgtcttaacatacagaaacggtctagtggtggcaggctggacaggagaactgccttaatgttcagaaacggtccagtggatggcaggctggacaacatatccaccttcctacagtccggtggtggcagactgggcaagaaaaccacaactgcaaccgcctgcgaaacatcatgcagtttacgcagcattttcatttagcaccctcctcctaacagccctcacctgagcaaccttcatgtaacccaagcttgtccaacccaaggcctgtgggacgcatgcagcccaggatggctttgaatgcggcgcaacacaaatttgtaaactttcttaaagtgttatgagannnnnnnnnnnagctcatcagctatcattagtgttagtgtattttatgtatggcccaagacaattcttctttttctaatgtggcccagggaagccaaaagattggacacccatgatctagaggcttaccacattcccatgacttatggcacctttcttcaatctttaaagtcagtaacattgcgtttttctcatccttcttcagtagccatatctacctctctgactcttctgcttccttcttccacttaaggatggttattattaaattggatccacctggataatctaggctagtcttcctttaaggtcagttgattaacaacagtaattccatctgcaagcttattgcccctttactatgtagcctaaaatattcacaggttctggggattaggacatggatctttttgtcaggc

SEQ ID NO: 348336 - DNA, 697 bp, Homo Sapiens
tttgtcatctttgttgtattggacaatcccagttcacgggtgagtgactactaaaagccaccttttctggaggtaaagtggggattcccttcaacctgttcaatctgaaatatggcctggatcactcagtcatactgagaactcccagcattcatagtattctgtcaagtaccattgtaggcacttgtaagtattttctctattaatctttgcaataagccagtgaggtagggatcattattcccactttacactgaaggaactgaaacacatagaggttataggtaatgagtgggagagccaagattcagaatgaccatcctctgtgggtcatcatttccctctatgcaaagtcagtgcaggtattgcagccttgataatgggtactgaccactttgaaatggagattaggtgttgccacacttaacttatgtctcagtagctcctcacagcaagaagcatcaatcatcttagtgaaatatgcctatagggcagttctgttccagggaagcattgtctctgtgggtcacattaaggccttgataggaaggtaaagatttagtgtgaatgattccaagtggatgatggggagacaccactgtagggaaagcagattttcctgtctatcccttttcctttttttcagtgtccatcctcctggaaggggcactcagaaaagacatctacctcccttctt

SEQ ID NO: 348337 - DNA, 1240 bp, Homo Sapiens
  misc_feature (24)..(24): n is a, c, g, or t
  misc_feature (206)..(206): n is a, c, g, or t
ccactgtggataacattacaggangagcaaggagtggtcattaggcaaatagtaatactcatgtcatgaatttcctagcttgactgcctaagacatctgatgcctttaccattgagaactcagctaggactttaatttttatgccatttgcagtgtctttttctgcctactctgccagccactcttaattcattaattcactcaanaaatatatatgaatatatatggagcacccatgagacagctttatcccaggcacttagaatacagtgaacataacagacaactctccttcaaaatgtatctcatttctgtaatccctgctaagtgaggtcaaggctgacatctaagatgttctgtggcggaacctggcccccatcaggggcaacctttaatttggattctggaagactaaaactttgagatccctcgccccgcgccgcccccccaaaaaataagaagaagaagaatgaaaggatgcttcatgaccaaatgatgatgggtggagttgaaaattctgggatcggggccccgcccagcccacctgaaattcctttgatggtactataaggcagctgcacagatttataaggagccatgtttcctgatttttggtctagaatccaaattttctagattggagtagtagatgttaccaagaagagaatgctggtcagctttcagcttataggaaatgttttgttttcttttacccacatcaaccaaagagaagaaaccagtatggtgaagagatctctaaaacatttcataggaagccactaacaagtgctttgcctacacaacacttggcaggggctggccaacctcagtgatgaaggtttccaattatccaaaagacttctcatgaaagagggattcgatattttttctgttttttcagaggatggttagaagttatttctaatgcttttctatttctgtacagaaagaaaaaataatgaccacaggttataaggctcctgctcagattctcagggagaggccaagtatgacttgacttgttgaaggaatgaagcccttacccatcttgtccagaaattctgtcttagggcagtggattagggtgacatctgaaggccccagagttttaaatattaatagagtaggggtccaaaggcagaatccatggttctggaaatgccacgatgccttctggcactttttgggcattctcagctgccaaattaaagtgaaaaataggccgggcgcggtggctcag

SEQ ID NO: 348338 - DNA, 1696 bp, Homo Sapiens
  misc_feature (1444)..(1587): n is a, c, g, or t
  misc_feature (1595)..(1595): n is a, c, g, or t
  misc_feature (1626)..(1626): n is a, c, g, or t
  misc_feature (1628)..(1628): n is a, c, g, or t
  misc_feature (1632)..(1644): n is a, c, g, or t
atcaggccaaatcggccgagctcgaattcgtcgagagcggaggggcggacggcgttggtttgaagaccttcagcgttgccctggcggagcagagacaggccctcggggtggaggtctttggtttcataagagcctgagagagatttttctaagatatgtgtaacacaccaacgtactgtgacctaggaaaggctgctaaggatgtcttcaacaaaggatatggctttggcatggtcaagatagacctgaaaaccaagtcttgtagtggagtgatggaattttctacttctggtcatgcttacactgatacagggaaagcatcaggcaacctagaaaccaaatataaggtctgtaactatggacttaccttcacccagaaatggaacacagacaatactctagggacagaaatctcttgggagaataagttggctgaagggttgaaactgactcttgataccatatttgtaccgaacacaggaaagaagagtgggaaattgaaggcctcctataaacgggattgttttagtgttggcagtaatgttgatatagatttttctggaccaaccatctatggctgggctgtgttggccttcgaagggtggcttgctggctatcagatgagttttgacacagccaaatccaaactgtcacagaataatttcgccctgggttacaaggctgcggacttccagctgcacacacatgtgaacgatggcactgaatttggaggttctatctaccagaaggtgaatgagaagattgaaacatccataaaccttgcttggacagctgggagtaacaacacccgttttggcattgctgctaagtacatgctggattgtagaacttctctctctgctaaagtaaataatgccagcctgattggactgggttatactcagacccttcgaccaggagtcaaattgactttatcagctttaatcgatgggaagaacttcagtgcaggaggtcacaaggttggcttgggatttgaactggaagcttaatgtggtttgaggaaagcatcagatttgtccctggaagtgaagagaaatgaacccactatgttttggccttaaaattcttctgtgaaatttcaaaagtgtgaactttttattcttccaaagaattgtaatcctccccacactgaagtctaggggttgcgaatccctcctgagggagatgcttgaaggcatgcctggaagttgtcatgtttgtgccacgtttcagttcagttctgaagtgttattaaatgtgttcctcagcgacagtgtagcgtcatgttagaggagacgatctgacccaccagtttgtacatcacgtcctgcatgtcccacaccattttttcatgaccttgtaatatactggtctctgtgctatagtggaatctttggttttgcatcatagtaaaataaaataaacccatcacatttggaacatnnnnnnnnnnnnnnnnnnnnnnnnnnnnnnnnnnnnnnnnnnnnnnnnnnnnnnnnnnnnnnnnnnnnnnnnnnnnnnnnnnnnnnnnnnnnnnnnnnnnnnnnnnnnnnnnnnnnnnnnnnnnnnnnnnnnnnnnnnnnnnnncccccccncacccccaaaaaaacctttaaaaaccacccncnaggnnnnnnnnnnnnnaacaacaacgggcaacgagggccaacccggggtccccagggaaacccggccc

SEQ ID NO: 348339 - DNA, 2611 bp, Homo Sapiens
  misc_feature (40)..(40): n is a, c, g, or t
  misc_feature (44)..(44): n is a, c, g, or t
  misc_feature (1065)..(1078): n is a, c, g, or t
  misc_feature (1336)..(1348): n is a, c, g, or t
aagaagcagccaattactcgagcacacaaagctgcgacangaanagcaccaagccaccatgaatccaccctctagaaggtagattcaagagatgaatccaaaatgtcttcatggtgaaaaaagttaagggaaaagactttgcttttaaaaaaatgtttcaaaagaaaggtattttcactaaaccactgccagtataaaagcaccctgtcaagggccctgacccagagttgtggtctccaaggaggcagcagaactaagtctgaaccgccaagatgctaaattgcaatggaagcttaactttagtttatttctaagcattttttatatctgtggagtaatagaaagctccattactcaactggaaaggaccctaatgacagggcaactgaacagattgcacatgggatagccaaactggactttctttgtttcctctttaaaagtttacaatgcagaccattttttgtcccttccttttgtttcctctgaggggctgttcgccccaggcagggtccatctttctgatctgtccaacctcctttgtgccacacggtgctggtcacagggcttcagtagtgtttgtgttgtgcgctcaccccattccagaacaaatccaagaggccagtcctccataagcacaaatggaattgtgcaaccaccagaaaaacactactgtggcaaactggagaagtgccaatttaattctaactgccacgttctcatgatgtgctccaccaactttttagtatatgagtcactggttttataaggttgtttttaccacagtggtctttttaaaccacctgcccactcccttaacaagagttttataccaattattagtcaacactgataaaaggcttttttagggctttatttgtttgagccttttcagtgaaagaaggaacatttcctatggtgctgtctcactgccttaaaacagatttctatgacagtttaacagttggtttaaatcctaaaccattggtaatttccactgtcttttcatttacaaccaagcaacaccagttaacatagtagcctcatctctatatatctttctcnnnnnnnnnnnnnnggaagaaagggataggagaaagatcagtattttaacgcctggtgaatagatcggcttggcctatcctccaaaatattaaaataacccagaaaggctcttggaccggtcacttaaaacctaagacatggtggcgaaattccatccagttctaagtgaaagagtttcagaaggcaggagattttgaattattatccagcagggctggaaagcactaggatgcagcatgagcacaactattcggctttccttccctattgnnnnnnnnnnnnnaatgagttttgacgcatgttgttttgattgctattgttgtacatgagaaattcagcattaaagaacactgaagcggtaaggtcactgtggaagaggaagcgtttatactgtaaaagaaggttagatttgcacagtctactgggtaggtattgtaaataataatttttaaaacttgcacaaatcaaaacaaacacaaacaaaattgtattttatcctgttggtgttaagaggtgtttcacttgctgagatttcctgtacattgcaaacaaatacagaatgcaaaccctcaaagctgtattatctggtgtgtttgtcctgtatttacagttgtttttgactatgcaggagctatcagtgctagagtgagcatgcttcaaaactgtacatgaagccaatatatttttggataagtaaaactgtctgaaagtacatctgtcatggcaggctttaaagagagtgcatgaaaactgatcagtcattggagaagttaccaccacacacaaaggacaggttttaagtttatgaaacccaagggctaggccatggtatagacttcttctatgagtgtgtgaaaatgtgttacttttaggacgtgtatttggtgctactctctgtgaccaccaatgggtcagttgctatagaacaacaacaccacgaaacatctgtgcagttttcagagtgtcacaaagtcaataggtccttacacggtgctattgccctaagggaaatccgaactgaatttatgcacatagaattgtcaccctgactttgaagcctcaaacatggatcaaatctgttgtgaaacatcaatatatgtagctggatgagtgactagtttcccttgtataatatgtgatctaagaaaattgctaatctttccctgccattttgagaaacacagtccaaacatgagcataaacagaatttcctgcaatacatcccagtaggtccacctagtttacaacttaaactagtttgtgaaacatttgtctgtatacattttatattttgtacattttgatgtaacatatcatgtaaataggcagaaacagtgaaataaatcatctgaaaagttttgtagtctttgtaaagccccaacaataagtacttggtgtcaatggacttaactggatgatgtattttctattggtttattgttcctctagcttgtaaaccagcttgcatatatttttttgcaaatgtgcaccctgtatctgtctaaattattactttgccattaaagtggaattatttattgacaac

SEQ ID NO: 348340 - DNA, 3735 bp, Homo Sapiens
  misc_feature (64)..(100): n is a, c, g, or t
  misc_feature (569)..(586): n is a, c, g, or t
cacgcgtgaattaactcgaaaccccactatagggcgaactggagctctaacgcggtggcggcgnnnnnnnnnnnnnnnnnnnnnnnnnnnnnnnnnnnnnatcaggccaaatcggccgagctcgaattcgtcgagagcggagcggtctctccgcgcgtctcccggagctttctccattgtctctgcctttacaacaggttcgggcggcggggaagacgggggggtgcggggccgccccagcccgggctttcttggggccgccccccttctaccgggtgtgcgagtctttggctgcttttattcggctcgggagctaattccccgacggagccgcgccggggcgagtccgacccctccctccgggccccctccgggccgcgctgccgcctcggccctgcgtgtgggaatgatgtgcgcattggagggtctaagttcttcacgcgcctggggaggcctcccttttctttcttaggcaaccaaagcgtattaatcctactgatcagtaaatccgaggcagcagcaggagagacaaacgttattttcccgcttgattccaagaacctcttcgnnnnnnnnnnnnnnnnnnaaagagggagacgatggactgagctgatccgcaccatggagtctcgggtcttactgagaacattctgtttgatcttcggtctcggagcagtttgggggcttggtgtggacccttccctacagattgacgtcttaacagagttagaacttggggagtccacgaccggagtgcgtcaggtcccggggctgcataatgggacgaaagcctttctctttcaagatactcccagaagcataaaagcatccactgctacagctgaacagttttttcagaagctgagaaataaacatgaatttactattttggtgaccctaaaacagacccacttaaattcaggagttattctctcaattcaccacttggatcacaggtacctggaactggaaagtagtggccatcggaatgaagtcagactgcattaccgctcaggcagtcaccgccctcacacagaagtgtttccttacattttggctgatgacaagtggcacaagctctccttagccatcagtgcttcccatttgattttacacattgactgcaataaaatttatgaaagggtagtagaaaagccctccacagacttgcctctaggcacaacattttggctaggacagagaaataatgcgcatgaatattttaagggtataatgcaagatgtccaattacttgtcatgccccagggatttattgctcagtgcccagatcttaatcgcacctgtccaacttgcaatgacttccatggacttgtgcagaaaatcatggagctacaggatattttagccaaaacatcagccaagctgtctcgagctgaacagcgaatgaatagattggatcagtgctattgtgaaaggacttgcaccatgaagggaaccacctaccgagaatttgagtcctggatagacggctgtaagaactgcacatgcctgaatggaaccatccagtgtgaaactctaatctgcccaaattcctgactgcccacttaagtcggctcttgcgtatgtggatggcaaatgctgtaaggaatgcaaatcgatatgccaatttcaaggacgaacctactttgaaggagaaagaaatacagtctattcctcttctggagtatgtgttctctatgagtgcaaggaccagaccatgaaacttgttgagagttcaggctgtccagctttggattgtccagagtctcatcagataaccttgtctcacagctgttgcaaagtttgtaaaggttatgacttttgttctgaaaggcataactgcatggagaattccatctgcagaaatctgaatgacagggctgtttgtagctgtcgagatggttttagggctcttcgagaggataatgcctactgtgaagacatcgatgagtgtgctgaagggcgccattactgtcgtgaaaatacaatgtgtgtcaacaccccgggttcttttatgtgcatctgcaaaactggatacatcagaattgatgattattcatgtacagaacatgatgagtgtatcacaaatcagcacaactgtgatgaaaatgctttatgcttcaacactgttggaggacacaactgtgtttgcaagccgggctatacagggaatggaacgacatgcaaagcattttgcaaagatggctgtaggaatggaggagcctgtattgccgctaatgtgtgtgcctgcccacaaggcttcactggacccagctgtgaaacggacattgatgaatgctctgatggttttgttcaatgtgacagtcgtgctaattgcattaacctgcctggatggtaccactgtgagtgcagagatggctaccatgacaatgggatgttttcaccaagtggagaatcgtgtgaagatattgatgagtgtgggaccgggaggcacagctgtgccaatgataccatttgcttcaatttggatggcggatatgattgtcgatgtcctcatggaaagaattgcacaggggactgcatccatgatggaaaagttaagcacaatggtcagatttgggtgttggaaaatgacaggtgctctgtgtgctcatgtcagaatggattcgttatgtgtcgacggatggtctgtgactgtgagaatcccacagttgatcttttttgctgccctgaatgtgacccaaggcttagtagtcagtgcctccatcaaaatggggaaactttgtataacagtggtgacacctgggtccagaattgtcaacagtgccgctgcttgcaaggggaagttgattgttggcccctgccttgcccagatgtggagtgtgaattcagcattctcccagagaatgagtgctgcccgcgctgtgtcacagacccttgccaggctgacaccatccgcaatgacatcaccaagacttgcctggacgaaatgaatgtggttcgcttcaccgggtcctcttggatcaaacatggcactgagtgtactctctgccagtgcaagaatggccacatctgttgctcagtggatccacagtgccttcaggaactgtgaagttaactgtctcatgggagatttctgttaaaagaatgttctttcattaaaagaccaaaaagaagttaaaacttaaattgggtgatttgtgggcagctaaatgcagctttgttaatagctgagtgaactttcaattatgaaatttgtggagcttgacaaaatcacaaaaggaaaattactggggcaaaattagacctcaagtctgcctctactgtgtctcacatcaccatgtagaagaatgggcgtacagtatataccgtgacatcctgaaccctggatagaaagcctgagcccattggatctgtgaaagcctctagcttcactggtgcagaaaattttcctctagatcagaatcttcaagaatcagttaggttcctcactgcaagaaataaaatgtcaggcagtgaatgaattatattttcagaagtaaagcaaagaagctataacatgttatgtacagtacactctgaaaagaaatctgaaacaagttattgtaatgataaaaataatgcacaggcatggttacttaatattttctaacaggaaaagtcatccctatttccttgttttactgcacttaatattatttggttgaatttgttcagtataagctcgttcttgtgcaaaattaaataaatatttctcttaccttataaaaaaaa

SEQ ID NO: 348341 - DNA, 539 bp, Homo Sapiens
tgatatagctgttctagaggatccctcacgcccatgtcacaaggcttcactggacccagctgtgaaacggacattgatgaatgctctgatggttttgttcaatgtgacagtcgtgctaattgcattaacctgcctggatggtaccactgtgagtgcagagatggctaccatgacaatgggatgttttcaccaatgtggagaatcgtgtgaagatattgatgagtgtgggaccgggaggcacagctgtgccaatgataccatttgcttcaatttggatggcggatatgattgtcgatgtcctcatggaaagaattgcacaggggactgcatccatgatggaaaagttaagcacaatggtcagatttgggtgttggaaaatgacaggtgctctgtgtgctcatgtcagaatggattcgttatgtgtcgacggatggtctgtgactgtgagaatcccacagttgatcttttttgctgccctgaatgtgacccaaggcttagtagtcagtgcctccatcaaaatggggaaactttgtataaca

SEQ ID NO: 348342 - DNA, 1413 bp, Homo Sapiens
  misc_feature (121)..(121): n is a, c, g, or t
  misc_feature (327)..(327): n is a, c, g, or t
  misc_feature (1403)..(1403): n is a, c, g, or t
ttgctgctgcaaagaacagattttatatttcttcctctaatcttggcaaatgacctttaccttttggaaagatttcatattgcttcctcctccctggataggacctaatgtagcacagcgngactcaaagaggaggacattttctcttgccagtgcactgggcagtggggctgtccttcaactgctgctgccaaaattggttttctaaaattcttccagtagagactaaaagaagattcaattcctgtaacccaagactgagtcttagggctccagtctccacctgcttggtttcctatcctttgctgcctgcctgggggtggcctnggaagcctgttcagaaaggcacaatgtgggagcctgggggtgtcttcccccaccccaggaccgtcaggtttaccagtgtgtgcaatcgccatgtattcagagggaagtacctttgttacctacaacttaggagctaggcctctgctacaagcacttgaaaatgatatttttatttttaacgtctcaacaatctgatatcggatgtcgtttaacctgggctcgtggtagggctccagcatttctccctccttcctggtttgcctgtaggggtagactcggaaggtgggtggggtgtgcatttcctgttaggagtgtatcagtgcttgtcttattataagcccctttcttttgtgaatttgaagtagcaccaacaagcctggattgtgaaggtattaagaatcggtctgtgggctactgagtgggtccttaggatactggcccagattttgccactgggtatggcagatcattttctaccatggcctgctgctcttgtagtggacttcctgagtccaatcccacctcctggtgtagaatttacactgctgcacctgaggtcgatgtttcaaagtaagatcaagccagtgttttgatctgggctctgagcacaagtcaggaaacaccaacatattcacactctcccagtaggttcctcagtccgatggtgaatggctattcgtaaatggctggtctggctctttggtgttggagcctttcccaatagccccatgaaaagaagcatcacccaaggatattgtaaaaaggatgtaacaaggagatagggtagacattgtactcagtgggccttgggcctagcccagctctgagcagaggactgtggcattcactgtccttgagtgtttcaccttcttggataacacacgggccttctcttctggatttcatcagagattacagccagatgggggctgaagaccatcctcttgaccacagaggtgtgactgtgggaattcctcccaatttatggtttcccagaaaatcttagttccttttatttatagaatgcatgtcttttgtgttaagaaaccaaagagaaataaagagaacactccctnataaaaaaaa

SEQ ID NO: 348343 - DNA, 606 bp, Homo Sapiens
  misc_feature (256)..(389): n is a, c, g, or t
gtttttggtgttcttaccacctcttaatacctactattattacaactcttagtgaaaattagatagttatcaggtcaaaggaaactattagtttaccattgtaaacgaattggtaaaccattagtttaccaatttggggaaggaggtaagtagaggatagaaaatgagagagaatttgggcttataatgggatggggtaggtgagtcatttaggttgggccttaaattcatgatgtgccttaaatttaggtttttnnnnnnnnnnnnnnnnnnnnnnnnnnnnnnnnnnnnnnnnnnnnnnnnnnnnnnnnnnnnnnnnnnnnnnnnnnnnnnnnnnnnnnnnnnnnnnnnnnnnnnnnnnnnnnnnnnnnnnnnnnnnnnnnnnnnnntaattaaacaaaaatttttaaatatcccctattcagtttttatatacacttgtgtttttttgtatgtgtattaaagacattaaactataaaatatactacaaattattgtgactcttattttggcttttttccccccttttatatgtagggaaccagagcctctcttgacctttgaaagggacaaagagaattttagatagaaaatagcatcagaaa

SEQ ID NO: 348344 - DNA, 552 bp, Homo Sapiens
  misc_feature (11)..(11): n is a, c, g, or t
  misc_feature (26)..(26): n is a, c, g, or t
  misc_feature (39)..(39): n is a, c, g, or t
  misc_feature (73)..(73): n is a, c, g, or t
  misc_feature (106)..(106): n is a, c, g, or t
  misc_feature (551)..(551): n is a, c, g, or t
ctttccaaaanggaccatccttcggnatccataagcccntagggcccaaaggtgtttttaatgagataatccnttttgattttcctaacaagaagggaaatattcnctttacattttaacatcaacttttaagtgatattcagaattaattgaccatggtgaatacgttgtaaaatgttttcatattaagaatgtaattatttccctattgtattttttaaaagctaaagtcatatttaaaattctctttgaaagaaacaggcaaagaaacagcaaagatttttttaaattaaatatgttagtagtgcccacttcaaatgactgtaaatatattttcactgtttctcaatgtatttaattcataaagtaaaaattttatgaaaagaaacttgcaaggaaaatcctagttttcagtccactcgccccactttgtagtagcttcactgaatttcctgctttcctggttgaattttctactgtttcacgtggtgtaaccctagactggcgcccttggcgtgcccctttgtgtatgaataaacttctctcccccng

SEQ ID NO: 348345 - DNA, 1821 bp, Homo Sapiens
gtcgtctgataaggggaagctgtgacgcagacacgcacagtaatacacagatggaggctcaaaagacacgagtttcgcgtcctgaaattccgcttccagggccaagctttcttttctgatactgtttgtccctcgcgaggcaccgttgggtcgcgcagtaggcgtgactaggggcgggaagtggggcgggagcagggccgcggagcctgggctgcggctgtcatggacgcctgggtccgcttcagtgctcagagccaagcccgggagcggctgtgtagggccgcccagtatgcttgctctcttcttggccatgcgctgcagaggcatggagccagtcctgagttacagaaacagattcgacaactggagagccacctgagccttggaagaaagcttctacgcctgggtaactcagcagatgcccttgagtcagccaaaagagctgttcacctatcagatgttgtcctgagattctgcatcactgttagtcacctcaatcgagccttgtacttcgcctgtgacaatgtcctgtgggctggaaagtctggactggctccccgtgtggatcaggagaagtgggcccagcgttcattcaggtactatttgttttccctcatcatgaatttgagccgtgatgcttatgagattcgcctactgatggagcaagagtcttctgcttgtagccggcgactgaaaggttctggaggaggagtcccaggaggaagtgaaactgggggacttgggggaccaggcactccaggaggaggtctgccccaactggctctgaaacttcggctgcaagtcctgctcctggctcgagtccttagaggtcatcccccacttctgctagacgtggtcagaaatgcctgtgatctcttcattcctctggacaaactaggcctctggcgctgtggccctgggattgtggggctttgtggcctcgtgtctccatcctgtctattctcaccctaatctatccctggctacgactcaagccctgaccttccggtacaggataaggaggggacctgaattggtaagatggaatcttagatcgtcccccatgtgccagcctcattcgaattctactctttggttaaagttagaaattcagagatttaggggtggaggaagagctttggggaagatgaggtaaggaaagatgactcgtgaagttaataggatgtctctaatttctagatgtgcctgagcttctgttcttttcctctttctttgtgtctctcttgaatatatttactttgtgtctcttaactctgtttaaggttctgtgtctatgcatctctctctttcttttttcaaccttctcattctcctatccagggatttaatcagcagaattactttttgataggggaggtataaggtttggcctgtaaggttctaactgccttcttttttctcacagaggtggcttatggcagatttttcctccttcaaactccaaacataatttttaagactatgtgccagtggactcttcccttatatctctgcaccacaagttgttggatgtttcctcttcctcccttatgtctacctcaccaacctcgctcatcatttggcccttatccttccttgtacacctaccttcagatttctgcttacactttgatttcagagctttattccccagtctgttcttactcctttgtcgcttatccagaatgatgctatgtgtagcatcttgctgtaaatcctgtacaatgattctgtgtaaatagctgtggcctatgccaataatgaagagcaagcctttcaggtaagcaaattaaagttcagtttgctcatcgacaaaaaaaa

SEQ ID NO: 348346 - DNA, 991 bp, Homo Sapiens
ctctgtgcatatgaagtcaggaacaagactgctcaaggggtcacactataccactagagctcagaggaggacccgagaagttctgagatatatccaaaggtaagactgttctggggatgggagggtcgaagcactctcgtattctgacagggatttcaggctgttggtgttctaaaatgcagcagcgtgttggcccttatttcttagcattaacttgtgtccttggcgccagtacttttcgtgcacgcttgtttgttgatctgtgttagaaaacctgcattgccaacagtgcagctcgaacttaaacttgttattccaaataaatattgtaattttttaaattgctcttgtataatcagatgccccttttagtattattttagaagcgttgggagggttttgcctaaagtacaatttatcgggaaaaactagatttttagttttataaaacttttaagtctttcatgggacctatattttcttgaattaaattttgtagttctagaataaataggcaatctaaaaaggtgttctctgtgttatgtaaagtggaggcttccttatattttaacctactaagcaatgaggagggattcctgtcattaagcacaagggcgctggatcctcaagtgcccatcttcgtgagagaaaaagcagcacatcctgcccatttctggtgctttctgctcacaggcaccaaagctgcacatgtaaactgacttcttgccaaaggaaatgacccctgggaagttcaagctcctggaagaggctttaactcggacgcgccctcctccaggaaccagtgggcagggcagccttcatgcatgtgtaactggacctccagccataagcatggtgtgcagtatggaagagcctgctacggaactgaaagtgattggacattttataggaattgatagagatgttggtcctcaaaagctacaaaccagtggtctgcaaaataaagtgtgttggaaacctctaataaaaa

SEQ ID NO: 348347 - DNA, 903 bp, Homo Sapiens
gacgcagctgaggaagcaggaacgtctgtaacaggcggccaaacagtactaaacccctggattgtcctgggaggagtggctaccactgtctgccaacccaatgaatttatcatgccagacaatgcagtgccagggacgtgctggtgctgacaaaacccctggggacacaggtggcagtggctgtgcaccagtggctggatatccctgagaaatggaataagattaaactagtggtcacccaagaagatgtagagctggcctaccaggaggcgatgatgaacatggcgaggctcaacaggacagctgcaggactcatgcacacgttcaatgcccacgccgccactgacatcacgggcttcgggattttgggccatgcgcagaacctggccaagcagcagaggaacgaggtgtcgtttgtaattcacaacctcccggtgctggccaagatggctgcggtgagcaaggcctgcggaaacatgttcggcctcatgcacgggacctgcccggagacttcaggcggccttctgatctgtttaccacgtgagcaagcagctcggttctgtgcagagataaagtcccccaaatatggtgaaggccaccaagcatggattattgggattgtagagaagggcaaccgcacagccagaatcatagacaaaccccggatcatcgaggtcgcaccacaagtggacactcaaaactgtgaatcccacacccggggccacctcttaatctagacagaaatagctgtcggaacgacccacacatagatctatttcccttatcacttcaatttaacgacctataagcaaccaaaatctcatggtgtctacccatcggggtgaccttaggatcggccgaacgtgcatacacctcacacacttaaaacccactcgaaatcct

SEQ ID NO: 348348 - DNA, 2472 bp, Homo Sapiens
  misc_feature (1754)..(1764): n is a, c, g, or t
catttttattcaggcgacgcttaagggagcccggccgcgcccggtgcattgtgggagcggcccgcggcccgttttcgggaggaggcggagggcgcaaagcgagccggtggatccataaagaacccagccaacccgcagagggaggggaggggctgagctgtgaggagagcggggcccaagaaccatgtctacgcgggagtcctttaacccggaaagttacgaattggacaaaagcttccggctaaccagattcactgaactgaagggcacaggctgcaaagtgccccaagatgtcctgcaaaaattgctggaatctttacaggagaaccacttccaagaagatgagcagtttctgggagccgttatgccaaggcttggcattggaatggatacttgtgtcattcctttgaggcacggtgggctttccttggttcaaaccacagattacatttacccgatcgtagacgacccttacatgatgggcaggatagcgtgtgccaatgtcctcagtgacctctatgcaatgggggtcacggaatgtgacaatatgctgatgctccttggagtcagtaataaaatgaccgacagggaaagggataaagtgatgcctctgattatccaaggttttaaagacgcagctgaggaagcaggaacatctgtaacaggcggccaaacagtactaaacccctggattgtcctgggaggagtggctaccactgtctgccaacccaatgaatttatcatgccagacaatgcagtgccaggggacgtgctggtgctgacaaaacccctggggacacaggtggcagtggctgtgcaccagtggctggatatccctgagaaatggaataagattaaactagtggtcacccaagaagatgtagagctggcctaccaggaggcgatgatgaacatggcgaggctcaacaggacagctgcaggactcatgcacacgttcaatgcccacgccgccactgacatcacgggcttcgggattttgggccatgcgcagaacctggccaagcagcagaggaacgaggtgtcgtttgtaattcacaacctcccggtgctggccaagatggctgcggtgagcaaggcctgcggaaacatgttcggcctcatgcacgggacctgcccggagacttcaggcggccttctgatctgtttaccacgtgagcaagcagctcggttctgtgcagagataaagtcccccaaatatggtgaaggccaccaagcatggattattgggattgtagagaagggcaaccgcacagccagaatcatagacaaaccccggatcatcgaggtcgcaccacaagtggccactcaaaatgtgaatcccacacccggggccacctcttaatctagacagaaatagctgtttggttttgtttttaaatagatctatttcccttatcacttcaattaaagactataaacaacaaaaatctcattgtgtctacacatcggggtgaccttaggtcggtttgtaagtggatacaattaataaaataaaatccattgcctttttttcctgttacattaactgaagatgcacctaatcttgaggcagtttctgagttgagaattatattgttatccaatactgttgattcattttgaatctttagacacttatctcttgccgcataggctttttaaaggtgctttcacatagcacaggcattacccgtagtcgtgtcaaatagcagttggtgtcttcattttatgtatatttatcatataagtctgannnnnnnnnnnaagcgtcttgaatggttttctggagagacagcattggtaagtggcacatgacggtatcccagtcataagagggttgcatgattcctttgagtgtttgatttgaaaagcctagtcttgtctctcaagagcatctcggacccagaacattctccagtagtgcattcagttcaacacagcaagtgcttcattgcatggaaaacactttgaagacaaaaaagaaatcttatttctttttttgtagccttcctgatatttacagtaataccattaactgttttatcgatagcaaaaaaggatactttttgcaatgttattagatgttctatagtgctacaaggaattgccttccgaatggaggttcatgtataatactcatttacaattcaatatataattacacaaataatttttaaatataatcaatagtaaagactgttctgtggatggtagtgtttaatacattttctattttgtacagtgatttcaggccttttgttttcttaaaatcagcagctgtttggcctaattcttagcattattttgtcctttgcgccagtacttttttgtgcacgctttttgtgatctgtgttaaaaacctgcattgccaacattgcagctcgaacttaaacttgttattcaaataaatatttaattttttaaattgctcttgtataatcagatgccccttttagtattattttagaagcg

SEQ ID NO: 348349 - DNA, 965 bp, Homo Sapiens
atccccagcacatgcatgtaaacaggaaatgcagacagtcacagataatacagttgtaaatgcttcacagctgaattggtaatgtgcagtggctgaagtctttgagggacagtggtgctatctctccagacattttcttgaggtattgttatttcttgttccaagtcttgtagctctaaggcagaaatcataagcagtccaaaagggctgacactgctacttttccttgcatatttcctttacacttaatcctgaggactaccaccacttcgcattcttcattatgaacacgaatatgaaattaggcaagctgatttttactaaaatcccatgggataatatcccctatcacatttcctgagggagaatttcaagacacaatggccaaagctgccacataaggaaagacagaaattctaaggctccatttgtgacatggacaagagctctggactcctttagagagcccagagacctaactgagctccagccattaggaggttagccttggtacttactggatatgtttttactcccaccccacaagcacaagtgtaggtaaattataccaagaaatgcctattcgacatttctttgcatggagggatgccagaggtatatggtgggtgaggggaggaagggatgagaagagaatcagaatatgattttaaaccaattcaggtgagcctaacgtggaataattatattttccagctaccagatctccttcctcccccttcaagaacattagagatgccatacttgaccagtgatccattcagatcaacattctgcctttgaaagaggcactaaggagtagtttgttgagggacacagttaccctctcagttgtatattaccaagtagccctacttttctataattccttgtagaaggccgtcatgcaaggattcctcataaacctgcacccatgtatagtttcttggtggcatcccttcttagac

SEQ ID NO: 348350 - DNA, 952 bp, Homo Sapiens
  misc_feature (839)..(855): n is a, c, g, or t
gaaaccattttcttttggtttccagctttttcctttgcatttttattaggtgtcacttcattttttgacacagtgaaataatatcactgcagtcacctcacgacgatattgattggaaaagtatagtgagtgatgggaaagccacagcccttacaatgtctgtgtctggcacacacagagcaatctttaagttccagtgtgccctttctgcatctcttttcctttcagcacaaatcctagtgtcttgctttactagagacataaggtggcaacccaatcgcatgacttggccaggatcattatacaataaaaaaggtgcctatcatatgggcagattcaaactactcaagcaagcaccactgaatggcaataaaggaaccccacagaacccttcctgtggggaagggtcatttagccaaggctgtgaatctaaattcttggtaactgttcagctgatgaaaaatactttattcttacacaattcactgcctgtgcttaacataaattttgattactgtaatttatgtatattgttgctttgtgatcctgagttactttatatcactgggcagatgcaaaaacttgttgataaatatggtgttctcatctttccaaatatgccttttagtccattttataaaatgtaatatatacgttgcaaactatcttactcaagttgattatactggatgtcatataattaaaactatcttaatgtccctaataaaaaatgaaaacacagcccccggagaaacagcctttaaatggaactgggaaatcaatgttggggaaatatccttggaaaacccccacgcccctttttggggaaaggccccaannnnnnnnnnnnnnnnnattttattgaaaggggcccagggagaagaattccaaagagacccccttctcccctgggggcccaaaaacatgtggtgtgggaaaaaaccccccctgt

SEQ ID NO: 348351 - DNA, 1293 bp, Homo Sapiens
ggttagggaggatttgtagaattctagcaggtaaaaatcaagcctttttcccctcccatagtaaacttaaccattttcaccctgtacgttatcttctagctcctactaacatctccaattagacaaccgcttcaaagggtgcttagcacagggattggggttcatggacttaggaggtggtaaggaaactggctggcaccaccaaactgccttagtgaacttggcccttcccaggcaggtaggttgggcattgagggaaggtggcccagtctttgctggcagggtctggccagtctcatgggggcaccaccagtttggtgacagaagtggtgtcatttattgaattccacctccgtttagaaggagatcatggtacaaagcccaggaggggccttaagatgtgaagatctctctgagtaaaaggcaaggggcttctcttcttcacctctgggatagttggtagatcggagagttttattttcagggtcaaggctgtggactgatggggatattggagggtgggtgggtttttcctgagagactttgtataatgctgaatgtgtccagagggacaagtttgcagaacctcatattggtatattaaagaaataataaaataaaaaagcactttaggttattttatctttaacccgattgctgcaatttcgtttgtgtgtatatatacatatttatactttccgcaaagttttattttttgctcagaataaaaagttaaattgaggtgtgaaaagaaaagcagttaccttggtgcaatatgtgtagcttgatggtcgttgtcccatgtggccctggcctggcagcgttttgccgctcaatcagccctgtgctgtgagattgtccatagggaaacactattatgcattctcggcaacggcgtcaatctatgcaagccttccctgtgtgccccagggcgcccccctcgagctctctgaaagaattgctgtggggtcctgtttttctgcctgacttgttggaggccctttgttcaatcactttcttgggtcgtctcaccattcttttcccttcttcgccatttaacaaatgaatgccctgaaaagggaatgggaaaaattgtgccctaagtgagagaagctgggaaaccttgcaaaacgttttaaaattttgaaaacgacagtccgttggtcctttaaagaaatttttccccaaagtgttgttaagagcccttgtaatattttgaggaaactgctagcggtataatttctataaagaaaatccagaccaagaatacccatcaaaccgacgccatattaa

SEQ ID NO: 348352 - DNA, 1251 bp, Homo Sapiens
tctgaaaaaattaagtatattcatatattgtgtagttgtttttgtcgtatgcatcatgaaggacgcgagagtggcttgcgggtatcgagaagaacctgtatggtcgtactgtttttggaacatctggtttttttgctcgccaatagtggtgtgttgtagtgtcttctgttttcatatctttgtaatgtttttagttggtctttttgtgcgcacgtttttaatgctgctggtatgaactcgtttttgttgcctctttggttcttgtgttcagtctgaagcatatcgccgtcacggagatgttgattctatactgcttgactaagctattgttgaagcgattaaacaagtgtgggattccggtcattggcctttggcattgtcaccggtttagtcagaagtacaaagggagattctaatcaattgcttgccagtaaaaagcttattgggtcaacatgccccattgtggagcttccttgaaaaagtatcacctgatgcagtttgcggaagtaaccagagctgtgagcgaggcaacctgctgctgctgcacgaggcgctggcgaagcacgaggccttcgttcattcgctgcggaatcttcctcatcctggagaagctgaagatcatcacctacaggaacctctttaagaaagtgtatttgttactgaaaacacaccagctgtctctggatgcttttctggttgccttgaagttcatgcaggtggaggacgtggacattgacgaagttcagtgtattctggctaacttgatatacatgggacacgtcaaaggctacatatcgcatcagcatcagaagctggtggtcagcaagcagaacccatttcctcccctgtccacggtgtgttgaaagtacacggagccccgaggacggactcggctggttctggagtctttgtgagacttctttgaaggaggctttgcgtgaaggctgctcggctcacttttcctaagtgtggttcctgaaggctgtctttgtaactttttgtagttctttgtgtaaaaagcgtattctgaatttatacacatggcatgttcttcattatatcttccaggatacatctatttttatatattaaatttgaatgtgttatcaaaatgcttggttaacttaaggcacctttttaaaagcagaatttaatttgatttaaattttccagattttatagcttgcctgtatggatgctcctcaatttatgatggggttacatcccaataaacttattttatttgccttc

SEQ ID NO: 348353 - DNA, 998 bp, Homo Sapiens
cacatgcccactgtggagctcctgaaaaagtatcacctgatgcagtttgcggaagtaaccagagctgtgagcgagggcaacctgctgctctgcacgaggcgctggcgaagcacgaggccttcttcattcgctgcggaatcttcctcatcctggagaagctgaagatcatcacctacaggaacctctttaagaaagtgtatttgttactgaaaacacaccagctgtctctggatgcttttctggttgccttgaagttcatgcaggtggaggacgtggacattgacgaagttcagtgtattctggctaacttcatattacatgggacacgtcaaaggctacatatcgcatcagcatcagaagctggtggtcagcaagcagaacccatttcctcccctgtccacggtgtgttgaaagtacacggagccccgaggacgggtgagcagttgtttctttccactttggttgtgctgatgagaccggtccggtactgcaacaaggctccctgaagccggaactcttggaggcgcttttcccagggatgctgaggctgagattttcagcacacccgagttaatctccttcatttgtaactaatttcagcctgatgaaaacctggaattcctttttcacagactcggctggttctggagtctttgtgagacttctttgaaggaggctttgcgtgaaggctgctcggctcacttttcctaagtgtggttcctgaaggctgtctttgtaactttttgtagttctttgtgtaaaaagcgtattctgaatttatacacatggcatgttcttcattatatcttccaggatacatctatttttatatattaaatttgaatgtgttatcaaaatgcttggttaacttaaggcacctttttaaaagcagaatttaatttgatttaaattttccagattttatagcttgcctgtatggatgctcctcaatttatgatggggttacatcccaataaacttattttatttgcctttgc

SEQ ID NO: 348354 - DNA, 1424 bp, Homo Sapiens
  misc_feature (1087)..(1087): n is a, c, g, or t
  misc_feature (1162)..(1162): n is a, c, g, or t
  misc_feature (1385)..(1385): n is a, c, g, or t
  misc_feature (1417)..(1417): n is a, c, g, or t
  misc_feature (1421)..(1421): n is a, c, g, or t
tccctgcattgttgctgcaatgaggcagtttttagctggtgccgcggaggaaggatgttactcaagtagttaattgggattttcctggtttgttttctcttttatttttacccatcaggtaagacatcttttttcataatgttattttgtttgatgaatatgacttgatatgaataagttgatatgaatatgacttgagctttgggacttacctcaagatattaatttgctttaggcagtttattttgctgatttataaataaaaatttttatttccctatgtaacttaaaaaaaattatttccccatagccgtgctggtatagaggactctaagaagtggggcatgctgtttctggtgaaccagctgtttaaaatctacttcaagatcaacaaactccatttatgtaaacccctaattagagcaattgacagctcaaacctgaaagacgattacagcactgcacagagagtaacatacaaatactacgttggacgcaaggctatgtttgacagcgattttaagcaagctgaggagtacctgtcatttgcctttgagcattgtcaccgttctagtcagaagaacaaaaggatgattctgatctatttgcttccagtaaaaatgctattgggtcacatgcccactgtggagctcctgaaaaagtatcacctgatgcagtttgcggaagtaaccagagctgtgagcgagggcaacctgctgctgctgcacgaggcgctggcgaagcacgaggccttcttcattcgctgcggaatcttcctcatcctggagaagctgaagatcatcacctacaggaacctctttaagaaagtgtatttgttactgaaaacacaccagctgtctctggatgcttttctggttgccttgaagttcatgcaggtggaggacgtggacattgacgaagttcagtgtattctggctaacttgatatacatgggacacgtcaaaggctacatatcgcatcagcatcagaagctggtggtcagcaagcagaacccatttcctcccctgtccacggtggtgttgaaagtacacggagcccccgagggacggcctgatgaaaacctggnaattcctttttcacagactcggctggttctggagtctttgtgagacttctttgaaggaggctttgcgtgaaggcngctcggctcacttttcctaagtgtggttcctgaaggctgtctttgtaactttttgtagttctttgtgtaaaaagcgtattctgaatttatacacatggcatgttcttcattatatcttccaggatacatctatttttatatattaaatttgaatgtgttatcaaaatgcttggttaacataaggcacctttttaaaagcagaatttaatttgatttaaatttnccagattttatagattgcctgtatggatctcntctnttt

SEQ ID NO: 348355 - DNA, 1572 bp, Homo Sapiens
  misc_feature (1380)..(1380): n is a, c, g, or t
  misc_feature (1382)..(1382): n is a, c, g, or t
agcggggagggggtggcgctctccgttcggcggcgctcccatggcgcacattaccattaaccagtacctgcagcaggtgtacgaagccatcgacagcagagatggagcatcttgtgcagagttggtgtcttttaaacatcctcatgttgcaaacccacgacttcaaatggcctctccagaggagaagtgtcaacaagtcttggaacccccttatgatgaaatgtttgcagctcatttaaggtgcacttatgcagtggggaatcatgacttcatagaggcatacaagtgccagaccgtgatagtccaatcattcttgcgagcattccaggcccacaaagaagaaaactgggctctgcctgtcatgtatgcagtagcgcttgaccttcgagtgtttgccaataatgcagatcaacagttggtaaagaaaggaaaaagcaaagttggggacatgttggaaaaagcagcagagttactgatgagctgtttccgggtctgtgccagcgacacccgtgctggtatagaggactctaagaagtggggcatgctgtttctggtgaaccagctgtttaaaatctacttcaagatcaacaaactccatttatgtaaacccctaattagagcaattgacagctcaaacctgaaagacgattacagcactgcacagagagtaacatacaaatactacgttggacgcaaggctatgtttgacagcgattttaagcaagctgaggagtacctgtcatttgcctttgagcattgtcaccgttctagtcagaagaacaaaaggatgattctgatctatttgcttccagtaaaaatgctattgggtcacatgcccactgtggagctcctgaaaaagtatcacctgatgcagtttgcggaagtaaccagagctgtgagcgagggcaacctgctgctgctgcacgaggcgctggcgaagcacgaggccttcttcattcgctgcggaatcttcctcatcctggagaagctgaagatcatcacctacaggaacctctttaagaaagtgtatttgttactgaaaacacaccagctgtctctggatgcttttctggttgccttgaagttcatgcaggtggaggacgtggacattgacgaagttcagtgtattctggctaacttgatatacatgggacacgtcaaaggctacatatcgcatcagcatcagaagctggtggtcagcaagcagaacccatttcctcccctgtccacggtgtgttgaaagtacacggagccccgaggacgggtggagcagttgtttcctttcccactttgggttgtgcctgaatgagaaccggtccgggtactgcaaccaaggcttccctggagcccggaaactcctgggaaggcgcttttcccaangnatgctgaaggcttgaaatttttcagcaccccccgaggtaatcctcccttcatttgggaactaaatttccgcctgaatgaaaacctgggaaattccctttttcaacaaactcgggttgtggttcctggaaactttgtggaaaacttccttttaaagaggggttttcccggaaaaggctggctccggtccct

SEQ ID NO: 348356 - DNA, 1886 bp, Homo Sapiens
cggagcgggggcgcggacccaagaccacctggagctccgcccgggcagcgcggggtcacggcgggaattttcgggtcgccgagtgactcagccccgcaggctcgaaactgcgggcgcatgaggtcttattagtaggtaagaaacagctgctcctccacctccaccccagccccatggagcttgcgtttttccaggccaccgtagtcctcaccactgccactttgcttcgagatggtcatcatgggccagtgctactacaacgagaccatcggcttcttctataacaacagtggcaaagagctcagctcccactggcggcccaaggatgtggtcgtggtggcactggggctgaccgtcagcgtgctggtgctgctgaccaatctgctggtcatagcagccatcgcctccaaccgccgcttccaccagcccatctactacctgctcggcaatctaggccgcggcatgacctcttcgcgggcgtggcctacctcttcctcatgttccacactggtccccgcacagcccgactttcacttgagggctggttcctgcggcagggcttgctggacacaagcctcactgcgtcggtggccacactgctggccatcgccgtggagcggcaccgcagtgtgatggccgtacagctgcacagccgcctgccccgtggccgcgtggtcatgctcattgtgggcgtgtgggtggctgaccctgggcctggggctgctgccatgcccactcctggcactgccatctgtgccctggacccctgctcacgcatggcacccctgctcagccgctcctatttggccgtctgggctctgtcgagcctgcttgtcttacctgctcatgactggctggtgtacacccgcatttccttctacgttgcggcggcgaagtgcagcgcaatggcagagcatgtcagctgccacccccgctaccgagagaccacgctcagcctggtcaagactgttgtcatcatcctgggggcgttcgtggtctgctggacaccaggccaggtggtactgctcctggatggtttaggctgtgagtcctgcaatgtcctggctgtagaaaagtacttcctactgttggccgaggccaactcactggtcaatgctgctgtgtactcttgccgagatgctgagatgcgccgcaccttccgccgccttctctgctgcgcgtgcctccgccagtccacccgcgagtctgtccactatacatcctctgcccagggaggtgccagcactcgcatcatgcttcccgagaacggccacccactgatggactccaccctttagctaccttgaacttcagcggtacgcggcaagcaacaaatccacagcccctgatgacttgtgggtgctcctggctcaacccaaccaacaggactgactgactggcaggacaaggtctggcatggcacagcaccactgccaggcctccccaggcacaccactctgcccagggaatgggggctttgggtcatctcccactgcctgggggagtcagatggggtgcaggaatctggctcttcagccatctcaggtttagggggtttgtaacagacattattctgttttcactgcgtatccttggtaagccctgtggactggttcctgctgtgtgatgctgagggttttaaggtggggagagataagggctctctcgggccatgctacccggtatgactgggtaatgaggacagactgtggacaccccatctacctgagtctgattctttagcagcagagactgaggggtgcagagtgtgagctgggaaaggtttgtggctccttgcagcctccagggactggcctgtccccgatagaattgaagcagtccacggggaggggatgatacaaaaaagtaaacctttctttacactc

SEQ ID NO: 348357 - DNA, 1145 bp, Homo Sapiens
caggaggccgcggctcgctgatactgcgagctggcaaagccgaagctgggcgggggtccgggcggtgggagccaagtcggatcagggagtggcttgtaactcggcggccgattggacacgaagaagagagcggggtggggctgggagggttgggggtccggagcgggggcgcggacccaagaccacctggagctccgcccgggcagcgcggggtcacggcgggaattttcgggtcgccgagtgactcagccccgcaggctcgaaactgcgggcgcatgaggtgtgcaggtaccggggtgggggtcccgcgccggaaataggggcgactgaggggccgcgaggcggggaggaaacaggggggctgcggttccgggcgacaccgcccccgacgcggccgtggaggcggggctcccccaggtggcggggcggggcagggctcccccaggtggtgggggctgtgggcgcctggggagacccctgcctcccgcgccctctcatgcaagcccgcactagtggctgcaccctggacgctctaccgctccctgccgcagtcgccgggccatgggcctcgatgcccaccccgaacccccgcgagcccgccttgtctgcggcgtgactggaggcccagatggtcatcatgggccagtgctactacaacgagaccatcggcttcttctataacaacatgtggcaaagagctcagctcccactggcggcccaaggatgtggtcgtggtggcactggggctgaccgtcagcgtgctggtgctgctgaccaatctgctggtcatagcagccatcgccatccaaccgccgcttccaccagcccatctactacctgctcggcaatctggccgcggctgacctcttcgcgggcgtggcctacctcttcctcatgttccacagctggtaccccgcacagcccgactttcacttgagggctggttcctgcggcagggcttgctggacacaagcctcactgcgtcggtggccacactgcatggcccatcgccgtggagcggcaccgcaagtgctgatgggccagtcaggtgcacaagacgccatgccccagtgaccagagtagacattcacatagtggaggcagtggggatggctgcccaggagactggagatgatgcatgcaca

SEQ ID NO: 348358 - DNA, 2112 bp, Homo Sapiens
  misc_feature (11)..(11): n is a, c, g, or t
  misc_feature (70)..(70): n is a, c, g, or t
  misc_feature (87)..(87): n is a, c, g, or t
  misc_feature (104)..(104): n is a, c, g, or t
  misc_feature (1412)..(1412): n is a, c, g, or t
ccagaaaaaanccaagaaacggggggcaaaacagaggtaaaataatacctcaggactcaggaaacaaacncaaaatactgtggggangatcagaaaagtagagnacacaggttctccttcaagtacatcacagtagaaaactacagcacatttacagcccttatttggtcactgtctacctggttgctacatgaacaaaacttcacctaagacacagaagaaaaattaaagctatttacacagataacactgtggattcgaaagagcagtcctctgcagaccggcactccatctgacaaaagccacagtgctcacagaagaggcaagtcagtctgctcgcgtagcgtcctttgaaaaatcccagtgtacaaacatgtgccacgtcaccacacaaaaccaaagtctgctcagagaggtgggctatggtgtgcaggctgcaacctttctctgcaattgttaagtcttcaaaaatctgagttcctcacataaaattctgtgctgtggccagagctcgttttaccattttcttagattggatcacttttaggatcagcttcgttgttctttgcgtagacaatgactctcacagctttctccaagtgtcccagaagcactaacttactgaaaatagaatctcatcaaagcttaacatattcactctgaaaacagcggagctgcagggtcgcttaaggaaagctgagaacctcaaacctgtggaaggaaaaccagtgaccacttgtggcccttataaagttgattggcaggtgaggaaggggatctcaagaggagaatcccgaatttcaaagacatgggagatttgtccctaatgttttcatactagtgctcttgttaaaaggaaaaacccttcataaatggggaagatctgaggctaaatctggatcctgggactctcattcttgcccaccaccatctccctgtggctgtcattcttccctggaagtgaatgaatactgagaacacagtaagaggagggtggtcacagctgacttcacaaagcctcatggaggttaagttgttcaaagaatttaaaaaagtaaacacccccaaatcctcccaaaatggaatactgtggaaaataactgaaatttcccactgcttaaggcttcatcctattaagacagctgagtacttggcctggcccgattttcacctttccttttacacctcaagaacagcagataggtatgcataaccacagcagaacacaccctccacctctctgactgctgacactggctacaggaataaggctttggttatcatctagcaaaatgccacagagcatggacggactgagtttgttctaaggaaaggagtttcaccagatagtctgaagaggcccagcccagcaaagagatttagagcaggaaagcctttcattaaagtagccnacacaccccctcgagacaacccataaaagacttgactaggaaatcaaaaggtttttattaaacaagacttcctctgaggctattcgagcaagcagatttggctataagtcagatacgcaagatttctgaaccatgtataaatacgttctgcagaatttcgaagtgtgcgtcctttgacttttccagggatgcaccaggggccaacccgttatgtagacacggttactgttttaggactgggtgacatggggcctgggtaaaaaaataaggccaaaactgagtaagctcaatttatagagcaatatcagtgctggacagatctgccatgcttcgtttacatcatgtttcctacttttgatttcttcatcttatttatagtcttcctcccatcccctgaacacaacttgactttatcttctaactaagatctttccactcaagggggcgtaggaaaacaattcctggatgcctttctaactaaaaccagcaggactaagtgctcaagattttataatatttcgatttagaggtttctagagttattcctgagacgtgccatagcagtaaatgaattggtgaattgagtagaaggtagttgtgacatctacacccaattcttactctggtggcttgaataaaactggagaagctcaaggtagggcccagatagaggcccaggaaagcaataaatgaaagacgg

SEQ ID NO: 348359 - DNA, 687 bp, Homo Sapiens
tccatgatggtgccagtgcctagagtcatttcggcacaaagtaaacagcagaatattgttgactaactgattctcactcccaattccagtttttaaaggtctattaatcccattctaaccctcctcagatagaaaaacctcatctcttccaaaatgcctctcctgactggctctaaagagcttcaactgaaataagaccatcctgcttctggttatgtttcagtcatctacgttttattcttctctagcttccaattcagataagatactcaagggctacaagacagacctcctactatagtaataaacctactagggctgtgcccaggatgaatggaatgttctcactaatggtccactgctcaacttgctgttgagataccacatagccattttataggtacccgcagcaagcagtggtggcagcagcaaggatagacagaaggaagcacagaggaaggagtacagcagagaaagcaatcacatttaggtgaaactaaaggaaaggatgggaaatggtggcagaacccacagagcctcactcatcccttactcaggaccgtaacattccttcccaaaagggctcttaaatcaagttctaggaagtccatctggtgccctttaggacattttccatctattatcacaactctatatcattttaaaaggagtgaagttttaaacaaa

SEQ ID NO: 348360 - DNA, 1103 bp, Homo Sapiens
  misc_feature (325)..(567): n is a, c, g, or t
  misc_feature (588)..(607): n is a, c, g, or t
aatatattaatcaggatataaaaaattaaattttcacagaggttttcagggatgtttgtttgttaacaatgacctatatgtaataatgttatttgttaataaattcacacaacacaaagcagtaattaactaatgaattttcatttttctttccccaatattaaaaagggataattatactatcattataatttgataatgtctatatctgctaattagggcacataatatcctgcaaactactactataaaatgtgggaaatcctagaactataattaatactgtaattaaaatccccccaaaggccaggcatggtggctcatnnnnnnnnnnnnnnnnnnnnnnnnnnnnnnnnnnnnnnnnnnnnnnnnnnnnnnnnnnnnnnnnnnnnnnnnnnnnnnnnnnnnnnnnnnnnnnnnnnnnnnnnnnnnnnnnnnnnnnnnnnnnnnnnnnnnnnnnnnnnnnnnnnnnnnnnnnnnnnnnnnnnnnnnnnnnnnnnnnnnnnnnnnnnnnnnnnnnnnnnnnnnnnnnnnnnnnnnnnnnnnnnnnnnnnnnnnnnnnnnnnngatagcgtgagacaccatctnnnnnnnnnnnnnnnnnnnnccccccaaaatgagaaattaaatatttaaacatattcaattacaatttttactagacaaatcttataatccacatgccttctctgaggttttcatctgtttgtttttttaaaaataattatagcaaatgctttagtacaaagacttagtccaagactattattgttttccaatttaaggtgaagcattctattaataaaactcactgtaaaaacatttacaattcagtgtaaaattactacttagtaaaaatgcatataattccttgttcctactgtctacaaaaaaggaaatttccactttttatgttttaaaattgattcaaacacttgtatagaggatttattaaacctgctcataaccacttcatagaaagtgtcagcaccatctcatactggtgcatcacgggtaaaagaaaacattttagaaacaaaaccactaaaaccaacagtttaaatgactatttacagagcattaggtctccaagttaatatctc

SEQ ID NO: 348361 - DNA, 925 bp, Homo Sapiens
  misc_feature (55)..(74): n is a, c, g, or t
  misc_feature (95)..(337): n is a, c, g, or t
gggtaaaaattgtaattgaatatgtttaaatatttaatttctcattttggggggnnnnnnnnnnnnnnnnnnnnagatggtgtctcacgctatcnnnnnnnnnnnnnnnnnnnnnnnnnnnnnnnnnnnnnnnnnnnnnnnnnnnnnnnnnnnnnnnnnnnnnnnnnnnnnnnnnnnnnnnnnnnnnnnnnnnnnnnnnnnnnnnnnnnnnnnnnnnnnnnnnnnnnnnnnnnnnnnnnnnnnnnnnnnnnnnnnnnnnnnnnnnnnnnnnnnnnnnnnnnnnnnnnnnnnnnnnnnnnnnnnnnnnnnnnnnnnnnnnnnnnnnnnnnnnnnnnnnatgagccaccatgcctggcctttggggggattttaattacagtattaattatagttctaggatttcccacattttatagtagtagtttgcaggatattatgtgccctaattagcagatatagacattatcaaattataatgatagtataattatccctttttaatattggggaaagaaaaatgaaaattcattagttaattactgctttgtgttgtgtgaatttattaacaaataacattattacatataggtcattgttaacaaacaaacatccctgaaaacctctgtgaaaatttaattttttatatccctgattaatatattgtgactttaggcccatttttcatgtgcctcactttgatagaaggtaatccataaaattgctctttactttagcttatcaaatgaagtattaatttgtggactggaggccaaaaagtcaatggtgagcttctcacaggtttttaaagctccactaaaaataaatatccacttgtctttacttttgttgaccagaatagttggtaactctgccagagcctgtacttacctgccaaaaacaattaaatctggttaatgcctgggaa

SEQ ID NO: 348362 - DNA, 1943 bp, Homo Sapiens
ggggacctgtcattcgttcgtcctcagtgcagggcaacaggactttaggttcaagatggtgactgcagccatgctgctacagtgctgcccagtgcttgcccggggccccacaagcctcctaggcaaggtggttaagactcaccagttcctgtttggtattggacgctgtcccatcctggctacccaaggaccaaactgttctcaaatccaccttaaggcaacaaaggctggaggagattctccatcttgggcgaagggccactgtcccttcatgctgtcggaactccaggatgggaagagcaagattgtgcagaaggcagccccagaagtccaggaagatgtgaaggctttcaagacagatctgcctagctccctggtctcagtcagcctaaggaagccattttccggtccccaggagcaggagcagatctctgggaaggtcacacacctgattcagaacaatatgcctggaaactatgtcttcagttatgaccagtttttcagggacaagatcatggagaagaaacaggatcacacctaccgtgtgttcaagactgtgaaccgctgggctgatgcatatccctttgcccaacatttctctgaggcatctgtggcctcaaaggatgtgtccgtctggtgtagtaatgattacctgggcatgagccgacaccctcaggtcttgcaagccacacaggagaccctgcagcgtcatggtgctggagctggtggcacccgcaacatctcaggcaccagtaagtttcatgtggagcttgagcaggagctggctgagctgcaccagaaggactcagccctgctcttctcctcctgctttgttgccaatgactctactctcttcaccttggccaagatcctgccagggtgcgagatttactcagacgcaggcaaccatgcttccatgatccaaggtatccgtaacagtggagcagccaagtttgtcttcaggcacaatgaccctgaccacctaaagaaacttctagagaagtctaaccctaagatacccaaaattgtggcctttgagactgtccactccatggatggtgccatctgtcccctcgaggagttgtgtgatgtgtcccaccagtatggggccctgaccttcgtggatgaggtccatgctgtaggactgtatgggtcccggggcgctgggattggggagcgtgatggaattatgcataagattgacatcatctctggaactcttggcaaggcctttggctgtgtgggcggctacattgccagcacccgtgacttggtggacatggtgcgctcctatgctgcaggcttcatctttaccacttctctgccccccatggtgctctctggagctctagaatctgtgcggctgctcaagggagaggagggccaagccctgaggcgagcccaccagcgcaatgtcaagcacatgcgccagctactcatggacaggggccttcctgtcatcccctgccccagccacatcatccccatccgggtgggcaatgcagcactcaacagcaagctctgtgatctcctgctctccaagcatggcatctatgtgcaggccatcaactacccaactgtcccccggggtgaagagctcctgcgcttggcaccctccccccaccacagccctcagatgatggaagattttgtggagaagctgctgctggcttggactgcggtggggctgcccctccaggatgtgtctgtggctgcctgcaatttctgtcgccgtcctgtacactttgagctcatgagtgagtgggaacgttcctacttcgggaacatggggccccagtatgtcaccacctatgcctgagaagccagctgcctaggattcacaccccacctgcgcttcacttgggtccaggcctactcctgtcttctgctttgttgtgtgcctctagctgaattgagcctaaaaataaagcacaaaccacagc

SEQ ID NO: 348363 - DNA, 969 bp, Homo Sapiens
cagggcccacatgccttggccccacataccaacccaggctgctgtgacagcccatgagagggggagaggttgctctgggatggaacaagaaaaagaggttgttttgtgaggactttaggttcaagatggtgactgcagccatgctgctacagtgctgcccagtgcttgcccggggccccacaagcctcctaggcaaggtggttaagactcaccagttcctgtttggtattggacgctgtcccatcctggctacccaaggaccaaactgttctcaaatccaccttaaggcaacaaaggctggaggagattctccatcttgggcgaagggccactgtcccttcatgctgtcggaactccaggatgggaagagcaagattgtgcagaaggcagccccagaagtccaggaagatgtgaaggctttcaagacaggaaactatgtcttcagttatgaccagtttttcagggacaagatcatggagaagaaacaggatcacacctaccgtgtgttcaagactgtgaaccgctgggctgatgcatatccctttgcccaacatttctctgaggcatctgtggcctcaaaggatgtgtccgtctggtgtagtaatgattacctgggcatgagccgacaccctcaggtcttgcaagccacacaggagaccctgcagcgtcatggtgctggagctggtggcacccgcaacatctcaggcaccagtaagtttcatgtggagcttgagcaggagctggctgagctgcaccagaaggactcagccctgctcttctcctcctgctttgttgccaatgactctactctcttcaccttggccaagatcctgccagggtgcgagatttactcagacgcaggcaaccatgcttccatgatccaaggtatccgtaacagtggagcagccaagtttgtcttcaggcacaatgaccctgaccacctaaagaaacttctagagaagtctaacc

SEQ ID NO: 348364 - DNA, 2190 bp, Homo Sapiens
  misc_feature (975)..(975): n is a, c, g, or t
  misc_feature (1542)..(1542): n is a, c, g, or t
  misc_feature (1590)..(1590): n is a, c, g, or t
  misc_feature (1602)..(1602): n is a, c, g, or t
  misc_feature (1609)..(1609): n is a, c, g, or t
  misc_feature (1625)..(1625): n is a, c, g, or t
  misc_feature (1632)..(1632): n is a, c, g, or t
  misc_feature (1656)..(1657): n is a, c, g, or t
  misc_feature (1661)..(1663): n is a, c, g, or t
  misc_feature (1665)..(1665): n is a, c, g, or t
  misc_feature (1671)..(1673): n is a, c, g, or t
  misc_feature (1677)..(1678): n is a, c, g, or t
  misc_feature (1681)..(1682): n is a, c, g, or t
  misc_feature (1689)..(1689): n is a, c, g, or t
  misc_feature (1692)..(1692): n is a, c, g, or t
  misc_feature (1694)..(1695): n is a, c, g, or t
  misc_feature (1697)..(1699): n is a, c, g, or t
  misc_feature (1706)..(1706): n is a, c, g, or t
  misc_feature (1708)..(1708): n is a, c, g, or t
  misc_feature (1710)..(1710): n is a, c, g, or t
  misc_feature (1712)..(1712): n is a, c, g, or t
  misc_feature (1720)..(1720): n is a, c, g, or t
  misc_feature (1723)..(1723): n is a, c, g, or t
  misc_feature (1731)..(1731): n is a, c, g, or t
  misc_feature (1736)..(1737): n is a, c, g, or t
  misc_feature (1742)..(1743): n is a, c, g, or t
  misc_feature (1745)..(1745): n is a, c, g, or t
  misc_feature (1748)..(1748): n is a, c, g, or t
  misc_feature (1757)..(1757): n is a, c, g, or t
  misc_feature (1759)..(1759): n is a, c, g, or t
  misc_feature (1763)..(1763): n is a, c, g, or t
  misc_feature (1767)..(1767): n is a, c, g, or t
  misc_feature (1769)..(1769): n is a, c, g, or t
  misc_feature (1779)..(1779): n is a, c, g, or t
  misc_feature (1781)..(1781): n is a, c, g, or t
  misc_feature (1783)..(1783): n is a, c, g, or t
  misc_feature (1787)..(1788): n is a, c, g, or t
  misc_feature (1790)..(1790): n is a, c, g, or t
  misc_feature (1794)..(1794): n is a, c, g, or t
  misc_feature (1823)..(1823): n is a, c, g, or t
  misc_feature (1841)..(1841): n is a, c, g, or t
  misc_feature (1858)..(1858): n is a, c, g, or t
  misc_feature (1898)..(1898): n is a, c, g, or t
  misc_feature (1905)..(1905): n is a, c, g, or t
  misc_feature (1917)..(1917): n is a, c, g, or t
  misc_feature (1923)..(1923): n is a, c, g, or t
  misc_feature (1925)..(1925): n is a, c, g, or t
  misc_feature (1942)..(1943): n is a, c, g, or t
  misc_feature (1949)..(1951): n is a, c, g, or t
  misc_feature (1963)..(1963): n is a, c, g, or t
  misc_feature (1987)..(1987): n is a, c, g, or t
  misc_feature (1991)..(1991): n is a, c, g, or t
  misc_feature (1999)..(1999): n is a, c, g, or t
  misc_feature (2008)..(2008): n is a, c, g, or t
  misc_feature (2013)..(2013): n is a, c, g, or t
  misc_feature (2015)..(2015): n is a, c, g, or t
ctgtgcaatctacatctagtatgaaatccacacataggagagctggggcacaaggggactggaggcagttgctttgcaagatggctgaggagaaagcacactgggaacacaatccagaatgttctaacaataagttttcagtgaataaaccactggcaagacaattccatgtgcacctttaggttacctatatagtctcctaggaagatcaggatgaaagacctagatgatacccctgaggataaaacctccatcccctaaaatgattttttttaaataccactgtctttagctgtccaggaggtcagagtgttttttctgtctttgggccaagtcctgtctgagacctgtattttcactcttgttaccaaatctatctccctagtgcagtgtctccaggcctgagtttcttctggaacagattccattttagaatggggattcacaggttctgtgcatcaccacagtgctcagagaggattctcctggggtgtcttagaggcaggtgcccaactcaaatgtattcccaaggtttgctgggctctgggatccacgagacaaccagagagggatatctcatgaaatttgcatctggtggctgaacagtacctatgttctctgttttgaatatactttaatacctgagagtcttaaaatttgtgaacaacgtttctatagtcctttattttcaaatgcacgttgatcttcacttgctgcatttttactcttcaaccctgaaactatggtctacattaatatggatttttaaatcacatgtcattacttttgcaacaccatcaccaaaattttttgctcttttacatttaggttcatctctgtggtctgtgttgtcctgacatgtaaaaagcatatcgtttattgaggtttttttcccccccttttagagcatccggaagtgataacacgcaaaatcacaaagtagcataaatcagtaaattagttgagttgtttttnggccggaggtgggggtagggggcacagaacaccagaaagagtgttggtgtgtaggtagattccatattaatgaggaacactgaactagttggaaattactgctttctctagaaatataaagcaaagcactattccaaggctatggagtagctctacagcctggcctcaactctaaaagtgtgaagaatgcaatgggcagagacctacctgcagtggactgtcattttcctttctttctctgaattactgctttttctgtgggcattaactatattgctacagcatctagtgtactgagcctgcggtgcatggctcaggccttttcccatcgacgtctagggggactctggaccgtgtgaagctagggggtgtttctcagcacactgcagaagggcagctcagaagaatgcagggcccattcagcatggggatcccagcacatcactgtagaatttgagtgatctatgctgaataaacagtggaatgtgaccagtcaagtagaaatcttgagtaatcagatgggaatgcaatcctttctaacattaagcctaccaagatcctgaatgncagagatgtactcagagggttaacagacaagcacaaggcatgctgacnacattggtgtanccagatngctttgcttttagccngtgctgncggagggggggcggcgacagggcnngggnnngncccagnnngaannaannaaggggnggngnncnnnaaggaangncnanaaccaaanggngcggattntgganntcacnnancanagaacaaanangtancatnanggcagggtancnangaannancaangtaaccacctaccacgcgggggttcccanattttggtcccaagtatntaatatagctcccttanggtggtggcctggtgatggggagcgcgtctttcttttacngacacangaccaatcatanggtatntncaagggaattttaaganncatctnnncaggttgatagnagactagttaaggaagaactcttncatnacccgcancgtgtaaancatcncngtagacatgtgttcatattaatgaacacattttttctcaacattgtagcagaaatcatttgtgattcgtcatgatcaatgaatatgtgatttgctccagatcgttagaaggaaaagtaagatttcagtcatcaaaaatgtttttaccgtagccctcatctaacttacacgtggag

SEQ ID NO: 348365 - DNA, 620 bp, Homo Sapiens
catgctgactacattggtgtatccagattgctttgcttttagccagtgctttctaatttttttctcgacattcttgggatagttcaagtttgaaataattaagtggtggtgttctttaaggaatttctataaccaaattgatcttatttttgatttcacttatcatagaacaaatatgtatcattatggcagtgtatctatgtaattatcaatttaatcatcaccaccggtgtttccatattttttcccaagtatttaatatagctctcttatggtggtggcctggtgatggggaccgtctttcttttactaacacatgaccaatcatatggtattttcaagggaattttaagattcatcttttcagtttgatagtagactagttaaggaagaactctttcattacttgcatcgtgtaaatcatctctgtagacatgtgttcatattaatgaacacattttttctcaacattgtagcagaaatcattttattcgtcatgatcaatgaatatgtgatttgctccagatcgttagaaggaaaagtaagatttcagtcatcaaaaatgtttttaccgtagccctcatctaacttacacgtggtgcatattaaaataagcagag

SEQ ID NO: 348366 - DNA, 402 bp, Homo Sapiens
ccccaaattttccccccaagtatttaaaaatagctccccctaagggtggtggccccggtgatgggggacccgtcctttccttttacctaacacatgacccaatccatatggtattttccaagggaattttaagattccatcttttcagtttgatagtagactagttaaggaagaactctttcattacttgcatcgtgtaaatcatcctctgtagacatgtgttcatattaatgaacacattttttctcaacattgtagcagaaatcattttattcgtcatgatcaatgaatatgtgatttgctccagatcgttagaaggaaaagtaagatttcagtcatcaaaaatgtttttaccgtagccctcatctaacttacacgtggtgcatattaaaataagcagag

SEQ ID NO: 348367 - DNA, 1082 bp, Homo Sapiens
tggtgcccttgggtaccatgtagccaccgggcgagactgtgctggcccggctgtcacagcgcaggggcgtggggctgaaccagagaagggggccccctcagagctgctgaagaaggaggccttgcttggtggcaggcaggggcccccggtaggcggtggggcatagccggcgctgtgggcgctgctgggtgaggcagggaggctgttgccactgccataggcgaagctgcagtccttgctgttagcgcagtcctggcctgtaaagggcttagttggggcgaatacgctttgtccggccccatagccgccgtactggggcaggtaggtgttggcaggcgggtgggtggtaggtgagcgggccatggctgagggcgggggcaccagcttgggaaaggtctcggctgcccggcagtctgaagtggctggagttagcccatagcttgctgctcgtcctggtgggaaggtctggcgcgcggacaggacaggctgaaaggaggggtccgccccagccccgctgctacccactgccactgggctggccttggctccccggctaggcaaggtggccaggccccgctgggcaggcagggcactggtgggtggccctgcataggtgcccgatgccttccgggactctgggcgagaggctgagagggcaaagtccaagagatcggaggagtcatccgaatcgagcagcgagcgaaagtagccggtgaagaggttttggcgctcctggctgagctcggtctggcctgagggtgcacccgtgctgtagtagctgccacggcctgaggctccactctccagcccagtggaggcaaaggcccgggcctcggtcccctgaaacccacagtttcggccagcttgtccgcctgggtgcccatggtgaggggcccagccaccacccttatccccggcccactcagcacctgcctccccaaagcctgggccactgggcacctgctctgggaacagagtcccattcttccgggaccgtctcttgcgctttggcttcccagtcacagcgtctacctccccccggccccgtttgcgtgggtgccccaactcagtaaggcccgggc

SEQ ID NO: 348368 - DNA, 944 bp, Homo Sapiens
  misc_feature (324)..(332): n is a, c, g, or t
aaaatctgtttctgaataggattgtgaagaagaaagaaccgtgcgtgtgtcgaagttataaacctgccacgttctaaacccacagaaaaggacaaacaagatatcattctaaatgtccttcttttctggacatttcagcatctaacaacaccccttgatctgcagtaaaatcaagaaacatgtgtgtatacatccaaaggcctgaaaaattcccaaacaagaattctcaataaaattctatgcactcagagggttaacaagtgctatattacatactgcagatcctagcttgactgatgaaaacattcattgcttctaagtttnnnnnnnnnttgcaaattggccttaaccctttgaggactctattagcagcaaattaccatcttcacaatcaccacgtgtcatcttattcagtaaagggaaaccgctacaaagatacctgaaaacactttcagttctgccattcaagcattgagcgctagatagatcagatgaaactgttttacacaaatttgggggaaaaaaatctcagagtctcaaagggttaagctaggactttgagtaaaagggtcttattaaaagggcgagttaggggagcgaacagtctcggaggagcttggggagtagtcttccgattccgagttgagttcgggaggagctggctgcgccttgtaccggctcctcacatcctggttgcgtcttcgtcggaaaacctgcctctccttatcaagagcggtggttgctatgacagaaactccagctgctgtgctattcggcttggggcctgtgttgaaatgcttctttatctttccagctactgacagctgatgttcattttctgggaggccatcatcattaacccagggatgctcaagtacttgaacagcagaaaatcgctgatctacatcgaccacagcatcatggtaatgagctcctttgccgct

SEQ ID NO: 348369 - DNA, 1013 bp, Homo Sapiens
  misc_feature (614)..(622): n is a, c, g, or t
  misc_feature (651)..(663): n is a, c, g, or t
tagcgaggctgggtggcgaattcggcacgagggacaaccgagtttgtaacccgtgggttagtatgaggaccgggttcgtgtactctctgtatctcctcttaagcttcgtccaggttctttattttgtctgctgccaatgtcgtctcgcatgcctgcaccctcgcatgcacgctgcccgcatgccacgtgccacgctgtagccacagaccccttgctcgggcctcacccaaggccaaactccaaacacaatcagaaccagccaaagaagcacttcctgggcacggccaccagctctcccgcctccagtgtgggccggctcctgcagggtccgagggctgcatctctaccagccagcccagggctcttcccaggtctcgcattcaagggcaattacattttaaaaagaaaaacagaaaaaggttaatcacaaaaccaaccctcacttcacagggtctgtaagtcactcatagaactttgctcttcccgagacagggtcccttccccagctcaggcacaacagagtctggcaggctctggcaccctgggcctcctccgggagcctcccatctgggcagtggagccataaacggggatccgagaagagagtatccacnnnnnnnnnacaggaagaagggactcacagcataaacnnnnnnnnnnnnnatcctgattttgaaaataatctatttgtagcttctcttctatcaaaaccaacacatcctcttctttctgccaatcctctcccccacgggacacctctctggttcgggaccaatccctccctggggacgtgccccacctgcgtgccggctgagctcaggaacccctgcctgccccccgggtggggctgcggctctggcctcccaggcccatcctcaacagctaccccagccaacaccaaggccacaaggggaccccggcctaggaggcaggaagccaaggtacagagagcagcctggccctcaccagtgcgcaagctggggcagcaaggctgacagttgctgcatgcccag

SEQ ID NO: 348370 - DNA, 479 bp, Homo Sapiens
tctgggcctcactgtggacagaggagtcaggcccgccccaggagcctccagctgcctaaccagtgccattctttcacaacacgattttctacaaatctacagcacaaccgagtttgtaacccgtgggttagtatgaggaccgggttcgtgtactctctgtatctcctcttaagcttcgtccagggttctttatttttgtctgctgccaatgtcgtctcgcatgcctgcaccctcgcatgcacgctgcccgcatgccacgtgccacgctgtagccacagaccccttgctcgggcctcacccaaggccaaactccaaacacaatcagaaccagccaaagaagcacttcctgggcacggccaccagctctcccgcctccagtgtgggccggctcctgcagggtccgagggctgcatctctaccagccagcccagggctcttcccagggtctcgcattcaagggcaattacattttaaaaaaa

SEQ ID NO: 348371 - DNA, 727 bp, Homo Sapiens
  misc_feature (21)..(21): n is a, c, g, or t
  misc_feature (29)..(29): n is a, c, g, or t
  misc_feature (36)..(36): n is a, c, g, or t
  misc_feature (90)..(90): n is a, c, g, or t
cgttccctgccccggcccccntccccaanggaaagncccacaagccgcgggggccccaccgaggaaggaaatgttccaatttccatttgnccccaaaacccaccttaagttttaagtatattaaatcttgatgctttttaactattgctttttaacttgcctgagatttagaaatactgttataaaaacttttttaatttctgtatttttttctgtattgtatcttcatgggacattaggggttttctatggtaagcacacctatggttttggtaaaaacattatcaaatatatatccagacggttcttccctagaagaaaaacaagtctttacacctgataaaatattttgcgaagagaggtgttctttttccttactggtgctgaaaggaaggatggataacgaggagaaaataaaactgtgaggctcaaggctggtgttctccacttatttcagcgacaagctggggccaggcctcaggggcacgcctgggggcaggggagggagttcctgcccccaactgcaggacaggcactgcccaagtctgccctgaatccgaggacaccggaactctgctcatacaggcggctcggctggcctggcacaagcctcaccttctaagctgcgagccagaggccactgggttctctcacgtggtgtctgctgttaccttctgagagctgggacataaccaaaggggggttagtgtgtgagagaagcaaggcc

SEQ ID NO: 348372 - DNA, 502 bp, Homo Sapiens
  misc_feature (71)..(71): n is a, c, g, or t
aggggctgcagcccctcttctcttcctccccaggttgaacaatacggacaggtttcacacatatctacccngtataacccctctgtacctctcataactggtccaacggactgtaaccaggttaccatccaggtgtttttctacatactttttacacagattctatgcgattaatgtaatttaattcaatgcatcattttattgtactagttcttaggcttgtccttatttttttctaagtgattgtggtttttctcgtggtttttattgtaaaaaatgaaaggctgttgatgcttattctctgtaactaagaatttttaccttttgggggaaaaaagcattgctatgaactaatgaattgaaacttcatttactcattgtaaatacactattgtgcaaaaaaagttttcactcaattgaattgctagtgttaactgaattttgtctagacaccatttctgttgatgaaataaagacatatcattatgcattgtaaaaaaaa

SEQ ID NO: 348373 - DNA, 1597 bp, Homo Sapiens
  misc_feature (1482)..(1482): n is a, c, g, or t
  misc_feature (1500)..(1501): n is a, c, g, or t
  misc_feature (1518)..(1521): n is a, c, g, or t
  misc_feature (1545)..(1545): n is a, c, g, or t
gctaccgtcatatgcgtgtgcagcagcgcaagtataatcacttgtacagcgtctggcctggtcctacagctcctgcacacgcagcagtcccggcggagctgagtcaaatacctggtacttgtctcctggaatctcccggcagatcaccagcaggtcgttgaacaggaagaggtaaatttcgtgcaagagcttcttggtcctcagggtacggaaggtcttggggcctgacatctgctgcagctcaccctgcttcagcagccagcgggagtggcagatgatgggcaccgacttgatcttgaactccatcttcttctgaatgctgatcatctgttccgtgcggctcattttcctgacgccctcgttgcatgccttcaccaccatttccagctccttgtgagcatccaaagcagtgcactcccgctcagacctctcttctaccctcttcaggatgttctggaccaacagcttgaggcgtgtgatcctctggaaaggcaggatgaggaaggaggagaagggcagccccctgcacttggggtcgagctctagctgcgcgatcagctcccggaaagctgccttctcctggagcagctgcttataggtccgctcctggtaggtctgattgctgacgtaggtgatgtagacagagaagtggtcggccgcataacggtacacgatgtcacacacgtcagagatgacgatgttctcctccatccggtgctccagctccaggaggaaccgctcactgacagccagcacgtccaggacgttggagaagaggatgtgcgcctcggacgggtgcaggatcttccttatccgctcgttctccatgaagtgggacacgagcaggttcagactcttgtagtaggacgcctcggaagtgaccagctcgaacatggcctcctgcagcttaatctcctcaggctgtaggatctcaagcaccccgctgctccggatctcgggaagatcctgccagaggttgaaccttgagtgggggttactgagcaggcagatctggggcagagtcttcctctctggtgggctggccggctcctcctcctcctcctcttcttcttcctcctccggggtgtcctcactggccggggacccattggtattgtcttctatttctgcatcctgttgcctcctggtttcgatttcttggagagtcgatttatctcggtattcctgatacaggagccctatttgttcaatgaggtttctccaggagtcggcgggaatggggtggatcatccgcagggcctcggtgagcgtggtggggctgtcggccagggccggccactcctcgggcgtggccccatttcccggggtggaggacgactcactgccgggcaggtgtcccgccgccgagtcgcgcgcgtcgctttccgaggtggaactgtcgtggtccacggcgcaggcggcgctgaaggcagcggccagcagctccatagggtcggcggcggggcgggtgcgggggccggntcgggttttacgccgganncctgggctgggtcgggnnnnactagcgggctgcggagcggggtngcagcgcgcgcggctcgaccggagctgcagccgccgccgccaccgctgccga

SEQ ID NO: 348374 - DNA, 1772 bp, Homo Sapiens
  misc_feature (1035)..(1035): n is a, c, g, or t
ctaaggtagcgaggcctgggtggcgaattcggcacgagggggggctgcccttctcctccttcctcatcctgcctttccagaggatcacacgcctcaagctgttggtccagaacatcctgaagagggtagaagagaggtctgagcgggagtgcactgctttggatgctcacaaggagctggaaatggtggtaaaggcatgcaacgagggcgtcaggaaaatgagccgcacggaacagatgatcagcattcagaagaagatggagttcaagatcaagtcggtgcccatcatctcccactcccgctggctgctgaagcagggtgagctgcagcagatgtcaggccccaagacctcccggaccctgaggaccaagaagctcttccacgaaatttacctcttcctgttcaacgacctgctggtgatctgccggcagattccaggagacaagtaccaggtatttgactcagctccgcggggactgctgcgtgtggaggagctggaggaccagggccagacgctggccaacgtgttcatcctgcggctgctggagaacgcagatgaccgggaggccacctacatgctaaaggcgtcctctcagagtgagatgaagcgttggatgacctcactggcccccaacaggaggaccaagtttgtttcgttcacatcccggctgctggactgcccccaggtccagtgcgtgcacccatacgtggctcagcagccagacgagctgacgctggagctcgccgacatcctcaacatcctggacaagactgacgacgggtggatctttggcgagcgtctgcacgaccaggagagaggctggttccccagctccatgactgaggagatcttgaatcccaagatccggtcccagaacctcaaggaatgtttccgtgtccacaagatggatgaccctcagcgcagccagaacaaggaccgcaggaagctgggcagccggaatcggcaatgacccccacccagggggccagcgggagcagggcctgcatgagaccccgacagaaggtggggggggnggctctgggaagcacaggccagcacctccccaggtggcaggatctggcttggggtgcccgggccctcatccctgcccacgcagtgagtgctcatgtgtcttggccccttgctcgcaaactggataaagggtgcccaagcctctcctgatgcatttgtaaacaagaaggtttcagcagtattacaccacctccctcatgcctccgagggggtggaagggggtgggcacactccagggccccccatgcccctggcccccagggactggaagaggctcccaacccagagtgtccctgtgggaggcaggcagaaggtgacaattgacacgatttcctgcacgcgtcctcctctaccttggaagcagttagaatctaccaggcacagatgaggccgcccttgcctgacggagcttgatgagcagcccttggtctccggttccaggactgagagcccagctgcctctgcccacccttccccaggcctctgccagcctctggctgcacggtcaggccctgccccatggcaggcctgccagagcttggctggggacccctcccgcctctggctccctgatgggctggatgtaacttgtgtcttctagccccttaaggagcccaggtgttttaaggaatgaattggtcactgcatcttgtatcgattatggttctgagaaaagcaaatatcacttttggctgcattaaaagaagcatcatatataaaataaagaagatgaaggtct

SEQ ID NO: 348375 - DNA, 729 bp, Homo Sapiens
catggtgactcatgcctgttatcccaacactttgggagtccagggtgggagtattgcttgaggtaagaagtttgagactagcctgggtcccatagtaagaccctgtctcttaaaaaataaatactatctttctctctggcctctccatcctccagacaatcactgaattacaatatttgcttaacagtagattaatgtcaattttctggaattttatatgactgatataacatgtttcctcttttcatacctgagtactctcctgagccctatttatttagatgttcttcttttctctttattattatttttatttcacatagcagggatgcatattttgacattcatcaatcatgatatatgagtagttcattctttttatcttagaatatgacatgctatggaaatcactgtatacgaattcatctgcttatggatatgttattgcttcttatttttgtctgttaggaataaaactgcttgttaagcacatttgaatgcaattcttcatatagataaggtttcatttctcttgtttgaatgccttggtgtgcagtgcccaactcacatggtagatgaatgtatacccctctcccaactccaggccgcacagcttacagctccaagagagactccttccctccacttgaggagaggagagggaagaataaagaaaactttgtcttggaacttgttccagctcagctacagtaggatagggcaccaggc

SEQ ID NO: 348376 - DNA, 1297 bp, Homo Sapiens
  misc_feature (144)..(188): n is a, c, g, or t
  misc_feature (334)..(466): n is a, c, g, or t
  misc_feature (1123)..(1226): n is a, c, g, or t
  misc_feature (1245)..(1257): n is a, c, g, or t
aaaaataagaagcaataacatatccataagcagatgaattcgtatacagtgatttccatagcatgtcatattctaagataaaaagaatgaactactcatatatcatgattgatgaatgtcaaaatatgcatccctgctatgtgnnnnnnnnnnnnnnnnnnnnnnnnnnnnnnnnnnnnnnnnnnnnnagggctcaggagagtactcaggtatgaaaagaggaaacatgttatatcagtcatataaaattccagaaaattgacattaatctactgttaagcaaatattgtaattcagtgattgtctggagcatggagaggccagagagaaagannnnnnnnnnnnnnnnnnnnnnnnnnnnnnnnnnnnnnnnnnnnnnnnnnnnnnnnnnnnnnnnnnnnnnnnnnnnnnnnnnnnnnnnnnnnnnnnnnnnnnnnnnnnnnnnnnnnnnnnnnnnnnnnnnnnnttattacagctttaaaaatgtaatttgaaagaactatctggatttaacattatttttgacaaataggttatgtgattttacattgactctcctaactctcatcacgccctaaggggggcaattagcctgagtgataccaaatacttatgagccaggaagatcatttccacctgattaaattggaatgctggctggttgcaaaggccacatcactggactaagagatttcctttctccctatcctcttcctcctactaattcagggatggctttttggtatgcagcccagataggctacagaaatccacaaacctttagatttagtctgacaatgacctaagctacactagattcataattatggaggtcctgaaaatttctgtacctgcttgtccatcacagacatagtgactgaatcattgtggatgcctttttaaaaaaagtatatcccaactattctgttgcagtctgcttcactacctagaaatgctaattctacaaaattatttttgggctgggcatggtggctcacacctgtaatcctagtgctttcaagggcgtatgctagaggattacttgaggccaggagttgaacatcagtcagggtaaaatagcaaaaccctatctccacaaaaaattcttaaattacctgggctnnnnnnnnnnnnnnnnnnnnnnnnnnnnnnnnnnnnnnnnnnnnnnnnnnnnnnnnnnnnnnnnnnnnnnnnnnnnnnnnnnnnnnnnnnnnnnnnnnnnnnnngagtgacatcatttccctnnnnnnnnnnnnnttaaagaattatgatttctttctccaggcttataacgtag

SEQ ID NO: 348377 - DNA, 507 bp, Homo Sapiens
  misc_feature (102)..(102): n is a, c, g, or t
gaagaaaggtaactcgtgtatgaaccccgagccatttccctgttgtcctgaggaggaactccaggcctcccatcgtgtgccctaaggcctcctgcgtcctgnagccctgcctcccactgcctgacttcctgccacacggttaatgctgcagcaacaccgactgcttcatcttccctgtgctccacgtggcttcctacctctctcgcctttgttcttgttgaagggtctcttctcagctaattaactctgaatcatggttcaagacaagcctcaggcatcatgtcaatgggtgtttccctcaagcttagttggcagcactctccacacttctgtggctcagtgattactgctattactatatttacttgcatatgtcagaatgatgtgatagactatctctgtcactatgctgttgggttcctgaggacagtgatcatatctgattgatttccatgtgtccactgtctagcacagggcaataaaaaatacacccctaaatctatgtgt

SEQ ID NO: 348378 - DNA, 473 bp, Homo Sapiens
cagcctgagaaataccctcagcagcgaagcttcctgacgcctgtctgcaggcgccgctgccgccgtcgcttctggctgaagacgtttgaggacgatttgcggaattccaagtccactactgggttccagctgccttcccccggttttgactccagatccctggctcctcagccaggcccacatggagccctcccagccaccagcctgcctccatgttcactgtcggcaccacagcctgaccgccccttggtgttgctctgaatccgttttccctgtgggtgtggaaccgtagatgttgctgttaccgtaggagaggcctcggggagggtcatcattgtgataaaccatcgcggttaatgacagcagaaggttctttgtcgctccccatggaccaggcctggtgcccagtgggaccctccatggccctctggtgggaggattcccggggataaagtgaggattgtgcagttatg

SEQ ID NO: 348379 - DNA, 1028 bp, Homo Sapiens
  misc_feature (863)..(863): n is a, c, g, or t
  misc_feature (888)..(888): n is a, c, g, or t
  misc_feature (911)..(911): n is a, c, g, or t
  misc_feature (918)..(918): n is a, c, g, or t
  misc_feature (930)..(930): n is a, c, g, or t
  misc_feature (935)..(935): n is a, c, g, or t
  misc_feature (950)..(950): n is a, c, g, or t
  misc_feature (985)..(985): n is a, c, g, or t
  misc_feature (1010)..(1010): n is a, c, g, or t
aagtacaactaacgcaaccaagtgtgctaaaaatgagcttgattaaatcaaccacctatttttgacatggaaatgaagcagggtttcttttcttcactcaaattttggcgaatctcaaaattagatcctaagatgtgttcttatttttataacatctttattgaaattctatttataatacagaatcttgttttgaaaataacctaattaatatattaaaattccaaattcatggcatgcttaaattttaactaaattttaaagccattctgattattgagttccagttgaagttagtggaaatctgaacattctcctgtggaaggcagagaaatctaagctgtgtctgcccaatgaataatggaaaatgccatgaattacctggatgttctttttacgaggtgacaagagttggggacagaactcccattacaactgaccaagtttctcttctagatgattttttgaaagttaacattaatgcctgctttttggaaagtcagaatcagaagatagtcttggaagctgtttggaaaagacagtggagatgaggtcagttgtgttttttaagatggcaattactttggtagctgggaaagcataaagctcaaatgaaatgtatgcattcacatttagaaaagtgaattgaagtttcaagttttaaagttcattgcaattaaacttccaaagaaagttctacagtgtcctaagtgctaagtgcttattacattttattaagctttttggaatctttgtaccaaaattttaaaaaaagggagtttttgatagttgtgtgtatgtgtgtgtggggtggggggatggtaagagaaaagagagaaacactgaaaagaaggaaagatggntaaacattttcccactccattctgnattaattaattggagcaccaaantccaaancatggccatttngaagnaagatgttttgcgtncagaggttaaaccccaaaaagccttttaaaaaggnctccacatagcgatccgtttgtggnttggatatttaaaacctc

SEQ ID NO: 348380 - DNA, 1836 bp, Homo Sapiens
caggcagcctaggccatggctgaaaagaaggggtaagtccttcattgcatgatgatgtgtgcaggttttcctgattttctaatttttatttttgaattcacatgtgtaatttcacatcaataacttgtgtttctgaaatatcctaactaacttgttaataaggaaagaaaccagatttgcttaaatctgttcaaggctgacattctgaaattctaaactggaaataacttcccagagtatttggaaaggttctaagtacaaggatcaggcctaaaatagctccttgggaaagaaatttcctttttgatgagaaaacttaaaatactgtttttggtaatgtaagcagttaaaaacatgactttagaaagacagcttaatgcgtattcaagcaaacctttgttttgttgcttttgcttttgtttgtagaagagagaggaagttattataccaaaaagtaatagtatatgtaactttgagtgaggctacttatatcttagaatgggtatccttgaactatatctaccccaccatggcttaaaaaaatcagtggtatatattgagaatgtcagtcatgagcttagtgtttaagtaacacatcccacttacagttgtttgcatgattagtcttgtgtatcatgatgttcaactttgcttttgctgtgccagttccaaaaatatcttttttgctaaaaactcttaaaattcatgacataaggtttggtagtgatcacccggctttatatagtatttctggcaccaaaaaaagtaaatatacctttttaatataaaacagaagtttgaagctggaaagatagtgtttatggaaaattgtgtgcttttgtgttttttaaagcccgtcaggctgctggtaaggcagtttctagggctcacttttcctccttacctcttgactagtgtagcatgtggtatctttaaaatatttcattttctgcttcgtaattctaaggtcaacactatactgtatgtagacaggagagctgatttgtatattttagttatatggtctaatcaagcataactaaagggacttcttttttgatacttttctcaaattaagtttaaatatagtatacgggccacatttcatgtcttgaaagtgttgtacattactgtaaaccaagtactctgtctacaccagagggtgctttaactgcaaaatatttgagaaacaattcagtctctcaaacattttggcacagttcatcactccagtttgttactttcttgagaatagtccattttttgtttttgttattataccgtatgttctggtcattggaaacagaacagctcatagttgggtgatgtaatataataacagtaatataacctagtagtcattttgcttcaagtaatttaattagatagcaaaatcactgcggtttgtttattacacttgtagggctttttgtcttactcagtgaccatcactacgaatgtcttacattgaagcacagactgcagagcacttgttaacttagtcctcctgcataatgcactcgtgaaaagtagtgcttgctaggtgtttgaagattttatgatccgtgtgcttgggctcgttgagttatttgtaaaataaacatttagtttgagttgatgcagtaagttttttggactagtagtatccaggtccctactctactgaaaatataatcttcactatctccccttaagtcagaggagatgtagcatttagaacaccttgagacatgacattgtaaaatagcttgttttatgttcctgaagctatcttgttctctgttaaagctactaattgtctcagtgtaagttttaaataaacatatttctttaaaa

SEQ ID NO: 348381 - DNA, 1169 bp, Homo Sapiens
acaagcagggctggccctgaggcctggagaccccccgcttctgcctcccaggccccctcaaggcctgtgagccaactactgcagccctctgctcctcaacaggccagagacccctttgaggatttgttacagaaaaccaagcaagacgtgagcccgagtccggccctggccccggccccagactcggtggagcagctcaggaagcagtgggagaccttcgagtgagccgggccctgagggtgggggatgcaccgaggcccgagggtccgtccactgctgcggttccgaggctcccccgccactctctctctgcccaggttctgctggtgggaagggatgggacccctctctgctgccccctcctcccctccacactgcccatctctgatgtctggccctggggaatggcaccagttccagcctgggaatcaacccagttcctgagtgcccatcccaccccgcggttgcctctcctcggcacccttgattgggttttgcactaaagaggtcagctgggccaatgatattgctccagaccgagtcctacccaccttcccccggaagtgtcccaagaggctccgaaggcctcccctccgagcccagctctcctgtctcctccacagccaggccctgcaagcccacctcctcggacacaggtgacagggttaccctccagctttgagctcatctgcacgagacacaggtagcttggggttgaagttaggactcctcctgggctggaggatttacctggtggggcacttccagactgtttctagcaatatacacacacgttctttcctgtgtcttgcaccccaaaacttcaagtgattctgacctgggaggatctggggaccagggggtcttgggctgccttgtgatacacagccccagccaccctgcacgggggctgcgagcaccagcaactttgatttatagaaggaaaatggaaacccccatctgagtattttgggaggagcccccagccctcatccagctctggcacgctgatacctccaggtactcccctcactgtcaaagctggggctcagcctcttgtcatctggagctttgtggggcaaagctggagaagcttgcaacccagattttcaacccaaaaaggttcaagcttgaatgccttcagattgatgtgggaagggcagctgggc

SEQ ID NO: 348382 - DNA, 562 bp, Homo Sapiens
gacggatcaggctctcctcatgctgtttagtgatggcactgtccaggtgaacttctacgggggaccacaccaagtctgattctcagtggctgggagcccctccttgtgacttttgtggcccgaaatcgtagtgcttgtacttacctcgcttcccaccttcggcagctgggctgctctccagacctgcggcagcgactccgctatgctctgcgcctgctccgggaccgcagcccagcctaggacccaagccctgaggcctgaggcctgtgcctgtcaggctctggcccttgcctttgtggccttcccccttcctttggtgcctcactgggggctttgggccgaatcccccagggaatcagggaccagctttactggagttgggggcggcttgtcttcgctggctcctaccccatctccaagataagcctgagccttagctcccagctagggggcgttatttatggaccacttttatttattgtcagacacttatttattgggatgtgagccccaggggggcctcctcctaggataataaacaattttgcagaattggactccc

SEQ ID NO: 348383 - DNA, 364 bp, Homo Sapiens
  misc_feature (89)..(89): n is a, c, g, or t
gctaatgctctgcgccctgctcggggaaccgaaagcccaagccctaggacccaaaacccctgaagcctgaagccctgtgcctgtaaagnctctggcccttgcctttgtggccttcccccttcctttggtgccctcactgggggctttgggccgaatcccccagggaatcagggacccagctttactggagttgggggcggcttgtcttcgctggctcctaccccatctccaagataagcctgagccttagctcccagctagggggcgttatttatggaccacttttatttattgtcagacacttatttattgggatgttgaacccaggggggcctcctcctaggataataaacaattttggcag

SEQ ID NO: 348384 - DNA, 526 bp, Homo Sapiens
aattgcaacaatgcaaaagccaagaaagtataagggtcacaagtctaaacaatgaattcttcaacagggaaaacagctagcttgaaaacttgctgaaaaacacaacttgtgtttatggcatttagtaccttcaaataattggctttgcagatattggataccccattaaatctgacagtctcaaatttttcatctcttcaatcactagtcaagaaaaatataaaaacaacaaatacttccatatggagcatttttcagagttttctaacccagtcttatttttctagtcagtaaacatttgtaaaaatactgtttcactaatacttactgttaactgtcttgagagaaaagaaaaatatgagagaactattgtttgggaaagttcaagtgatctttcaatatcattactaacttcttccactttttccaaaatttgaatattaacgctaaaggtgtaagacttcagatttcaaattaatctttctatattttttaaatttacagaatattatataacccactgctg

SEQ ID NO: 348385 - DNA, 537 bp, Homo Sapiens
  misc_feature (193)..(193): n is a, c, g, or t
taagcttttggctccgctggtcactctctgagtttatcctccaaaccatgtgtgcccctcatacctgccagctgcactgtggtcccctggccctgctaccaggtagaggctggaccggtcccccttgctgctcagcagagaatggaggttctgaaaagaggcagctttccgacgctggtgagagggtgacacnctgatgagaaagggacaatattgcgggtgagaaaagctacctgggaggtgctgacagaggacttggccccaccatgaacctgagggccctgtaagaaagtgacagcacaagcttttatcattgcttccaagaattcaacaggaaccaccatgacttactcaaggacatcatgggtctacataggccatctgaggagtcaagggagtttttgttttgctttttagctgaaataacaactttagtgctatactaatttcctcattgattaaggaaatctaatgtactcattaaggaagaaatgaaagtaagtttattatacagtaataaataccacattagagtta

SEQ ID NO: 348386 - DNA, 1532 bp, Homo Sapiens
agcggggcctgccttacggaagcctgcgagggagggtggtgtccactgcccagttccgtgtcccgatgcccagcgccagcgccagccgcaagagtcaggagaagccgcgggagatcatggacgcggcggaagattatgctaaagagagatatggaatatcttcaatgatacaatcacaagaaaaaccagggaaacagtgcttcttagtcatacgtcagcagcagtttaatgtccaggctcttgtggcggtgggagaccatgcaagcaagcagatggttaaatttgctgccaacatcaacaaggagagcattgtggatgtagaaggtgttgtgagaaaagtgaatcagaaaattggaagctgtacacagcaagacgttgagttacatgttcagaagatttatgtgatcagtttggctgaaccccgtctgcccctgcagctggatgatgctgttcggcctgaggcagaaggagaagaggaaggaagagctactgttaaccaggatacaagattagacaacagagtcattgatcttaggacatcaactagtcaggcagtcttccgtctccagtctggcatctgccatctcttccgagaaactttaattaacaaaggttttgtggaaatccaaactcctaaaattatttcagctgccagtgaaggaggagccaatgtttttactgtgtcatattttacaaataatgcatacctggctcagtccccacagctatataagcaaatgtgcatttgtgctgattttgagaaggttttctctattggaccagtattcagagcggaagactctaatacccatagacatctaactgagtttgttggtttggacattgaaatggcttttaattaccattaccacgaagttatggaagaaatagctgacaccatggtacaaatattcaaaggacttcaagaaaggtttcagactgaaattcaaacagtgaataaacagttcccatgtgagccattcaaattttgggagccaactctaagactagaatattgtgaagcattggctatgcttagggaagctggagtcgaaatgggagatgaagacgatctgagcacaccaaatgaaaagctgttgggtcatttggtaaaggaaaagtatgatacagatttttatattcttgataaatatccattggctgtaagacctttctataccatgcctgacccaagaaatcccaaacagtccaactcttacgatatgttcatgagaggagaagaaatattgtcaggagctcaaagaatacatgatcctcaactgctaacagagagagctttacatcatggaattgatttggagaaaattaaggcttacattgattccttccgctttggagcccctcctcatgctggtggaggcattggattggaacgagttactatgctgtttctgggattgcataatgttcgtcagacctccatgttccctcgtgatcccaaacgactcactccttaaattcacactttgccacttaactccagtgtggatgacagagcgagaccctgcctc

SEQ ID NO: 348387 - DNA, 1135 bp, Homo Sapiens
ccgggatctcgagatagccgcagctctcgcgatctttctggagccgcacctccacgcggagtccgagcgcgtgtgctgagacccgagggtcgggagggcggagactgggagggagggagaagcccctttggcctgccttacggaagcctgcgagggagggtggtgtccactgcccagttccgtgtcccgatgcccagcgccagcgccagccgcaagagtcaggagaagccgcgggagatcatggacgcggcggaagattatgctaaagagagatatggaatatcttcaatgatacaatcacaagaaaaaccagatcgagttttggttcgggttagagacttgacaatacaaaaagctgatgaagttgtttgggtacgtgcaagagttcatacaagcagagctaaagggaaacagtgcttcttagtcctacgtcagcagcagtttaatgtccaggctcttgtggcggtgggagaccatgcaagcaagcagatggttaaatttgctgccaacatcaacaaagagagcattgtggatgtagaaggtgttgtgagaaaagtgaatcagaaaattggaagctgtacacagcaagacgttgagttacatgttcagaagatttatgtgatcagtttggctgaaccccgtctgcccctgcagctggatgatgctgttcggcctgaggcagaaggagaagaggaaggaagagctactgttaaccaggatacaagattagacaacagagtcattgatcttaggacatcaactagtcaggcagtcttccgtctccagtctggcatctgccatctcttccgagaaactttaattaacaaaaggttttgtggaaatccaaactcctaaaattaatttcagcctgccagtgaaggaaggagccaaggttttttactggtgcccatattttaaaaaataatgcatacctggcttcagttccccacacgttttattaagccaatgtggcattttgtggcttgattttgaaaaagcgttttttcctatgggacccatctatcttcgaaggggaagaacctcttatccccgctggacatccaactggggttctgctgggtttagaccttttgaaaaggtgcttttaacttcccattccccaccaaaccttgct

SEQ ID NO: 348388 - DNA, 420 bp, Homo Sapiens
  misc_feature (65)..(102): n is a, c, g, or t
gggctaccttttttcaggaaaggactgcattagaccaaaacccaatgccgtgaggaccacagtcnnnnnnnnnnnnnnnnnnnnnnnnnnnnnnnnnnnnnnaataatatgcccatggcttatgtagaagtgttgcaagatcttccactgagatagtaatttgtttaaatgtgtttccctcctcctctcttcccaccaccaatttcaagcaatgagcgtggttgtgcttctttgcctcagatgatatttgtggcaggatggacagcagaagccacttgaaatcagagaatattcttagtttttcttaaaacctatgctccccgatattattatggtaagtgtgccaggggatgaggaaggagaaagcagtgcctttgaggtcaacagagggaggaggaaagatttatccagagaagaaaa

SEQ ID NO: 348389 - DNA, 445 bp, Homo Sapiens
ctatacggctgcgagaagacgacagaagaagcaagcgctggcctggccttgaaagaaccgaagtctttcccattcacttctctagaaagctgccaagacagaggcagaaagaaatggatgatagttctgtcaagcacacttctgttctcttagaacttagaagtgtttctaagagaacagaagtaataagagaaacagttacgtgtggaattcaacatctttggttggaacgcattggctttttgtttcttgttttgatagaaatggaattaagcaaaagtagtttttgtcttttctgttgtcttcaaattttatgccttttatttttaatttaatcccgttcaattatttaattgttatacattgacattaactgctgtattttgactttgttcaataattttgttctttcagggctagaaataaactttttaaaaaaagtgac

SEQ ID NO: 348390 - DNA, 764 bp, Homo Sapiens
  misc_feature (579)..(691): n is a, c, g, or t
gaatttgataatcctccttttattcaatattaaactttaaaatttgtgaccacattattaaagtattacttttactcacagtagtattatacatagacttaacacaatttttaaaaatgtgtttacttaaaacaatataattctcctttacaaaagcaactttatataaaatgtttggcttaagactgtcattgctattatgcctttgaatgaaattccactctttcgcctccattgtccagaaacaggcacatatcagcttgttttctttaatgaatattctgtaacaagttcctgaagttttctaattctttcacacttgtagaaattctgtaaccaaaaaatatttcactcagaaaccatctcagataaattttatctgtaaaagttattcactttgcattttaaaacatttttaaagtaatttatttcaataaatttaaggtgcataaaccatttaatggattcttaatatattttagttcttaattcgacaaggtaaaactaagatattaatgtctagagattagttattttaaaagtatttaaatacatatgccaggtgcagtgattcactcnnnnnnnnnnnnnnnnnnnnnnnnnnnnnnnnnnnnnnnnnnnnnnnnnnnnnnnnnnnnnnnnnnnnnnnnnnnnnnnnnnnnnnnnnnnnnnnnnnnnnnnnnnnnnnnnnttgccaggcatggctgtgtgtgccatgtagtcgtagctacttggaaacccgaggtaggagaactgcttgagtc

SEQ ID NO: 348391 - DNA, 2609 bp, Homo Sapiens
  misc_feature (160)..(160): n is a, c, g, or t
  misc_feature (2130)..(2137): n is a, c, g, or t
  misc_feature (2139)..(2141): n is a, c, g, or t
  misc_feature (2143)..(2146): n is a, c, g, or t
  misc_feature (2149)..(2149): n is a, c, g, or t
  misc_feature (2151)..(2151): n is a, c, g, or t
  misc_feature (2156)..(2156): n is a, c, g, or t
  misc_feature (2159)..(2228): n is a, c, g, or t
  misc_feature (2232)..(2232): n is a, c, g, or t
  misc_feature (2311)..(2381): n is a, c, g, or t
ccccgcagaaaacacaggcccctccggctttcgctctcgctctgggaactggaaggacccccgactcccgcgcagggtctggggttgtgcgcgtcgggttgcgtctccaggccgggggcctcacggacccgggggccgggacgggcgcgggcgcacgganccgggcggggccgagccgggaagctggtcggtgcgtcacctcacgcggcgggaaggaaccggtccgaggccccgggctgccggcgcgggcgccgcggcacgtccacaggctgggtcgcgaggtggcgatcgctgagaggcaggagggccgaggcgggcctgggaggcggcccggaggtggggcgccgctggggccggcccgcacgggcttcatctgagggcgcacggcccgcgaccgagcgtgcggactggcctcccaagcgtggggcgacaagctgccggagctgcaatgggccgcggctggggattcttgtttggcctcctgggcgccgtgtggctgctcagctcgggccacggagaggagcagcccccggagacagcggcacagaggtgcttctgccaggttagtggttacttggatgattgtacctgtgatgttgaaaccattgatagatttaataactacaggcttttcccaagactacaaaaacttcttgaaagtgactactttaggtattacaaggtaaacctgaagaggccgtgtcctttctggaatgacatcagccagtgtggaagaagggactgtgctgtcaaaccatgtcaatctgatgaagttcctgatggaattaaatctgcgagctacaagtattctgaagaagccaataatctcattgaagaatgtgaacaagctgaacgacttggagcagtggatgaatctctgagtgaggaaacacagaaggctgttcttcagtggaccaagcatgatgattcttcagataacttctgtgaagctgatgacattcagtcccctgaagctgaatatgtagatttgcttcttaatcctgagcgctacactggttacaagggaccagatgcttggaaaatatggaatgtcatctacgaagaaaactgttttaagccacagacaattaaaagacctttaaatcctttggcttctggtcaagggacaagtgaagagaacactttttacagttggctagaaggtctctgtgtagaaaaaagagcattctacagacttatatctggcctacatgcaagcattaatgtgcatttgagtgcaagatatcttttacaagagacctggttagaaaagaaatggggacacaacattacagaatttcaacagcgatttgatggaattttgactgaaggagaaggtccaagaaggcttaagaacttgtattttctctacttaatagaactaagggctttatccaaagtgttaccattcttcgagcgcccagattttcaactctttactggaaataaaattcaggatgaggaaaacaaaatgttacttctggaaatacttcatgaaatcaagtcatttcctttgcattttgatgagaattcattttttgctggggataaaaaagaagcacacaaactaaagtaggactttcgactgcattttagaaatatttcaagaattatggattgtgttggttgttttaaatgtcgtctgtggggaaagcttcagactcagggtttgggcactgctctgaagatcttattttctgagaaattgatagcaaatatgccagaaagtggacctagttatgaattccatctaaccagacaagaaatagtatcattattcaacgcatttggaagaatttctacaagtgtgaaagaattagaaaacttcaggaacttgttacagaatattcattaaagaaaacaagctgatatgtgcctgtttctggacaatggaggcgaaagagtggaatttcattcaaaggcataatagcaatgacagtcttaagccaaacattttatataaagttgcttttgtaaaggagaattatattgttttaagtaaacacatttttaaaaattgtgttaagtctatgtataatactactgtgagtaaaagtaatactttaataatgtggtacaaattttaaagtttaatattgaataaaaggattatcaaattcatatatgatnnnnnnnncnnncnnnnccncnccccnccnnnnnnnnnnnnnnnnnnnnnnnnnnnnnnnnnnnnnnnnnnnnnnnnnnnnnnnnnnnnnnnnnnnnnntggnaaaaccaatgcacggtcccttacctcgttttcaccccgcgatttctccgccgaaaagcacacagggcgcctgcgcattnnnnnnnnnnnnnnnnnnnnnnnnnnnnnnnnnnnnnnnnnnnnnnnnnnnnnnnnnnnnnnnnnnnnnnnagcacatataactcggtggcgcctccaccgcgacttttttggaggcgcgggccccccgcggcgggaggctccccccaacacgacgcgccggtccttccccctctgccaccaacaaaacgtcgcgggggcctcctttccaaagcgttgtttccgcagcccctacccccaaacaaaacataggcgccgcccgtactatcacaccctggcccctttttttataaaccactc

SEQ ID NO: 348392 - DNA, 937 bp, Homo Sapiens
ctggacagtttctcattgctgggtctccactcctagctgttactgcaagtccatgcctctaccatgagggtggaggagttaagatcaacagatccacatgtaccttgaggtgacagactggctctgaacaagttgaaatcatcgcagaaggataaagttcgtcagtttatgatcttcacacaatctagtgaaaaaacagcagtaagttgtctttctcaaaatgactggaagttagatgttgcaacagataattttttccaaaatcctgaactttatatacgagagagtgtaaaaggatcattggacaggaagaagttagaacagctgtacaatagatacaaagaccctcaagatgagaataaaattggaatagatggcatacagcagttctgtgatgacctggcactcgatccagccagcattagtgtgttgattattgcgtggaagttcagagcagcaacacagtgcgagttctccaaacaggagttcatggatggcatgacagaattaggatgtgacagcatagaaaaactaaaggcccagatacccaagatggaacaagaattgaaagaaccaggacgatttaaggatttttaccagtttacttttaattttgcaaagaatccaggacaaaaaggattagatctagaaatggccattgcctactggaacttagtgcttaatggaagatttaaattcttagacttatggaatacatttttgttggaacatcataaacgatcaataccaaaagacacttggaatcttcttttagacttcaggtacgaatgattggcgatgacattgtctaatttatgattgaagaaggagccatggcctgttcttatttgatgacttggtggaatttgcacggcctccaattgctgggacaaaaaggtacaacagtgtagcactaaaggaaccttctagaatggtc

SEQ ID NO: 348393 - DNA, 1475 bp, Homo Sapiens
ggtccggaattcccgggatcggaggaggaggggagaggcctggaggacaccaacatgaacaagttgaaatcatcgcagaaggataaagttcgtcagtttatgatcttcacacaatctagtgaaaaaacagcagtaagttgtctttctcaaaatgactggaagttagatgttgcaacagataattttttccaaaatcctgaactttatatacgagagagtgtaaaaggatcattggacaggaagaagttagaacagctgtacaatagatacaaagaccctcaagatgagaataaaattggaatagatggcatacagcagttctgtgatgacctggcactcgatccagccagcattagtgtgttgattattgcatggaagttcagagcagcaacacagtgcgagttctccaaacaggagttcatggatggcatgacagaattaggatgtgacagcatagaaaaactaaaggcccagatacccaagatggaacaagaattgaaagaaccaggacgatttaaggatttttaccagtttacttttaattttgcaaagaatccaggacaaaaaggattagatctagaaatggccattgcctactggaacttagtgcttaatggaagatttaaattcttagacttatggaataaatttttgttggaacatcataaacgatcaataccaaaagacacttggaatcttcttttagacttcagtacgatgattgcagatgacatgtctaattatgatgaagaaggagcatggcctgttcttattgatgactttgtggaatttgcacgccctcaaattgctgggacaaaaagtacaacagtgtagcactaaaggaaccttctagaatgtacatagtctgtacaataaatacaacagaaaattgcacagtcaatttctgctggctggactgaactgaagatcaatcctcacaattcagactgagggttgagacaaaactttaaggatacatcttggaccatatcgtatttcattcttctaatggtggtttgggcttgtcttctagtctgggccgctctaaacatttataattccaacattgtggatttcatcttatatctgtggaccatcctagtttattctcccataagtcttagaagctttatggtgattattttgaggttttcattctcgcataaagcacaatgctgtcttcatcagaaaacagttggcataagaattaaacatatgaacatcacaaaacaatttataaaaacttcttaaatatacgctttgggctagttgcaaagactatgctaatagcacttccagtgagagtgatatatttaagtgtactggatctggaatggtgttttggctttggggggcattttttgttttcctggcaatcacatgtcttgttgatcgtgagtatctgatgatgatacatgtcagcataaccgacatgaaattttttagataacacgttcgctaggtaccgagctcga

SEQ ID NO: 348394 - DNA, 1802 bp, Homo Sapiens
  misc_feature (30)..(30): n is a, c, g, or t
agtcttattttagtagctaatgcatgtttnaaataagatgtgttagaaattatatgactatattaaggttgtgtttatattaggtgaaaaattgcatgcaattggtgaatcatgcagctttggggacatttacactgccactcacacacaggctctgtctcaatccgtatgcatgattcacgtcctttcaaaagtcccttttcaacatttggtaaagtgaaaatgttattcatagtgctaatgagccaataaacaatgctgcgtttcttttttctaactgcagcatattgtggtaaattttctcccaaaactttatttttggagttattgttggcaataaatacaacaaattatttgttggcaagtgatacaatttactggataacaacttaatagtacaaagcatgaagatgtgaaaatatcatcttaaccagtttcattctatgaacataatattctggcagctttttctataactgagaatggtatatctttttatacactgcctaaatcagtactactgccagtcacctgaggtcaggtctgcacaacactaaattgggcaataacatagaacatctaggcagtcttgacagtcaaccagtgtaatcactaggggaaggaaaagtagggcctacccttttacttattaacttaagtaataaaaattgtataaaaatatgaatgttcgctgcagaggagcctttacatgcagataatttgaagcagtctttgaaaataacaaaaattattccatttaatgaagggtttgttttgtttagcttttctcttttattcagaaaacatacctgtgcttttgaaagggcttaatcccaaacaggtaatatgtgtggatcaatcatctctcctcccatgaaattaatcattcatggtaatatattaaggctggaacgtagctcttagtgacttaaaacatgacagtaagcatttacactgttggaaggtaatttcattgctatgttattaaaatgatgggaatcctatttatacatttatttatttatttatttacagaagattggttccttccagttcaatttaacagcttcagtgaagttagtataatgataagaaaaattgactgtagctattattccaagtgaaaatcatgcagctgagtcctgctgcatcctgggagcaaagcattaattcaaatgaggagtagtcagtcctagcactgtagacgccgactttaccaaccaagatattgtatgtgtgtgacattcagctaacattgatctaggcacttagtttgctaccacattgttcccttcattgattgaaactgtaaataacataacactttaaggcagctaagcaaatattttaataagccatgaaaggcaagatgccagagaaaatctgtatattcagctatttggagaactcgtgttttccacaaattaaactggagatgtcatttgaaattttcttcccttaaacatgctgtcacaacatggattccttctcatggatgtctttctaggcttataaatatatggtgtgattgctataattttgtgaaattttattcagcaattaatagtgatttcagcaatatgtactaagattccaaggcagaaataaatgtataaaggatttgagcctgtatgtgtaagaagaaactctctcttcagtcatatttcctaaattcagtgtaagtacctcgctgatttagcactggagttattccttgaatgtgtaaataatgatgttctattctgacctaatgaattcctgtaatgtgaatatttaaaataaaagaattcaatttaaatgta

SEQ ID NO: 348395 - DNA, 3204 bp, Homo Sapiens
  misc_feature (2755)..(2758): n is a, c, g, or t
  misc_feature (2760)..(2796): n is a, c, g, or t
  misc_feature (2993)..(3003): n is a, c, g, or t
gtactacagcggtttaaggtagcgaggcctgggtggcgaattcggcacgaggacaacaacccctcatcaacaggcatttgatttactgccttggggacatcatcctggaattcttggatctcagtgcctctgttgaggagtctgctgctaccacctctgcctcagataccccaggcaactctaagaggatgggtgtctcctcttagctggttattcacgccttcttcccaggtcagggaagtagagttactcggccaccagagaccagtcaggaagcccgtgccctcttcaagtaggctacagctaagaaggcctaggttctcggtggctcacttctctcccacttctgctccatttgtagcaggtgacaggggtctgtgtgtcccagttgcatgcacgtttatttccctgttccttttgtgatgttgggattgttgctggtgagtagatcctgtttcctttgggaacaagaagctgtgaggtagaggaatgaaccccttttgcttctccttttgccatcctccctgagattgtttgccagaatcctggccctgtgcacacatgtgcttaatccaccagcgacacaagctctagatagaacaggaaaaaaactgtggccagatttccttggaggagaaaacaaccttctcagctctctgttcctacccggaaactaaaaattcattcagggccattctcaaaaaccagactcctgggtctaatctagtttcccaacagttccagaagaagaaggagggaagaaaatttttcaaggaacttcttgctcatgtgttgctgtttcccaacacatcagccttatggaagatgtcatgaggctgcttgcctgggaggctacactttcctttccagaagacttcaaagctgactgccaaagcttctggtaaatccaccccacccttcacaccctttcctgaaaggcatttataccacccattttatttattggctttgctcccaaccccctgccctagagcaattgagtttttgaatttttgaccctctctctgtcttcagcaaaactgcatgacaagctgcatattcagcctcagtttttccaaggagaatggaaagcacttgcctcctgtcttaagaatgcacaaagagtaggactagcaaggctgggggatgaaatctcccttcctaagtctttgacagagaacttttattattctgaacagataagattagcaaacttacaaggaatagcttcttatttcccattccttacggttataatcagtcctttaacaacaccagcatgaaggcaaaggtgttttgtcagactgcaacatctattagaaaggcaaggcaactgggaattgctggagaaggataaatcaggaggaattgctggtagaaaaggctgcagacagtcacagggaagtgctgtatattaaatgcatgtgaatagctggcaaaaagatgtcaaggatgtcactgggagccctttggcttcacactcgcctgttagcgccttgctttcgctgaattaccagagcctaccactcggaggaaggtcttggagttagactgatgagaaggcaatggggtgtcaaaaacaagtgtcaaagttctcttagattctgaagtcggtgatgagcacacaattaaagtggtttgtggaagaaagttgtaaaatctttttacttttttgcccctctggaggcttttaaccctaaattgtgtctgatgtattcgggaggcttaggtgtgcaattcttgcccaaaggcaaggagatgaatgagatgtctcatggcctcttctagccttaaaagttgaccattacagtgactttatggctccaaagtttcttgaagcaatctccagccctagactttgacaagaaaaaggtagcctcagcatctctactttccgtgagtacctgcaggagtccagccaatgtattagagctgatcattaagctccttcagtgagggctaagatcctattctcgatgagcacagggggacagccttgttttatgccacttttctctccccatacctaccttcccctcatgtgtacttagccacctgtgttgctttgaatctgctgccagttctggctcaaatgtggcacaaaatcagtacatcagacacaccatgaaatccctgtggctataaattctaaggaatcttttgacacttccagcccaaagaacttatttttatttcgtattatataagagtccccacctctactccacgtaccccaaaaagataagctgtcctcagatcctccttctacccaggagggaaataatggatattgccaagggaacaatcagaactcatctggctttgaaaacgacctgccaagtttggctagcaggttcagacaacaagagagtaacaattggtagagagccacaggtagaaaagatactcccagctgacagggtgataaaaggcagggaagaattgggcctgtgctgatccaggaaggttttattgtttgcttgttttttgtatttactcgtgactaaattttattcatttaagtcagaattttgatatttgaaataagactactttcccttttcttactatctataaaaaagacgaggcagggatgctgtgttctttctgtcaaattctaaatgtgatctttgccattgcttatttgaattcaagaaagctatactttttcatcacatataactcacagtttcatttttgcattgttggattagacttaataaaacctaaatggaaaataaattcctaaatctgnnnnannnnnnnnnnnnnnnnnnnnnnnnnnnnnnnnnnnnnggggcgggccgctctaaagtattccctcgagggggcccaagcttacgcggaccccgcctttcttgtaccaagtgggtccccataaggggggtcgaattaaaaagcttagggcacgggccgggcgtttttacaacgtccggggactggggaaaactggctagcttggggaacttttgggaagggaacctttattttcnnnnnnnnnnnaaataaatggggaccaacttacctaccgaggtttttaaggctcctaagggaaataattaaaattttttagaggggaaaaaggggggtaaaacaaaccggcaaatggcttggcgggctggaaaaattttgccttcacgggggaagggttttttggaaaaatattttttccccggggggcttgggggttttcaaattggggtt

SEQ ID NO: 348396 - DNA, 1211 bp, Homo Sapiens
ccgggcttcatgctccaggaggttctccttcccgaaagtaaaacttcccacatttgggaaactcaaagggtttctccccagtatgtttcctgttgtggacttttagataatatttgctgaggaactttttatgacatgtggggcattcgaccggcaccgctgtaccttttctgttctcagcaggctcagctgctagggagcccgcgctcagggctggctcagctgcacagggctttcggattacatttgacttcctcctggtcagcacagcctaaggctcagacatgtaatcgccatccccatcatcctccacttgaaccaccacttcccactcattactgccgccctgcagctgggcaccttcagcctctaagggccttgggggcactttgcagtcctcgggtttcttgtcctcaaggggacaaggcttcaaggcctgcttcagtttcccacagagggaggaggggccctcactctgagctggggaatggagctggggcctctgaggactatgactgcctctgggctcctgatccctggggactagacccagagtcctcgaaacttcctcttcttccaagcctgccggctccttgacgtggctgttcacattctgggaggcagggggccccagcccactctggccacctgctgcctgtcccactgaagttttgggcttgaagctctggcacagctctacggcctctggcactcgcaactccctggctgccaggagcacctgatcccggttccctgaggtgagagcgaggtgaccagtgtagaaaaagtccaacaagaggccaaagatctcagcgaagccagcagggaggacgacactgccccctgagccatccccgtagaggctctggaaaaagtgactgcagcaggcaaggacactccagtgtgccttaaacaccaggccccccacgtccagagtggcgtcgcagtactggcccttctcccgctgcttgttgagctcctgcagaaccctcacactgtgctggacgaaggagccgtccatggtctggagggcagggaggcagaagtgacaccccggccagcctaagcgagggtatgcaagagaaagctcccaggcaggtcctccctgagctggccccactggccacctgctccgtcgcctccacagcccacgaacctagtgcccaggctacgcgtaccccgccgacagtgcggagactccaccgtctccg

SEQ ID NO: 348397 - DNA, 736 bp, Homo Sapiens
  misc_feature (256)..(256): n is a, c, g, or t
agttgggaaggaacaccgtaagccgaaagggcaatatcagcaagcacatgcgcacacgcacgggtaagaagcccttccagtgcctcctctgtggcaagaacttacgaacccaagacaaacctgaacaagcgcaaccgcacccagagcggggaaaggcccttcagtgcggagttctgtggacagcgctacactgagaaggggcccctcctgaggcacagtgcccagccaccatcaggaggaccggcaccactcatgnccagatatgcggcaaaaccttcaaagccgtgaaacaactgcgtgtgcacatcagacggcacaaggggggtgaggaagtttgagtgcaccgagtgtggctacaagtttacccgacaggcccacctgcggaggcacatggagatccacgaccgggtagagaactacaacccgcggcagcgcaagctccgcaacctgatcatcgaggacgagaagatggtggtggtggcgctgcagccgcctgcagagctggaggtgggctcggcggaggtcattgtggagtccctggcccagggcggcctggcctcccagctccccggccagagactgtgtgcagaggagagcttcaccggcccaggtgtcctggagccctccctcatcatcacagctgctgtccccgaggactgtgacacatagcccattctggccaccagagcccacttggccccacccctcaataaaccgtgtggctttggactctcgt

SEQ ID NO: 348398 - DNA, 1130 bp, Homo Sapiens
  misc_feature (968)..(993): n is a, c, g, or t
  misc_feature (1053)..(1053): n is a, c, g, or t
taccagttggaaaaagaagacgctgtagaagttctggcaattgataatacttcagtgcgaaacaggcagattgaaaaacttaagaagatcaaatccagcagggatcaagctttggctgaacgttgtcttgctgcactaaccgaatgtgctgctagcggagatggaaatatcctggctcttgcagtggatgcatctcgggcaagatgtacagtgggagaaatcacagatgccctgaaaaaggtatttggtgaacataaagcgaatgatcgaatggtgagtggagcatattcgccagggaatttgggagaaagtaaagagataacatctgctatcaagagggttcataaattcatggaacgtgaaggtcgcagactcgtcttcttgtagcaaaaatgggacaagatggccatgacagaggagcaaaagttattgctacaggatttgctgatcttggttttgatgtggacataggccctcttttccagactcctcgtgaagtggcccagcaggctgtggatgcggatgtgcatgctgtgggcataagcaccctcgctgctggtcataaaaccctagttcctgaactcatcaaagaacttaactcccttggacggccagatattcttgtcatgtgtggaggggtgataccacctcaggattatgaatttctgtttgaagttggtgtttccaatgtatttggtcctgggactcgaattccaaaggctgccgttcaggtgcttgatgatattgagaagtgtttggaaaagaagcagcaatctgtataatatcctctttttgttttagcttttgtctaaaatattattttagttatgatcaaagaagagagtaaagctatgtcttcaatttaatttcaatacctgatttgtactttccttgaaagctttactttaaaataccttacttataggcctggtgtcatgctataagtatgtacatacagtttcacttcnnnnnnnnnnnnnnnnnnnnnnnnnnctctctatactctctataacaatactttatcaagaactctggacaatggtattatttttnaaaatcatggtgatgtatttattagaatgtttcttataaatctgtttactttttatattaagaattaaactgtacct

SEQ ID NO: 348399 - DNA, 390 bp, Homo Sapiens
  misc_feature (70)..(70): n is a, c, g, or t
  misc_feature (152)..(152): n is a, c, g, or t
  misc_feature (185)..(185): n is a, c, g, or t
  misc_feature (225)..(250): n is a, c, g, or t
tgggaaaagaagccagcaaccggtaaaaataccccccttttgttttaagcctttgtcctaaaatattatnttaagttatgatcaaagaagagagtaaagctatgtccttcaatttaatttcaataccctgatttgtactttcccttgaaagnctttaactttaaaataccttacttataggcccnggtgtcatgtctataagtatgtacatacagtttcacttcnnnnnnnnnnnnnnnnnnnnnnnnnnctctctatactctctataacaatactttatcaagaactctggacaatggtattatttttaaaaatcatggtgatgtatttattagacatgtttcttataaagtctgtttactttttatattaagaattaaactgtacctg

SEQ ID NO: 348400 - DNA, 2319 bp, Homo Sapiens
  misc_feature (15)..(15): n is a, c, g, or t
  misc_feature (2220)..(2272): n is a, c, g, or t
cgctatactactacnatgctgcgagaagacgacagaagggggcggaactttggtgcagcctgatgcgcaacgtggggactcaggtgcgctgggcggcaggagttgcttccggccgtgttggtggtctgaattgagaagccgcgactaagggaagatggagacaatactggagcagcagcggcgctatcatgaggagaaggaacggctcatggacgtcatggctaaagagatgctcaccaagaagtccacgctccgggaccagatcaattctgatcaccgcactcgggccatgcaagataggtatatggaggtcagtgggaacctgagggatttgtatgatgataaggatggattacgaaaggaggagctcaatgccatttcaggacccaatgagtttgctgaattctataatagactcaagcaaataaaggaattccaccggaagcacccaaatgagatctgtgtgccaatgtcagtggaatttgaggaactcctgaaggctcgagagaatccaagtgaagaggcacaaaacttggtggagttcacagatgaagagggatatggtcgttatctcgatctccatgactgttacctcaagtacattaacctgaaggcatctgagaagctggattatatcacatacctgtccatctttgaccaattatttgacattcctaaagaaaggaagaatgcagagtataagagatacctagagatgctgcttgagtaccttcaggattacacagatagagtgaagcctctccaagatcagaatgaactttttgggaagattcaggctgagtttgagaagaaatgggagaatgggacctttcctggatggccgaaagagacaagcagtgccctgacccatgctggagcccatcttgacctctctgcattctcctcctgggaggagttggcttctctgggtttggacagattgaaatctgctctcttagctttaggcttgaaatgtggcgggaccctagaagagcgagcccagagactattcagtaccaaaggaaagtccctggagtcacttgatacctctttgtttgccaaaaatcccaagtcaaagggcaccaagcgagacactgaaaggaacaaagacattgcttttctagaagcccagatctatgaatatgtagagattctcggggaacagcgacatctcactcatgaaaatgtacagcgcaagcaagccaggacaggagaagagcgagaagaagaggaagaagagcagatcagtgagagtgagagtgaagatgaagagaacgagatcatttacaaccccaaaaacctgccacttggctgggatggcaaacctattccctactggctgtataagcttcatggcctaaatatcaactacaactgtgagatttgtggaaactacacctaccgagggcccaaagccttccagcgacactttgctgaatggcgtcatgctcatggcatgaggtgtttgggcatcccaaacactgctcactttgctaatgtgacacagattgaagatgctgtctccttgtgggccaaactgaaattgcagaaggcttcagaacgatggcagcctgacactgaggaagaatatgaagactcaagtgggaatgttgtgaataagaagacatacgaggatctgaaaagacaaggactgctctagtgttgagggatgtagctcagcttttgggctagcccaggcttccctaagatctgctttttctatttctcccaaccaaatcctcttaaagaccctttgctatgtagtctcatggtctagcatgcatcttgtagaaacaaggcatgctggcagattgcagggttgagatgtgttttatctgttttatattttaaaagattctgccagaaaataaaaccagaccttgttctaaagcccagggttatggaccaactcagtgcttcaggtcttaatgcctccatacctcttcctcaccaactttactagtagctgagatttaatgggcacctattatgctacatatcatgttaggtaaatctgacctgacctctttccccaccctcctttgttgctgcttccctgaatgagtattaccccaggatgaggtctgccatcagcttagttagccattgatgcaaatactagggaaagactaggaggatgagccagggttgctactaaggactaagtgtcgcaccaaggtttgccttttgtatttgcataaagaaaggagttggagctgnnnnnnnnnnnnnnnnnnnnnnnnnnnnnnnnnnnnnnnnnnnnnnnnnnnnnggttgcttgagactagcctaggtaacatagtgagaccctgtctcatt

SEQ ID NO: 348401 - DNA, 1172 bp, Homo Sapiens
gacataagtgcataggtacgaggcctggctgtaaatcggccgaggctgaattgagaagctgcgactaagggaagatggagacaatactggagcagcagcggcgctatcatgaggagaaggaacggctcatggacgtcatggctaaagagatgctcaccaagaagtccacgctccgggaccagatcaattctgatcaccgcactcgggccatgcaagatatctgtgtgccaatgtcagtggaatttgaggaactcctgaaggctcgagagaatccaagtgaagaggcacaaaacttggtggagttcacagatgaagagggatatggtcgttatctcgatctccatgactgttacctcaagtacattaacctgaaggcatctgagaagctggattatatcacatacctgtccatctttgaccaattatttgacattcctaaagaaaggaagaatgcagagtataagagatacctagagatgctgcttgagtaccttcaggattacacagatagagtgaagcctctccaagatcagaatgaactttttgggaagattcaggctgagtttgagaagaaatgggagaatgggacctttcctggatggccgaaagagacaagcagtgccctgacccatgctggagcccatcttgacctctctgcattctcctcctgggaggagttgggcttctctgggtttggacagattgaaatctgctctctatagctttagagctcgaaatgtaggcgggaccctagaagagcgagccaagagactattcagtaccaaaggaaagtcccttggagtcacttgatacctctattgtatgccagagaaatcccaagtcagagggcaccaagcgagacactgaaaggaacaaaggacattgctttctagaagcccagatctatgacatatcgtagagattctcggggaacagcggaacaactcactcatgcaaaatgtacaagggcaagaaacgccagggacaggagaagagcgagaagacgaggaagaagagcagatcacgtgagaagtgagagtgaagaatgaagcaggaacgagaatccataaaacaggccacaaaagcctgccacagccgaggactggcaaaaccaataccataacggacaaactaagctcatgggacacaaatcacgtaaaactgcagaatcg

SEQ ID NO: 348402 - DNA, 347 bp, Homo Sapiens
cggagaagttacagattgcctcataatcctgtggggatactatgtggctatgatgagtgatgactacactgaaataggagaactagacggtttcatgataacctgatttttttaaatccagagctgtctgaactggaggattcagcagaacaacagtatccacatttaattatgcatgaagtccccttttctctaccttaagcaattaatttcctcccaaaattcaatgtggaggaggttagaaggcacatctggtccctctgccctcccctgcctttactttaaaccactggttttacctgttttgtaatgtggaggtttcactggcaattttatttcaagaaaaa

SEQ ID NO: 348403 - DNA, 699 bp, Homo Sapiens
  misc_feature (679)..(679): n is a, c, g, or t
tggcccggatgttcggtgcagctgccagatccgctgatctagcgcttctcgaaaaaaaccttcaggcggcccatggctgtcgatattcaaccagcatgccttggactttattgtgggaagaccctattatttaaaaatggctcaactgaaatatatggagaatgtggggtatgcccaagaggacagagaacgaatgcacagaaatattgtcagccttgcacagaatctcctgaactttatgattggctctatcttggatttatggcaatgcttcctctggttttacattggttcttcattgaatggtactcggggatggcagctattatcacctcacttgtgagtgatccagttggtgttctttatattcgttcatgtcgagtattgatgctttctgactggtacacgatgctttacaacccaagtccagattacgttaccacagtacactgtactcatgaagccgtctacccactatataccattgtatttatctattacgcattctgcttggtattaatgatgctgctccgacctcttctggtgaagaagattgcatgtgggttagggaaatctgatcgatttaaagtatttatgctgcactttacttcttcccattttaaccgtgctcaagcagttggtgaggcctttatattacgccttccatacattatatagngttatctttggtactctgct

SEQ ID NO: 348404 - DNA, 757 bp, Homo Sapiens
  misc_feature (512)..(512): n is a, c, g, or t
  misc_feature (579)..(579): n is a, c, g, or t
  misc_feature (660)..(660): n is a, c, g, or t
  misc_feature (710)..(711): n is a, c, g, or t
  misc_feature (718)..(718): n is a, c, g, or t
  misc_feature (744)..(744): n is a, c, g, or t
ggtgcagctgccagatccgctgatctagcgcttctcgaaaaaaaccttcaggcggcccatggaatgccttggacctttattgtgggaagaccctattaatttaaaaatggctcaactgaaatatatggagaatgtggggtatgcccaagaggacagagaacgaatgcacagaaatattgtcagccttgcacagaatctcctgaactttatgattggctctatcttggatttatggcaatgcttcctctggttttacattggttcttcattgaatggtactcggggaaaaagagttccagcgcacttttccaacacatcactgcattatttgaatgcagcatggcagctattatcaccttacttgtgagtgatccagttggtgttctttatattcgttcatgtcgagtattgatgctttctgactggtacacgatgctttacaacccaagtccagattacgttaccacagtacactgtactcatgaagccgtctacccactatataccattgnatttatctattacgcattctgcttggtattaatgatgctgctccgacctcttctggtgaagaagatngcatgttggttagggaaatctgatcgaattaaaagtacttatgctgcaccttacttctttcccattttaaccgtgctttangcacgttgtggaggccctttatattacgcctttccatacattattataannggtatcntttggtactctggctgtgtacatggntgcttttggaaag

SEQ ID NO: 348405 - DNA, 2289 bp, Homo Sapiens
aaaatttttatatttattttttattcctacagagaagaagaaacacattcgtacaagggttcatttcccagtggttaaatgtactgagaaaaatacattaacaaagtaactcaaggatacaactgctgtgaattcaaaagacagactactacaggaaaagtgagtgcacttactttcatattttgcagctgttaatagaagtcttaaacatttaaaatttaactaattcacacaacctccaccaagtatcagtaaataaacttctaaacaataaaaatggataaacatggtcaggttgttaggttaagagctaaaaatttcattttgcttccatggttgcaaccatgagtcttaaggccttcaaagcataaacatcacagaacacctatcacaaaccacaaaccaaccacaggaaaaccctttttatactgtggatcttctgtatttcattaaacctaataagccatcagttgtaagatgcatcctaattcagagatgtcacaaagtgaaataagtatctctggatcaataaaatatggtatgtatatatacccgagatatgagaggaaactatttaccagtttgaattacttccatactattgtgccaaacaacaattaagtgtcaaaacattgaaattttatgtaggtaagctttttattattgttttctttacaggaacaataatccaaacaaatcttgaaccaatctataaacagaaaacctgttatataaattattatctatttttgcaatacatcaaaatactgtattgatgaaaataaatagataacaaaaaacaatatacatcatttctatgtttgctatcagaccccacaagtatgtttgtttttacaattcattataggtgaaaaacaaactgaaacacaacaggtacgtacaattacgccactgttaaggactgcagattacacgtgttaaagcttttcttaataaaatgggaacacattgctaggtacacagaaacatgattttgccctaaagaacagctgaactgttgagagaagcaagggcttcctagcggccttccagtgtagcagataatattaccctgtgtaacagagtattacagagttttgcattttccaagtctgtaagtctaaccataaacaaaacaaagacaaacccaaacattaagatatactgacaatcttgttcccatatatgatagaatagttctcatacactgttaagattgatttacttttttattaggagcacttctcaggtttttggcatttcacatgtctacactcagtgtccattggctccttctgagagtatccttgaaggttcggtaaattttgcagtgaacaagtaaaaaagggctggtgtaggtaccaaagccaaaaggggcaaatcttgctcaagtttatccactctggaaatggagattattccataggcatgaagtaaccagtggctgaagagaacaataagtcttttctttctgaccagaagatcatagcagttctctatttcagaagcagacatgtacacagccagagtaaccaaagataacactaatataatgtatgggaaggcgtaatataaaaggcctccaccaactgcctgaagcacggttaaaattgggaagaagtaaagtgcagcataaatacttttaaatcgatcagatttccctaacccacatgcaatcttcttcaccagaagaggtcggagcagcatcattaataccaagcagaatgcgtaatagataaatacaatggtatatagtgggtagacggcttcatgagtacagtgtactgtggtaacgtaatctggacttgggttgtaaagcatcgtgtaccagtcagaaagcatcaatactcgacatgaacgaatataaagaacaccaactggatcactcacaagtaaggtgataatagctgccatgctgcattcaaataatgcagtgatgtgttggaaaagtgcgctggaactctttttccccgagtaccattcaatgaagaaccaatgtaaaaccagaggaagcattgccataaatccaagatagagccaatcataaagttcaggagattctgtgcaaggctgacaatatttctgtgcattcgttctctgtcctcttgggcataccccacattctccatatatttcagttgagccatttttaaataatagggtcttcccacaataaagtccaaggcatgctggttgaatatcgacagccatgggccgcctgaaggtttttttcgagaagcactagatcagcggatctggcagctgcaccgaacatccgggccacagcgc

SEQ ID NO: 348406 - DNA, 1107 bp, Homo Sapiens
  misc_feature (118)..(118): n is a, c, g, or t
ttatctgtagacatgtcttccacgagccgctgtacatctatcgttgtccttttgtacttagggcctcttctccagggtttcgcgcgtgatcacatgttaacacactacatgtcccatnggtccctttctgggatacttccctgaaggtttccgtaatatttcgcaagtgacactagtaaaaacgggcttggttaggttatccaatgcacaaaagggggacaaatctcttgctacacacgtttatccacttgggaaatggagattattccataggcatgaagtaatcagtggctggaagagtccgataagtcttttctttcctgaaccagaagatcataccagttctctattttcagaagcagacaatgtacacagccagagttaccaaagatacactaatataatgtatgggaaggcgtttatataaaagacctccaccaactgcctgaagcacgggtaaaatggggaacaagtaacagtgcatgcataaagtacttttaaatcgatcagatttccctaacccacatgcaatcttcttcaccagaagaggtcggagcagcatcattaataccaagcagaatgcgtaatagataaatacaatggtatatagtgggtagacggcttcatgagtacagtgaactgtggtaacgtaatctgaacttgggttgtaaagcatcgtgtaccagtcagaaagcatcaatactcgacatgaacgaatataaagaacaccaactggatcactcacaagtaaggtgataatagctgccatgctgcattcaaataatgcagtgatgtgttggaaaagtgcgctggaactctttttccccgaataccattcaatgaaaaaccaatgtaaaaccagaggaagcattgccataaatccaagatagagccaatcataaagttcaggagattctgtgcaaggctgacaatatttctgtgcattcgttctctgtcctcttgggcataccccacattctccatatatttcagttgagccatttttaaataatagggtcttcccacaataaagtccaaggcatgccatgggccgcctgaaggtttttttcgagaagcactagatcagcggatctggcagctgcaccg

SEQ ID NO: 348407 - DNA, 449 bp, Homo Sapiens
  misc_feature (419)..(419): n is a, c, g, or t
ccgccgagctcgctgtggcccggatgttcggtgcagctgccagatccgctgatctagcgcttctcgaaaaaaaccttcaggcggcccatggaatgccttggactttattgtgggaagaccctattatttaaaaatggctcaactgaaatatatggagaatgtggggtatgcccaagaggacagagaacgaatgcacagaaatattgtcagccttgcacagaatctcctgaactttatgattggctctatcttggatttatggcaatgcttcctctggttttacattggttcttcattgaatggtactcggggaaaaagagttccagcgcacttttccaacacatcactgcattatttgaatgcagcatgggcagctatttatccaccttacttgtggagtgatcccagttgggtgttcntttataatttcggtccatgttcgagtattg

SEQ ID NO: 348408 - DNA, 339 bp, Homo Sapiens
  misc_feature (41)..(41): n is a, c, g, or t
  misc_feature (54)..(54): n is a, c, g, or t
  misc_feature (58)..(58): n is a, c, g, or t
  misc_feature (82)..(82): n is a, c, g, or t
  misc_feature (86)..(86): n is a, c, g, or t
  misc_feature (115)..(115): n is a, c, g, or t
agacaatgtggcccccattttattaagaaaagcctttaacnccgtgtaacccgncagncccttaacagtggccgtaattgtncgtncctgttgtgtttcagtttgtttttccccnataatgaattgtaaaaacaaacatacttgtggggtctgatagcaaacatagaaatgatgtatattgttttttgttatctatttattttcatcaatacagtattttgatgtattgcaaaaatagataataatttatataacaggttttctgtttatagattggttcaagatttgtttggattattgttcctgtaaagaaaacaataataaaaagcttacctacat

SEQ ID NO: 348409 - DNA, 2624 bp, Homo Sapiens
  misc_feature (26)..(26): n is a, c, g, or t
  misc_feature (2619)..(2619): n is a, c, g, or t
ccccgcccgccccaggggggaggggngggaattttcgacccggggagctgctgccgtagctgccgccgccgctaccaccgcgttcgggtgtagaatttggaatccctgcgccgcgttaacaatgaagcagagttcgaacgtgccggctttcctcagcaagctgtggacgcttgtggaggaaacccacactaacgagttcatcacctggagccagaatggccaaagttttctggtcttggatgagcaacgatttgcaaaagaaattcttcccaaatatttcaagcacaataatatggcaagctttgtgaggcaactgaatatgtatggtttccgtaaagtagtacatatcgactctggaattgtaaagcaagaaagagatggtcctgtagaatttcagcatccttacttcaaacaaggacaggatgacttgttggagaacattaaaaggaaggtttcatcttcaaaaccagaagaaaataaaattcgtcaggaagatttaacaaaaattataagtagtgctcagaaggttcagataaaacaggaaactattgagtccaggctttctgaattaaaaagtgagaatgagtccctttggaaggaggtgtcagaattacgagcaaagcatgcacaacagcaacaagttattcgaaagattgtccagtttattgttacattggttcaaaataaccaacttgtgagtttaaaacgtaaaaggcctctacttctaaacactaatggagcccaaaagaagaacctgtttcagcacatagtcaaagaaccaactgataatcatcatcataaagttccacacagtaggactgaaggtttaaagccaagggagaggatttcagatgacatcattatttatgatgttactgatgataatgcagatgaagaaaatatcccagttattccagaaactaatgaggatgttatatctgatccctccaactgtagccagtaccctgatattgtcatcgttgaagatgacaatgaagatgagtatgcacctgtcattcagagtggagagcagaatgaaccagccagagaatccctaagttcaggcagtgatggcagcagccctctcatgtctagtgctgtccagctaaatggctcatccagtctgacctcagaagatccagtgaccatgatggattccattttgaatgaataacatctatcttttgggaaaggttgagctgttggattatcttgacagtattgactgcagtttagaggacattccaggccatgctatcaggaagacaatttagcatagacccagatctcctggttgattctgagaataaaggattagaaactaccaagaacaatgtagttcagccagtttcggaagagggaagaaaatctaaatccaaaccagataagcagcttatccagtataccgcctttccacttcttgcattcctcgatgggaaccctgcttcttctgttgaacaggcgagtacaacagcatcatcagaagttttgtcctctgtagataaacccatagaagttgatgagcttctggatagcagcctagacccagaaccaacccaaagtaagcttgttcgcctggagccattgactgaagctgaagctagtgaagctacactgttttatttatgtgaacttgctcctgcacctctggatagtgatatgccacttttagatagctaaatccccaggaagtggactttacatgtatatattcatcaaaatgatgaactatttattttaaagtatcatttggtactttttttgtaaattgctttgttttgtttaatcagatactgtggaataaaagcaccttttgcttttctcactaaccacacactcttgcagagctttcaggtgttactcagctgcatagttacgcagatgtaatgcacattattggcgtatctttaagttggattcaaatggccatttttctccaattttggtaaattggatatcttttttttacaaatacgaccattaacctcagttaaatttttgtttgttttcctgtttgatgctgtctatttgcattgagtgtaagtcatttgaactaatggtataactcctaaagctttctctgctccagttatttttattaaatatttttcacttggcttatttttaaaactgggaacataaagtgcctgtatcttgtaaaacttcatttgtttcttttggttcagagaagttcatttatgttcaaagacgtttattcatgttcaacaggaaagacaaagtgtacgtgaatgctcgctgtctgatagggttccagctccatatatatagaaagatcgggggtgggatgggatggagtgagccccatccagttagttggactagttttaaataaaggttttccggtttgtgtttttttgaaccatactgtttagtaaaataaatacaatgaatgttgagtactagtgtctgttatgtgtcttctttagaggtgacactcacatgaaacaattttttcttctcataggaagcagtagctttaaactgtctgtggttcattattctcaatatgaatcataccaagatatttgtgcctcatctcgaaaatatattgtatattgcaacaagggggaaatataatctctaaatttaatgtatttnaaagt

SEQ ID NO: 348410 - DNA, 484 bp, Homo Sapiens
ctccatcaaacctcctatggggtttatcctacagaggacaaaacttctgatgatgcctgttgtactcgccctgttcaaacagaagaagcagggttccccatcgaggaatgcaagaagtggaaaggcggtatactggataagctgccttatctggtttggatttagattttctcccctcttccgaaactggctgaactacattgttcttggtagtttaatcctttattctcagattttgtattattgatgtaatctgtgggattcatctgcacagaactagtgaaaagatcaaccaggagatctgggtctatgctaaattgtcttcctgatagcatggcctggaagtcctctaaactgcagtcaatactgtcaagataatccaacagctcaacctttcccaaaagattgatgttatcattcaaaatggaatccatcatggtcactggatcttctgaggtcagactggatgagccatttagctgga

SEQ ID NO: 348411 - DNA, 1775 bp, Homo Sapiens
  misc_feature (27)..(27): n is a, c, g, or t
  misc_feature (54)..(54): n is a, c, g, or t
  misc_feature (56)..(56): n is a, c, g, or t
  misc_feature (88)..(88): n is a, c, g, or t
  misc_feature (104)..(104): n is a, c, g, or t
  misc_feature (116)..(116): n is a, c, g, or t
  misc_feature (127)..(127): n is a, c, g, or t
acccaccgcgtgaaacagtggttttgnacgtggcctttctgataagaaaagtgnanaaagtcaggttttatttgaaacagaaatatcncggaaactctttgatncccttaatgaanacctctttcanaaaatactggtacccattcagcaagtattgaaagaaggccacctggaaaagactgagattgatgaggtggttttagttggggctccgccattcaacagatgggtggccagtggcttggtggaagacaaatcagaactaactgggcaacccgaaagcctcccgctccaaagagtacatatgagtcaaataccaaacagctatcatatgatgaggttgtaaatcagtctagtccaagcaactgtactgtatactgtggaggtgttacttctgggctaacagaacaactaatgcgtcagactttttcaccatttggacaaataatggaaattcgagtctttccagataaaggatattcatttgttcggttcaattcccatgaaagtgcagcacatgcaatttgtttctgttaatggtactaccattgaaggtcatgttgtgaaatgctattggggcaaagaaactcttgatatgataaatcccgtgcaacagcagaatcaaattggatatccccaaccttatggccagtggggccagttggtatggaaatgcacaacaaattggccagtatatgcctaatggttggcaagttcctgcatatggaatgtatggccaggcatggaaccagcaaggatttaatcagacacagtcttctgcaccatggatgggaccaaattatggagtgcaaccgcctcaagggcaaaatggcagcatgttgcccaatcagccttctgggtatcgagtggcagggtatgaaacccagtgaataaggactccagaatctaaagccagtggcttgaggctacagggagtgtagtaaagccgttgtttacttaaagatttatcaaatcagtcagtgcaaatgtcagatacaatgtatttatttaaaagattcatttttaatcatgaaattacttatcatccacattgttttaaaaagaaacaagatgctggatgtctgccaatttttgccttcattaccttttttgataaagtttctcagatccttgtttcaaacacaaatgcagggattgctgccactttttaactattaagaggcagaaaattgcacaatattgaacttttttccactgaagtagtgtgcagttctagtttgcattcctgatatgatttaaaacatgtaatataaagatgttaaaaattctgttttaggttaaaaaaaggcattgtttgagctgtcccatctccactgttatccctttggggttttttaatataaattattagtttacatcatttttgtatctacatcttttttcacaaatttgtcttgccttattaaagttctgtaaaatatacttaaatggaaaaaatgatgttcatttagattgaaaacttttctcagatggattgataattgcattcatcttgtgttttatatgagaaggtgcctcaagaatttcctgttggatttgtttaaaaggatttttatctttcgtgataaactttgctgtgtaccaggaactataaaaacaaaaacttgttactaaagaaaatatctgaaatgtgataagttcttatgccatgttaatttcatgtgtcaacttcaacatttacatgtattatttcattatggtgttttagcaatttaatattttgcacagttagcctttgtatgtctttccttcgc

SEQ ID NO: 348412 - DNA, 1604 bp, Homo Sapiens
  misc_feature (66)..(86): n is a, c, g, or t
ttataaccaaggtaaatttttaagaaaacgaggtaaatgttcaaaaaatattttggaggaaaaagnnnnnnnnnnnnnnnnnnnnnctggttttccagttacattaccaagaaaaatgtttttttaaaaaaccatccctaccgaacaaatgaatatcctttatctggaaagactcgaatttccattatttgtccaaatggtgaaaaagtctgacgcattagttgttctgttagacaaaaaaccaaaacaaacaaatcacactaagttatataaaaatcctacaaatattaagctttgcactttaaaaaattaatgccacacagggaaggctcccatacctgttagcccagaagtaacacctccacagtatacagtacagttgcttggactagactgatttacaacctcatcatatgatagctgtttggtatttgctggtgagagaaaaggtttatgtctttaattcattaaataaaatgtgcagaaagagaaaagtagcattcactacactactgtaaaggtaacattaaccttgatcaaaatgcttatattacacatattatacttcagttcaggattaaacctcccccacgaatgtctaaaaaattacccagtattttctatttaataggagacttgacattagaaataatattatttataattacaaaaatgaaaactaagtacatttttgaatagtagtcttgatttgcttctcatctatttctgcaataagtctccgggaacagctctaacatttaaaatctagcgtatttttctcccaaaattcccacatttccttttctttctccaatacacctacactccatatgtactctttggagcgggaggctttcggggttgcccagttagttctgatttgtcttccaccaagcccactggccacccatctgtggaatggcgttttcagcatcccatttgtgaaaaaggagacaaagccatatcccttagactttcctgttgccatgtcttttaccactcgggcatctgatattcttccaaatggtgcaaaagcagcttttatatcttcagttgtaatttctgggctgagatcaccaacaaagacatggaaatgatcttgtgaacgctgtgtgctgacaacggtactactgcttgtatctttcttttgactgctaggggttgttgcccaattcactttgacttccttacccattatcttccgtccattcatagcagctaatgctgcagctgcatgacgatgctcatgaaactccacaaaacaatagggatcatttccagctgtatccataaacaaaaagcagtttttacaaggtccaatctggctaaagagttgcagaattagagcttctgtcacatctctggaaaggttaccgacgtatagagtcttgggcatctcgtcctccatggctgctgctgtcgcggcggcgcctccaggtccagctccctgcccttcactacctcccaaatcgtttaagcggttatggctacaggatagtggggtttctcggctgaccagaggttactccgcctcctcctccggcggcaattacattatacggcaaggcccagcgggaacacctcggtatgaaacgccacccagg

SEQ ID NO: 348413 - DNA, 911 bp, Homo Sapiens
ctggagaagaacttctcatgtaatgtaaacacagacatcaaagatgctgtggtagtgcctgtaccacaaacaggtgcaaattcactgccatctgcagagggtggcccccctgaagttgtatcagtctgatggaacctgttgggagtttcttcaccgaagaatatctttctagccctcagccactacaaatgacagaagtgatcttgaattatttactcccttcagctcctcctttctcctactgacacatttttcctgactttgttcaaagaggaaaggagaaaaacaaacaaacagaccaaatgcccaggagcccatgaagtaatagcgtaaagtaaagtatgatatggaaatgtgaagtttgcaagagaatgatttccaagacaattaagaactactggggcaatgaatgcttttaggcagtaatcaaagattaaatggacccatgatactcttcttcacagtaacaggggaaaagttcaagaatacagacttgaattgcgatgtgtattacttctagggccttgtaatgttaactgtctcatctggaaataataactaacatatttggttttaagcctgaaattgtctgcattatccctaagtcacattggaagtgaacttggaggatgcatattttgatatgctttgacagctaacagatttgtatggtttagtggagtctggttattttgacagatgcatgttttttttaaatagatgcaatatacatttgaagacattgatatttggaattaattatgtttgtttaagtcacgcaaaagattttcagaaaatgttcggatataattagctctgttaaatacccacagaactgttatcaggtcttatatttattttcatctggttcctctaatacagtgctgtccaatagaaacacaacagccaca

SEQ ID NO: 348414 - DNA, 1393 bp, Homo Sapiens
  misc_feature (12)..(12): n is a, c, g, or t
  misc_feature (52)..(52): n is a, c, g, or t
  misc_feature (1331)..(1331): n is a, c, g, or t
atacgttcgctnatactactatcctgcgagaagacgacagaaggggagtgtnggaggtgaggaggcggggctggcagggctagtcggggcatctggaaatttccgaccccacgcttcgggcgtttccttatcaggttcaccgctccctgatctcgcgctgcacttcgtaggcgcagccgctgcttgggaagtcctacttaagagctgaaggtcaggccaggacagtgagacctgactccttgctcctaccagcctactatggcttaagacccagggccagggtcccgttgatgtaacagagcagaggaccagcagatgaatggacaccttgaagcagaggagcagcaggaccagaggccagaccaggagctgaccgggagctggggccacgggcctaggagcaccctggtcagggctaaggccatggccccgcccccaccgccactggctgccagcaccccgctcctccatggcgagtttggctcctacccagcccgaggcccacgctttgccctcacccttacatcgcaggccctgcacatacagcggctgcgccccaaacctgaagccaggccccggggtggcctggtcccgttggccgaggtctcaggctgctgcaccctgcgaagccgcagcccctcagactcagcggcctacttctgcatctacacctaccctcggggccggcgcggggcccggcgcagagccactcgcaccttccgggcagatggggccgccacctacgaagagaaccgtgccgaggcccagcgctgggccactgccctcacctgtctgctccgaggactgccactgcccggggatggggagatcacccctgacctgctacctcggccgccccggttgcttctattggtcaatccctttgggggtcggggcctggcctggcagtggtgtaagaaccacgtgcttcccatgatctctgaagctgggctgtccttcaacctcatccagacagaacgacagaaccacgcccgggagctggtccaggggctgagcctgagtgagtgggatggcatcgtcacggtctcgggagacgggctgctccatgaggtgctgaacgggctcctagatcgccctgactgggaggaagctgtgaagatgcctgtgggcatcctcccctgcggctcgggcaacgcgctggccgggagcagtgaaccagcacgggggaatttgagccagcccctgggccctcgaccctggtgctcaactggctcactgttgcctgtggccgggttgggggcccacccactgggacctgctctccctgaacgcttggcctccgggctcccgctggtttcctccttcccggncctggggccctgggggctttctggtccaaatgtgggataaatccgagcgaaaggcctttaag

SEQ ID NO: 348415 - DNA, 841 bp, Homo Sapiens
  misc_feature (400)..(400): n is a, c, g, or t
ggcccttccctgacctagaaagagggagacagagtttcataggggaggcaaaatggagactccgtggcttggggctggggggaatggaggcccaaagggtaggaaggagacctagaaaagaggggtgagatggagacccagggagaagtagtggcaaagaaagatggtgagatggggccttgcaaggctataaccaaattcaaatcctggctctgctagttactaatggggtgattgggcaagtcatttaacctctctgtgatcttgggaaaatcacttaacttctttgggccttactctccttatggacaaaaaggggatgacaacaggcctggcacacagggtgtttttcaggattatgaaagttaataaaactgcctgaggtcaatattttgcacantaataagtgcctcaataaaaaatttacccttcactccctattatagcatacatattgtgtgcaaccagatggactggctggggcagtgattaaaatgacttatctactcttccccccacccgccagggaggcccctgcctcttggttctcaggcacattgagcctggaagggcctcctgcagttggctgtcaatgctgctcctcacttacctctcctccacagagctgaaggtcaggccaggacagtgagacctgactccttgctcctaccagcctactatggcttaagacccagggccagggtcccgttgatgtaacagagcagaggaccagcagatgaatggacaccttgaagcagaggagcagcaggaccaggtaagggaccatctaaaagccaagatcctcatactgtggaaagacaaaaatctgaagcttttcttt

SEQ ID NO: 348416 - DNA, 840 bp, Homo Sapiens
agcggggaagaaagggatctgggagcgagatgcgtgtagctagcacgatgcgtcgcgcggtgacgctctggcccgacgccgacggcctctcagtggctcccggaggacccggcgggcccagtgttggagagctgaaggtcaggccaggacagtgagacctgactccttgctcctaccagcctactatggcttaagacccaggaccaggtcccgttgatgtaacagagcagaggaccagcagatgaatggacaccttgaagcagaggagcagcaggaccagaggccagaccaggagctgaccgggagctggggccacgggcctaggagcaccctggtcagggctaaggccatggccccgcccccaccgccactggctgccagcaccccgctcctccatggcgagtttggctcctacccagcccgaggcccacgctttgccctcacccttacatcgcaggccctgcacatacagcggctgcgccccaaacctgaagccaggccccggggtggcctggtcccgttggccgaggtctcaggctgctgcaccctgcgaagccgcagcccctcagactcagcggcctacttctgcatctacacctaccctcggggccggcgcggggcccggcgcagagccactcgcaccttccgggcagatggggccgcacctacgaagagaaccgtgccgaggccagcgctgggccactgcctcacctgtctgtccgaggactgtcactgcccgggatggggagatccccctgacctgtactcggcgccccggttgctctattggtcaatccttgggggtcgggctggctggcgtggtgtagaacccttgttcca

SEQ ID NO: 348417 - DNA, 935 bp, Homo Sapiens
ggcagctccgcatgcgcgcttcgacgacggcctggtgcacctgtgctgggtgcgtagcggcatctcgcgggctgcgctgctgcgccttttcttggccatggagcgtggtagccacttcagcctgggctgtccgcagctgggctacgccgcggcccgtgccttccgcctagagccgctcacaccacgcggcgtgctcacagtggacggggagcaggtggagtatgggccgctacaggcacagatgcaccctggcatcggtacactgctcactgggcctcctggctgcccggggcgggagccctgaaactaaacaagcttggtacccgccgggggcggggcctacattccaatggggcggagcctgagctagggggtgtggcctggctgctagagttgtggtggcaggggccctggccccgtctcaggattgcgctcgctttcatgggaccagacgtgatgctggaaggtgggcgtcgtcacggttaaagagaaatgggctcgtcccgagggtagtgcctgatcaatgagggcggggcctggcgtctgatctggggccgcccttacggggcagggctcagtcctgacgcttgccacctgctcctacccggccaggatggctgagggcggagtctattttacgcgtcgcccaatgacaggacctggaatgtactggctggggtaggcctcagtgagtcggccggtcagggcccgcagcctcgccccatccactccggtgcctccatttagctggccaatcagcccaggaggggcaggttccccggggccggcgctaggatttgcactaatgttcctctccccgcgggtgggggcggggaaattcatatcccctgttcgtctcatgcgcgtcctccgtccccaatctaaaaagcaattgaaaaggtctatgcaataaaggcagtcgcttcattcctctc

SEQ ID NO: 348418 - DNA, 511 bp, Homo Sapiens
  misc_feature (47)..(59): n is a, c, g, or t
  misc_feature (73)..(73): n is a, c, g, or t
  misc_feature (80)..(80): n is a, c, g, or t
gagagcggcgcctcactactgactatgctgcgaaaacactacataannnnnnnnnnnnntggcgccacccctngattgcngtgccacggactgctcctgctgggcggagaggacacattttgcaaagcggaggctgcgacgggtcctgcagggggacagtgaggaaagggccgcctcatctccgctcctgggggaccgcagaaataagaatcaaactccacaatgacaacctatttggaattcattcaacaaaatgaagaacgaaatgggagtccgatttagttggaatgtttggccatcaagtcgactggaagctacaagaatggttgttcctgtggcaaccctgtttacaccactgaaagagagacctgacttaccacctattcaatatgaacctgttctgtgtagtaggaccacttgccgtgcaattctgaatcctttatgtcaagtggattatcgagcaaaactttgggcttgcaacttttgttaccaaaggaatcagtttccacct

SEQ ID NO: 348419 - DNA, 1038 bp, Homo Sapiens
agacgtcgctatatactatgctgcgagaagacgacagaaggggagagagctgctggatatgcggagggactgggcgggtcggcttccgaatggaagaggtctgtgagaagttaacctggtgataccgatccgaagagcctatcaagtgaagccccctgaaatacggagaataagaatcttagaggttgttcagcagaagtcttggagtgcattttcagtggttaaggtgaaaaaatgactactaaaaatttagaaaccaaagtcaccgttacttcatccccaatccgaggagcaggagatggaatggaaactgaggaaccacctaaatctgttgaagttacctccggagtccaatctagaaagcatcatagtcttcagagtccatggaagaaagcagttccatcagagagcccaggagttcttcagctagggaaaatgctcactgaaaaagcaatggaagttaaagctgtaagaatattagttcccaaagctgctataactcatgatatccccaacaaaaatacaaaggttaagtctctgggacatcataaaggagaattccttggtcagtcagagggagttatagaacctaataaggaactctcagaggtaaagaatgtattggaaaagctcaagaattctgaaagaaggttactacaggacaaagaaggtctttcaaaccagctccgtgtacagacagaggtaaatcgtgagttaaaaaagttactggtggcttctgttggggatgatcttcagtatcactttgaacgtctagcccgtgagaaaaatcagcttattttagaacaatgaaagccctaggtcgaaacacagctcaggctttctgaacagttagaacgttatgtcaactacaagtgttgatgtatgggcgaaggtaacattccttgacaagcaggttaatggccgcataagttaaccaacctcaagagcagctttacagggtccaaaccgtgatgcacaccgggctattacacgatctcctagtgaacggaccagtcgtcagaaatggatgtaccagaa

SEQ ID NO: 348420 - DNA, 1278 bp, Homo Sapiens
  misc_feature (134)..(142): n is a, c, g, or t
gttcagttgacccagccttatacttaagatagccttatgaaaaatatgtgctgtgaggcagaagtatattttggcagagagaataataaataaaactttttcttttagctcaatatccttactttggtaagtannnnnnnnnatttcacatctacttaacagaaaataaactgagaaatagaagtcagtccattggcataatttatcattcttcactttaaaaaattctaataaatattctgcttgagttttcttttctgctatttgttcttacttgcaactttaagtcaaacctcccaatacaaaacattaaaagctaacattaatgtactaaagtattaatttaaaagaaatcgaacctcccatgctagatttgaaaataacatcatcacagcaccctgatcccaaatattacaccgaggcttttaaaatgtaagtgaaatctagctaagtttcatggtttcattaaaagcaaatgtctgcctctatctgaaaaacaaatggaaatcttttgaggtgttaataccctttggatcctcatcaaaaggatggcattcacctgaggattcctatcttgacttcttaggtattaaaaacctttcttgatatgctctacattttaaaatttgttttataaaatccttatgttgattttcattttattctcaagtacaatacgtttcactctagaccagttgaagaacatgtttaaactttgttcatggtcaaattcattttctatttttttagtaacatatctcttaaaaagcacactaccttataaaaaacttcatcagaaattaaatttaatgcaagtaaattgccatctgatacttccacatgctatcataatcaactgtaataataaaaatgatttatccaattagaaaaggacaagatatatttttctctgtatttctataacttttgccactccattgaatacattgtatgttggacataagattattagtaatgcattcttgagatcttttattttggaatgatgctaactctgtctctttgccaattctaataccaggttccaagtaataactctacagtacaaagagaactgaatattcattctaggggctataggatatgaacttcacaattcatttggggtacattctcattgaatttccttcaaaacaatctgttccgggtgcccagtgataatttcagtcgggaccagcctggactaaaagggaggggggtatggctaggggtccggcaaagtggaccctcaactggggggtatgttcccggggtggg

SEQ ID NO: 348421 - DNA, 763 bp, Homo Sapiens
  misc_feature (144)..(146): n is a, c, g, or t
  misc_feature (148)..(148): n is a, c, g, or t
gtcccccacggggtccttgggtggtaccagcagtagtttgcgaaagatagttacttcaaggatctagcacgtttggggattggctttttttccttgcttcagtcaaatctcttataatttttctttccatactccctttctgtnnntnccccatccctagcccagaaagacggttcttcccaatccagatatgttcttcttaggctgcccccactcctttcccaaaatggaaggatgagtggactgcttagattagtcagtataacttggttaaaccacgtcttcttctttccatcctgggacataactctcatttagggtcactttgctgagccttagcatatccccttccttttagtcatgctggtcccgactgaattatcactgggcacccaggaacagattgttttgaaggaaattcaatgagaatgtacccaaatgaattgtgaagttcatatcctatagccctagaatgaatattcagttctctttgtactgtagagttattacttggaacctggtattagaattggcaaagagacagagttagcatcattccaaaataaaagatctcaagaatgcattactaataatcttatgtccaacatacaatgtattcaatggagtggcaaaagttatagaaatacagagaaaaatatatcttgtccttttctaattggataaatcatttttattattacagttgattatgatagcatgtggaagtatcagatggcaatttacttgcattaaatttaatttc

SEQ ID NO: 348422 - DNA, 1959 bp, Homo Sapiens
  misc_feature (319)..(632): n is a, c, g, or t
  misc_feature (1871)..(1907): n is a, c, g, or t
aaccttctgctctcatgaggagaatgtattttaaacttgggaagagtcataattctgggatgtttcacatgttgtcagctttaaccttctacagacacaggccctctcctctgtgaggagggacctctggcatgtgtgggtgtgtggtgggtccctctccctattagcagaaatgtgttgggcatgagccaggtttatgatttggattgtgtcctgcacataacacctgtgagaatacaactgggactaggacaatgcgggaagcatattcttcatgaggcggtaaccaaaaggcttggctataccaaaggattctggnnnnnnnnnnnnnnnnnnnnnnnnnnnnnnnnnnnnnnnnnnnnnnnnnnnnnnnnnnnnnnnnnnnnnnnnnnnnnnnnnnnnnnnnnnnnnnnnnnnnnnnnnnnnnnnnnnnnnnnnnnnnnnnnnnnnnnnnnnnnnnnnnnnnnnnnnnnnnnnnnnnnnnnnnnnnnnnnnnnnnnnnnnnnnnnnnnnnnnnnnnnnnnnnnnnnnnnnnnnnnnnnnnnnnnnnnnnnnnnnnnnnnnnnnnnnnnnnnnnnnnnnnnnnnnnnnnnnnnnnnnnnnnnnnnnnnnnnnnnnnnnnnnnnnnnnnnggattctgggtgtaacaatctcagtagagccagcgggtgactctggttctcctaaaattctgcccttacttgccactcaccacacccccagatctgaagggccagcccttttctacctatgacacctcaccagcaagtaaagggcacaggacctcagaagtctgtggtgctaaggatgaagactctactcagagaaggtgctcagccctagtgaggaggttctgggaagcaggtgggcctgctcaatgcagtccctaacccttgggagcatccatgtgagaggtaaaggtgcaaatgacttgggcatgttgactccctactgaggaaggcagggcccctcacatctgcagtggccgtatgcatcagagaacggcatgactgcacatgtgagaactgggtgcacccgagcagtgtcaataggaatcccttccctattccatgccaaacagtcttccccagacacaaagtttccaggtcctgaggcttgactcttctaaggctcaaaatgggttctgtttccagacgtgcttgccttgcttgtctttgcttgtcttaaggactctatttcaggccaatacttgatcctcagacaaactgggacaggttgggaactttgatgttgagatcgccaatgttgatgttccgaggaatctctggcaggttgatgtttttcacagcagacacagcccgcgcaggggctgctgaaaggccaccctcggatttctccagcctgttttgagcctcaatctgagccacgatttcattcatgtttgtttccaacaccatcccacccatcaccacctcctggaggatgtagtgcaccttatccatatggaagatcaaatccaattcacacacattttcgaaacacttatccagagtttccacaaaaacctggatgaggtccaagattccaagttcactctctgaggaatccacacaaaatacaaagtagagggtagcatagtgccggtagatcagtttgtagtcagagccaccaatcaaacttccaccctccaagaagttacagatgttgtcatcccgcttgaggactagatggaaagtctctcgaacaatctgctgttgaatttcttctgggaaacgctggtagaagcggactagccgtggcttcccatggttgttgaaaaccagaatcgcctgaatcatctttgccagccacggttctctcagcaccggcccgctctcgacgaattcgagctcggccgatttggcctgatnnnnnnnnnnnnnnnnnnnnnnnnnnnnnnnnnnnnncgccgccaccgcgtgcgagctccggttcgccctatagtgatcgatcatttcc

SEQ ID NO: 348423 - DNA, 585 bp, Homo Sapiens
  misc_feature (561)..(561): n is a, c, g, or t
gatcgtgttgtggcggaaggaggagctttctgggagtagccggtgctgagagaaccgtggctggcaaagatgattcaggcgattctggttttcaacaaccatgggaagccacggctagtccgcttctaccagcgtttcccagaagaaattcaacagcagattgttcgagagactttccatctagtcctcaagcgggatgacaacatctgtaacttcttggagggtggaagtttgattggtggctctgactacaaactgatctaccggcactatgctaccctctactttgtattttgtgtggattcctcagagagtgaacttggaatcttggacctcatccaggtttttgtggaaactctggataagtgtttcgaaaatgtgtgtgaattggatttgatcttccatatggataaggtgcactacatcctccaggaggtggtgatgggtgggatgggtggtttggaaacaaacatgaatgaaatcgtggctcacaattgaggctcaaaacaggctggagaaatccgagggtggcctttcagcagcccctgcgcgggcctgtgntctgctgtgaaaaacatcaacctg

SEQ ID NO: 348424 - DNA, 1232 bp, Homo Sapiens
agcgggggcgcgggaagatggcggcagcggcggcggcggctgcagaacagcaaagttccaatggtcctgtaaagaagtccatgcgtgagaaggctgttgagagaaggagtgtcaataaagagcacaacagtaactttaaagctggatacattccgattgatgaagatcgtctccacaaaacagggttgagaggaagaaagggcaatttagccatctgtgtgattatcctcttgtttatcctggctgtcatcaatttaataataacacttgttatttgggccgtgattcgcattggaccaaatggctgtgatagtatggagtttcatgaaagtggcctgcttcgatttaagcaagtatctgacatgggagtgatccaccctctttataaaagcacagtaggaggaaggcgaaatgaaaatttggtcatcactggcaacaaccagcctattgtttttcagcaagggacaacaaagctcagtgtagaaaacaacaaaacttctattacaagtgacatcggcatgcagttttttgacccgaggactcaaaatatcttattcagcacagactatgaaactcatgagtttcatttgccaagtggagtgaaaagtttgaatgttcaaaaggcatctactgaaaggattaccagcaatgctaccagtgatttaaatataaaagttgatgggcgtgctattgtgcgtggaaatgaaggtgtattcattatgggcaaaaccattgaatttcacatgggtggtaatatggagttaaaggcggaaaacagtatcatcctaaatggatctgtgatggtcagcaccacccgcctacccagttcctccagtggagaccagttgggtagtggtgactgggtacgctacaagctctgcatgtgtgctgatgggacgctcttcaaggtgcaagtaaccagccagaacatgggctgccaaatctcagacaacccctgtggaaacactcattaaaagaaccccagaggtcaccaacatgtttatatcttgacttgacttttttatgcatgcaaatcattgtttttacagagtttgtgataactcataattattttaatggcagagcactgctgtatctgttttatggtctacatagttaaaatcttctcagagagcctaaattctaatacattttattaatttatactaatcttcatatttactgttctctaaaataattatgagaagcaaataaaatcaaaagtcatgttt

SEQ ID NO: 348425 - DNA, 455 bp, Homo Sapiens
ctgtgatggtcaagcaacccaccccgccctaccccagttcccccccagtggagacccagttgggtaagtggtgaactgggtaacgcctacaagctctgcatgtgtgcctgatgggacgctccttcaaggtgcaagtaacccagcccagaacatgggctgccaaatcctcagacaacccctgtggaaacactcattaaaagaaccccagaggtcaccaacatgtttatatcttgacttgacttttttatgcatgcaaatcattgtttttacagagtttgtgataactcataattattttaatggcagagcactgctgtatctgttttatggtctacatagttaaaatcttctcagagagcctaaattctaatacattttattaatttatactaatcttcatatttactgttctctaaaataattatgagaagcaaataaaatcaaaagtcatgttt

SEQ ID NO: 348426 - DNA, 696 bp, Homo Sapiens
  misc_feature (301)..(352): n is a, c, g, or t
ggcacgaggcgcacaatctggggcaggcggaaccttagtcctcagcctcgcgtttcccgcgactccgctctcaccgctacactaccacacaaacggcctccttcccccacccccgggggcccatcccggtggcgggctccggagctcgggactgctaatttcagcgaaacgattaaaagacgcccctacagctgacagcactttctctcctccggcagggaaggacgtccagcgtagcgtcgcccgcgcttccccgccggcgcagagcaggcctcacagaatcgcacgccgctggcacgcnnnnnnnnnnnnnnnnnnnnnnnnnnnnnnnnnnnnnnnnnnnnnnnnnnnnatcccggcctcactgcccctcgactcctgttccgttggaggggcctgaggcgagcctgagcgcgctgttggccggagggaagccggaggagaccgggtcgactggggcagagcggcagagggtcgaggagcctgctctgcacgcccagggagtagaagtgggcagggagcagggtcacgtgagggagcgcgccgcgactgagcttgggtccgactggagctcaggctcgcgacccagactggtgggccaggcctccaagccggccttacacccaatccaaggaggacagaccggacacagagggacggagcgagcaaggagacatggcttcatcattcctgccc

SEQ ID NO: 348427 - DNA, 1816 bp, Homo Sapiens
  misc_feature (1575)..(1579): n is a, c, g, or t
  misc_feature (1581)..(1586): n is a, c, g, or t
  misc_feature (1588)..(1588): n is a, c, g, or t
  misc_feature (1591)..(1592): n is a, c, g, or t
  misc_feature (1594)..(1647): n is a, c, g, or t
  misc_feature (1683)..(1683): n is a, c, g, or t
cacacaaacggcctccttcccccacccccgggggcccatcccggtggcgggctccggagctcgggactgctaatttcagcgaaacgattaaaagacgcccctacagctgacggcactttctctcctccggcagggaaggacgtccagcgtagcgtcgcccgcgcttccccgccggcgcagagcaggcctcacagaatcgcacgccgctggcacgcacgccgccccgcccccacggcccagcgccagccgcgccccgcgctcgcacgcatcccggcctcactgcccctcgactcctgttccgttggaggggcctgaggcgagcctgagcgcgctgttggccggagggaagccggaggagaccgggtcgactgggcagagcggcagagggtcgaggagcctgctctgcacgcccagggagtagaagtgggcagggagcagggtcacgtgagggagcgcgccgcgactgagcttgggtccgactggagctcaggctcgcgacccagactggtgggccaggcctccaagccggccttacacccaatccaaggaggacagaccggacacagagggacggagcgagcaaggagacatggcttcatcattcctgcccgcgggggccatcaccggcgacagcggtggagagctgagctcaggggacgactccggggaggtggagttcccccatagccctgagatcgaggagaccagttgcctggccgagctgtttgagaaggctgccgcgcacctgcaaggcctgattcaggtggccagcagggagcagctcttgtacctgtatgccaggtacaaacaggtcaaagttggaaattgtaatactcctaaaccaagcttctttgattttgaaggaaagcaaaaatgggaagcttggaaagcacttggtgattcaagccccagccaagcaatgcaggaatatatcgcagtagttaaaaaactagatccaggttggaatcctcagataccagagaagaaaggaaaagaagcaaatacaggttttggtgggccagttattagttctctatatcatgaagaaaccatcagggaagaagacaaaaatatatttgattactgcagggaaaacaacattgaccatataaccaaagccatcaaatcgaaaaatgtggatgtgaatgtgaaagatgaagagggtagggctctacttcactgggcctgtgatcgaggacataaggaactagtcacagtgttgctgcaacatagagctgacattaactgtcaggacaatgaaggccaaacagctctacattatgcctctgcctgtgagtttctggatattgtagagctgctgctccagtctggtgctgaccccactctccgagaccaggatggctgcctgccagaggaggtgacaggctgcaaaacagtttctttggtgctgcagcggcacacaactggcaaggcttaatcaaaagactggaaaactgcagtctgtaatagcataaggcttccattatgaaagaaaactacaaaaataatacttcttttccacccgtctttggtatgtattggctaataaaatcagttctgtggaactgggaaaannnnnannnnnnanaannannnnnnnnnnnnnnnnnnnnnnnnnnnnnnnnnnnnnnnnnnnnnnnnnnnnnntcatcaaccttcccccggaacaaacacattcaccancacttaaagaaatttgtggccccccttgggcccttaaaaaatttttcaaaacatttcttttgggcgcccggggccccgtagggaaagggaacccggggcccaaacgggtttccccaaggaaaaacccggggcc

SEQ ID NO: 348428 - DNA, 1113 bp, Homo Sapiens
ccaggtagcgaggctgggtggtgaatcggcacgaggctgctttaacctcagcatccgagggcatggggaatgcgttgaatatgtcaagagcttcaatatccctctactcgtgctgggtggtggtggttatactgtccgaaatgttgcccgctgctggacatatgagacatcgctgctggtagaagaggccattagtgaggagcttccctatagtgaatacttcgagtactttgccccagacttcacacttcatccagatgtcagcacccgcatcgagaatcagaactcacgccagtatctggaccagatccgccagacaatctttgaaaacctgaagatgctgaaccatgcacctagtgtccagattcatgacgtgcctgcagacctcctgacctatgacaggactgatgaggctgatgcagaggagaggggtcctgaggagaactatagcaggccagaggcacccaatgagttctatgatggagaccatgacaatgacaaggaaagcgatgtggagatttaagagtggcttgggatgctgtgtcccaaggaatttcttttcacctcttggttgggctggagggaaaaggagtggctcctagagtcctggggttcaccccagggcttttgctgactctgggaaagagtctggagaccacatttggttctcgaaccatctacctgcttttcctctctctcccaaggcctgacaatggtacctattagggatgagatacagacaaggatagctatctgggacattattggcagtgggccctggaggccagtccctagccccccttgccccttatttcttccctgcttccctcgaacccagagatttttgagggatgaacgggtagacaaggactgagattgcctctgacttcctcctcccctgggttctgacttcttcctccccttgcttccagggaagatgaagagagagagatttggaaggggctctggctccctaacacctgaatcccagatgatgggaagtatgttttcaagtgtggggaggatatgaaaatgttctgttctcacttttggctttatgtccattttaccactgtttttatccaataaactaagtcggtattttttgtaaaa

SEQ ID NO: 348429 - DNA, 1554 bp, Homo Sapiens
  misc_feature (1299)..(1299): n is a, c, g, or t
gagtccggaattcccgggatggccgcgggcggcgggcggcggaggtgcggggcctgctcccgccggcaccatggccaagaccgtggcctatttctacgaccccgacgtgggcaacttccactacggagctggacaccctatgaagccccatcgcctggcattgacccatagcctggtcctgcattacggtctctataagaagatgatcgtcttcaagccataccaggcctcccaacatgacatgtgccgcttccactccgaggactacattgacttcctgcagagagtcagccccaccaatatgcaaggcttcaccaagagtcttaatgccttcaacgtaggcgatgactgcccagtgtttcccgggctctttgagttctgctcgcgttacacaggcgcatctctgcaaggagcaacccagctgaacaacaagatctgtgatattgccattaactgggctggtggtctgcaccatgccaagaagtttgaggcctctggcttctgctatgtcaacgacattgtgattggcatcctggagctgctcaagtaccaccctcgggtgctctacattgacattgacatccaccatggtgacggggttcaagaagctttctacctcactgaccgggtcatgacggtgtccttccacaaatacggaaattacttcttccctggcacaggtgacatgtatgaagtcggggcagagagtggccgctactactgtctgaacgtgcccctgcgggatggcattgatgaccagagttacaagcaccttttccagccggttatcaaccaggtagtggacttctaccaacccacgtgcattgtgctccagtgtggagctgactctctgggctgtgatcgattgggctgctttaacctcagcatccgagggcatggggaatgcgttgaatatgtcaagagcttcaatatccctctactcgtgctgggtggtggtggttatactgtccgaaatgttgcccgctgctggacatatgagacatcgctgctggtagaagaggccattagtgaggagcttccctatagtgaatacttcgagtactttgccccagacttcacactttcatccagatgtcagcacccgcatcgagaatcagaactcacgccagtatctggaccagatccgccagacaatctttgaaaacctgaagatgctgaaccatgcacctagtgtccagattcatgacgtgcctgcagacctcctgacctatgacaggactgatgaggctgatgcaaaaggagaggggtcctgaggagaactatagcaggccagaggcnacccaatgagttctatgatgggagaccatgacaatgacaaagaaaagcgatgtggaagatttaaagagtggcttggggatgctgtggtcccaaaggaatttccttttcacctcctgggttgggcctggagggaaaaagagtggctcctagagtcctgggggtccaccccagggccttttgctgaactctggggaaagaacctgggagaccaccatttgggttctcgaaaccatctacctggcttttccctctccc

SEQ ID NO: 348430 - DNA, 1685 bp, Homo Sapiens
  misc_feature (1045)..(1045): n is a, c, g, or t
  misc_feature (1173)..(1174): n is a, c, g, or t
  misc_feature (1178)..(1179): n is a, c, g, or t
actggcagcagccagcctctgctgtgcccacatgacccacaactctggcagcggacccggcacttccaacattattaaataataagaaagcggctcctactccaggctcaaacctccctgcagaccaatggacaccttctaagagtttggcgagtcagtgactgaagcgcccgtccattccaagataaataggatttaccaatccttggatgaagtgcttgggaagtctttaagtgccataatcaactgccatttcaaagaatatagatggttttgaaaagttcatgctgtcccttcattgaattttagaatgattgaagatagtgggaaaagaggaaataccatggcagaaagaagacagctgtttgcagagatgagggctcaagatctggatcgcatccgactctccacctacagaacagcatgcaagcttaggtttgttcagaagaaatgcaatttgcacctggtggacatatggaatgtcatagaagcattgcgggaaaatgctctgaacaacctggacccaaacactgaactcaacgtgtcccgcttagaggctgtgctctccactattttttaccagctcaacaaacggatgccaaccactcaccaaatccatgtggagcagtccatcagcctcctccttaacttcctgcttgcagcgtttgatccggaaggccatggtaaaatttcagtatttgctgtcaaaatggctttagccacattgtgtggagggaagatcatggacaaattaagatatattttctcaatgatttctgactccagtggggtgatggtttatggacgatatgaccaattccttcgggaagttctcaaactacccacgggcagttttttgaaggtccttcatttggtaacacagaacagtcagccagatcctgtctctcccaacagaaaaaagtcacgttaaatggttccttgaacacgcttatgtcagatcctcccccgcagtgtctggtctggttgcctcttctgcatcaactagcaaatgtggaaaatgtcttccatccggttgagtgttccnactgccacagtgagagtatgatgggatttcgctaccgatgccaacagtgtcacaattaccagctctgtcagaactgcttctggaggggacatgccggtggttctcatagcaaccagcaccaaatgaanntttnnacgtcatggaaatcacctgctaagaagctgactaatgcattaagcaagtccctgagctgtgcttccagccgtgaacctttgcaccccatgttcccagatcagcctgagaagccactcaacttggctcacatcgtgcctcccagacctgtaaccagcatgaacgacaccctgttctcccactctgttccctcctcaggaagtccttttattaccaggagctcggacggtgcttttggtggatgcgtctagatggataacatgacttcttctaccctaaaatattcctataatactttgagctgttctggttcctccagggtgcatggtacccattaacccaaaatatgattatttcccttttttcccattttcagtcattttggaatgttctctgtgaaccacagttgtgttgtttaaagctcacatttctttctgtcaccacagagattggcctacggtttctgttttgagggtgctgttcaataaagctgtgtacactaaatgtc

SEQ ID NO: 348431 - DNA, 1349 bp, Homo Sapiens
tcacacaaaccccctctgaccaacaaacttaccccaacttccgtcctgaccaaccacaacggtgtcctgaatcccatgcagtagatttcaccttcctcccctcctacattaatatggcgctgtggaggagggttggctgtgttagaccagtgcttattaacaggctatcagctctgatggagatggatgtgcaattcattgtggaacaagaaagaaacaacccccgcaagatgtagttgtatctaatggacaggacaagtgaaacttgctgggtttgcacttagaacaggccccaaaagtaaatctggagagccaaggaaagaaacccaccaaaaaacacaaaaccccaaaataacacacgccattttgtctcgcttacaggacaggggtgctcgagtctggtctcagtgctgacgtggagttgagaggagtgtgataaaaggatattgcattcaaccttgcaagctgacctgataagcttcatcttgcagcttctgtttcaggtattcctccatctggagctcattctccagctgccggacagagtcattttcatagttttcatcttcaggctgcacatagggatctgcatcctccgtaaccatgtcgccacgcatggtacttgtggtagctccactgtgaatgtacccaggttttcgggcatggatttgcgctagaaaagccttttcagaggttggtgagggaacaagatcctcaaactgagtccgtgcaaattcagaatccacattactctctgtttcactcccaacctcagaattcagctctttcacaagagaggacatagtgttagtgatggaatctgcagccactagcaagtcattccttaagtttcttcttgaactttgtgcaaatgcctcttgtacatctccccctactcctgtgagggagtcctgcggcgtgtgcgtcggggtggagcaggctgacgctgaccggatgggcatgggaattggcctgctgatggtgtggctgggggaggagcggggagagcctgccccctgagtctttagtagcttcatgagaccctccaactggaccattagctctctccggctctcctggagagcagacattctctgttccagctcatctttgcgctgtctgaggagccggagttctgccagcagggtggggttttgctgtgccttctctggcgtgggctgagaagcttgttcatgctctagccgaagtctctggatctcctgtaagatttctctgttcttgttttctagctcagcaatcagctgcctttgctgcttattcgcatcgatggtgaaagagatgtcaggagcacttctctgctgaggtggctgagacgaagaggactctgc

SEQ ID NO: 348432 - DNA, 952 bp, Homo Sapiens
cctatgtgcagcctgaagatgaaaactatgaaaatgactctgtccggcagctggagaatgagctccagatggaggaatacctgaaacagaagctgcaagatgaagcttatcagctccacgtcagcactgagaccagactcgagcacccctgtcctgtaagcgagacaaaatggcgtgtgttattttggggttttgtgttttttggtgggtttctttccttggctctccagatttacttttggggcctgttctaagtgcaaacccagcaagtttcacttgtcctgtccattagatacaactacatcttgcgggggttgtttctttccttgttccacaatgaattgcacatccatctccatcagagctgatagcctgttaataagcactggtctaacacagccaaccctcctccacagcgccatattaatggaggaggggaggaaggtgaaatctactgcatgggattcaggaaacagttgtggttggtcaggacggaagttggggtaagtttggttggtcagagggagttgtgctggagattgtgaaaaatgggttcttgaatgatctactataaggcagggaaggttcatttgtaagtagtaatgtgaactgaattgcattaagagtgtgtggcctttgttgtgatatactatgtattttcttatatgcatgagccaaactgttgcatcataatttagcactgatgtctgcttttattttgatcatctttgtccacccttattagttcttggctgttaaccgtagatagatcttgtaaaatccagcaacctttggttgctgcattccccttggttcgattccacgcaaggagccacaagtgagaactccactgtccttagaagaaagggcatttttacttttgaaccaaaagagacacacaaatcgaagtgttgcatatgagggcgaatacctgtagacattttaattctgc

SEQ ID NO: 348433 - DNA, 2660 bp, Homo Sapiens
  misc_feature (47)..(81): n is a, c, g, or t
  misc_feature (1782)..(1782): n is a, c, g, or t
  misc_feature (1784)..(1795): n is a, c, g, or t
  misc_feature (1889)..(1945): n is a, c, g, or t
  misc_feature (2559)..(2559): n is a, c, g, or t
  misc_feature (2600)..(2600): n is a, c, g, or t
  misc_feature (2634)..(2634): n is a, c, g, or t
aaccgcatctgcctctatggccctggattcacgcggtggggccgacnnnnnnnnnnnnnnnnnnnnnnnnnnnnnnnnnnnatcaggccaaatcggccgagctcgaattcgtcgagagcgggtaggatgtgtgagtgtgcccagagttaaagggaatatcaaggatggtggcagaattaaagggcaaacttaccttccatcccaggtctagtattcagtcccccttcctcccactctccaccctactgcgtgctcttacttattctgttggaacccagtgtagcttcctgagatttaaaatataggaagactcaaaactatgttacttcttggaatatagataattcagtactgatttaaataacaactgaatagcaaggaccttctggaacataatcttacattcacaaaatcacctgctaagaagctgactaatgcattaagcaagtccctgagctgtgcttccagccgtgaacctttgcaccccatgttcccagatcagcctgagaagccactcaacttggctcacatcgtgcctcccagacctgtaaccagcatgaacgacaccctgttctcccactctgttccctcctcaggaagtccttttattaccaggagcatgcttgagagttcaaaccggcttgatgaagaacacaggctaattgccaggtatgcggcaaggctggcagcagagtcctcttcgtctcagccacctcagcagagaagtgctcctgacatctctttcaccatcgatgcgaataagcagcaaaggcagctgattgctgagctagaaaacaagaacagagaaatcttacaggagatccagagacttcggctagagcatgaacaagcttctcagcccacgccagagaaggcacagcaaaaccccaccctgctggcagaactccggctcctcagacagcgcaaagatgagctggaacagagaatgtctgctctccaggagagccggagagagctaatggtccagttggagggtctcatgaagctactaaaggaagaagaactgaagcagggagtaagttatgtcccctactgcaggtcttaactaacagtggaggggcctgccgacctgcggttttctcattgcttttgctctaatgtatgttcatgcttcagtttggaaagagaaaaaagtcatactaatttgcttctttttcaatgtagtgcttgaattgagatatataaatttagcattttttataactatcactactatccacatcaaaagaagaactatgacatcttttagaaaagggaacgaattgtcatttattggaaacattttagatccccagaggtataagtttcaaaccagtcttagcttttcaagttgttgatcagacccttctcttaacagagagataccacagtcactagagataccctgaggttcatgtcatcccaaaacccacagcactcagaagctaacctctacacccactcacactgtgagtattcagttcggtttcattttactgaaaacctgtgaaacctctttttataaaaatcaggcaattaaatcccttttcatcacacaattattgagccttgttccccatggctcaccaaaatgtgctcaattttgtgagagaaagactgtactccataactgactattcacgtcccatctttttggctcttccccaaagcagaatccttactgttggttgacagtaatctctttttaaaaagtaactctcagctttttccttagcaccagagcctttccgctccgggagacgagagggtcattacatactntnnnnnnnnnnnnctggaaataggggcattgtgactttatagcctaaactggagctgtctgaacctgtggtcaggctcaagagccagcagggggagcagcaaactcnnnnnnnnnnnnnnnnnnnnnnnnnnnnnnnnnnnnnnnnnnnnnnnnnnnnnnnnnagctttaatttcaagtgcatgtaccacgctatgtatgacaatatatcccactcactagcattatttaaaagtttcacattatttccatggatcaattagaaccacaacctgtccaatttcaacgtatctttcatttcttctgtatgctcttttctattattcattatgtgtgtttgtgtgtaacaaagaatgtttggaaaatgctggacacatttttacccttcattcccatggtctgtaaaaaaggaaagtgtaaaatcaatctgtaatgtcagacaataaagataatgtattacattattttgtattttgtgaaaaaaattactttactaaattaaagtcaaattttaacagaagacagtccccctgggtgaaggacacataacacatacagcctgtataattgcccatgaatgcatacatggggtattgctattgtatttccaatacacttagatcatggtaaagaaaaatgccttcttcatgatacttctctgcaaatggcttctttcctctcctgtctcttatttaggcatgtgcataggaaaaagggaaataaggttccaattattaacctccctcctcctaggcaggggaggaggaggggcaattcntcctgttcgtccttcagccttgctttagcccttttcccttngggggattacttttccggggccttttcccggggnggcgggttcttggaagggttccctgg

SEQ ID NO: 348434 - DNA, 1112 bp, Homo Sapiens
  misc_feature (924)..(924): n is a, c, g, or t
  misc_feature (1007)..(1007): n is a, c, g, or t
  misc_feature (1026)..(1026): n is a, c, g, or t
  misc_feature (1035)..(1036): n is a, c, g, or t
  misc_feature (1042)..(1042): n is a, c, g, or t
  misc_feature (1055)..(1055): n is a, c, g, or t
  misc_feature (1059)..(1059): n is a, c, g, or t
  misc_feature (1064)..(1064): n is a, c, g, or t
  misc_feature (1072)..(1072): n is a, c, g, or t
  misc_feature (1074)..(1074): n is a, c, g, or t
  misc_feature (1079)..(1079): n is a, c, g, or t
  misc_feature (1082)..(1082): n is a, c, g, or t
  misc_feature (1106)..(1106): n is a, c, g, or t
gggggcagggccgcgtaggtccccgcccccagagtctggctttccgcggctgcccgcctcgcgcgtcttccctgcccgggtctcctcgctgtcgccgccgctgccacaccatggccttcgtcaccaggcagttcatgcgttccgtgtcctcctcgtccaccgcctcggcctcggccaagaagataatcgtcaagcacgtgacggtcatcggcggcgggctgatgggcgccggcattgcccaggttgctgcagcaactggtcacacagtagtgttggtagaccagacagaggacatcctggcaaaatccaaaaagggaattgaggaaagccttaggaaagtggcaaagaagaagtttgcagaaaaccctaaggccggcgatgaatttgtggagaagaccctgagcaccatagcgaccagcacggatgcagcctccgttgtccacagcacagacttggtggtggaagccatcgtggagaatctgaaggtgaaaaacgagctcttcaaaaggctggacaagtttgctgctgaacatacaatctttgccagcaacacttcctccttgcagattacaagcatagctaatgccaccaccagacaagaccgattcgctggcctccatttcttcaacccagtgcctgtcatgaaacttgtggaggtcattaaaacaccaatgaccagccagaagacatttgaatctttggtagactttagcaaagccctaggaaagcatcctgtttcttgcaaggacactcctgggtttattgtgaaccgcctcctggttccatacctcatggaagcaatcaggctgtatgaaccgaggtgacgcatccaaagaagacattgacactgctatgaaattaggagccgggttaccccatgggcccatttgagcttctagattatgtcggactggatactacganttcatcgtggatgggtggcatgaaatggatgcagagaaccattacatcagccagccatccttaaataagctggtagcagaganaagttcggaagaggatggngaggatttnncaatanaagtgatgtgcanttcngcggnctgagaananactgncancgtttccagcagtgcccgagtgcngtggga

SEQ ID NO: 348435 - DNA, 1624 bp, Homo Sapiens
  misc_feature (1078)..(1078): n is a, c, g, or t
  misc_feature (1088)..(1088): n is a, c, g, or t
  misc_feature (1092)..(1092): n is a, c, g, or t
aggtagcgaggcctgggtggcgaattcggcacgagggacatcctggcaaaatccaaaaagggaattgaggaaagccttaggaaagtggcaaagaagaagtttgcagaaaaccctaaggccggcgatgaatttgtggagaagaccctgagcaccatagcgaccagcacggatgcagcctccgttgtccacagcacagacttggtggtggaagccatcgtggagaatctgaaggtgaaaaacgagctcttcaaaaggctggacaagtttgctgctgaacatacaatctttgccagcaacacttcctccttgcagattacaagcatagctaatgccaccaccagacaagaccgattcgctggcctccatttcttcaacccagtgcctgtcatgaaacttgtggaggtcattaaaacaccaatgaccagccagaagacatttgaatctttggtagactttagcaaagccctaggaaagcatcctgtttcttgcaaggacactcctgggtttattgtgaaccgcctcctggttccatacctcatggaagcaatcaggctgtatgaacgaggtgacgcatccaaagaagacattgacactgctatgaaattaggagccggttaccccatgggcccatttgagcttctagattatgtcggactggatactacgaagttcatcgtggatgggtggcatgaaatggatgcagagaacccattacatcagcccagcccatccttaaataagctggtagcagagaacaagttcggcaagaagactggagaaggattttacaaatacaagtgatgtgcagcttctccggctctgagaagaacacctgagagcgctttccagccagtgccccgagtgcctgtgggaatgctctttggtcagacattccctcacacagtacagttttaataaatgtgcattttgattgtaatctatcgaagtgattattacaccagttacagcagtaatagattctccattaagaaataattcccggtgtttagtctgttcatttctgcgtattttctaaacagctttacacccttggtgccttggaagcaaacatgtgggntgaaccttgncagntttgtgaagaattgcctagattcctgtctctcatcaacggcgaaagtacttcctctgagagtgcgagtgcaccatgctcactgttgctgcgtgggagagtcacaagccactggcaagcaagtggtatagtctgtgaagcactgcagcgagcagcacctgggatcttgcctttataagaacattttactacctgcagctttgagtcttgccctacattttgggcatgacataagatgtgtctttattcagctcgtcgtgaagatgctgctgctgaatgggtcagcatatctctgtttgcatggtttgcaggaggtcggttttcatggtcattcagttccacagatctgaatgattactgtctgtctgtgtcttttttccatgagaaatcactgttgcaaattgcctataaattgactctactaaaataacaatgtttcagtctgaaaatttgaattgaaaaaaatgtataatataaaattgtaatacactcaaatgattataaaagtaaaagttggtaatttaggcagaagct

SEQ ID NO: 348436 - DNA, 890 bp, Homo Sapiens
ggggtgagaggcggtagcggcggcggcggcggtggtatcggcggcagctgtgagggggttccgggaagatggtgctgatcaaggaattccgtgtggttttgccatgttctgttcaggagtatcaggttgggcagctttactctgttgcagaagctagtaagaatgagactggtggtggagaaggaattgaagtcttaaagaatgaaccttatgagaaggatggagaaaagggacagtatacgcacaaaatttatcacctaaagagcaaagtgcctgcattcgtgaggatgattgctcccgagggctccttggtgtttcatgagaaagcctggaatgcgtacccctactgtagaacaattgtaacgaatgaatatatgaaagatgatttcttcattaaaatcgaaacatggcacaaaccagacttgggaacattagaaaatgtacatggtttagatccaaacacatggaaaactgttgaaattgtccatatagatattgcagatagaagtcaagttgaaccagcagactacaaagctgatgaagacccagcattattccagtcagtcaagaccaagagaggccctttgggacccaactggaagaaggagctggcaaacagccctgactgtccccagatgtgtgcctataagctggtgaccatcaaattcaagtggtggggactgcaaagcaaagtagaaacttcattcaaagcaagaaaaacggatatttacaaacttccatcgccagctttttgtggatgaccagtggatcgatctcacgatggaagaccttagggagaatgggaagacgagactccgaaagaactagaaactttacgtaatcagggtcaagtgagggaacaagcgcagccagtgatgacgtggagaaaa

SEQ ID NO: 348437 - DNA, 317 bp, Homo Sapiens
  misc_feature (223)..(256): n is a, c, g, or t
gctagaaataaaacactgaaacagagatgaatgactttgatgggctcataagactgaacacagccagaaagaatcagtgaacttgaagatatgtcaatagaaacttcccaaattgaaattgaaagatttcaaaaaggaatggaaaatttttaaaaacagcagaatatccaagaactgtgggataatttttaaaagtgtaggttggatgtagtgtcttacactnnnnnnnnnnnnnnnnnnnnnnnnnnnnnnnnnngattgcttgaggccaggagtttgagtccagcctgggcaacatggcaaaacccagtgtctac

SEQ ID NO: 348438 - DNA, 839 bp, Homo Sapiens
agcgggcacggggcgcgggctgccggggacccagcagcgggcgcgcggataatctggagctttcaaaatgtttgccaaagcaaccaggaattttcttagagaagttgatgctgatggtgacctgattgcagtatcaaatctgaatgactctgataagttacagcttctaagtctggtgacaaaaaagaagagattctggtgctggcagagacccaagtaccagtttttatccctcacccttggcgatgtactcatagaagaccaatttccgagtccagtggtcgtggagtcggactttgtgaaatacgagggcaagtttgcaaaccacgtgagtggaaccctggagactgcactggggaaggtcaagctgaacctggggggcagcagccgcgtagagagccagtcttcatttggaaccctgaggaagcaggaggtggatttgcagcagctcatcagagactctgccgagagaacaataaatctgagaaaccctgtgctccagcaggtgctggagggaaggaatgaggtcctgtgcgttttgacacagaagatcacgacgatgcagaagtgtgtgatctctgagcacatgcaggtcgaggagaagtgtggtggcatcgtgggcatccagaccaagacggtgcaggtgtcagcgacggaggatgggaatgtcaccaaggactccaacgtggtgctggagatcccagctgccaccaccatgcctacggtgtcattgagttatacgtgaaactggacggccagttcgagttctgacttctccgagggaagccaacgtggcttccagaacaagaagagaattgactctgttctacctggacccc

SEQ ID NO: 348439 - DNA, 623 bp, Homo Sapiens
gccagggcccagccctaactcttgcccttattcccatcctatttaccagctcctctttccacagccccgactccacaatctggaagggccagaatggtcgcaccttcaaagtgggcagcttcccagcctcggcagtgacgctggcagatgcggggggcttgccagccacccgtccagtccacagaggcacccctgcccggggagatcaacacccaggaagcatagatgggtgaggacctaaaagggtaagggcaggggttggctggaagaactgatgaggtccaggagcttctctgaaagagaagcctggggacagaaccagagtgaagctgcagcctccaccctgggccctgggtctcctgggttcccctgtgagtttttttgggagggtatattgatctgtggggtgggaaaagttggtgtggaggatgaactggatccctctccgacagagacagaaagaaggcaaatctttgggatgcgcccccagcacggggccagaggaggaacatgcccctggagaggatgaaaggtgggtgtggtggactccagagtctctgaggagatcaagaccagtccttcaattccgaccccctgccctaaatccatgcctttgcatctat

SEQ ID NO: 348440 - DNA, 2119 bp, Homo Sapiens
atcaggccaaatcggccgagctcgaattcgtcgagagcggcttctcgcctccgcctcctcccgacgccggcgccgctttctggaaggttcgtgaaggcagtgagggcttaccgttattacactgcggccggccagaatccgggtccatccgtccttcccgagccaacccagacacagcggagtttgccatgcccgagaatgtggcaccccggagcggggcgactgccggggctgccggcggccgcgggaaaggcgcctatcaggaccgcgacaagccagcccagatccgcttcagcaacatttccgccgccaaagcggttgctgatgctattagaacaagccttggaccaaaaggaatggataaaatgattcaagatggaaaaggtgatgtaaccattacaaatgatggtgctaccattctgaaacaaatgcaagtattacatccagcagccagaatgctggtggagctgtctaaggctcaagatatagaagcaggagatggcaccacatcagtagtcatcattgctggctccctcttagattcttgtaccaagcttcttcagaaagggattcatccaaccatcatttctgagtcattccagaaggccctggaaaagggcattgaaatcttgactgacatgtctcgacctgtggaactgagtgacagagaaactttgttaaatagtgcaaccacttcactgaactcaaaggtggtttctcagtattcaagtctgctttctccaatgagtgtaaatgcagtgatgaaagtgattgacccagccacagccaccagtgtagatcttagagatattaaaatagttaagaagcttggtgggacaattgatgactgtgagttggtggaagggctggttctcacccaaaaagtgtcaaattctggcataaccagagttgaaaaggccaagattgggcttattcagttttgcttatctgctcccaaaacagacatggataatcaaatagtggtttctgactatgcccagatggaccgagtgctgcgagaagagagagcctatattttaaatttagtgaagcaaattaaaaaaacaggatgtaatgtccttctcatacagaaatctattctaagagatgctcttagtgatcttgcattacactttctgaataaaatgaagatcatggtgattaaggatattgaaagagaagacattgaattcatttgtaagacaattggaaccaagccagttgctcatattgaccaatttactgctgacatgctgggttctgctgagttagctgaggaggtcaatttaaatggttctggcaaactgctcaagattacaggctgtgccagccctggaaaaacagttacaattgttgttcgtggttctaacaaactggtgattgaagaagctgagcgctccattcatgatgccctatgtgttattcgttgtttagtgaagaagagggctcttattgcaggaggtggtgctccagaaatagagttggccctacgattaactgaatattcacgaacactgagtggtatggaatcctactgcgttcgtgcttttgcagatgctatggaggtcattccatctacactagctgaaaatgccggcctgaatcccatttctacagtaacagaactaagaaaccggcatgcccagggagaaaaaactgcaggcattaatgtccgaaagggtggtatttccaacattttggaggaactggttgtccagcctctgttggtatcagtcagtgctctgactcttgcaactgaaactgttcggagcattctgaaaatagatgatgtggtaaacactcgataatctggataactgactagcaccattatgatcaccagtattgtggctggaatggaagaagatcaccttggtgttccttgtttggaagattatttcctctgaatttctgggcttggtcttccagttggcatttgcctgaagttgtattgaaacaatttaatgaaaatattaaatatttggtttcaaaaggcagatttatcttctcccaacattctgttatttctgatacttttgaaaaactaataaaaactaataaaagaagcgtaaaaagtgagtttacatgttgaggaaaaaaatggcccaatatgctcatc

SEQ ID NO: 348441 - DNA, 1307 bp, Homo Sapiens
  misc_feature (660)..(669): n is a, c, g, or t
  misc_feature (762)..(762): n is a, c, g, or t
  misc_feature (1047)..(1066): n is a, c, g, or t
  misc_feature (1295)..(1295): n is a, c, g, or t
ttctccagtgttgggtagaactactttttttaagtggagggcaacttggtagtactagtagaatttgggtttaaaaatatcagacacatctacccagtttattttttgcctgtattatcagggtatatttaattgtcctgtggttaaacaaagctgagagagctcagaggtttctaaaggtcaagcattttacatatatacatacatacatgctcttggaggcagctatatcctgctttgatttttatgcacacgagccctatagggttatatactcatctaactacacttcagcatccccagtgcccaagaaattggaaagtacaatatttggtttgagacattcttcataaaagattctttattataaaaatttacctcatttacatttaatgtgatgatcttttttttcctttctggtatatttcccactgtactgtttggtttttgttattctcttgtctgtgggtagatatagttacccaaacatagaaactaaagcaattgcttttttcctctggtcttaaatatgtttggacaaaaagacactaaaaggtcaggcctaggggaaaagtaccctggtggaaattatttttgtaattcttaatatttttgagttggctccgtttgtcagttttaaaagcctcaaaaattatgttnnnnnnnnnntccagtgaaatcccatttagggcaggccgatttgttagaagtgcactgtatgctccagtaggacttttgttataatcaggacctgtttcctgnagtatgtgcctcttttaaaagaagaaataattagctgtatagtatttcagtactgatgaatgaatgaatgaatgaatgggcagttagtggacccaaataagtattcagtggtatataaatatttgaggaactaggtactgaattaggtgctctgagttggtcaccccgaaatgtttggaatcacgactatgatttacttaaacacgtaacacattcaaggatatataaatggagtctaagtattttgcttttgaagagaataatctatgaaatggaagacttgannnnnnnnnnnnnnnnnnnnagaagtaatacacatttatgattgttggcacataaaactatgcaaaataattctttttaagtatctgtaagaaagaattggcagtttaaacggattttgcttatttatgcactacaggaatgcagcatactgtattactgttgaggccgcttaataagtttaccaatgtgaaaagcagatcttgggtataagtgtatgcctgatttgagcttttaaaactgtgcagtangtgtatggtaat

SEQ ID NO: 348442 - DNA, 481 bp, Homo Sapiens
  misc_feature (15)..(16): n is a, c, g, or t
gttatagccagacannaaacaagggcatgagttcaaatgcattactatcagtgtcctaggcaatacctaacctactctgaaattgtgattcaaaagcagtatttcaagaggcattctccttttttggtttgctgaccccacttggactggtaggtttggtgaggcccccataaaccagctggagcagacccttttcatctcctgtgcctgtaacacccctcttcccccaccccctccgcaattcaatgagggctttcttgggtcagaggacttcaaggttgtctagagaagtttgccatgtgtgtaaggtgctgtgaactgtgagtgctgaagattcgcagcattcaataccaggcagccaaagagctgctcttgcaattattttggctctcaagctctgttcttcatcgcattctcatttctgtgtacatttgcaagatgtgtgtaatgtcattttccaaaaataaaatttgatttcaat

SEQ ID NO: 348443 - DNA, 703 bp, Homo Sapiens
  misc_feature (570)..(607): n is a, c, g, or t
  misc_feature (682)..(682): n is a, c, g, or t
ctactatgctgcaagaagacgacagaatggggcagacgggagtttctcctcggggtcggagcaggaggcacgcggagtgtgaggccacgcatgagcggacgctaaccccctccccagccacaaagagtctacatgtctagggtctagacatgttcagctttgtggacctccggctcctgctcctcttagcggccaccgccctcctgacgcacggccaagaggaaggccaagtcgagggccaagacgaagacatcccaccaatcacctgcgtacagaacggcctcaggtaccatgaccgagacgtgtggaaacccgagccctgccggatctgcgtctgcgacaacggcaaggtgttgtgcgatgacgtgatctgtgacgagaccaagaactgccccggcgccgaagtccccgagggcgagtgctgtcccgtctgccccgacggctcaagagtcacccaccgaccaagaaaccaccggcgtcgagggacccaagggagacactggcccccgaggcccaaggggacccgcaggcccccctggccgagatggcatccctggacagcctggactnnnnnnnnnnnnnnnnnnnnnnnnnnnnnnnnnnnnnntggcctcggagggaaacttttgctccccaagctgtcttagggctatgatgagaaatcaaccggaggaatttcgtngcctggccccatgggtccctc

SEQ ID NO: 348444 - DNA, 1504 bp, Homo Sapiens
ttacaggccttttggaaaatgggccagggcccaattcagccaggacattttcacagggccaggaagaggtggggttaaaggaacagccctggggttaaagggggccagccagcaaatagcccaagggttggccatgaggcttgccagaaagagatggagtctgtaaggttccttgatggtcccctgcccttggagatgaggagagcaaggtttctaaatcccagttttagggagaccttcacttactcaagggtcctttgccaggtggcatgtgccaatgttgctggccttctttgcttcaaaaatagccattaggaataagggaagagctcacactttcccctctctaaaagaaaataaaagtcccttccccatcaggaaaaaaatcttgattaagaatcgtcagtttatcagactgctggacattgcatatacagcatgtaacttccaattcttcccacggcttctagtgaagattcctattctctccatccctcccctccacaaaaggccaggagttccagggaaaactggcaaaaagaactaatctgcagcagtttctcaaaatatgcaaataattgagtcaggtttcttgggagaaaaatggagggaatgggggagggggaggcgttgagacaattaaacttcacaggaagaagttgggagttgatggaaagaaggcagccacttagggctgtaagggcaggaggcagcctggcagttggcacaatagtccagcgaagaaaaaggaaaatcatcagtcaatttcaccaccaaaaaataaaagtacatataagcccagatggaacggagatagtggtgctaaatcttctgcatcaagggtgttgttcccttcaatggctccatgtcgcctagatcccccgatcgatccagtgttctattgtggtctcctctctcatttggtgtggaatagttgttatctagtgattttgtgttggatcccatattgctcatctgaatttcttcccgatcaggtgttcttatctgagttttggttccggtcaatgagagggagagtactatcatcatatgaatgactgctctggcttcgggaagcattgtttagattcacctgaaagtctgatttcttccatccttctttttccagtggcttccgcagttccttatatccccagattgtctgtaatacaagtgctgctgctcgaacttctttttctgagcggttccctgatttgttgatcaacaccagcttctcaataccctgtgtctctcgaagcttttgggcagcctccaagttctcagcgataacctcgtggatagtgttcaaaatagagatgacagtgtcctcagagaaattccaagaggagttctgctgtcctcctggcagattctttaccaagttaggaatagcatgtttaccacttaattcttggtggcgagcatccacagccaggtttctcagtgctccagatgcagctttcaccacccggtcatgtccattagtcaggaggtcagctatgca

SEQ ID NO: 348445 - DNA, 938 bp, Homo Sapiens
ctttgggcgtaattaggggcccaaatatgtgggtaagggaagccacccaaaattttatttggcgaaaattatgagaaaatgagcctgccagaggccaaagaaaaggcacatggaaagggcgggaggagatcccccccaggccaaaggccccaaagaggaggcaaagccaggggcaatccccaccttgtaagggaaaagggacaggagtttatgtacaccaagtcctttagtttgccaaccaatccagggcagaggcaagggacaggcctataaggataggaaaaggagaaacggggggagtggggaagccagtttcagactaattgcttcatgtacattcctactagctcctcctagaggtcttcttcttcccaaaaacacatctttctgctccttctctaccaaaagtcttccttgacattctcccctttctacagcctcttggaaatggccaggccaactcagcagacatatcacagggcaggagaggtgggttaaggacagcctgtgtttaaggggcagcagcaatagcccagggttggcatgaggcttgcagaagagatggagtctgtaggttcttgatggtccctgccttggagatgaggagagcaaggtttcttaatcccagttttaggagaccttcacttactcaagggtcctttgccaggtggcatgtgccaatgttgctggccttctttgcttcaaaaatagccattaggaataagggaagagctcacactttcccctctctaaaagaaaataaaagtcccttccccatcaggaaaaaaatcttgattaagaatcgtcagtttatcagactgctggacattgcatatacagcatgtaacttccaattcttcccacggcttctagtgaagattcctattctctccatccctcccctccacaaaaggccagatcccgggaattccggaccg

SEQ ID NO: 348446 - DNA, 1697 bp, Homo Sapiens
  misc_feature (129)..(177): n is a, c, g, or t
tgggggtcacctgatctgtcagagtggagacgtactaagtgcaagatgtatagaatatttttcaacacttattaacttttcagataacataatctatatatagattaagctttcagggatttggaaatnnnnnnnnnnnnnnnnnnnnnnnnnnnnnnnnnnnnnnnnnnnnnnnnnggtgggggggattgtatttttgctttctttagaaatgtaatgtttgttatatagaacttccagaacagtaatcaaattaatgaaattagacctaataattatgttttttgatggtgttgaccaataaaatatctagtgataaggaaatttgtagcatcaactagaataatctacattgatagcatttattgtgataagtacattgtttccacttcttgatatgactgagatttatttctctcttttagatgaaattgttgatactttaggtgaaggagcttttggaaaagttgtggagtgcatcgatcataaagcgggaggtagacatgtagcagtaaaaatagttaaaaatgtggatagatactgtgaagctgctcgctcagaaatacaagttctggaacatctgaatacaacagaccccaacagtactttccgctgtgtccagatgttggaatggtttgagcatcatggtcacatttgcattgtttttgaactattgggacttagtacttacgacttcattaaagaaaatggttttctaccatttcgactggatcatatcagaaagatggcatatcagatatgcaagtctgtgaattttttgcacagtaataagttgactcacacagacttaaagcctgaaaacatcttatttgtgcagtctgactacacagaggcgtataatcccaaaataaaacgtgatgaacgcaccttaataaatccagatattaaagttgtagactttggtagtgcaacatatgatgacgaacatcacagtacattggtatctacaagacattatagagcacctgaagttattttagccctagggtggtcccaaccatgtgatgtctggagcataggatgcattcttattgaatactatcttgggtttaccgtatttccaacacacgatagtaaggagcatttagcaatgatggaaaggattcttggacctctaccaaaacatatgatacagaaaaccaggaaacgtaaatattttcaccacgatcgattagactgggatgaacacagttctgccggcagatatgtttcaagacgctgtaaacctctgaaggaatttatgctttctcaagatgttgaacatgagcgtctctttgacctcattcagaaaatgttggagtatgatccagccaaaagaattactctcagagaagccttaaagcatcctttctttgaccttctgaagaaaagtatatagatctgtaattggacagctctctcgaagagatcttacagactgtatcagtctaatttttaaattttaagttattttgtacagctttgtaaattcttaacatttttatattgccatgtttattttgtttgggtaatttggttcattaagtacatagctaaggtaatgaacatctttttcagtaattgtaaagtgatttattcagaataaattttttgtgcttatgaagttgatatgtatctgaacagtttgttctaagtaccatttttcttcctacttctattaaagaatggacatagaa

SEQ ID NO: 348447 - DNA, 914 bp, Homo Sapiens
  misc_feature (286)..(286): n is a, c, g, or t
  misc_feature (377)..(377): n is a, c, g, or t
atgccatctttctgatatgatccagtcgaaatggtagaaaaccattttctttaatgaagtcgtaagtactaagtcccaatagttcaaaaacaatgcaaatgtgaccatgatgctcaaaccattccaacatctggacacagcggaaagtactgttggggtctgttgtattcagatgttccagaacttgtatttctgagcgagcagcttcacagtatctatccacatttttaactatttttactgctacatgtctacctcccgctttatgatcgatgcactccacaanttttccaaaagctccttcacctaaagtatcaacaatttcatatcttgcacttagtacgtctccactctgacagatcaggtgaccctcctcntcatcctctacactcctggttcttttcctttcggtgactcttcccatgtgaacgacgatgtgaagtactgtcggtgaatcctgtgtttgcttttataactacttcttccacttctaccagaagacttgctactatggttctgataccggctttcatggtctctttggcgatgtccaggttcacatccttgagtgtagtcatttctgtactcatcaatgtagcgtcgactatgataatctttctcatttatagacctgctttccaaataatggctatcacacattttagagtgattgtatttgcagcgcttgttctcctgggcactgctatgtgatctcttccttcttttatgactgctgctgctcctccattttccataatcccaatccttgtcatcccaatcaggacagtaagttctctttgagtgtctcatcgtcctggacaaagactccaagtcgaaggagacaaagcttgtaacgcaatcacgggaatcacgcagctgactgcgtcgcgcaccaacaacaaaatggagctccc

SEQ ID NO: 348448 - DNA, 1983 bp, Homo Sapiens
  misc_feature (36)..(36): n is a, c, g, or t
  misc_feature (55)..(55): n is a, c, g, or t
  misc_feature (188)..(257): n is a, c, g, or t
  misc_feature (709)..(720): n is a, c, g, or t
accttatccacaaaaaaaggccaacaatgtggattnatcctagttgatgcctacnaaatttcccttatccactaggtattttattggtcaacaccatcaaaaaacataattattaggtctaatttcattaatttgattactgttctggaagttcctatataacaaacattacatttctaaagaaagcnnnnnnnnnnnnnnnnnnnnnnnnnnnnnnnnnnnnnnnnnnnnnnnnnnnnnnnnnnnnnnnnnnnnnnatttccaaatccctgaaagcttaatctatatatagattatgttatctgaaaagttaaaaagtgttgaaaaatattctatacatcttgcacttagtacgtctccactctgacagatcaggtgaccctcctcatcatcctctacactcctggttctttctcttcggtgactcttctggaaacgtcaagtgggcggcaccaagatcatccagccaatcaatataccagagtgaattcagggcagaatacgaaattcattcagcggggagatattcaggcattcagataaacaccaggccacaaacagttggcaggagcaatttcaaattcagtccccagaaattcacagggcacatagtttatgttaacagaagaaaaacatggcaaggaacagattttcagataagatactcaaagtggcaaggcaacaaaacataatacaattgtttttcttnnnnnnnnnnnntgcttagttgtagcattccactgaaacataattttttagtttctagtgttctaatttaatgttgcaaaatcgtatgatgtaatatttacttgtcaaagtaggcggtggccaaattaagatttcctacctaatctaagaaaacaaatattataacagtaaataaaattaaagtgctaattttggggaaaaaaagatttggcatacaagaataacactacggcatttttaatgtcatctgagctgatctccatactaatatataacccataacagttcaaatctgttctggtttgcttagtgaaagaagggttagaaaacatgacttgttagaacaaagaagcatacctaatcctaaattatacaaaaataaaatgccctgttctacttttgtgatttcaatagatcaaaactaatcaggtttcttgaagtaccacaaaaaacccttttagaatattttgtaataattttcaactaatctaaattaaatcaattaactcccatcatttcactggaatgtcaattaggagccaaccaataattaaattatagaactaaatgtgtactttattcccggaatttcctatccaatgcacaaacacagaaaaatcctgcaggttaaaactgagatgatttcatcttaaaactttctcaaataatcaaacacaaaaattcaagtttccctgttccacatgggatataaaatttccaaaatgttttaaaaacgttcataccccatgtgaacgacgatgtgaagtactgtggtgaatcctgtgtttgcttttataactacttcttccacttctaccagaagacttgctactatggttctgataccggctttcatggtctctttggcgatgtccaggttcacatccttgagtgtagtcatttctgtactcatcaatgtagcgtcgactatgataatctttctcatttatagacctgctttccaaataatggctatcacacattttagagtgattgtatttgcagcgcttgttctcctgggcactgctatgtgatctcttccttcttttatgactgctgctgctcctccattttccataatcccaatccttgtcatcccaatcaggacagtaagttctctttgagtgtctcatcgtcctggacaaagactccaagtcgaaggagacaaagcttgtaacgcaatcacgggaatcacgcagctgactgcgtcgcgcaccaacaacaaaatggagctgacagctgctgcgtcgagactcgtctcgaaaacactccgct

SEQ ID NO: 348449 - DNA, 538 bp, Homo Sapiens
  misc_feature (130)..(143): n is a, c, g, or t
  misc_feature (362)..(372): n is a, c, g, or t
  misc_feature (489)..(489): n is a, c, g, or t
aaaatgggttcaagaaagtcatctccccagagacggcggaaacggtccacctagggaacagagtggggcatcttttcgcagccgagcccagaacccatcacctaaagagttctggatgattcgttttgannnnnnnnnnnnnnaaatcaccatcgctgtcgtcatcagagtctcgcctagggcctggcacagagtagacgctcagttagaagctgtctggccttttcaccttctcccgggtcagcacacacagatttgggagtatttacctgcacagaacgcaccttcaggaactgccaaccagaagcaaaatccaaagctgctctctgcgatcccttcacttttaactctcagtctgcacnnnnnnnnnnnaactgagcatctattatgtgctaggcactgttccagtgctcggggacgcagctgtgaatgaacagaaacgggggatggaggacaggggagaaaccccctttcacgggccttaggatnggcagggggtagggaaggagagacagaaaataaacagaaatatctgtcc

SEQ ID NO: 348450 - DNA, 3487 bp, Homo Sapiens
  misc_feature (83)..(83): n is a, c, g, or t
  misc_feature (88)..(88): n is a, c, g, or t
  misc_feature (147)..(147): n is a, c, g, or t
  misc_feature (166)..(166): n is a, c, g, or t
aggtattccatggcaaaatcgtattgctgctctcctgttatactcacatttataaagggatcatgagcttgccaagtgctaanaatgnagatggtctagtaactagaaaactccccaggaacacagacattagaacttcatgaagtnttaactgttgattctttcncaagcatcatcaagttatgatttaggcaatgtatgattgaaatgcattcattcatcatgcataggcacaatcacagaaatattgcacaaagtatgtccctgactgaaaatgagaggtacaaaaacgtatttcactcttcgtaaagaagtttgtgaggaaatacaactctgcgatcgtatagacatgtttcctgataatacagacattcacaaacagtagattgcaccacagtgtgtaaacattttaagttgcataaacttctccttgattttcaaagataatataatactgtctactaaaattcctttttgtttcaactaagtactctcacatatattagtttataataatgtttgttattactttctaaagtgttttccactcaaggaaaagaagtaaattcctatgtcagagtaaccgaggtggttgaagaataggtattagccagagaggtctagatagtaaaatcaaacttcaagcctcaaagaagctccatgaacagagaggaatgccaggtgtcacacagctttccttcactctaattcattcttgactagagcctgtatgcctgtttcagagacatttaaactcttaaaggatgtcttatgatctttactaaatacattaagaagaatgccaaccagcgccctttcgtgtactgggacaggtagtcatgtgattaaaacagggaacacgaactctgactttaaaatgtattgtagatacaaatgctctaagctaggaaaggtttttcacatccacagccaatgatggcagcctttcattcctcggaaataagccctttttaggtcattgaaaaagagtgcaactgctgcagctcacgatgcaatatcttcatgagcccagagcacatacaaatccaaagggaactgccacagtacactgctcattcttggcaccggaacagatgaaacacactgtatcctgcacatacctgccagagcaggccactttcctcttctgtgagatttagaaagctcccccaaaaggttatcactcccatcaccaatacacagaaaatggaggaaaggctgtttccagttctcggcctttaaacagctctaaatgtcagtactcacagtggcatattacaaagtaataaacagtgcacacttgagggcaaaccgcatattgagctatagaagagctcactgtgattaagatgagatcaaacatcatagcagaacattagcaaattttatctgaattctgtaatggacatccatgctgcaataacattagaaaagcacgggagcctattccaaaccagcgagaacagttttgtgcaaagagtgggtctttgtgtgtttgaactcccaccacgtaagggcaaactcgatatgcatgctaatgacctacaattatgaaatgaaaaaagaaaaatgctgaaggatgccagagtgaacatcagtgagagccacagagacccactctcttttaactttttacaaataaacttaaactataaattagaaacacaaataatcatgagtagctctaacattcaaatgaagtaaatgaattgtgtaggagattaaccccataactttgtttcgtttttaaaaatttcttgagcagctctttgatgatggtggtgtttatctccttcttctcggcagccaagcccagcaaaagcatggcacacagcagttgctgcccaagcctgggtgctcctggtggtcctgcatctcaccaaggagctgcacgactggctgtgcagtagggttgtcctgggaagaaccctccctggcttctccttgtgcaggctccacgctgttggtgaggctcgcctcacaaagatcaccatgcttgtcggcagccccgagctcctggggggctggggctcctggactgggttcagcagcagggttccgggcagcggccaggaatttgccgtgcccctcgctatagctgccacaagccgcaacaccatctcctgcagctccaacagcttcaccttcctctcctcctcgtcctgggccagcctgatgatggcctcctcccggtgacgcatctttggcactgtcccctggctctgttagaaggcgatgtactttctgatggcatctctctctccggtactggatgaatccaagttccagtttctccacatgctccctcaggtccaccttctcctccaggaggtccataaggccgctagactcgcccccagtccctgaggctgggactgctgcctctggctccttctcggccgaggtgagcgtctccatcacctggcccagcttctcctgcagctcctttacttgctgctcccaactgcagtgcgctcttgttctcgtgcttcagctcctccaagtcgctctgtggctcggccagctgctgaagcctcttctcctgttcccgaagcctctcctgctgctcctgaagcctctcctcctgctcgcgaagcctctccttttgcccacggttcaggagactgatgcactgattgttttccacctgagcctggagctctcctgccactctctccagctccttcctcaggtcttgcagctccacctcagaggacactgctggggcatccgggggcagtggctcagccatctggtttttgagtctggacaagctcctctccagctcctctacccgatgcgtatcatgcttcttctcctccttcaatgtgcaaacctcctgcgacattttcctcatcctctgctgccactgggccctctctccttttatttgttcagcatattgatctctctccagctggacttctttaagcgactccttcaactgtgtcacgtgtcctttcagcagtatctgctcccgtatggactgctctaactgccgcttgagaagtgctttactgcggctcgagaacccatccggcttcttcttctgtgtggcggcgacagcacagagagaccactctaactctcctatacgctgcgatgaacgttgcaggcggccggccagatccttggactcttcttcaaagtatctgagagaatgtttcatgtgatacaggtccgtatttagtttctttttctctgtgttcaatctctggatttgaccctctagctccctttcagctttctgtttctcattgtttgctttcttttcttcttccagctgatgttccacttgtttcttctgttgtttcaaagatttgatggtgtcattcagtcgactgatttttatggacctcgagttcaggactgctgcttgttcttggcacgggctctgaggcgcatgcagagaggaggaggcggaggaggacttgggggagaggtagagagaacgatcattagggctgggttgtgtgcggctgcaatt

SEQ ID NO: 348451 - DNA, 1252 bp, Homo Sapiens
  misc_feature (795)..(804): n is a, c, g, or t
aaaatgaaacctctcagcagaaggcatatttgtgtaaatttatggcttaaatgggcctaaggtcctgttcttgcctttcttaacttgccgcttttgcattctttgagttcagtttaaagcacttacttttaactcatttttaaaccctcgggctagaattcgtaccactgttaattagccacattatttggtctaacagttatccattctgaaactgagcttatctaatacattgataaattattgcaaaggtacttttatcgttgaaatcacttcacttttaccctgataaatatcagtgactaggaatgaccttcggatagcgtttagcatctgtaaccaatctgacaataatgtgttcatgaggtgcctatggattaaatcacacactggcatatttaagctgaaggtcagtctggaaaataaatttactatattgactgaaataccactctttgtgtaggtatttgtgatatatttaagaaaacgctaaaaagaatggaaattgtatgacaataacttaagtctttctccaaagtgcatgcagtcttttgcgatacctcattcagccgagtatttgtactcttcctcattcagtataaggaagctttcagtttgcttagaaggcaacattggaatgttagagttcatcagaaacatagaattttaaactgtgagttccactgaatacattttaatgtctgtaggaagaatcaaaacacctatttaaagatggcaatatataataatcattttaaaagtatttgattaaacctgataattttccagaaatgnnnnnnnnnntcagctctaaaaccaaagctgatttcagaaaatttgaaaatgtaaatcagccctatccataatatagtttctctaaaactttatcttaaagagtcattttaaaataatataactattaaaaaatgtaactgctatcttaatgttctgaaataatttaaaacattttaaaatatgaatactgtagtataaaagaaagaaatggtgggaacgaaaagcagagaaagaaatgccaattccagtccaaagttttatttgccaagttttcttagaatgaattttaccagtttatgaattattgtaaacagaatgtgtcatggaaatactgaaagatttttccctagagtggccttattgactgctggtgtgatgccactgtaatgtaataaattattaaattgttgcaaagtgctgtttttgccttaaaattttattttgtgtgctaagtggg

SEQ ID NO: 348452 - DNA, 558 bp, Homo Sapiens
gcggccgcacctatgaccccaacctcaggtggcagcacccctccgggcatcactgcaccagccgtgcctagcatcccatcccccattggggtgaatggcttcaccggcctccccccacaggccaatgggcaacctgctgcggaagctgtgttcgccaatggcatccacccctacccagcacagagccccaccgccgcggaccccctgcagcaggcctacgccggagtgcagcagtatgcaggtccagctgcctaccctgctgcctatggtcagataagccaaggcctttcctcagccgcctccaatgatcccccagcagcagagagaagggcccgagggctgtaacctgttcatctacaatctgccccaggagtttggggacgctgagctgatgcaagatgttcctccctttcggtaatgtcatctcctcgaaagtgtttgtggatcgggcgactaaccaaagtaaatgctttggcttcgtgagcttcgacaacccggccagcgcgcagaccgccatccaggccatgaacggcttccagatcggcatgaagaggctca

SEQ ID NO: 348453 - DNA, 1268 bp, Homo Sapiens
ttgctgctccaactgcagtgcggtcttgttctcattgttcggctcctcgaagacgctctctggcttggccagctgctgaaggctcttatgctgctcctgaatcctctcctcctgcttccgaagcctctcttcctgctcctgaatcctctcttctttgtcgctggttcaggagacttatgcgctgattctttttgacctgggcctggagctctcctgccactctctcttagttccttacctcagggtgtctgcagctccacctcaagagggcactgctggggggctcccaggggacaagggttcagccatctggtttttgagtttggacaagctcctctccagctcctctacccgacgcatatcttgctgcttctctttctttaatgtgcaaatctcctgcgacatttttctcatcctctgatgccaccgggccctctctccttttagatgttcagaacactcatctctttctaattggagttgttgaaatgactccttcaactgtgtcagctgcgctttcagcagtgcctggtcccgcagggactgctctaactcccactctgtatgtgctttgctgcagctggacaactggtttgccttcttcttctctgtggcgatgacagcagacagagccctctctaactctcctttacactgcaatgaatgttgcaggcggacagccaggtccttggactcttcttcaaagtatctgagagaacgttccatgtggtacaggtccgtatttagttcctctttctgtatgatcaatgtctggatttgaacctctagctccctttcggctttctgtctctcgttgtttgctttcttttcttcttccagctgatgttccacttgtttcttctgttgtttcaaagatttgatggtgttcttcagtcgactgatttttacggacgttgaatccaggactactgctcgttcttggcacgggctctccagatctctcagggtagcagatgatgtagggccttccctgcggaagacctgaagatggatgagacgagactggcgcctctatgtctgagtgccccccaaacccagcagtcatgtcgcgaggaaacgaaatcacgttacttcttccagctgatgttccacttgtttcttctgttgtttcaaagatttgatggtgttcttcagtcgactgatttgcacggacgatgtgaataccaggacgactgcgcggtcttgcccgatcacctctaggggcacagttgagaaaaacactgtgttatgcagcttctttccttctc

SEQ ID NO: 348454 - DNA, 588 bp, Homo Sapiens; identical to SEQ ID NO: 264736

SEQ ID NO: 348455 - DNA, 592 bp, Homo Sapiens; identical to SEQ ID NO: 264737

SEQ ID NO: 348456 - DNA, 384 bp, Homo Sapiens; identical to SEQ ID NO: 264738

SEQ ID NO: 348457 - DNA, 897 bp, Homo Sapiens
agcggccggagtgcagcagtatgcaggtccagctgcctaccctgctgcctatggtcagataagccaggcctttcctcagccgcctccaatgatcccccagcagcagagagaagggcccgagggctgtaacctgttcatctaccatctgccccaggagtttggggacgctgagctgatgcagatgttcctccctttcggcttcgtgagcttcgacaacccggccagcgcgcagaccgccatccaggccatgaacggcttccagatcggcatgaagaggctcaaggtgcagctgaagcggcccatagacgccaatcgcccgtactgagcgccggcgggagcgtcccacgggggagaccaggactcgcacagggcaggatgctgaacgggctacattaaaaaacaaacctctctctatatatatttataaatgagaactgttggatgacacctttgacatatcagccaatatcaatcaagctgaagactccagacactatctgtgtgactgtaacatttcttcaaggaaagtatagcgtctatggagttcagagggcacgtgtttgggggaaacatatatatgacatgaagaagaagatgaagaaaaacttgagaaaaaaacacacaaaaggcaactttaaaacaaaatatcacgagcagacgggggaggctgaaaggctgggagctgggaggagagctccaggctcaggtggaaaacaatcagtgcatcagtctcctgaaccgtgggcaaaaggagaggcttcgcgagcaggaggagaggcttcaggagcagcaggagaggcttcgggaacaggagaagaggcttcagcagctggccgagccacagagtgacttggaggagctgaagccgagaacaagagcgcactgcagttggagtcg

SEQ ID NO: 348458 - DNA, 1135 bp, Homo Sapiens
gcactttgcaacaatttaaaaatttattgcattacagtagcatcacatcagcagtcaataatgccactttaagcaaaagtctttcagtatttccgttacacattctgttaacaagaactcatacattggtaaaattcattctaagaaaacttggcaaataacgctttggcctgtaattggcatttctttctctacttttccttcccaccatttcttccttttaaactacaggatttatattttaaaatgttttatttcagaacattaagatagcagttacattttttaatatttatattattttaaaatgactctttaagatacagttttaaacccatgggctagaaatcatacgactgttaattagccgcattatttggtctaacattttttatcattctgaaactggatttgtgtaatacattgataaattcatacaatttggaagagtcagttgaagttacaaggacccaatatctgccctctttcagtgaatgccggcaaatctgttattccattggcaaaatcgtattgctgctctcctgttaatctcacatttataaaaggatcatgaggctgccaagtgctaaaaatggagatggtctagtaactagaaaactccccaccccagggagcacacctacatatctccctacaacctaataatgtgatgtgttttggaacacagacattagaacttcatgaagttttaactgttgattctttcccaagcatcatcaagttatgatttaggcaatgtatgattgaaatgcattcattcatcatgcataggcacaatcacagaaatattgcacaaagtatgtccctgactgaaaatgagaggtacaaaaacgtatttcactcttcgtaaagaagtttgtgaggaaatacaactctgcgatcgtatagacatgtttcctgataatacagacattcacaaacagtagattgcaccacagtgtgtaaacattttaagttgcataaacttctccttgattttcaaagataatataatactgtctactaaaattcctttttgtttcaactaagtactctcacatatattagtttataataatgtttgttattactttctaaagtgttttccactcaaggaaaagaagtaaattcccac

SEQ ID NO: 348459 - DNA, 658 bp, Homo Sapiens
aagtctttgacatactttatcaatgtattagatcagctcagtttcagaatgataaacaaaaactgttagaccaaataacgtggcatattaacagtggtacgatttctagcccgagggtttacactggcgtttaagtaagtgtctttaaactgaactcaaagagtgcaacagcggcaagttcagaacaggcaagaacaggacctttagatccattttaagccataaatattacacaaaatatgcctctaactgaaactgagaggtataaaaacatatttcactcttcgtaaagaactttgtgaggaaatataactctgtgattgtatagacactttcctcatgacactttgacagtcacaaacagtagattgcgctgcagtttgtaaacattttacgttgcataaactgctccttgattttcaaatgtagtataatactgtctactaaaactcctttttgtttcaacttaagtactctcacatatattagtttataataatgtttgttattatttttaaagtgttctccattcaaggaaaagaagtataattcctatgtcagatggttgaagactagctattagccagagaggtctagatggtataaatccatcttctagcctcaaataagctccatgaacacagaggaatgccacgtc

SEQ ID NO: 348460 - DNA, 538 bp, Homo Sapiens
aattagacccaaataatgtgggcctaatagtggtatgatttcccagcccgtgggtttaaaactgtatccctaaagagtcattttaaaataatataaatatttaaaaatgtaactgctatctttatgttctgaaataagttaaaacattttaaaatatgaatactgtagtttaaaagaaagaaatggtgggaaggaaaagtagagaaagaaatgccaattccagtccaaagctttgtttgccaagttttcttagaatgaattttaccaatgtatgggttcttgttaacagaatgtgtaacagaaatactgaaagacttttgcctaaagtggcattattgactgctggtgtgatgctactgtaatgcgataaattattaaattgttgcaaagtgctgtttttgccttaaaattttattttgcgcatcttgaaaattatagtattaaaggtattgatactgtgcaaatactgggcatgcttggcatgagataatctgtttcattttcacaaaattgtagtataactatgcaagtgtttatt

SEQ ID NO: 348461 - DNA, 440 bp, Homo Sapiens
  misc_feature (14)..(14): n is a, c, g, or t
aaaaattacccaanttccccggggggggttcgcctcctctccttgggggctttaatgtctttctctcccccaacctgaaggtcccaagggctgtaacctgtttatctaccaacctccccccaggagtttggagacacggaaatgacgcagatgttccctaccttcggcaatatcatttcctccaaggtgtttatggatcgagctaccaaccagagcaagtgtttcggcttcgtgagctttgataacccggccagcgcccaggcagccatccaggccattaacggcttccagatcggcatgaagaggctcaaagtccagctgaagcggcccaaagacccgtgaagggggtttctcccctgtcctccatcccccgtttctgttcattcacagctgcgtccccgagcactggaacaggcctagcacataaaaaatgctcagct

SEQ ID NO: 348462 - DNA, 476 bp, Homo Sapiens
  misc_feature (344)..(344): n is a, c, g, or t
  misc_feature (347)..(347): n is a, c, g, or t
  misc_feature (408)..(408): n is a, c, g, or t
  misc_feature (413)..(413): n is a, c, g, or t
  misc_feature (437)..(437): n is a, c, g, or t
  misc_feature (458)..(458): n is a, c, g, or t
atcattggctgtggatgtggaaaacctttcctagcttagagcatttgtatctacaatacattttaaagtcagagttcatgttccctgttttaatcacatgactacctgtcccagtacacgaaagggcgctggttggcattcttcttaatgtatttagtaaagatcataagacatcctttaagagtttaaatgtctctgaaacaggcatacaggctctagtcaagaatgaattaggagtgaaggaaagctgtgtgacacctgggcattcctctctgttcatgggagcttctttgagggcttggaagtttggatttttactatctaggaccctctctgggcctaantancctatttctttcaacccacctcgggttactctggacataggggaattttactttctttttnccttngaggttggggaaaaccactttttngggaaaattaattaacccaancattatttattaaaccta

SEQ ID NO: 348463 - DNA, 651 bp, Homo Sapiens
cacgagattcagccaagtatttgttctctacctcattcagtataaggcagcctttaatttgcttagaaggcaacattagaaggttagagttcagcaggaacatagaattttaaaatgtgacttcaactgaataaatttgaatttctctagggagtaaagaatcaaaacacctatttaaagactgcaaaatatgataattatttttaaagtaattgattaaacctggtaggttttcccaaaatgaaaaacaatcagttctaaaaccaaagctgatttttagaaaatgtgaaaatgtaaatcaaccctatccataatagattctctaaaactttatcttacagtcactttcaaataactattcaaaaatgtaactgctatattaacgtcttaaaataatttaaaacattttaaaatatgaatactgtagtttaaaacaaagaatctaggggaaggaaaagtagacaaagaaatgccaattccagtccaaagctgtatttgccaagttttcttagaatgacttttaccgatttatgaattcttatacacagaatgcataatggaaatactgatttttgtctaaagtggcattattgactgctgctgtgatgctactataatgtaatacattactaaattgtttcaaggtgcaaa

SEQ ID NO: 348464 - DNA, 420 bp, Homo Sapiens
  misc_feature (12)..(12): n is a, c, g, or t
  misc_feature (39)..(39): n is a, c, g, or t
  misc_feature (65)..(65): n is a, c, g, or t
  misc_feature (90)..(90): n is a, c, g, or t
  misc_feature (131)..(131): n is a, c, g, or t
  misc_feature (141)..(141): n is a, c, g, or t
  misc_feature (146)..(146): n is a, c, g, or t
  misc_feature (205)..(205): n is a, c, g, or t
  misc_feature (261)..(261): n is a, c, g, or t
  misc_feature (327)..(327): n is a, c, g, or t
  misc_feature (345)..(345): n is a, c, g, or t
catgtgttaatnagtaaatcttacccatagcccccgtanataggttggaacttatttaataagtnctaaatttttatatagatgctttanactttaataatatttatatttacagaatttaattgatattnacctgaattnaatantttaattattaattatcttagtcgagatgaaatcataagcatatgagttaaaaatatgnagctcctttgtgaggtggaataccatatttaaacattggtgtatgaaggcaggtanatttacttcatcattattttaacaagtgatgttgataaaagccagaggaacaaacatgggtgaaanaacatattaattaatcanaacttctagcaaataccaacccgggcatgtctttttatggttgtcttgaattaatactaattttacttccttaca

SEQ ID NO: 348465 - DNA, 1514 bp, Homo Sapiens
tagcgaggcctgggtggcgaattcggcacgaggatctgactccaggggtcaatattgccaagactgggaaacactgatatagacagtgttgtccctgcctcctgggttagggtaaattttcaccccaaccctggacaaacagtgccttttgacactcatgcaactgttggggaaggactggactgggatccttgaattctccccagactttgacttttgataactctgcatatagcaagagtgattcttgaaagagctgtggctccatgctgaatgcacacatgtactcagagggattcaggtgggcattgttctggtgtgtgctgtgcaatggtgggaaaggacaaagctctctaaactgtctagagcaacctgccctgccccggtgtgcttggaccctttgcccagggaaccaggacatcagaaataatgttccttctgtggaaggacaacggggagctagggtagcaaagagcaataaattccaactctttatgaggtcaggagtcctttaaaaaagcctatgtcttggtctttaactgtccccttctgcaagatgtgactctatacacatggagacagattgaagaaagacttcacccatcttctaggaaataaaatcctgctcttgtcttctcccagtcactcccttatgcactgaaaggagaatttgactcccttgcacttcaaggccaggtgcctctccactagacagtcagacaaaggcaaataatggaggatagagagacaggtgttcattaggctggccatagggagaggaagggggtgacagcaggggaaaagaaactgtagtatcagttgtcacaagtagagctcggcccagctttccctcccttcccagccaccctagaattgagagtcccagtgcccctagtgtcgactttctatgtacatcctaggggtgagggagtgcggggcaatgggtaggatataaagcgtaaaggacaaattgccgcagtcttctaattgatgcttccaaactcaggaagggcttatccagtgtaaaatagccccaagcccagcaaccttctagagggctctggctgggcagatagcttttgtttttgagtctccagccctcagtcaaggaaaatataccatagctgctttcttgtcagtggcctttgagagaaagagaaaacaaatctagaattctgttcatctgatagaccgggggagctttgctatggtaggaggtttaggaagggcctttcacgcatagaaaccattgttgatattgccactccccactcctctgcctcacagaactcctgattctgtcttctttctctctctatatatatattttaaaatgtttaaatggctctaattttttgttttgaattttgaatttaccttttggaattcttctcatatgaatctacttgttagattgtattaatgagtgtttctggtttgggcatgggaagtgatgggggcctgaagttattttgcagtggctaatggcactgaggaatttcttttttggtgca

SEQ ID NO: 348466 - DNA, 1119 bp, Homo Sapiens
ttagctctttctcctactcccttcctacaaacacccacaccctttcctcaggaatggaactgagatctccagaggggaatggtgagaaaggagaatgctagataggaaatgagaactgaagatattgattttgttgctacctgggctgaaagatacagccacaggcagaaatcaagacggtaaatcctctgggggtctatgaagaaagaggaccagagaaagccagtctatgtttatttcaggtcctgctggtcaatctttgtgaaggaaccttcttaatgtcggttggtgatgaaaaagacatcctgccaccgaagcttcaggatgacatcttagactctcttggtcaggggatcaatgagttaaagactgcagaacaaatcaacgagcatgtttcaggcccctttgtgcagttctttgtcaagattgtgggccattatgcttcctatatcaagcgggaggcaaatgggcaaggccacttccaagaaagatccttctgtaaggctctgacctccaagaccaaccgccgatttgtgaagaagtttgtgaagacacagctcttctcacttttcatccaggaagccgagaagagcaagaatcctcctgcaggctatttccaacagaaaatacttgaatatgaggaacagaagaaacagaagaaaccaaggggaaaaaactgtgaaataagagctgtggtgaataagaatgactagagctacacaccatttctggacttcagcccctgccagtgtggcaggatcagcaaaactgtccagctcccaaaatccatatcctcactctgagtcttggtatccaggtattgccttcaaactggtgtctgagatttggatccctggtattgatttctcaggactttggagggctctgacaccatgctcacagaactgggctcagagctccattttttgcagaggtgacacaggtaggaaacagtagtacatgtgttgtagacacttggttagaagctgctgcaactgccctctcccatcattataacatcttcaacacagcacacactttgtggtcgaaaggctcagcctctctacatgaagtctgtggacatgtaaggacgagagtaaagaggaaaatcttattttt

SEQ ID NO: 348467 - DNA, 765 bp, Homo Sapiens
acaaaataggctaggtcgaggctgggtggttgaatcggcacgagggctgacgtggaggcgtccgaagggcagcagggtgtgtcggggctcggattaagacatcggagtcggagacctgagagatgttaaccaaattcgagaccaagagcgcgcgggtcaaagggctcagctttcaccccaaaagaccttggatcctgactagtttacataatggggtcatccagttatgggactatcggatgtgcactctcattgacaagtttgatgaacatgatggtccagtgcgaggcattgacttccataagcagcagccactgttcgtctctggaggagatgactataagattaaggtttggaattacaagcttcggcgctgtcttttcacattgcttgggcacttagattatattcgcaccacgttttttcatcatgaatatccctggattctgagtgcctccgatgatcagaccatccgagtgtggaattggcaatctagaacctgtgtttgtgtgttaacagggcacaaccattatgtgatgtgtgctcagttccaccccacagaagacttggtagtatcagccagcctggaccagactgtgcgcgtttgggatatttctggtctgaggataaagaaacctgtccctggtgcggtggaatcggatgtgagaggaataactgggggtgatctatttggaactacagatgcagtggtgaagcatgtactagagggtcacgaacagtggtctgagatcctgctagagtcgc

SEQ ID NO: 348468 - DNA, 1483 bp, Homo Sapiens
ggggtcttaagtgagaatatttgcctgggagtagagataaagacacaaaccgaatgtgaaataccaggtaataattattttgcattaaactctttttatcgggaatagtatgatattttcaatgtcactccattcatgttgatttggagctgacagttattttgtgtaagcagagatttaattttatattgaaagtcagtgcaaaattatgaataggatatactaataaatacaaagtaataacaaaagtcaaagcagtgttctaaataaaaattctgggttccttaaaaattattttaaatttatctttgaaatagttttcttagattaatctcaggatatgagaaagtcaattaagtgtgagtaaagttagtatcattaaacaaattgtctattaaatgcaagacgtggtaatatacagaatttatcaggcattaccaagtctaggcacatataggaaatgcagcactcagaatggtttcaatgtagtagttgatgcttgtaaggtaggggagcttattcagacatagtagatagtttctctaatgctgtctcaattgctggcctttggctacctgtacttccccattatggcagcccattcagtcttgagttttcttctctggacaccttatgctctgaaatcatgagcgaggctgattcaattggtgatttgggtagaaagcagtatgttttgctgacattaagatgtaggttatagataggtttagcctttaagtgtatgtttttatactttaaaataagaaatataaccttttaagctattccacctcctcccccagcctatctcaaactggtggaatatatggagagatcttgaaagaggtaaaataaaccttcactgctccactccaggtgaatccgcccactcccactgacctagtagaatttgtaatttaatacttaccatctatttctgaaatcagttgtgaactgttgccttatgttcagaggtttaagaacctcagtgaattcattttttaaaatctgctattctgagaagcattgaatgaattcttaacaagaagactcatctgtagctgtttgctgactcctatgagcccataagggttctgtgcttagcattaacaaaataaggtttataggtaaagccaatgtattaatattttatttgcatggagggctttaaaatttgtgctctttttcatattttattcatattcaatttatggtttgtaactgctttttagggagataattatatgttataaattagttttggggggaataattgtgcaaagaggataatttaatttacgtgcttctgttattcagaataaagagagaagactacgctgcatattcaagagttgtaccttaacattggtgaaacattttttctaagattttcaaaaggaatatgtgtaaattgagaaatcataaccactgtcctaacttggtaaacaaactgttcttaaataaagtatttaatgattttaaa

SEQ ID NO: 348469 - DNA, 2629 bp, Homo Sapiens
tgtgtatagagacatcctggcttgtggcagaggggattcgttttttataagaagccactttgaatgtgagaaggaaactccacagagcctggccttcaccagaggggaggtcttccgagtggtagacacactgtatgacggcaagctgggcaactggctggctgtgaggattgggaacgagttggagaaaggcttaatccccaacaagagcagagctgaacaaatggccagtgttcaaaatgcccagagagacaacgctggggaccgggcagatttctggagaatgcgtggccagaggtctggggtgaagaagagcctgaggaaaagtcgggaagacctcacagctgttgtgtctgtcagcaccaagttcccagcttatgagagggttttgctgcgagaagctggtttcaagagacctgtggtcttattcggccccatagctgatatagcaatggaaaaattggctaatgagttacctgactggtttcaaactgctaaaacggaaccaaaagatgcaggatctgagaaatccactggagtggtccggttaaataccgtgaggcaaattattgaacaggataagcatgcactactggatgtgactccgaaagctgtggacctgttgaattacacccagtggttcccaattgtgatttttttcaacccagactccagacaaggtgtcaaaaccatgagacaaaggttaaatccaacgtccaacaaaagttctcgaaagttatttgatcaagccaacaagcttaaaaaaacgtgtgcacaccttttttacagctacaatcaacctaaattcagccaatgatagctggtttggcagcttaaaggacactattcagcatcagcaaggagaagcggtttgggtctctgaaggaaagatggaagggatggatgatgaccccgaagaccgcatgtcctacttaaccgccatgggcgcggactatctgagttgcgacagccgcctcatcagtgactttgaagacacggacggtgaaggaggcgcctacactgacaatgagctggatgagccagccgaggagccgctggtgtcgtccatcacccgctcctcggagccggtgcagcacgaggagagcataaggaaacccagcccagagccacgagctcagatgaggagggctgctagcagcgatcaacttagggacaaatagcccgcccccagcattcaagccagagccgcccaaggccaaaacccagaacaaagaagaatcctatgacttctccaaatcctatgaatataagtcaaacccctctgccgttgctggtaatgaaactcctggggcatctaccaaaggttatcctcctcctgttgcagcaaaacctacctttgggcggtctatactgaagccctccactcccatccctcctcaagagggtgaggaggtgggagagagcagtgaggagcaagataatgctcccaaatcagtcctgggcaaagtcaaaatatttgagaagatggatcacaaggccaggttacagagaatgcaggagctccaggaagcacagaatgcaaggatcgaaattgcccagaagcatcctgatatctatgcaggtccaatcaaaacgcacaagccagaccctggcacgccccagcacacgagttccagaccccctgagccacagaaagctccttccagaccttatcaggataccagaggaagttatggcagtgatgccgaggaggaggagtaccgccagcagctgtcagaacactccaagcgcggttactatggccagtctgcccgataccgggacacagaattatagatgtctgagcacggactctcccaggcctgcctgcatggcatcagactagccactcctgccaggccgccgggatggttcttctccagttagaatgcaccatggagacgtggtgggactccagctcgtgtgtcctcatggagaacccaggggacagctggtgcaaattcagaactgagggctctgtttgtgggactgggttagaggagtctgtggctttttgttcagaattaagcagaacactgcagtcagatcctgttacttgcttcagtggaccgaaatctgtattctgtttgcgtacttgtaatatgtatattaagaagcaataactatttttcctcattaatagctgccttcaaggactgtttcagtgtgagtcagaatgtgaaaaaggaataaaaaatactgttgggctcaaactaaattcaaagaagtactttattgcaactcttttaagtgccttggatgagaagtgtcttaaattttcttcctttgaagctttaggcagagccataatggactaaaacattttgactaagtttttataccagcttaatagctgtagttttccctgcactgtgtcatcttttcaaggcatttgtctttgtaatattttccataaatttggactgtctatatcataactatacttgatagtttggctataagtgctcaatagcttgaagcccaagaagttggtatcgaaatttgttgtttgtttaaacccaagtgctgcacaaaagcagatacttgaggaaaacactatttccaaaagcacatgtattgacaacagttttataatttaataaaaaggaatacattgcaatccgtaaaa

SEQ ID NO: 348470 - DNA, 1130 bp, Homo Sapiens
ccctcggcccagctgagagcctggaggaggggatggggctcattcttgttctcacttcagccccgccttgggcgtcctgttcagcatcgaggtcatgtcttcccacttctctgtccgggattactggaggggcttctttgcggccacctgcggggccttcatattccggctcctggcagtcttcaacagcgagcaggagaccatcacctccctctacaagaccagtttccgggtggacgttcccttcgacctgcctgagatcttcttttttgtggcgctgggtggcatctgcggcgtcctgagctgtgcttacctcttctgtcagcgaaccttcctcagcttcatcaagaccaatcggtacagctccaaactgctggctactagcaagcctgtgtactccgctctggccaccttgcttctcgcctccatcacctacccgcctggtgtgggccacttcctagcttctcggctgtccatgaagcagcaactggactcgctgttcgacaaccactcctgggcgctgatgacccagaactccagcccaccctggcccgaggagctcgacccccagcacctttggtgggaatggtaccacccgcggttcaaccatctttgggacccttgccttcttcctggttatgaagttctggatgctgattctggccaccaccatccccatgcctgccgggtacttcatgcccatctttatccttggagctgccatcgggcgcctcttgggaagaggctcttgccgtcaccttcgcttgagggcataggtgactggaggggttaccaatcccatcatgcccgggggggtatgcctctggcagccaagccattgcacaaggagtgacaacccttccgttctattgaatgggcacccagcaattggtcgaagaaagctagcaagtaccttgccacgagagactgccagtgggcccgacaaaaatcggagtccccacaccatgggaacggggtggaggaccttcatatgaaacacgcaggattaccgaccactgggcaaaggcacaagcccgcagggcagacaagtcggccaacagagcgtggtagcgccacaaaaggacagcagaagacccgagagaggggagacaacagagatcgcacaactg

SEQ ID NO: 348471 - DNA, 2020 bp, Homo Sapiens
ggtccggaattctccggattgccggaagaagtggcgaagttacttttgagggtatttgagtagcggcggtgtgtcaggggctaaagaggaggacgaagaaaagcagagcaagggaacccagggcaacaggagtagttcactccgcgagaggccgtccacgagacccccgcgcgcagccatgagccccgccccccgctgttgcttggagaggggcgggacctggagagaggctgctccgtgaccccaccatgtcctctcctaccacgagttccctggatacccccctgcctggaaatggcccccctcagcctggcgccccttcttcttcacccactgtaaaggaggagggtccggagccgtggcccgggggtccggaccctgatgtcccaggcactgatgaggccagctcagcctgcagcacagactgggtcatcccagatcccgaagaggaaccagagcgcaagcgaaagaagggcccagccccgaagatgctgggccacgagctttgccgtgtctgtggggacaaggcctccggcttccactacaacgtgctcagctgcgaaggctgcaagggcttcttccggcgcagtgtggtccgtggtggggccaggcgctatgcctgccggggtggcggaacctgccagatggacgctttcatgcggcgcaagtgccagcagtgccggctgcgcaagtgcaaggaggcagggatgagggagcagtgcgtcctttctgaagaacagatccggaagaagaagattcggaaacaacagcagcaggagtcacagtcacagtcgcagtcacctgtgggggccgcagggcagcagcagctcagcctctgggcctggggcttcccctggtggatctgaggcaggcagccagggctccggggaaggcgagggtgtccagctaacagcggctcaagaactaatgatccagcagttggtggcggcccaactgcagtgcaacaaacgctccttctccgaccagcccaaagtcacgccctgccccctgggcgcagacccccagtcccgagatgcccgccagcaacgctttgcccacttcacggagctggccatcatctcagtccaggagatcgtggacttcgctaagcaagtgcctggtttcctgcagctgggccgggaggaccagatcgccctcctgaaggcatccactatcgagatcatgctgctagagacagccaggcgctacaaccacgagacagagtgtatcaccttcttgaaggacttcacctacagcaaggacgacttccaccgtgcaggcctgcaggtggagttcatcaaccccatcttcgagttctcgcgggccatgcggcggctgggcctggacgacgctgagtacgccctgctcatcgccatcaacatcttctcggccgaccggcccaacgtgcaggagccgggccgcgtggaggcgttgcagcagccctacgtggaggcgctgctgtcctacacgcgcatcaagaggccgcaggaccagctgcgcttcccgcgcatgctcatgaagctggtgagcctgcgcacgctgagctctgtgcactcggagcaggtcttcgccttgcggctccaggacaagaagctgccgcctctgctgtcggagatctgggacgtccacgagtgaggggctggccacccagccccacagccttgcctgaccaccctccagcagatagacgccggcaccccttcctcttcctagggtggaaggggccctgggccgagcctgtagacctatcggctctcatcccttgggataagccccagtccaggtccaggaggctccctccctgcccagcgagtcttccagaaggggtgaaagggttgcaggtcccgaccactgacccttcccggctgccctccctccccagcttacacctcaagcccagcacgcagtgcaccttgaacagagggaggggaggacccatggctctcccccctagcccgggagaccaggggccttcctcttcctctgcttttatttaataaaaactaaaaacagaaacagg

SEQ ID NO: 348472 - DNA, 1064 bp, Homo Sapiens
ggggtttgcgacccagggtcaggccgtgactctcggcttgtcggtagaatgaagccgtttgttgcacatccagttgggcgtgcacccaactgctggattcattagttcttggacccgcgtgtgtagcgttggacacccttcgccttttccccggaggccttggccgtgcctgccctcagattcccacccaggggaagctcccaggccccaagaggctgagctggcttgctgcccctgcggcccccaccagggggacctgcgaccggtggactgtgactcctgctgctgttgtttccgaatcttcttcttccgggatctgttcttcagaaaggacgcactgctccctcatccctgcctccttgcacttgcgcagccggcactgctggcacttgcgccgcatgaaagcgtccatctggcaggttccgccaccccggcaggcatagcgcctggccccaccacggaccacactgcgccggaagaagcccttgcagccttcgcagctgagcacgttgtagtggaagccggaggccttgtccccacagacacggcaaagctcgtggcccagcatcttcggggctgggcccttctttcgcttgcgctctggttcctcttcgggatctgggatgacccagtctgtgctgcaggctgagctggcctcatcagtgcctgggacatcagggtccggacccccgggccacggctccggaccctcctcctttacagtgggtgaagaagaaggggcgccaggctgaggggggccatttccaggcaggggggtatccagggaactcgtggtaggagaggacatggtggggtcacggagcagcctctctccaggtcccgcccctctccaagcaacagcggggggcggggctcatggctgcgcgcgggggtctcgtggacggcctctcgcggagtgaactactcctgttgccctgggttcccttgctctgcttttcttcgtcctcctctttagcccctgacacaccgccgctactcaaataccctcaaaagtaacttcgccacttcttccggcaacatcccgagaattccggaccggtacc

SEQ ID NO: 348473 - DNA, 1118 bp, Homo Sapiens
  misc_feature (644)..(690): n is a, c, g, or t
caggagaggcccaccactttggccccaaagttcttgatatccaggtagtcctccaagaccacacccgccaacatggtcttcacctccgggattccagaacctccagaggagggtgtgatgctctgagagaagcccgaagagaaagagacgagggccacagggtacacagtccaggagagataccggagcaggtggctgtccccaatctccctgtacagccactggtgcgctcggaccacactctcaacagccaagtccatggcacagctgaccagggccatgagcaccccgagggtcatcaggaagtaccagtcctcgcccaggcggaagagcttctgcttcagccactccaggccacctcggatgcctcggcggatgaggggacaggggccccacagctcctgcagagtcacagggtcccctgagaagcccctcacgcagccccacaaactcctccatcaggcccctgtcagtcctcctgctgcggctgaactggccctcctctcacagagcctcctttgctcccagctccagtgcaccctgagtgcccacggaaatcccacgaggcaggcagcgtgatcccgttgtagagaaatggtgtctcaaggagctggggctgcctgtctaagatcacggaggccgannnnnnnnnnnnnnnnnnnnnnnnnnnnnnnnnnnnnnnnnnnnnnncaggctgtgccacacggtcccatcctgatgacccatcttgcccagggctggcgaggaggccgacacctgccgtgtgcctgcgacgtgtcaggagcgtcacatctgcagctcaagtcctcctccccacacctgagtgatgagggcttcatcactggcctatgagctggctgtgtggggagctgatgggaagagatgtgaggtcccttccccagatcccaaatccaaatcctggggtccaaggaaagggtctgtgtttgtgaaaagctctcctgggtgactgggattcaaaggactgcatcatctttgtagctccttctgtctctgtgatgcaactgcgagccccgccctttccaagaggcttcgcttccccgtccgtaacatgggaagagcccctccaccctcccggctgtgtggggatcaaacggggc

SEQ ID NO: 348474 - DNA, 1001 bp, Homo Sapiens
  misc_feature (39)..(39): n is a, c, g, or t
  misc_feature (94)..(151): n is a, c, g, or t
  misc_feature (631)..(631): n is a, c, g, or t
tggaagcagccagccgatcactagtcctccatccccctngagtcctccgattgtcatgcctaggccttgccacaaagacagcacctttatgtgnnnnnnnnnnnnnnnnnnnnnnnnnnnnnnnnnnnnnnnnnnnnnnnnnnnnnnnnnnttaaatggagatcttctgggaaaccaagccatgaatgcgagtttgtactaacctagccctctggaggccacatctgtagcaatcagaataggagcttttccatgtttgaattcatttagaacccagtcacgctcttgttgactcttgtcaccatggatacccatggcaggccacccatctctcctcatttttctggtaagctcatcacatcttcttttggtttccacaaaaacaatggttttattctccttctcactcatgatctcttccattagacgaataactttttcatccttttctacgtcatgacacacatccacaatctgaagaatgttgtggtttgcactcagttcaagtgcaccaatgtttatatgaatatagtctttcaggaaatcttcagcaagctgtcttacttcttttggccaagtcgcactccacattagagtttgcctatcacgtcttatttgatccacaatcttncttattttgcgttcaaagcccatatcaagcattctatctgcttcatcaagggacaagttacgttggtcttctcagcattgctttttcacactctaaaaagtcaatcagtctttcaggcggtgcaatacagatttccacaacctctctccaaaacacgttatctgtgtcccttaaggacacccaccggagatacaagaggactttaagcgccatgctctacaatattcagccgtacttgctggacctgttgggccaagttcccgagttggggcaagcacaaaccaataggccattcgcctcttcttaggaagggctgaagatgatggggcaatggaggaaacaaaaaaacaaggttttcacaaccagtctg

SEQ ID NO: 348475 - DNA, 327 bp, Homo Sapiens
gccaaaagaagtaagacagcttgctgaagatttcctgaaagactatattcatataaacattggtgcacttgaactgagtgcaaaccacaacattcttcagattgtggatgtgtgtcatgacgtagaaaaggatgaaaaacttattcgtctaatggaagagatcatgagtgagaaggagaataaaaccattgtttttgtggaaaccaaaagaagatgtgatgagcttaccagaaaaatgaggagagatgggtatgtgtgagctcctccattgaagcagattgattaaaacagcttaggaaagggcaaacttggttcacgagcagtggg

SEQ ID NO: 348476 - DNA, 1786 bp, Homo Sapiens
  misc_feature (9)..(9): n is a, c, g, or t
  misc_feature (16)..(17): n is a, c, g, or t
  misc_feature (21)..(21): n is a, c, g, or t
  misc_feature (32)..(32): n is a, c, g, or t
  misc_feature (37)..(37): n is a, c, g, or t
  misc_feature (41)..(41): n is a, c, g, or t
  misc_feature (995)..(995): n is a, c, g, or t
  misc_feature (1113)..(1122): n is a, c, g, or t
  misc_feature (1126)..(1165): n is a, c, g, or t
  misc_feature (1170)..(1170): n is a, c, g, or t
  misc_feature (1180)..(1181): n is a, c, g, or t
  misc_feature (1186)..(1186): n is a, c, g, or t
aataaaccnttttttnngaancaaaagagatntatgncttnccagaaaatgagagagatggtgcctgccatggtatccatgtgactagagtcaacaagagcgtgactggtttctaaatgattcaaacatggaaagctcctattctgattgctacagatgtggcctccagagggctagatgtggaagatgtgaaatttgtcatcaattatgactaccctaactcctcagaggattatattcatcgaattggaagaactgctcgcagtaccaaaacaggcacagcatacactttctttacacctaataacataaagcaagtgagcgaccttatctctgtgcttcgtgaagctaatcaagcaattaatcccaagttgcttcagttggtcgaagacagaggttcaggtcgttccaggggtagaggaggcatgaaggatgaccgtcgggacagatactctgcgggcaaaaggggtggatttaatacctttagagacagggaaaattatgacagaggttactctagcctgcttaaaagagattttggggcaaaaactcagaatggtgtttacagtgctgcaaattacaccaatgggagctttggaagtaattttgtgtctgctggtatacagaccagttttaggactggtaatccaacagggacttaccagaatggttatgatagcactcagcaatacggaagtaatgttccaaatatgcacaatggtatgaaccaacaggcatatgcatatcctgctactgcagctgcacctatgattggttatccaatgccaacaggatattcccaataagactttagaagtatatgtaaatgtctgtttttcataattgctctttatattgtgtgttatctgacaagatagttatttaagaaacatgggaattgcagaaatgactgcagtgcagcagtaattatggtgcactttttcgctatttaagttggatatttctctacattcctgaaacaatttttaggtttnttttgtactagaaaatgcaggcagtgttttcacaaaagtaaatgtacagtgatttgaaatacaataaatgaaggcaatgcatggccttccaataaaaaatatttgaagactgaaaaannnnnnnnnnaagnnnnnnnnnnnnnnnnnnnnnnnnnnnnnnnnnnnnnnnnccaanacccaaaaannaaaanccctttttcccccgccctctcccccccagaaaattttttcaaaactctttcctcttgggggcgccgggcccaaaaaggtaacggaccccctgccctaccagcttgttctcccaagaaaacccctgggcaaagaaccacgccccttgaatttccccccccacaaaaaaaacgccccgcggggcgcaaacctgcagggtcttgtaaaccaattcccaggaggggagtttctcgaggctttcatatcgggaattttacccaaggggggagcgccaacgggaggtctccaatatacaaaattagcgcccccgtccctgtccaccctctatcgagagaacacgggcttaaacattcccctataaccagtttctatgcccaacacttggacaacgccccttccctaatacgccctctcgtcgtgaaccctgtaactatgcgcccgcccgcgcgacctctacgcccccgttgtcgtccgcctttgggagatatacatcacctattcgcgcgcccgagccgataaacaccaacgggggtgtgtacaaataaaaagcctcggcgtcatcatgatgtgtgcgcaccccgctgtattacaaacacacgacc

SEQ ID NO: 348477 - DNA, 1987 bp, Homo Sapiens
  misc_feature (8)..(8): n is a, c, g, or t
  misc_feature (92)..(107): n is a, c, g, or t
  misc_feature (130)..(130): n is a, c, g, or t
  misc_feature (151)..(151): n is a, c, g, or t
  misc_feature (153)..(153): n is a, c, g, or t
  misc_feature (171)..(171): n is a, c, g, or t
  misc_feature (173)..(173): n is a, c, g, or t
  misc_feature (175)..(175): n is a, c, g, or t
  misc_feature (230)..(230): n is a, c, g, or t
  misc_feature (251)..(251): n is a, c, g, or t
  misc_feature (254)..(254): n is a, c, g, or t
  misc_feature (256)..(256): n is a, c, g, or t
  misc_feature (303)..(303): n is a, c, g, or t
  misc_feature (312)..(312): n is a, c, g, or t
  misc_feature (316)..(316): n is a, c, g, or t
  misc_feature (324)..(324): n is a, c, g, or t
  misc_feature (327)..(327): n is a, c, g, or t
  misc_feature (333)..(333): n is a, c, g, or t
  misc_feature (354)..(354): n is a, c, g, or t
  misc_feature (357)..(357): n is a, c, g, or t
  misc_feature (364)..(364): n is a, c, g, or t
  misc_feature (388)..(388): n is a, c, g, or t
  misc_feature (406)..(406): n is a, c, g, or t
  misc_feature (420)..(420): n is a, c, g, or t
  misc_feature (427)..(427): n is a, c, g, or t
  misc_feature (434)..(435): n is a, c, g, or t
  misc_feature (447)..(447): n is a, c, g, or t
  misc_feature (453)..(453): n is a, c, g, or t
  misc_feature (457)..(459): n is a, c, g, or t
  misc_feature (461)..(461): n is a, c, g, or t
  misc_feature (519)..(519): n is a, c, g, or t
  misc_feature (1082)..(1095): n is a, c, g, or t
attgcganggccatgcattgccttcatttattgtatttcaaatcactgtacatttacttttgtgaaaacactgcctgcattttctcagtacnnnnnnnnnnnnnnnnttgtttcaggaatgtagagaaanatccaacttaaatagcgaaanantgcaccataattactgcngnantgcagtcatttctgcaattcccatgtttcttaaataactatcttgtcagataacncacaatataaagagcaattangananacagacatttacatatacttctaaagtcttattgggaatatcctgtnggcattggntagncaatcatnggngcggcngcggtggcagggtatgcatangcntgttggntcataccattgtgcatatttgggncattacttccgtattgcngagtgctatcatanccattcnggtaagnncctgtggggttnccagtnctannncnggtctgtataccagcggacacaaaattacttccaaagctcccattggtgtaatttgcngcactgtaaacaccattctgagtttttgccccaaaatctcttttaagcaggctagagtaacctctgtcataattttccctgtctctaaaggtattaaatccaccccttttgcccgcagagtatctgtcccgacggtcatccttcatgcctcctctacccctggaacgacctgaacctctgtcttcgaccaactgaagcaacttgggattaattgcttgattagcttcacgaagcacagagataaggtcgctcacttgctttatgttattaggtgtaaagaaagtgtatgctgtgcctgttttggtactgcgagcagttcttccaattcgatgaatataatcctctgaggagttagggtagtcataattgatgacaaatttcacatcttccacatctgtaaggtgttgcagtgtggcaaaatagcaatgtacggagttttgcacaccacaacagccagaccaaaaataaaaagttagacaattgtattcccaagaaggtacgggctgcaaaaaatacagttaaaatggttatccatttcctgtaggaataccattgaggttggnnnnnnnnnnnnnngcacatgtcatctgtataattcatcacccacccagtgacagaccctgtcaaaaggaatgtgtgttccctaagcacattcccaaatcagcaagttcccttacagatcatcaagtgacatctgaatgcttctgcgcagtagggccacttaaagtttcacagcaacctcttcatgtgctcattttgaggaccttgaaacaaaaaaatgtacaaggtcctttgcattacacattcatcagaagttcaaaattctggccacactgcttgtcttgccaagaccttacaaccgcagctgcaagaaaacatacctgtcccccaaaagttgtttttatgcactgtgtctcgtctaggcaagcgcttccaagaagccaggattcacttgagaatgtgtctctctctggcaggtctcgacatgacgactactgtgtaggtgagggaggaactttcaaagcactttcttttcccacttactatgtgtgagaagttgctcctgctctagatctcatgtgccagtactcaccaatttgtaaaaggcttagtaccttttaaagctgctctctccatttcaaacttgaacaaaaatttcattgaacattgaagtttggaactacttcttcgacatttcagcaaactcactgaaactcaaagacccacagatcacagtgaacagtttgaaacaaggctgtaccatggcagtcatgcaaagcatgggacagaagaaataccacggcagtgaactgtgaggataacttccattttttccctcggagagaacagtttacggggcagaggtgatatgttctgccttttgaagattactggcacacgttcagctttttcacctctctaatcgactggaagcagccagccgatcactagtcctcctcccatctcg

SEQ ID NO: 348478 - DNA, 1996 bp, Homo Sapiens
  misc_feature (1805)..(1805): n is a, c, g, or t
  misc_feature (1858)..(1858): n is a, c, g, or t
ccccgacctcattcatttctaccggtctctagtagtgcagcttcggctggtgtcatcggtgtccttcctccgctgccgcccccgcaaggcttcgccgtcatcgaggccatttccagcgacttgtcgcacgcttttctatatacttcgttccccgccaaccgcaaccattgacgccatgtcgggttattcgagtgaccgagaccgcggccgggaccgagggtttggtgcacctcgatttggaggaagtagggcagggcccttatctggaaagaagtttggaaaccctggggagaaattagttaaaaagaagtggaatcttgatgagctgcctaaatttgagaagaatttttatcaagagcaccctgatttggctaggcgcacagcacaagaggtggaaacatacagaagaagcaaggaaattacagttagaggtcacaactgcccgaagccagttctaaatttttatgaagccaatttccctgcaaatgtcatggatgttattgcaagacagaatttcactgaacccactgctattcaagctcagggatggccagttgctctaagtggattggatatggttggagtggcacagactggatctgggaaaacattgtcttatttgcttcctgccattgtccacatcaatcatcagccattcctagagagaggcgatgggcctatttgtttggtgctggcaccaactcgggaactggcccaacaggtgcagcaagtagctgctgaatattgtagagcatgtcgcttgaagtctacttgtatctacggtggtgctcctaagggaccacaaatacgtgatttggagagaggtgtggaaatctgtattgcaacacctggaagactgattgactttttagagtgtggaaaaaccaatctgagaagaacaacctaccttgtccttgatgaagcagatagaatgcttgatatgggctttgaaccccaaataaggaagattgtggatcaaataagacctgataggcaaactctaatgtggagtgcgacttggccaaaagaagtaagacagcttgctgaagatttcctgaaagactatattcatataaacattggtgcacttgaactgagtgcaaaccacaacattcttcagattgtggatgtgtgtcatgacgtagaaaaggatgaaaaacttattcgtctaatggaagagatcatgagtgagaaggagaataaaaccattgtttttgtggaaaccaaaagaagatgtgatgagcttaccagaaaaatgaggagagatgggtggcctgccatgggtatccatggtgacaagagtcaacaagagcgtgactgggttctaaatgaattcaaacatggaaaagctcctattctgattgctacagatgtggcctccagagggctagatgtggaagatgtgaaatttgtcatcaattatgactaccctaactcctcagaggattatattcatcgaattggaagaactgctcgcagtaccaaaacaggcacagcatacactttctttacacctaataacataaagcaagtgagcgaccttatctctgtgcttcgtgaagctaatcaagcaattaatcccaagttgcttcagttggtcgaagacagaggttcaggtcgttccaggggtagaggaggcatgaaggatgaccgtcgggacagatactctgcgggcaaaaggggtggatttaatacctttagagacagggaaaattatgacagaggttactctagcctgcttaaaagagattttgggggcaaaaactcagaatggtgtttacagtgctgcaaattacaccaatggngagctttgggaagtaaattttgtgtctggctggtatacagaaccagtttttanggactgggtaatccaacaggggactttaccaggaatggtgtatgatagccactccagccataccggaaagtaatggtctccaatatggcacaatgggtatgaaaaccaccaggccatatgccatatcccttgctactc

SEQ ID NO: 348479 - DNA, 691 bp, Homo Sapiens
gggacctcattcatttctaccggtctctagtagtgcagcttcggctggtgtcatcggtgtccttcctccgctgccgcccccgcaaggcttcgccgtcatcgaggccatttccagcgacttgtcgcacgcttttctatatacttcgttccccgccaaccgcaaccattgacgccatgtcgggttattcgagtgaccgagaccgcggccgggaccgagggtttggtgcacctcgatttggaggaagtagggcagggcccttatctggaaagaagtttggaaaccctggggagaaattagttaaaaagaagtggaatcttgatgagctgcctaaatttgagaagaatttttatcaagagcaccctgatttggctaggcgcacagcacaagaggtggaaacatacagaagaagcaaggaaattacagttagaggtcacaactgcccgaagccagttctaaatttttatgaagccaatttccctgcaaatgtcatggatgttattgcaagacagaatttcactgaacccactggctatttcagctcaaggatgggccagtttgctctaagtgggatgggaatatgggttgggagtgggcacagaacggggatctggggaaaaacatgggccctaattggcctccctggccattggtccacattcaaatcatccagccctttccctaaaaaagaggg

SEQ ID NO: 348480 - DNA, 778 bp, Homo Sapiens
  misc_feature (650)..(666): n is a, c, g, or t
gggcttcgtgaagctaatcaagcaattaatcccaagttgtttcagttggtcgaagacagaggttcaggtcgttccaggggtagaggaggcatgaaggatgaccgtcgggacagatactctgcgggcaaaaggggtggatttaatacctttagagacagggaaaattatgacagaggttactctagcctgcttaaaagagattttggggcaaaaactcagaatggtgtttacagtgctgcaaattacaccaatgggagctttggaagtaattttgtgtctgctggtatacagaccagttttaggactggtaatccaacagggacttaccagaatggttatgatagcactcagcaatacggaagtaatgttccaaatatgcacaatggtatgaaccaacaggcatatgcatatcctgctactgcagctgcacctatgattggctatccaatgccaacaggatattcccaataagactttagaagtatatgtaaatgtctgtttttcataattgctcctttatattgtgcgttatctgacaagatagctatttaagaaacatgggaattgcagaaatgactgcagtgcagcagtaattatggtgcactttttcgctatttaaggtggatatttctctacattcctgaaaacannnnnnnnnnnnnnnnnggactagaaaatgcaggcagtgttttcacaaaagtaaatgtacagtgatttgaaatacaattaatgaagggcaatgcatggcctttcaaataaaaaatattttgaagactgg

SEQ ID NO: 348481 - DNA, 920 bp, Homo Sapiens
ggtgaaggtgcctaatcattaacccaatcctgggaaagttccccttgttgggattaaccagtccctaaaactggtcttgtatacccagcagacacaaaaattacttcccaaagctcccattggggtaaatttgcagcactgtaaacaccattctgagtttttgccccaaaatctcttttaagcaggctagagtaacctctgtcataattttccctgtctctaaaggtattaaatccaccccttttgcccgcagagtatctgtcccgacggtcatccttcatgcctcctctacccctggaacggacctgtcaaggaaaacaattgcaaattgatcaattatgtctatgacacaaatcattgtggacagaaagaaacagatctattcatggtaggcgtgaaatgtttttacaatttttcagcttaagttttcacattcaaggttttactcaccctccaataccatttaaatggatttgtagacaacgatgtgactcgtaactaccaacatttcctatcagtcatccttacctgaacctctgtcttcgaccaactgaagcaacttgggattaattgcttgattagcttcacgaagcacagagataaggtcgctcacttgctttatgttattaggtgtaaagaaagtgtatgctgtgcctgttttggtactgcgagcagttcttccaattcgatgaatataatcctctgaggagttagggtagtcataattgatgacaaatttcacatcttccacatctgtaaggtgttgcagtgtggcaaaatagcaatgtacggagttttgcacaccacaacagccagaccaaaaataaaaagttagacaattgtattcccaagaaggtacgggctgcaaaaaatacagttaaaatggttatccatttcctgtaggaataccattgaggttg

SEQ ID NO: 348482 - DNA, 704 bp, Homo Sapiens
  misc_feature (133)..(133): n is a, c, g, or t
tacaacgtggaggtctacctaatccatcttggcttgttttaatgcaactaataacaataatacatcactaaatgaaatattcaggacaaatgctaaattagacagaatgtcagacaatgggtaaaaccagacntcccaggcaaattgggatgcaggtacattcactccccccagtcagcatctttgtattcagcacaccgcacccttctcttcagttacttatacttttcccctctgttttgatattttgcaaagtgggcctgatatggtttggctgtgtccccacccaaatctcatcttgaagtgtaactccacatgattcccacatgtctgtgggaggaacccggtgggaggtgattgaattatgggggtgggtctttcctgtgctgttctcatgatagtgaatgagtctcatgagatctgatggttttaaaaatgggggtttccctgcacaagctctctttttgcctgctgccatccacgtaagatgtgacttgctcctccttgtcttccaccatgattgtgaggcctccccagccatgtggaactgtaagtccaataaacctctttcttttgtaaattgcccagtcttgggtatgtcttcatcagcagcatgaaaatggactaatacaacaagtaaatcactgaacatttaatcccagcagttctcttttttcaaacttctcccgttgattttgtgtccc

SEQ ID NO: 348483 - DNA, 810 bp, Homo Sapiens
ggggaggagggacctacaaagactggaaactattcttagctccgtcactgactccaagttcatcccctctgtctttcagtgtggttgagatataggctactcttcccaactcagtcttgaagagtatcaccaactgcctcatgtgtggtgaccttcactgtcgtatgccagtgactcatctggagtaatctcaacaacgagttaccaatacttgctcttgattgataaacagaatggggtttgggatcttagcaattctcacaattctcatgtattccacagcagcaaagtttagtaaacaatcatggggcctggaaaatgaggctttaattgtaagatgtcctagacaaggaaaacctagttacaccgtggattggtattactcacagaacaaacaaaagtattcccactcacggaaagaaatcgtgtgtttgcctcaggccaacttctgaagtttctaccagctgcagttgctgattctggtattgatacctgtatcgtcagaagtcccacattcaataggactggatatgcgaatgtcaccatatataaaaaacaatcagatcgcaatgttccagattattcgatgtattgcaacagtatctggatcagaacaaaaattccaaaatttattgtcctaccattgacctctacaactggacagcacctcttgagctggcaaagaatcgccaggctctccacggactcacggtacagggcgcacaagtcaacacaggacatcgactcatcgtgatgactgaggacgcaggtgataacacctgtcaatcatacacaacgaaaatggagcca

SEQ ID NO: 348484 - DNA, 442 bp, Homo Sapiens
ctgtaaggtgtgggtgtcgagccctctggcagagggttaacctgggtcaaatgcacggattctcacctcgtacagttacgctctcccgcggcacgtccgcgaggctttgaagtcctgagcgctcaagtttgtccgtagtcgagagaaggccatggaggtgccgccaccggcacgcgggagctttctctgtagagcattgtgcctatttccccgagtctttgctgccgaagctgtgactgccgattcggaagtccttgaggagcgtcagaagcggcttccctacgtcccagagccctattacccggaatctggatggggaccgcctccggggagctgtttgggcaaagacacagtgaacactagtctggaatgtattaccgaaataaagatgcctttaagccattttgtaattgcaggagctgtcacgggaagtctttttagg

SEQ ID NO: 348485 - DNA, 1415 bp, Homo Sapiens
ggctggaccggtccggattcccgggacttcctgtgtcgtatttccaaggactccaaagcgaggccggggactgaaggtgtgggtgtcgagccctctggcagagggttaacctgggtcaaatgcacggattctcacctcgtacagttacgctctcccgcggcacgtccgcgaggacttgaagtcctgagcgctcaagtttgtccgtaggtcgagagaaggccatggaggtgccgccaccggcaccgcggagctttctctgtagagcattgtgcctatttccccgagtctttgctgccgaagctgtgactgccgattcggaagtccttgaggagcgtcagaagcggcttccctacgtcccagagccctattacccggaatctggatgggaccgcctccgggagctgtttggcaaagatgaacagcagagaatttcaaaggaccttgctaatatctgtaagacggcagctacagcaggcatcattggctgggtgtatgggggaataccagcttttattcatgctaaacaacaatacattgagcagagccaggcagaaatttatcataaccggtttgatgctgtgcaatctgcacatcgtgctgccacacgaggcttcattcgttatggctggcgctggggttggagaactgcagtgtttgtgactatattcaacacagtgaacactagtctgaatgtataccgaaataaagatgccttaagccattttgtaattgcaggagctgtcacgggaagtctttttaggataaacgtaggcctgcgtggcctggtggctggtggcataattggagccttgctgggcactcctgtaggaggcctgctgatggcatttcagaagtactctggtgagactgttcaggaaagaaaacagaaggatcgaaaggcactccatgagctaaaactggaagagtggaaaggcagactacaagttactgagcacctccctgagaaaattgaaagtagtttacaggaagatgaacctgagaatgatgctaagaaaattgaagcactgctaaaccttcctagaaacccttcagtaatagataaacaagacaaggactgaaagtgctctgaacttgaaactcactggagagctgaagggagctgccatgtccgatgaatgccaacagacaggccactcttttggtcagcctgcttgacaaatttaagtgctggtacctgtggtggcagtggcttgctcttgtctttttcttttctttttaactaagaatggggctgttgtactctcactttacttatccttaaatttaaatacatacttatgtttgtattaatctatcaatatatgcatacatgaatatatccacccacctagattttaagcagtaaataaaacatttcgcaaaagattaaagttgaattttacagttaaaaaaaa

SEQ ID NO: 348486 - DNA, 554 bp, Homo Sapiens
  misc_feature (67)..(67): n is a, c, g, or t
  misc_feature (70)..(70): n is a, c, g, or t
  misc_feature (72)..(72): n is a, c, g, or t
  misc_feature (142)..(142): n is a, c, g, or t
  misc_feature (500)..(500): n is a, c, g, or t
  misc_feature (508)..(508): n is a, c, g, or t
  misc_feature (523)..(523): n is a, c, g, or t
  misc_feature (541)..(541): n is a, c, g, or t
gttaacctggggtcaaatgcacggattctcacctcgtacagttacgctctcccgcggcacgtccganggntntggaaggtcctgagcgctcaagtttgtccgtagtcgagagaaggccatggaggtgccgccaccggacgcngggagcttttctctgtagagcattgtgcctatttccccgagtctttgctgccgaagctgtgactgccgattcggaagtccttgaggagcgtcagaagcgggcttccctacgtcccagagccctattacccggaatctggatggggaccgcctccgggagcttgtttgggcaaagatgaacagcagagaatttcaaagggaccttggctaattatcctgtaaagacgggcagcttacagcagggcattcatttggcttggggtgttattgggggggaataaccagctttttatttcatgttaaaacaacaatacattgagcagagccagggcagaatttatcattaaccgttttatggntgtgaatnttgcaatcgtcttgnccacaagaggtttcattngttattggctggg

SEQ ID NO: 348487 - DNA, 896 bp, Homo Sapiens
gggggcggactgcggcgcacttccgtagaggtggacatggcgtgcggctttcgccgcgctattgcttgccagctttccagagtgttgaatcttccaccagaaaacttgatcacatcaatatctgcagttccaatttcccaaaaagaagaagtagctgattttcagctttctgtggattctttattggaaaaagacaatgaccattcaagaccagatattcaagttcaagccaagagactagcagagaagctaagatgtgatacagtggtgagtgaaatcagtactggtcaaaggactgtaaatttcaaaataaacagagagctcttaacaaagacagtgctacaacaagtaattgaagatggctcaaaatatggattaaaaagtgaacttttctctggacttccccagaagaagattgtggttgaattcagttcacctaatgttgccaaaaaatttcatgttggacatttgcgttctaccatcataggaaattttatagcaaatctcaaagaagctttaggacatcaagtaataagaataaattaccttggcgattggggcatgcagtttggtcttctgggaactggcttccagctgtttggctatgaggaaaaactgcagtccaatcctctacagcatctctttgaaagttatgtacaagttaataaagaagcagcagatgataaaagtgtagcaaaagcagcacaggagttccttccaacgattggaaactggccgatgtgcaagcactttcactggggcaaaaaatttcgggacttgagcattgaagagtacattcgggtttacaagcgtctgggagtatattttgatgaatattcaggagaatcattttatcgtgaaaaatctcaagaggtcttaaagttgctggagagtaa

SEQ ID NO: 348488 - DNA, 801 bp, Homo Sapiens
tagggatctgcggcgcacttccgtagaggtggacatggcgtgcggctttcgccgcgctattgcttgccaggtatggatcccggagcgcgcagaggagtccctgaggagctagggaccccaaaggcctttcaccgctgcgggccagtcctcagtcagctggagggtgggtcccacggaatcctgttagtttctaccacctcctcccccttctctggagctggtggagcttcagaagtcctgtggagcgtcggctgggatcagtttgtctcggtgaaaagtaaactttgaaagctttccagagtgttgaatcttccaccagaaaacttgatcacatcaatatctgcagttccaatttcccaaaaagaagaagtagctgattttcagctttctgtggattctttattggaaaaagacaatgaccattcaagaccagatattcaagttcaagccaagagactagcagagaagctaagatgtgatacagtggtgagtgaaatcagtactggtcaaaggactgtaaatttcaaaataaacagagagctcttaacaaagacagtgctacaacaagtaattgaagatggctcaaaatatggattaaaaagtgaacttttctctggacttccccagaagaagattgtggttgaattcagttcacctaatgttgccaaaaaatttcatgttggacatttgcgttctaccatcataggtaagtgtttagtttcacataaaatgctaaacgttcctttgaggaagtatttgatagttcaatttaatgttttaatgcttaaataacaaaatagc

SEQ ID NO: 348489 - DNA, 1146 bp, Homo Sapiens
  misc_feature (1003)..(1003): n is a, c, g, or t
  misc_feature (1045)..(1045): n is a, c, g, or t
  misc_feature (1113)..(1113): n is a, c, g, or t
gagcgaggcctgggtggcgaattcggcacgacgtgcggctttcgccgcgctattgcttgccaggtatggatcccggagcgcgcagaggagtccctgaggagctagggaccccaaaggcctttcaccgctgcgggccagtcctcagtcagctggagggtgggtcccacggaatcctgttagtttctaccacctcctcccccttctctggagctggtggagcttcagaagtcctgtggagcgtcggctgggatcagtttgtctcggtgaaaagtaaactttgaaagctttccagagtgttgaatcttccaccagaaaacttgatcacatcaatatctgcagttccaatttcccaaaaagaagaagtagctgattttcagctttctgtggattctttattggaaaaagacaatgaccattcaagaccagatattcaagttcaagccaagagactagcagagaagctaagatgtgatacagtggtgagtgaaatcagtactggtcaaaggactgtaaatttcaaaataaacagagagctcttaacaaagacagtgctacaacaagtaattgaagatggctcaaaatatggattaaaaagtgaacttttctctggacttccccagaagaagattgtggttgaattcagttcacctaatgttgccaaaaaatttcatgttggacatttgcgttctaccatcataggaaattttatagcaaatctcaaagaagctttaggacatcaagtaataagaataaattacccttggcgaatggggcaatgcaatttgggtctttctggggaactggccttcccagctggtttgggctatgaacgaaaaactggcagtcccagtccctctacggcatttacttttgaagatttatggtgccggtgcagctaaagagaacggccgaatgggtaaacagccggcaagactccgtcctactgaccgagacgtccatacgcacgaacatgaacacctgaaatgacagaacactactctantcctctcctcaaagtagcgcaccaacaatttgaaagatcatncggactaggatccgcgacacgtgagacgggaagacttaacaaggaagtgatagagatcaccctgcaangactgaccgaacgatgacgcgcgccggagagcc

SEQ ID NO: 348490 - DNA, 3152 bp, Homo Sapiens
  misc_feature (148)..(148): n is a, c, g, or t
  misc_feature (152)..(152): n is a, c, g, or t
  misc_feature (256)..(327): n is a, c, g, or t
  misc_feature (3062)..(3099): n is a, c, g, or t
gcctctattgctttattgtggtgttttatacaagtggcttaaaataaatggggtaccaaaggccagctacatggcccaaatctccccagtttcttcaggctgctgtctaggatgcctaaccccggggtacccgctgaccaccccccancccntgcaaagggcagggctgtgggtaactgaggaggaggtcacattctggggttagaaggggcccaatggatgggaattcttcatataaaagaggaaatgcctattnnnnnnnnnnnnnnnnnnnnnnnnnnnnnnnnnnnnnnnnnnnnnnnnnnnnnnnnnnnnnnnnnnnnnnnntaatcaaaggtcccttgtctacccctgagggaagggggaggaaccaggcactgctggtgagagtcacagtggccacaatctcctgtatggcagcagctggtaggctgagcccaggcactgtaagagcaagcacatgacggccaggacacccagtcacacaccaggagcgcccggcccagcctggccccacagtgggctacataacatccacaaagaactcgctgggattgcccatggccatgtggaagctttggcggctggctgtcagttctgggggcacagagcccaggtctctgactggaggggcccccggaggctgcactgctggagggactggaggtggaggtgggggcatcatgaccaccatcatggggttgtaggggagggccatgccagggggcggtccatagggatggagccctgggtgggctcggagattaggggcacccccagttgagcctctggatggaggagggcccccatcgctagtcccacttgcttccccaccccgccgaaggctgccccctcggctggagggctcagactcactgccactgccggacttggactcgggggcccgctcctcgggcctccccgtgcgccctgcccccccatcactccgtgtcgacccactgctccggctgccctcactatgctggctgctggcactgcccccaccataggtgtaagatgaaagctcatggtagggtggaggctgcgggctgtaggggtgtggggcagggtactggtaggagaaagtgggcagcaggggccagggggtggccccaggcagaggagccagggtatcctggtctgaagccccactggagccatcgttgtcattgagagacaggttgactaggtagctctcacagccaccactgaggtctccgaagacgtaatagcactgctcagagaaggtgatcttgttgacggtgtgtcggatcaggcctgctttgagcagcccgctggcatacttgcgggcctcccgccgctcaggaaagccctccacgtgatggtagagccagtcaaccacatccgagcccagaaaggcattagggatggtgatcttgagccacatgcggtcccggacttccagtccagactctggagctgccatggccttggtcaccgatgccatgtccgtatggacggagagaccccggccttcacagccatcaggcaaagacgatccagatgtaatggtgctcatggaggaggaacctggataggctgggaaggtgccagtcagagccgcggaatgggacacccaggcagcaggggtcaattggctggatgggctcatttcgggggagaatgaaatagccctgaggagagggatcccagcacttggccacagtcagcacaatggggccaggcttgtgcacaatgtccctcagcacccgcacagcgtcatcgttgctcatgttctcaaagttcatgtcattcacctgcaaaagcatgtcccctggctcaatgcgcccgtcggccgccacagccccacccttcatgatggagccaatgtagatgcctccgtctccccgctcattgctttggccaacaatggagatacccaggaagttgtacttctccatgtttagcgtgactgtgatgatattgagagacattgtggaatctgtgacgctgctgaaggatgacgtcctctccaggcggggtggcctctgcttccttcgccgccggtggcgcttaaggaggcgggaggcactgctctgctccgtggagctgctgaacctgctcatggtgtcctcctcgtccgagtcccccagactggtactctccagctcgctggtcatgagggtagaggagctctcgtatccggccaggtggcgctccagccttgaggggccaccagtcctgtggcccccagcgccatgctcactgctgtctctcctgcgaggccgctcccgcctcagtgacactactgactcggtttctgtctcaggctccagattctcatggctgctggacacattagggtggaaggatggaggccttgagtccccaatgccgctggtcctctcgggtggcaaaggaggtaaaggtggggctggaggcgccagttctgcccgaggctcatggactggaggggccatctcgggttggggattatctgaggacaccagccaggataccacccttccgttgaagcaggggaggcgggcgttgtcatctgaaatttcttccttcaccaccccgaaatcctgatccatagacttgaaaaagtacttggcgcccgcgggccgctgcaggacgctcttgaaatcgccgagggtgatgcgctcggcggggacagggatcttcaccaggtagggagtctcttcctcatccaggtggtaaatcaccttcgtctccccaaccccaccgcccccagtgctgctacccgccatggtctcgcccgcgcgctcccgggctccaccgcccacccaaagggctaatggcccctgccgcgcctgcgcacacccgcaaaccgacgcgcgagcgcggacaggactgacccagtacgggagagaagcaaaggggaaaaagcacggatctgcgagggtgcaggcggggggcaggccacagggtgcgactcaaagccccggtctcagcgccgccgcgcgccaccgccaccgacgccgcgagcttcctccaggtacccgcccacctctcctcatgtcacgtgacttaaagccgctctcgacgaattcgagctcggccgatttggcctgatnnnnnnnnnnnnnnnnnnnnnnnnnnnnnnnnnnnnnngccgccaccgcgtgagcccagtcgcccatagtagtcttcattcactatgtgcg

SEQ ID NO: 348491 - DNA, 397 bp, Homo Sapiens
  misc_feature (76)..(106): n is a, c, g, or t
ggccactgtgactctcaccagcagtgccatggttcctcccccttccctcaggggtagacaagggacctttgattannnnnnnnnnnnnnnnnnnnnnnnnnnnnnngggggttaaaatagagtttcttacatttttgggacttttttaataggcatttcctcttttatatgaagaattcccatccattgggccccttctaaccccagaatgtgacctcctcctccagttacccacaggccctgccctttgcagggttgggggtggtcagcggtaccccggggttaggcatcctagacagcagcctgaggaagctgggagatttgggccatgtagctgcctttgttactctatttattttagtcacttgtataaaacaccaaataaagcaatagaggc

SEQ ID NO: 348492 - DNA, 1187 bp, Homo Sapiens
gagtccaatagttctcttatgttttctttcattatctttattttaaatttgatattttagaataggaaattatctttcacagcaatgcctcctggtctgataatacagtatctcatttctgaatgtaaagatttaaaataaatcaaaatgaacattaaggcgtacaaagctactttaagtctgctcttaagatcagtttttgctcatattcaaaatacatggaatgttggcacaaaactgaagctgctgtagaaagatcacagatgttctgtgggttactcaaacttccatttctctaaaaacatacccttacatggtcttaattttatgaatttaagtgttgagaaatatctaaataataagtaacaattaaaataaaatgttttatttgtaaattatgtacagaatacactttacgttacgccaatgaaatggggagggaggagggagagccatcaccttccaacaaatgctgttcactttctctgctggagacgaccatctttctctcagtcagacgtacaaatcagtgtggatttcctacattggaaaaataatttagctaaaccagaagtgttgctgcattgttactagttggcttgtttccacaaaatagttttgaactctgctaactcagaatcttaaaagaaatctcctggtataattttataatgaaaaataaaaactatcaaggacaatgagtttacacatcttaaagaaactgtgaaatggctacataactatgcataatgtgaaatgttggagtttctttgttccttttaaagttatttttgattagtctaacagtaaaaagccataaaactatcaaaaattgccattaatgtaaatttaactgtggaaagtacatctttgataactgtcaaaatgaatgagacctacttactgtaaaattatcaaatggataaaacatattaatggctttaaactgtaccaataatagtgccaatattctataaaatgaaggaccgaatataactgcttgaatgtcaaatacatttcagtagatagatttaaagaatgctacaaatgccatgtgttcaatatggtaatcagccaacatagaaaatccaacctcttgtacttattcattcagtcccaaaattagtcagattatgatttttcatgtgaagatttaggtgtttctccatcattttcctcttcctccc

SEQ ID NO: 348493 - DNA, 1239 bp, Homo Sapiens
cctgttcaactttcttcgggtggggacgacccttctttcttctcagtcagaaggtacaaatcaggggggaatttcctacattggaaaaataattttaggttaaaccagaagtgttgctgcattgttactagtgggcttgtttccacaaaatagttttgaactctgctaactcagaatcttaaaagaaatctcctggtataattttataatgaaaaataaaaactatcaaggacaatgagtttacacatcttaaagaaactgtgaaatggctacataactatgcataatgtgaaatgttggagtttctttgttccttttaaagttatttttgattagtctaacagtaaaaagccataaaactatcaaaaattgccattaatgtaaatttaactgtggaaagtacatctttgataactgtcaaaatgaatgagacctacttactgtaaaattatcaaatggataaaaacatattaatggctttaaaactgtaccaataatagtgccaatattctataaaatgaaggaccgaatataactgcttgaatgtcaaatacatttcagtagatagatttaaagaatgctacaaatgccatgtgttcaatatggtaatcagccaacatagaaaatccaacctcttgtacttattcattcagtcccaaaattagtcagattatgatttttcatgtgaagatttaggtgtttctccatcattttcctcttcctcatcctcttcacaatccccatctgtttgctgttccagttcctcttttgttatcatttcaaaatcatttccatttccactactgtgctgggatcgatcatcttccctcctgtcactgtccgtgtctgaatgccgttctccccccgagccttctgttccatgatttcctggtcctactttcccctcctcatcttcctttttctcactgtctgacttttcctcactgtcggacttctgttgctttttggtttcagacttctcatctttctttaagtctgcttttggtcctttgtattcatgtgtgtacagaggcctgaaggagtcaatgaagcccacatcagcagtcagatttggcaagaaccaaaagtggtgccttcctccagttatgagccaaatgatgagaaatagaatgcatcgagcaacagcaaggagaagaatactggctacaaaacagcctgcacccacactgaggtaataaacacctactctcatttctgctggccaaagacggtccggtt

SEQ ID NO: 348494 - DNA, 1222 bp, Homo Sapiens
  misc_feature (1063)..(1126): n is a, c, g, or t
tatcgctttcagcgagggtagcgacttgaccgtagtgtaacatgatggtgcttcccggaagcagcaccaccgtgagctcagtgaccttcatgagttccagcgtggatcatccgcgcctggtgtatctgcacgtgccatccctgcccacgcgtcgattgtttgccagagttggtttaaaccccagtttcgaatgaaggatggggccaatgcgatgccaccattaatctgggggcttctgttacactggttgggagcttcgtgatggtgcgcacgtgttgcaacccgtccttgtgcatggagtcaaaaagcacaaggcagaggttacccatagacggacacccctgccctgaagttctgagtaggtcatcatcaaaatgatggacagcagttccaccgccagcagaatgccacgatgccaagtttctgggcatgacactgttgtttcagatacttcaagatagcactgatctctctatcgatcttctgggcatttctgtgttttcagccactcagggaagatagaccagtcgccagaggggtccccaaggctcttgccctacaaagaagtctggaacaatggctgtgtatccagttcctgagatcatgtcagctatatatctggtattgggcaactgccagccaaatatatcttgaatgacaatcacagctttgcctgcatcaacgggggatttggtgacataagccttgatgtgctcgacttgaacttcacggcctagccctccatactcaagtctgtggccaatgtcacacggacaaggataagcttcgttagccattggcagagatttaagtcgggcttgtcccgcggcctgagactgcgcatgcaccgcgcggaggccgaacccagaggaggcggcgtggcgccgggcggggacgcgagagggacgtggacgcggcgacacgaggacgcggggatcctgcgggaccagtggctccagtcgtagcctcctgggagagcacaagcccggagggggcggagaggtggaggagggaggcctgggggaagagaaatctgcaaagtcggggaagggaaggaaggccnnnnnnnnnnnnnnnnnnnnnnnnnnnnnnnnnnnnnnnnnnnnnnnnnnnnnnnnnnnnnnnnggaagaagtggggtggtcggagggtggggtagggaggaagagggagggagagatgggagaggctccaagataaagaaaggtgcagggagagccgct

SEQ ID NO: 348495 - DNA, 763 bp, Homo Sapiens
ggggcgagtggcgcaggtaacagaccgcaggggcaagacagccggcgcgggaggaggatggcgctgtcggtgctgcgcttggcgctgctgctcctggcagttaccttcgcaggtagcgctcggagcggtcctggcgagcggggacctccggagaaaagcgggtttgggagtcagaccggcggcggaccctgccctgctccgggcggcctcggcgacggtacccgcgcgcccgttactggcggttccccaaaggacctgccagaacgccaaactgctctcagtatagattaccaggatgtcccagacactttaaccctgtgtgtggcagtgacatgtccacttatgccaatgaatgtactctgtgcatgaaaatcagggaaggtggtcataatattaaaatcattcgaaatggaccctgctgatggagcagtttacagaaaagaagatggagagaccaccttcactggcagactagataaattgcatttcccctttttctcttttcctgtgtttctttacatgagatttgttaacacacattttctgagagcaggtatggaagacagccatgtgtagtgatggataatttaaagaaaaaaagaatccttgtttcttggcttttgctcctggagttaagcttactgcccaggtgacttgtgcattgctttatttagttgaaataaaatcagcattgaattcaaaaaagacacagcaataacaacgaaacactgcatctcgcgcgaccacgcaacagaaacgcggg

SEQ ID NO: 348496 - DNA, 1202 bp, Homo Sapiens
  misc_feature (592)..(594): n is a, c, g, or t
  misc_feature (596)..(596): n is a, c, g, or t
  misc_feature (630)..(641): n is a, c, g, or t
  misc_feature (817)..(825): n is a, c, g, or t
  misc_feature (1054)..(1054): n is a, c, g, or t
agcgggcgagtggcgcaggtaacagaccgcaggggcaacacagccggcgcgggaggaggatggcgctgtcggtgctgcgcttggcgctgctgctcctggcagttaccttcgcagcctctctgatccctcaatttggtctgttttcaaaatatagaacgccaaactgctctcagtatagattaccaggatgtcccagacactttaaccctgtgtgtggcagtgacatgtccacttatgccaatgaatgtactctgtgcatgaaaatcagggaaggtggtcataatattaaaatcattcgaaatggaccctgctgatggagcagtttacagaaaagaagatggagagaccaccttcactggcagactagataaattgcatttcccctttttctcttttcctgtgtttctttacatgagatttgttaacacacattttctgagagcaggtatggaagacagccatgtgtagtgatggataatttaaagaaaaaaagaatccttgtttcttggcttttgctcctggagttaagcttactgcccaggtgacttgtgcattgctttatttagttgaaataaaatcagcattgaattcnnnanaacaccataatcaaccgacccccaataaccttannnnnnnnnnnntcttccctttcacttatcacaacctccctaccctcctttcggccccccgctcttcttctttttctcggtgggggcctctccatttcacttattctcttccgaacgccccatgattccgcggcgcttcccctctttctccggcaacggggggccccctccttccgagggtcaccccnnnnnnnnncccaagaaactgtccccttcttcttcaccgcataccctcgctttgaaaacaacgaccggagccttggacttctcttgcgcaacagcatccccccctcacctgggcggacgtcacccaccttgccttacattacgccacccctctctcccctctgtactgcctcgtcatacgaagatacaaccaatcacttacgacctctcaaacagtggaccacccactcgcgtgtctnacactctttcctctccttcccgcgccctattctttctctaccccctctcccctacttgcgagacttacctacattcatacgctcacccacctcactatactctcccttatcgcgcgtctatatggccccgatcacccttccgccttgg

SEQ ID NO: 348497 - DNA, 1989 bp, Homo Sapiens
atgcacgtcaagcaaaccgggaaaggagaggatcccggagccgcgtgatggccagaggcctgggggccccccactgggtggccgtgggactgctgacctgggcgaccttggggcttctggtggctggactcgggggtcatgacgacctgcacgacgatctgcaagaggacttccatggccacagccacaggcactcacatgaagatttccaccatggccacagccatgcccatggccatggccacactcacgagagcatctggcatggacatacccacgatcacgaccatggacattcacatgaggatttacaccatggccatagccatggctactcccatgagagcctctaccacagaggacatggacatgaccatgagcatagccatggaggctatggggagtctggggctccaggcatcaagcaggacctggatgctgtcactctctgggcttatgcactgggggccacagtgctgatctcagcagctccattttttgtcctcttccttatccccgtggagtcgaactctccccggcatcgctctctacttcagatcttgctcagttttgcttccggtgggctcctgggagatgctttcctgcacctcattcctcatgctcttgaacctcattctcaccacactctggagcaacccggacatggacactcccacagtggccagggccccattctgtctgtgggactgtgggttctcagtggaattgttgcctttcttgtcgtggagaaatttgtgagacatgtgaaaggaggacatggtcacagtcatggacatggacacgctcacagtcatacacgtggaagtcatggacatggaagacaagagcgttctaccaaggagaagcagagctcagaggaagaagaaaaggaaacaagaggggttcagaagaggcgaggagggagcacagtacccaaagatgggccagtgagacctcagaacgctgaagaagaaaaaagaggcttagacctgcgtgtgtcggggtacctgaatctggctgctgacttggcacacaacttcactgatggtctggccattggggcttcctttcgagggggccggggactagggatcctgaccacaatgactgtcctgctacatgaagtgccccacgaggtcggagactttgccatcttggtccagtctggctgcagcaaaaagcaggcgatgcgtctgcaactactgacagcagtaggggcactggcaggcacagcctgtgcccttctcactgaaggaggagcagtgggcagtgaaattgcaggtggtgcaggtcctggctgggtcctgccatttactgcaggtggctttatctacgtagcaacagtgtctgtgttgcccgagctgctgagggaggcatcaccattgcaatcacttctggaggtgctggggctgctggggggagttatcatgatggtgctgattgcccaccttgagtgaggggtggataaactacccctgccccaaacctctacccctaactccaggtcaggggtgcgtagaggttgggggccctggccagggacatctgccaaaggaaggaactgtagcctgggagaatggttactttggcattagggccttcaagggctggcagtcttacagaggctggagcggtgagaatgagaggccagagggaccatagtgttgggcactgcctgaccatgttgcatttgcgaaggctaaatgggggccatgaagaacgctggaaaggacaggggggtgatggcagccctacctggtgtcccctaccccacctgttctcgcaaaacaagttgctacaacggaaagttctcccaagtccagtttcctttctccccccattggggggaggcttccgggaaaaacagactccgggacagaaacggtaaccgggaggacttctggcataacctcccaacattcaatcctgttgcccctatttctggaacgaattgggcccgattgctttggcaccacccatccccttact

SEQ ID NO: 348498 - DNA, 849 bp, Homo Sapiens
ggcgggactgccacgtccaagcaaaccgggaaaggagaggatcccggagccggtgagaattctctgttttttctctaccatcctttccaggccttttcctcacctaatgagtcgtagagacgagggcccagagagtctgtaaagtggctggtgaaagattagtgtcccagggccctacatccgggaggtggttcgggataaagagaactagtcttgggaacaatgtaggtgggaacttaagggaatgggagagcggcccatagaggtggacggagggcgcgattggagtaaagcggaccctgtgtaggtatagagttgagtcaagtggagtcactgcctctgtccctctggtcagcgtgatggccagaggcctgggggccccccactgggtggccgtgggactgctgacctgggcgaccttggggcttctggtggctggactcgggggtcatgacgacctgcacgacgatctgcaagaggacttccatggccacagccacaggcactcacatgaagatttccaccatggccacagccatgcccatggccatggccacactcacgagagcatctggcatggacatacccacgatcacgaccatggacattcacatgaggatttaacaccatggccatagccatggctactcccatggagagcctctaccacagaggacatggacatgaccatgagcatagccatggaggctatggggagtctggggctccaggcatcaagcaggacctggatgctgtcactctctgggcttatgcactgggggacacagtgctgatctcagcagatccattaaagtccatcttccttatccccgtgaagtcgaaatctcc

SEQ ID NO: 348499 - DNA, 436 bp, Homo Sapiens
  misc_feature (17)..(17): n is a, c, g, or t
tcagaaacaacaagccntgaaggctacaactgacgaggaaggttctgtttctaatatagccacagaaataaaggatggagaaaaatctgggacagtgtcttctcagaaaaaaccagccttgaaggccacaagtgctgagaaagattctttttcgaatataaccagagaaaaaaaggatggagaaatatctaggacaggtatcagcaaacaggtgtccaaggtgatcaattcaggactcttccactgaagagatgtgaagttgtcttctcagaaaccaccagccttgaaggctacaagtgacaaggaagattctgttttgaatatagccagagaaaaaaaaggatggagaaaaatctaggacagtgtcttctgaccaaccaccaggcttgaaggctacaagagacgagaaagattctcttttgaatatagccagagg

SEQ ID NO: 348500 - DNA, 2363 bp, Homo Sapiens
  misc_feature (96)..(109): n is a, c, g, or t
  misc_feature (207)..(207): n is a, c, g, or t
cgggtcacggggaatcgagggaagaatacggtcgtagaatgggagaaggcaggttaggggacaacagcgcggcggaaggggggcggatgtagagcnnnnnnnnnnnnnnaatccgaggagatgtgggatgagtattaccttatcggggataatcacttcggtataggagagcggaggagatgtgaggaggtaattatgaggtagtgngtataatttgtgtgtggcatgaaatgtagatcattgtgcatgcatatataatatgacaaaaaggagggagtagcgagaactagtggggagtttgaaggttatgacgtatccggtggtggcgatgatgagcgagagtgaatagtggggtttgtgagagggggatgggcgtggtgtgagcgagggatgtgtgactgagggagaggagacgaggtacgtaagtggaaggtgttatgggttggggtgaagatacagaggcggtgtggggggcgataggaaggaatgaggaaaagtgggtacgtggttatatgacatatgtggagggtaccgggtgggcaaagagggagaactggagtgggaaggagtgacagaatatcgcgctttggactgtgagtgggtatataataagctccgggggtgatgattagacttggtgggatagggttggtttgggggcaaagaggacggataaggggaagtgggacatttaatagagaggggagactgtctgggggatagcgtgtatcatgtatgtggaataaaaggagaaggggggcctgtgtgggagtcgcgtgtgctcgaagtgtgggtgggattagtggaagtttacgcatggagtagggtgaggaatttgcatggggatgtaggttgagggatgaattgagaggcagagcaggggtgataggacgctttgtcttgtcaggtggatagtggtccagcggccgcagaatccggaggtgcagctgccacctgcaagcggtgcgctgactgcagcagtggcaaccccggatcccgtcctcccgcctcacacccatcagcacggaccccgggggcgacgcagtggagaagtcgggctgtgggcccaccggcggcaccaggcggagaagcaccactcaaccccatccctgggctgcagagggcccagcgcgggggcctcggagcatcgggagccggtggaagaggagaagagcgcgcaggccacagtcaaacaggccctggggcagggcgcgccttgcggctccagggagccccgccagcccgcggcacctgagcagcaaccgccgcctgcactgggcgccgcgagagagctgctagggcggtttctccgcctagggcctgttgggcggggccggctaaggtgcacgtgctcgctggtcctaaccgttctgttgggcgtttctgctgagaggcgggaggcgctgagagtatgtgcaaaggtccgtggacgcaccgcattgcttgttgttgcgcttcggaggcggagatccccgaaggcgagctgaaatacggctggagcgttcccaggatacaatttgcagcagacgagtatggaagactaccagccggagaggtggcccaccctcagggagcgcttgtgctccgacggcttctcatttccccaataccacattaaatcatctcatatgaggaggatccacagagctgtcttctatggtaatctggagaaactggagtaccttctgctcacgtatcatgacaccaatgagagagacaaggaggaaagcatccggtgaaagacagagatcacatttcaactagattcttaggaagtatggattcactaacttcagcgaagcttaccctgaaagaagcagatcccagttcaaaagtagccataagaaggaaggattcaccacctccaggaaaagtgtcttctcagaaacaaccagctgagaaggctgcaagtgacgagaaagattctgtttcgaatatagccacagaaataaaggagggaccaatatctgggacagtgtcttctcagaaacaaccagctgagaaggctgcaagtgacgagaaagattctgtttcaaatatagccacagaaataaaggatggacaacaatctgggagacataattttgcaaagcacatttaatgtcatgttcagccaagatagacaagaacttctcttccccgaataaatcagcgggggactctttgaagctgcacattctgattcagcaggcctgagattctacatttgtatgtcttctcagaaacaatcggcctggaaggttatatttaaaaagaaagtttctcttttgaatattgccacaagaataatgggtggtcagaaatctggaacagagtatcctgagaatctgcccaccatgaaaaaacaaattcagtactataga

SEQ ID NO: 348501 - DNA, 1697 bp, Homo Sapiens
  misc_feature (1142)..(1142): n is a, c, g, or t
  misc_feature (1288)..(1288): n is a, c, g, or t
  misc_feature (1402)..(1402): n is a, c, g, or t
tcttatttccccaataccccattaaaccgtatcatctgaaggggatccacagagctgtcttctatcgtgatctggaggaactgaagttcgttctgctcacgcgttatgacatcaataagagagacaggaaggaaaggaccgccctacatttggcctgtgccactggccaaccggaaatggtacatctcctggtgtccagaagatgtgagcttaacctctgcgaccgtgaagacaggacacctctgatcaaggctgtacaactgaggcaggaggcttgtgcaactcttctgctgcaaaatggcgccgatccaaatattacggatgtctttggaaggactgctctgcactacgctgtgtataatgaagatacatccatgatagaaaaacttctttcatatggtgcaaatattgaagaatgcagcgaggatgaatatccgccactgttccttgctgtgagtcaaagaaaagtgaaaatggtggaatttttattaaagaaaaaagcaaatataaatgccgttgattatcttggcagatcagccctcatacatgctgttactcttggagaaaaagatatagtcattcttcttctgcagcacaatattgatgtgttttctcgagatgtgtatggaaagcttgcagaagattatgccagcgaggctaagaacagagtcatttttgaactaatttatgaatatgaaagaaagaaacatgaagagctttctataaatagcaatccagtgtcttctcagaaacaaccagccttgaaggctacaagtggcaaggaagattctatctcgaatatagccacagaaataaaggatggacaaaaatctgggacagtgtcttctcagaaacaaccggccttgaaggatacaagtgacaagaacgattctgtttcgaacacagccacagaaataaaagatgaacaaaaatctgggacagtgtcttctcagaaacaaccggcctggaaggatacaagtgacaagaaagattctgtttcgaataaagccacagaaataaaagatgaacaaaaacctgggacagtgtctcctcagaaacaatcggcccagaaggttatatttaaaaagaaagtttctcttttgaatattgccacaagaataacaggccggttggaaaatctnggaacagagtatcctgagaatctgcccaccttgaaggctacaatggaaaattaaaaattctgttctgaatacagccaccaaaatgaaagatgtacaaacatccacacagaacagacttagaaatggcatcagagggagagcaaaangaggcttgaagaatatgaaaataaccagccacaggtgaaaaacccaaatacattctagggatgaccttgatgacataattcagtcatctcaaacagtctcagaggacggtgacntcgctttgctgtaattgtaagaatgtcatattactcattgatcaacatgaaatgaagtgtaaagattgtgttcacctattgaaaattaaaaagacattttgtttatggaaaagattaacaaaacttaaagataaccactgtgagcaacttagagtaaaaattcgaaaactgaaaaataaggctagtgtactacaaaagagaatatctgaaaaagaagaaataaaatcgcagttaaagcatgaaacacttgaattggaaaaagaactctgtagtttgagatttgccatacagcaag

SEQ ID NO: 348502 - DNA, 1940 bp, Homo Sapiens
  misc_feature (1325)..(1355): n is a, c, g, or t
cggctaggtgcgaggctgggtggtgaattcggcacgagggggggcccgcgcgggtgcagccacgatggaagggggtgcgtacggagcgggcaaagccgggggcgccttcgacccctacaccctggtccggcagccgcacaccatcctgcgcgtcgtgtcttggctgttctccatagtggtgttcggctccatcgtgaacgagggctacctcaacagcgcctccgagggggaggagttctgcatctacaaccgcaaccccaacgcctgcagctatggcgtggccgtgggcgtgctcgccttcctcacctgcctgctgtacctggccctggacgtgtacttcccgcagatcagcagcgtcaaggaccgcaagaaagccgtcctgtccgacatcggtgtctcggccttctgggctttcctctggttcgtgggattctgctacctggccaaccagtggcaggtctccaagcccaaggacaacccactgaacgaagggacggacgcagcccgggccgccatcgccttctcctttttctccatcttcacctggagcctgaccgcagccctggccgtgcggagattcaaggacctaagcttccaggaggagtacagcacactgttccctgcctcggcacagccgtaggcctccccggcttgcagaggccggcagccctgtatcacccctggcagtgaggtggcaggagcagcctagtgccagaaatgtccaagatgccagggcatgcagggcagtggaaggctggcttgaggaaccaattcaggttctccactgactcattcattccttcaccgcctccttcattgattcttcatgcgttcattcattcagtaaacatttattgagcagctgttttgtgcctagtgatgaattaggtggggtccttggctccaggagcccacaggctggggaggagaaaacaaacacatcaatatctcttccaaatggacagccgtggacagttaccaggtaggtagcggccccatacatgggctgccctagaggcgttcatggtccccattgctgagctgtgggtgcagagcaatagcctctcccttcacagcggtgtgaagagtgacctcactgtccttagggttagcatcctggccgaggatgtcacagggctcctggtctggctctgtcctcatgtgctatgtgaccctgacaaacccgtgcacctctctcagcctcagtccacttacctgaactgaggggtgataatggaccaacctctcaaggctgttgtgccaatgaaacaaaggccagcccagggcttagcacaagcatgctcaataaatgtaagctcttttgnnnnnnnnnnnnnnnnnnnnnnnnnnnnnnnttctctccagagagtcaggggcacctccagaatctctactttgagagtaattctcatgtgatgaatccttgttcctccaaaggatttggtctctggttctacacaggtttcctgcttggggcccccagctgcctgggcaggaactcacccattcctccactctctgctggagttgaggaggctggtggagcacagacagttcccccaaagcaatgcctcaaccctgcgagggcctgagcacatcgagagtgagcttcctggcactggaggcatcccagtgcagatgcaagactgctgctgacgctggagatgctgcagagagagcacctacactgagacacgtggggccagggtacccaccaggtaccctgggtcttcttccggtagaaacttccatcctcccctctgtcagccccaggccaagcggggggcccccatgtcctactccttttgctcctgtcattgtggccccttttaaactgggttgccccaaatgaaggcttggacttagtgaagggcagagagcttgaaccacgcaacagtatgagttgctacagccagagggcatttccctagaaggatcat

SEQ ID NO: 348503 - DNA, 1185 bp, Homo Sapiens
agcggcgggggcgcgcgccgagcggggggcaccgcgcgggtgcagccacgatggaagggggtgcgtacggagcgggcaaagccgggggcgccttcgacccctacaccctggtccggcagccgcacaccatcctgcgcgtcgtgtcttggctgttctccatagtggtgttcggctccatcgtgaacgagggctacctcaacagcgcctccgagggggaggagttctgcatctacaaccgcaaccccaacgcctgcagctatggcgtggccgtgggcgtgctcgccttcctcacctgcctgctgtacctggccctggacgtgtacttcccgcagatcagcagcgtcaaggaccgcaagaaagccgtcctgtccgacatcggtgtctcggccttctgggctttcctctggttcgtgggattctgctacctggccaaccagtggcaggtctccaagcccaaggacaacccactgaacgaagggacggacgcagcccgggccgccatcgccttctcctttttctccatcttcacctgggcgggccaggctgtgctggccttccagcggtaccagattggcgccgactcggccctcttctcccaggactacatggaccccagccaggactccagcatgccttacgcgccctacgtggagcccaacactgggccggaatcccgccggtatgggcggaacctaccaccagtccgtaacccacttcgaccacgaaggcccgggggttaccaaacgccgggcctactgagccacagtgggccggatgcccaccgcccaatcttaaatcggccccctcaccttaaaggcccaggcccctcgatctcggccccgggattgccctggcgccgccgccgtcgaaacacctttggcccggatccccaatagcgcgtacccaggcgcccccccaggagacaataaggaggagcgccacaccgggcgacgggcagcccgggtgttgaatctaggtgccggaccaaaagaccccgtgggcgcgggcggactcccccgaacgacaatcaaaagccgctgaaccaacctaaccccgcccccagacccaatactgccgcctattaagcgatcccggtcactaacacatccggcgcgcccgattgctccgccgactggacccccggtccgcaaggctaatagcgccgcgcggcaccctcccaaacga

SEQ ID NO: 348504 - DNA, 805 bp, Homo Sapiens
gggcccttcggctccgagctgaccctgatcagggccgagttgtctcggcggcgctgccgaggcctccacccggggagggtggttaccgctgaggagctgcagtctctgtcaagatgatagaggtactgacaacaactgactctcagaaactgctacaccagctgaatgccctgttggaacaggagtctagatgtcagccaaaggtctgtggtttgagactaattgagtctgcacacgataatggcctcagaatgactgcaagactaagggactttgaagtaaaagatcttcttagtctaactcagttctttggctttgacacagagacattttctctagctgtgaatttactggacagattcctgtctaaaatgaaggtacagcccaagcaccttgggtgtgttggactgagctgcttttatttggctgtaaaatcaatagaagaggaaaggaatgtcccattggcaactgacttgatccgaataagtcaatataggtttacggtttcagacttgatgagaatggaaaagattgtattggagaaggtgtgttggaaagtcaaagctactactgcctttcaatttctgcaactgtattattcactccttcaagagaacttgccacttgaaaggagaaatagcattaatttttgaaagactagaagctcaactgaaagcatgtcattgcaggatcatattttcctaaagcaaagcccttctgtgttggcaattgtctatcatttgcattagagattccagcacagaaagtgtgtagagttaaccagaaggaaatagaatggtcctcc

SEQ ID NO: 348505 - DNA, 852 bp, Homo Sapiens
agcggctcttcggctccgagctgaccctgatcagggccgagttgtctcggcggcgctgccgaggcctccacccaggacagtccccctccccgggcctctctcctcttgcctacgagtcccctctcctcgtaggcctctcggatctgatatcgtggggtgaggtgagcaggcccggggagggtggttaccgctgaggagctgcagtctctgtcaagatgatagaggtactgacaacaactgactctcagaaactgctacaccagctgaatgccctgttggaacaggagtctagatgtcagccaaaggtctgtggtttgagactaattgagtctgcacacgataatggcctcagaatgactgcaagactaagggactttgaagtaaaagatcttcttagtctaactcagttctttggctttgacacagagacattttctctagctgtgaatttactggacagattcctgtctaaaatgaaggtacagcccaagcaccttgggtgtgttggactgagctgcttttatttggctgtaaaatcaatagaagaggaaaggaatgtcccattggcaactgacttgatccgaataagtcaatataggtttacggtttcagacttgatgagaatggaaaagattgcattggagaaacgtgtgttggaaaagtcaaagctactactgcctttcaatttctgcaactgcattattcactccttcaagagaacttgccacttgacaggagacatagcattaatttcgaaagactagaagctcaactgaaggcatgtcattgcaggatcatatttctaaagcaaagccttctgggtggcatgtctatcatggcgttagagattcc

SEQ ID NO: 348506 - DNA, 1203 bp, Homo Sapiens
  misc_feature (362)..(371): n is a, c, g, or t
ggaggacggcgacgaccagaaggggcccaagagagggggcgagcgaccgagcgccgcgacgcggaagtgaggtgcgtgcgggctgcagcgcagaccccggcccggcccctccgagagcgtcctgggcgctccctcacgccttgccttcaagccttctgcccttccaccctcgtgagcggagaactgggagtggccattcgacgacaggttagcgggtttgcctcccactcccccagcctcgcgtcgccggctcacagcggcctcctctggggacagtcccccccgggtgccgcctccgcccttcctgtgcgctccttttccttcttctttcctattaaatattatttgggaattgtttaaannnnnnnnnnaaaaaaagagagaggcggggaggagtcggagttgtggagaagcagagggactcagtgtggtgtaaaggaattcattagccatggatgtattcatgaaaggactttcaaaggccaaggagggagttgtggctgctgctgagaaaaccaaacagggtgtggcagaagcagcaggaaagacaaaagagggtgttctctatgtaggctccaaaaccaaggagggagtggtgcatggtgtggcaacagtggctgagaagaccaaagagcaagtgacaaatgttggaggagcagtggtgacgggtgtgacagcagtagcccagaagacagtggagggagcagggagcattgcagcagccactggctttgtcaaaaaggaccagttgggcaagaatgaagaaggagcccccacaggaaggaaattctgggaaagatatgccctggcgggatccctgaccattgagggccttaatggaaaatggcctttcttgaaggaaagggttatcaaagactacgaaaccttggaaagcccctaaagaaatatccttttgcctccccggtttccttgaagaatctggcttgaaccgaatgtttcccattccttggaacaaagggcctcaggttccccaatggggccccaggtcattgaacatttttcctcaaaggtttttttacagggggtaattctgggaagatcctttccatttaaggcacgtcgaatttggaaagtaattctggtacccgtggcccccccacttttgcccatttttgggggggccttttccccttttctccgctggaaaagtggaaaaaccctggggcgaaacccgaggggctc

SEQ ID NO: 348507 - DNA, 947 bp, Homo Sapiens
agcggaggaggaggacggcgacgaccagaaggggcccaagagagggggcgagcgaccgagcgccgcgacgcggaagtgaggtgcgtgcgggctgcagcgcagaccccggcccggcccctccgagagcgtcctgggcgctccctcacgccttgccttcaagccttctgcctttccaccctcgtgagcggagaactgggagtggccattcgacgacagtgtggtgtaaaggaattcattagccatggatgtattcatgaaaggactttcaaaggccaaggagggagttgtggctgctgctgagaaaaccaaacagggtgtggcagaagcagcaggaaagacaaaagagggtgttctctatgtaggctccaaaaccaaggagggagtggtgcatggtgtggcaacagtggctgagaagaccaaagagcaagtgacaaatgttggaggagcagtggtgacgggtgtgacagcagtagcccagaagacagtggagggagcagggagcattgcagcagccactggctttgtcaaaaaggaccagttgggcaagaatgaagaaggagccccacaggaaggaattctggaagatatgcctgtggatcctgacaatgaggcttatgaaatgccttctgaggaagggtatcaagactacgaacctgaagcctaagaaatatctttgctcccagtttcttgagatctgctgacagatgttccatcctgtacaagtgctcagttccaatgttgcccagtcatgacatttctcaaagtttttacagtgtatctcgaagtcttccatcagccagtgattgaagtatctgtaccttgcccccactcagcatttcggtgcttccctttcactgaagtgaatacatggtaacagggtctttgtgtgccgtggatttgggggttcaatctacaatgttaaaccaattaaaaacctaagtgatacc

SEQ ID NO: 348508 - DNA, 425 bp, Homo Sapiens
  misc_feature (161)..(291): n is a, c, g, or t
aggacaaaaatataaagttattaatagccatttgaagaaggaggaattttagaagaggtagagaaaatggaacattaaccctacactcggaattccctgaagcaacactgccagaagtgtgttttggtatgcactggttccttaagtggctgtgattaatnnnnnnnnnnnnnnnnnnnnnnnnnnnnnnnnnnnnnnnnnnnnnnnnnnnnnnnnnnnnnnnnnnnnnnnnnnnnnnnnnnnnnnnnnnnnnnnnnnnnnnnnnnnnnnnnnnnnnnnnnnnnnnnnnnntacatttttaattgagccttttattaacatatattgttatttttgtctcgaaataattttttagttaaaatctattttgtctgatattggtgtgaatgctgtacctttctgacaataaataatattcgaccatg

SEQ ID NO: 348509 - DNA, 2027 bp, Homo Sapiens
  misc_feature (1605)..(1619): n is a, c, g, or t
  misc_feature (1767)..(1777): n is a, c, g, or t
  misc_feature (1791)..(1843): n is a, c, g, or t
  misc_feature (1898)..(1898): n is a, c, g, or t
  misc_feature (1982)..(1982): n is a, c, g, or t
  misc_feature (2009)..(2009): n is a, c, g, or t
agcggggtaggagcttgcttctccattctggtgtgatccaggaacagctgtcttccagctctgaaagagtgtggtgtaaaggaattcattagccatggatgtattcatgaaaggactttcaaaggccaaggagggagttgtggctgctgctgagaaaaccaaacagggtgtggcagaagcagcaggaaagacaaaagagggtgttctctatgtaggctccaaaaccaaggagggagtggtgcatggtgtggcaacagtggctgagaagaccaaagagcaagtgacaaatgttggaggagcagtggtgacgggtgtgacagcagtagcccagaagacagtggagggagcagggagcattgcagcagccactggctttgtcaaaaaggaccagttgggcaagaatgaagaaggagccccacaggaaggaattctggaagatatgcctgtggatcctgacaatgaggcttatgaaatgccttctgaggaagggtatcaagactacgaacctgaagcctaagaaatatctttgctcccagtttcttgagatctgctgacagatgttccatcctgtacaagtgctcagttccaatgtgcccagtcatgacatttctcaaagtttttacagtgtatctcgaagtcttccatcagcagtgattgaagtatctgtacctgcccccactcagcatttcggtgcttccctttcactgaagtgaatacatggtagcagggtctttgtgtgctgtggattttgtggcttcaatctacgatgttaaaacaaattaaaaacacctaagtgactaccacttatttctaaatcctcactatttttttgttgctgttgttcagaagttgttagtgatttgctatcatatattataagatttttaggtgtcttttaatgatactgtctaagaataatgacgtattgtgaaatttgttaatatatataatacttaaaaatatgtgagcatgaaactatgcacctataaatactaaatatgaaattttaccattttgcgatgtgttttattcacttgtgtttgtatataaatggtgagaattaaaataaaacgttatctcattgcaaaaatattttatttttatcccatctcactttaactaataaacaatcatgcttataagctaacatgaattaagaactgacacaagaggacaaaacatactaaagttattaatagccatttgaagaaggaggaattttagaagaggtagagataaatggaacacttaacccctacactcggaattccctgaagcaacactgccagaagtgtgttttggtatgcacgggtccctaaagtggctgtgattaattattgaaagtggggtgttgaagaccccaaactactattgtagagtggtctatttctcccttcaatcctgtcaatgtttgctttatgtattttggggaactgttgtttgatgtgtatgtgtttataattgttatacatttttaattgagccttttattaacatatattgttatttttgtctcgaaataattttttagttaaaatctattttgtctgatattggtgtgaatgctgtacctttctgacaataaataatattcgaccatgaatnnnnnnnnnnnnnnngggggttcccgggaacctaagcagtgtagaagatgatttggactacaccctccttagagagccataagacacatttagcacatatttagcacatttcaagggctctgagagaatgtggttaacttggtttaactcagcattcctcacnnnnnnnnnnnaatcatcagaaatnnnnnnnnnnnnnnnnnnnnnnnnnnnnnnnnnnnnnnnnnnnnnnnnnnnnnacaggaaatgcctttaaacatcgttgggaactaccagagtcaccttaaagggagnatcaattctctaggactggataaaaatttcatgggcctcctttaaaatgttgcccaaatatatggaattctaggggtttttccntagggggaagggttttttctcttttcnggggaggatccttttaac

SEQ ID NO: 348510 - DNA, 1013 bp, Homo Sapiens
gggtctccttgttttgctttcgatctggactgttctcaggcaagccggggagtaacttttagttttgctcctgcgattattcaactgacgggctttcatttccatttcacacaccctagcaacacttataccttgcggaattgtattggtagcgtgaaaaaagcacactgagagggcaccatgccggtggaaaggatgcgcatgcgcccgtggctggaggagcagataaactccaacacgatcccggggctcaagtggcttaacaaggaaaagaagatttttcagatcccctggatgcatgcggctagacatgggtgggatgtggaaaaagatgcaccactctttagaaactgggcaatccatacaggaaagcatcaaccaggagtagataaacctgatcccaaaacatggaaggcgaatttcagatgcgccatgaattccttgcctgatattgaagaagtcaaggataaaagcataaagaaaggaaataatgccttcagggtctaccgaatgctgcccctatcagaacggccttctaagaaaggaaagaaaccaaagacagaaaaagaagacaaagttaagcacatcaagcaagaaccagttgagtcatctctggggcttagtaatggagtaagtgatctttctcctgagtatgcggtcctgacttcaactataaaaaatgaagtggatagtacggtgaacatcatagttgtaggacagtcccatctggacagcaacattgagaatcaagagattgtcaccaatccgccagacatttgccaagttgtagaggtgaccactgagagcgacgagcagccggtcagcatgagcgagctctaccctctgcagatctcccccgtgtcttcctatgcagaaagcgaaacgactgatagtgtgcccagcgatgaagagagtgccgaagggacggccacactggcggaagaggaatattgaaagcaaacagtacctcagcaacatgggggaactcaggctcctaactgcgtgcccggatg

SEQ ID NO: 348511 - DNA, 785 bp, Homo Sapiens
  misc_feature (154)..(162): n is a, c, g, or t
ttacatgcatgtgtggcatagctttaaataaaattccactttaggaatcaataagggaaatgggcaaaaaggagaggtggatattatttaaaagaagatgactgtttaaacacaaaaccatcacagagggaagagaggtttagaaaggtacagnnnnnnnnntctacaccaggtaacactggaggatgcagggctacatttgccactgaagaaacattgttctcttgcatctgaattccagtgctttccaaatagatgggtagatgatgaaaaatggagcagcttcttttatttcttcttcttttctcccttgaattctagtacgagacagttctctgcctgccaccaaggcagaaagcagcattttgctcacctgctcttcagtctggcagggtcccacgctcagttttccagcatagctgcagggtgctattgtaatgactcagggatggtgctgacaacgtgggttgcctctgtggctgcgggaggggagccaaagaaggtgttggtttgattcctctgctgatctcggaggtaaggaggaaccgacgaacttttgatatggaggatcctggtgtccatcacctgacagtcaatctgcatcatcacttcgtagtcctgcccattgatcacattctcatttatgtttattgctggtaacacaattgacatttttggtcttgtggtcttgttatgggtggtagctggtaacagcaggtgatcccttcgaaatgacacaacataaaatgtgtctccccttctgcggatggcttcaaaaaagtctt

SEQ ID NO: 348512 - DNA, 855 bp, Homo Sapiens
  misc_feature (784)..(784): n is a, c, g, or t
  misc_feature (842)..(842): n is a, c, g, or t
  misc_feature (845)..(845): n is a, c, g, or t
  misc_feature (851)..(851): n is a, c, g, or t
agcgggcgggtaaacagacatggccggcgaaggagatcagcaggacgctgcgcacaacatgggcaaccacctgccgctcctgcctgcagagagtgaggaagaagatgaaatggaagttgaagaccaggatagtaaagaagccaaaaaaccaaacatcataaattttgacaccagtctgccgacatcacatacatacctaggtgctgatatggaagaatttcatggcaggactttgcacgatgacgacagctgtcaggtgattccagttcttccacaagtgatgatgatcctgattcccggacagacattacctcttcagctttttcaccctcaagaagtcagtatggtgcggaatttaattcagaaagatagaacctttgctgttcttgcatacagcaatgtacaggaaagggaagcacagtttggaacaacagcagagatatatgcctatcgagaagaacaggattttggaattgagatagtgaaagtgaaagcaattggaagacaaaggttcaaagtccttgagctaagaacacagtcagatggaatccagcaagctaaagtgcaaattcttcccgaatgtgtgttgccttcaaccatgtctgcagttcaattagaatccctcaataagtgccagatatttccttcaaaacctgtctcaagagaagaccaatgttcatataaatggtggcagaaataccagaagagaaagtttccttgtgcaaatctaacttcatggcctcgctggctgtattccttatattgatgctgagaccttaatggncagaatcaagaaacagctacgtgaatgggatgaaaatctaaaagatgattctcttccntcnaatccnatag

SEQ ID NO: 348513 - DNA, 955 bp, Homo Sapiens
  misc_feature (473)..(473): n is a, c, g, or t
  misc_feature (877)..(913): n is a, c, g, or t
atcataatgtcttattcacacaattccttgatatcactcccatttaaagaactgattctcaaacatcatcatagaagacaacagctactctgttaaaaaaatctattggatttgaaggaagagaatcatcttttagattttcatcccattcacgtagctgtttcttgattctgtccattaaggtctcagcatccatataaggaatacagccagcgaggccatgaagttagatttgcacaatgaaactttctcttctggtatttctgccaccatttatatgaacattggtcttctcttgagacaggttttgaaggaaatatctggcacttattgagggattctaattgaactgcagacatggttgaaggcaacacacattcgggaagaatttgcactttagcttgctggattccatctgactgtgttcttagctcaaggactttgaacctttgtcttccaattgctttcacccntcactatctcaattccaaaatcctgttcttctcgataggcatatatctctgctgttgttccaaactgtgcttccctttcctgtacattgctgtatgcaagaacagcaaaggttctatctttctgaattaaattccgcaccatactgacttcttgagggtgaaaaagctgaagaggtaatgtctgtccgggaatcaggatcatcatcacttgtggaagaactggaatcacatgacagctgtcgtcatcgtgcaaagtcctgccatgaaattcttccatatcagcacctaggtacaggcaggagcggcaggtggttgcccatgttgtgcgcagcgtcctgctgatctccttcgccggccatgtctccgctctcgacgaattcgagctcggccgatttggcctgatnnnnnnnnnnnnnnnnnnnnnnnnnnnnnnnnnnnnncgccgccaccgcgaaacccgcagtccccatatatctatacag

SEQ ID NO: 348514 - DNA, 711 bp, Homo Sapiens; identical to SEQ ID NO: 264655

SEQ ID NO: 348515 - DNA, 1105 bp, Homo Sapiens
ctggactacttctgtgtccatgagtgcgtactggacccactgtcaggaactgcctatattggggcctatcaacatgggtccttcaccagcgaaggtgtgagaatatgagactcagcccgtcaatgatccgtccggttctctgggggactggatttcatcaaggaagggatggtccccacaagttcttcaaggcggtctttcaatggccctcacggctccagtcccggccagttccgggaacccagctatgcaggattgtacctccagcatgaggaacttcagcgccattgctgcgtctttggggccagaaagagttagacgtaaagagaaacgagaatccgcctcgggtgtgacatatctgtgcctctagaaccctgatgctagcaggagatctgggcatcaggggggttttctggctagcagtagaggggctcaggccctgctggagtggatctggcgcctggggggacacaaggtgggccctgcgggaggcaggagctgctccaggcaaagtccgagtgggaagggccggtatgaaggaggcgcccgatgggagggggcgagttctccccctgcaccgttccagtccactccgggtttcctgtagaaggggagccccccaaagtccatctgtgtttccccacctcactcacacactcagggaccctcggctgctccccgtggcgctgactgacatttttgccgaataaaggggccctgtgggtttcctgttcccatctcagcttctgctgaacagggtaaacttcccttccgaataaaaccaccagaatgcggtctggccaatttcagtcatagacccaccaggcctgtgtccctgcgtgagggggtgggaaaagcccagagtgcccctacccgtcccctgggaggggtggaagggcagctcttgctccccctgcagagacggctgcgcggactgggaaggctgccagcctcgcccggtctccctgtggaccctgccctgaccccaccccagcttcctggctccctgcaccccactgggcttccctgccccacagagcctggtggtagggagacctccggatggagacagcccacagtcccggagccccaaggcaggcaccag

SEQ ID NO: 348516 - DNA, 1728 bp, Homo Sapiens
  misc_feature (1080)..(1080): n is a, c, g, or t
  misc_feature (1212)..(1212): n is a, c, g, or t
acgacacgaatgggagcggactgcgcatgtgcaggacccagcaggtctagagcttttctgtgtttctccggacttcgagccatggcggtgacggaagcgagcctgttgcgccagtgccccctgcttctgccccagaaccggtcgaaaaccgtgtatgagggattcatctcggctcagggaagagacttccaccttaggatagtgttgcctgaagatttacaactgaagaatgcaagattattatgtagttggcagctgagaacaatacttagtggataccatcgaatagtacaacagagaatgcagcactctcctgatctaatgagctttatgatggagttgaagatgcttttggaagttgccttaaagaatagacaagagctgtatgcactacctcctcctccccagttctactcaagccttattgaagagataggaactcttggttgggataaacttgtgtatgcggatacctgcttcagtaccatcaagttaaaagcagaagatgcttctggtagagagcatttaatcactctcaagttgaaggcaaagtatcctgcagaatcaccagattattttgtggattttcctgttccattttgtgcctcctggacacctcagagctccttaataagcatttatagtcagtttttggcagcaatagaatcactaaaggcattctgggatgttatggatgaaatcgatgagaagacctgggtacttgagccagaaaaacctccacggagtgcaacagcacgcagaattgcattaggtaatacatgtttccataaatatagaggtagaccccaggcatcctactatgcttcctgagtgcttctttcttggagctgaccatgtggtaaaacccctgggaattaagctgagcaggaacatacatttgtgggatccagaaaatagtgtgttacaaaaatttgaaagatgttttagaaattgattttccagctcgtgctatcctggaaaaatctgactttactatggattgtggaatttgttatgcttatcaacttgacggtaccatccctgatcaagtgtgtgataattcccagtgtggacaacccntccatcaaatatgcttatatgagtggctgagaggactactaactagtagacagagttttaacatcatatttggtgaatgtccatattgtagtaagccgagtaccttaaaaatgtctggaaggaaacactganataagaatacaacatttcggtgaagagctggaaacttaaaaaattatcaaaaggaattttggtatcatcttcagagaaaaaataaagcaagaaatactaacatcaaaaggacaggtatgatgatgcgataataataaacatctgcgtttgtctcttcactaagagtaaactgggaaattgtaggccaaagtccagttgaactttctaagtctgtgatccccgtgctgactgtggaagtgtatttataccaagatggagatcttgacttcttgaatatatctggactggtaaaatcttgatgaggctcataaaatgagtttgggaattgtgtatagctgattttttgtgggaaactgtttacttcattcaaaggttcttgagactcttgatatttctgtcttctccttgtgctttcctatggaaaaaatacatatatagtttagtttgttagacgtgagttatccaagtatttattttgtgtagtgtgtaagaatgctaaataaaatgttatacaag

SEQ ID NO: 348517 - DNA, 910 bp, Homo Sapiens
  misc_feature (723)..(723): n is a, c, g, or t
  misc_feature (785)..(786): n is a, c, g, or t
tagtcaaagcaattttattttttagagtgtcccaaactttgttaaaaatgttctctttttaaagccaattaccttaaaaatgtctggaaggaaacactgaaataagaatacaacatttcggtgaagagctggaaacttaaaaaattatcaaaaggaattttggtatcatcttcagagaaaaaataaagcaagaaatactaacatcaaaaggacaggtatgatgatgcgataataataaacatctgcgtttgtctcttcactaagagtaaactgggaaattgtaggccaaagtccagtagaactttctaagtctgtgatccccgtgctgactgtggaagtgtatttataccaagatggagatcttgacttcttgaatatatctggactggtaaaatcttgatgaggctcataaaatgagtttgggaattgtgtatagctgatttttggtgggaaactgtttacttcattcaaaggctcttgagactcttgatatttctgtcttctccttgtgctttcctgagctgcttcatggttcatcaatccaatcagtttctcctctttctgcactttccatgtggcacaggactcagcgcttctctcactgtggacttttttttcgattaacctatggtgtgccttgtggacttgcttggttgcagcctttggtgaatcaactttttgactgtttggagtatggacatttatactctgtccttttgtggnaaagtccagtggtccctaaggtattccatgaggggtcaaatttttcttgagggcttgatagnnttggcttttcatcatatgctaaactatgagcacataccaaaaaattgggctatttcaagcaacttgcttccagaaggagcccatttaaccattgactgggggaagcttgtccaacaaatttgtt

SEQ ID NO: 348518 - DNA, 546 bp, Homo Sapiens
gggggagcgtagcggcctctagctcgagcagcaggagcagcccgcaccggacaacttgcgagccatggggctggcggatgcgtcgggaccgagggacacacaggcactgctgtctgcaacacaagcaatggacctgcggaggcgagactaccacatggaacggccgctgctgaaccaggagcatttggaggagctggggcgctggggctcagcacctaggacccaccagtggcggacctggttgcagtgctcccgtgctcgggcctatgcccttctgctccaacacctcccggttttggtctggttaccccggtatcctgtgcgtgactggctcctgggtgacctgttatccggcctgagtgtggccttcatgcagcttccgcagggcttggcctacgccctcctggctggattgccccaccgtgtttggcctctatagccccttctacactgtcttcatctacttcctgtttggcacttcccaggcacatctccgtggggacctttgcagacctgattgacactgcgtcagtcctgtcctgtccg

SEQ ID NO: 348519 - DNA, 536 bp, Homo Sapiens
agcctcatcctggacctgggtgccctctcctttgtggacactgtgtgcctcaagagcctgaagaatattttccatgacttccgggagattgaggtggaggtgtacatggcggcctgccacagccctgtggtcagccagcttgaggctgggcacttcttcgatgcatccatcaccaagaagcatctctttgcctctgtccatgatgctgtcacctttgccctccaacacccgaggcctgtccccgacagccctgtttcggtcaccagactctgaacatgctacatcctgcccaagactgcacctctggaggtgcagggcacccttgagaagcccctcacccctaggccgcctccaggtgctacccaggagtcccctccatgtacacacacacaactcagggaaggaggtcctgggactccaagttcagcgctccaggtctgggacagggcctgcatgcagtcaggctggcagtggcgcggtacagggagggaactggtgcatactttagcctcaggaataaagatttgtctgctcaa

SEQ ID NO: 348520 - DNA, 1312 bp, Homo Sapiens
gaattgtaattggcttaacagaaacagtctgtaaaaacctaacagtggtgcaatcatgttgtctgtgttgtgttatgtgagaattttctcctaagtcatgcaggtaatgacaatatactgtaaataccacatgtgagtttacctgaatctgtgcattttgtgccttattcatgagaatgatagaagtactaaaatctgtcaagtgttttcagtatagcacattatttactgagtgccagttgtaaatgtttttcaaccagcacctaaaaagactcttttcaaaaaatcacagaaacaacctaggacaattatttgttacataatccgacctcatagcagcattacattctttgccgtgataaacattccactcctgctttcctaaggatgaaacagtgataatgtgaactcaaatgaggtttcctgggtaatgtgacacctgcagaaactatagagcgtcatttatacgtagtttggcagaaaccacttacggctgatgatgcgcaaccctgctgactgtttcagttaatatgctgcacaccacacacttgtttagtgaaccaaatctagaaagtaccaaggcagaggtatgctcctgctgtaatcaggcaaatgagttcaactggatttcttttgacaatactgttggtacctattacttgggggaggacatgttgccgaagaccagatcatttgtatacagaatgtgaaatactgatacagttattcttttttttaaagaacattgttttataaagaacgtgatttccagtgatctctggaagcgctaaagctaaaatttctgttcttgaaacacttcagctttgcaactaaaatattacagattaataataaattaaaccaaccaatgataaacactactcagtccaccaacaacaaacgtgtttgaattcaccttaccaatattaatcccagcgtgtgtaaaacagaacagtaactctatgtgaccccagataacattttgtaacattgtgcttccttgtagtttgtaatgtgagttcaatcagtatttatgttgaaatttctaacattaaatctagtctctatcctgttaatttaatttttaaatgctttatccatttgtgcaaaggtaaacgcagattgtatcttttttaatggtacggcataaaaagtaaccctcaagtgaagtgtctctatactgttttatagagtactttaacatgaatagataccttgtaaacttgtattgtggatgtgtaaataatatgtactttgggtttttaacaccgcatgtaaagtcaaaataaaatatacaaatcattaaaaaaaa

SEQ ID NO: 348521 - DNA, 939 bp, Homo Sapiens
  misc_feature (425)..(425): n is a, c, g, or t
tgattaaccgttgtaaacacaggtggtcccggccggaattcccgggatatcgtcgacccacgcgtccggggcaacgagcgtctcgtttggacttctcgacttgagtgcccgcctccttcgccgccgcctctgcagtcctcagcgcagttatgcccagttcttcccgctgtggggacacgaccacggaggaatccttgcttcagggactcgggaccctgctggaccccttcctcgggtttaggggatgtggggaccaggagaaagtcaggatccctaagagtcttccctgcctggatggatgagtggcttcttctccacctagattctttccacaggagccagcatacttcctgaacatggagagtgttgttcgccgctgcccattcttatcccgagtcccccaggcctttctgcagaaagcaggncaaatctctgttgttatatggcccaaaactgccccaagatgatggaagtggggccaagccagcccctcgggcatgtccactgcagcagtacactaccaacagatcaaagaaacccctccggccagtgagaaagacaaaactgctaaggccaaggtccaacagactcctgatggatcccagcagagtccagatggcacacagcttccgtctggacaccccttgcctgccacaagccaggcactgcaagccaatgccctttcctggcagcacagatggaatcagagaggcagcaggtgtctcctgcaaagccagtcttgagcttcaggaggatgtgcagcgcacttgcaagcccgtgagggaagaggtgctgaacctaaggggccccagtgtggtagtgtgaaaaccgatgggggggtcccagggcactgctgagcactcccggcacttatgcaaggcaagccaaagaggttcatctttccaaaattgcaaatgtcccttagctacggtggaaatg

SEQ ID NO: 348522 - DNA, 2592 bp, Homo Sapiens
  misc_feature (64)..(75): n is a, c, g, or t
  misc_feature (132)..(140): n is a, c, g, or t
  misc_feature (161)..(208): n is a, c, g, or t
  misc_feature (224)..(235): n is a, c, g, or t
  misc_feature (275)..(286): n is a, c, g, or t
  misc_feature (288)..(288): n is a, c, g, or t
  misc_feature (291)..(292): n is a, c, g, or t
  misc_feature (295)..(392): n is a, c, g, or t
cccgcccgaaaggcggggaaaaatattttgtgtaggggggtggttggtgccacaataatttttnnnnnnnnnnnnacagagaagagggggttttcttctccaaagaaatccccccagggtgcggtttttttnnnnnnnnngcggggtttgaaaaaacgcgnnnnnnnnnnnnnnnnnnnnnnnnnnnnnnnnnnnnnnnnnnnnnnnntttcctcacaaaaaannnnnnnnnnnnaattattggggcccccccggggggttttttataagggggnnnnnnnnnnnntnttnnttnnnnnnnnnnnnnnnnnnnnnnnnnnnnnnnnnnnnnnnnnnnnnnnnnnnnnnnnnnnnnnnnnnnnnnnnnnnnnnnnnnnnnnnnnnnnnnnnnntatttccaggactatgtttttactatagattaaaatttaatataacttaattcacatataaagacaactctgaagaccatctggatatgataatggcctggggttaagtgaaataattgaggtcatgctcaggcctgagcagataccaacttgctcaagcctgagaaataggacttctctctttcactcatcacttcaaaatgcagtggcctcctgcagaagttgcactcagctgaggaatgaggcttcagttccagccccacttgcttccatgtgactagcagattctcaaggaagtagttcatcatctggggtgtgtggtgaggggtgggggcaatccgtaggagctcttctccccggggcaccgtagggtaattgattgcttgcacgtagatgttatgtctgctcattagttcatcacagacttctgtgtttttagcagcatctgcaacccgcacagggatgatgtggctggggcagtggacaacagggaggccggcatccattagcatctgtctcatgagtttgacgttgcgctggtgctggcggcgaagcacccgtccctcagcgctcttcaggatccgcacagactccagggctccagccagcagcatgggtggcagagaggtggtgaagatgaagccagcagcataggaccgtacggtgtcaatcagagaactcgtgctggcgatgtaccctccaacacaaccaaaggctttgccaagtgttccagaaatgatgtccatttttggcatgactccatcccgatccccaatccctccgcctcgagccccataaagccccactgcgtggacctcatccacgaaggtgattgctccaaactcatgggccacatcacacagctcttccagtgggcacaccgccccatccattgaatggacagtttcaaatgccacaatcttggggactgaggggtcagatctttgcagcagttctctgaggtggctgacatcattgtggcggaagatgtactttggcactcggctgtttcgaatcccttggatcatggaggcatggttcccagaatcagagtaaatctcacagcctggcatcatcttagccagggtgaagagggttgagtcattggccacaaagcacgaggaaaacaagagtgcggcatctttcccatggaggtctgccagctcccgctctaagtccacatggaatttactagttccagaaatatttctagtaccacctgccccagcaccatgttgtttcaaagtgtccataactgccccacacacccgtgggtggcgactcattcctaggtagtcattactgcaccagactgacacttgctttttggtgatgagggagtctgaatagtcatctgccatggggaagatgtgtgctcgccggttcacagttttaaaaactcgataggtgtggtcattctttttctcatcaatttttttctcaaagaaacgatcatactgaaaagtggaaacagattttggcaagttatcttgaagaagatgagacactctttctggtctttgcttttgcatgatgtcctggaagttcttcagcagtccactgggatcccctccatcggttttcacactaaccacactggggcctgctgaggtttcagcaacctctttcctcacggcattcatttcctgcacatcctcctgaagctcaagactggctttgcagaagacactgctgcctctctgattcatctgtgctgccaggaaagggcatttgcttgcagtgccctggcttgtggcaggcaaggggtgtccagacggaagctgtgtgccatctggactctgctgggatccatcaggagtctgttggaccttggccttagcagttttgtctttctcactggccggaggggtttctttgatctgttggtagtgtactgctgcagtggacaatgcccgaggggctggcttggccccaacttccatcatcttggggcagttttgggcatagaacaacagagatttgcctgctttctgcagaaaggcctgggggactcgggataagaatgggcagcggcgaacaacactctccatgttcaggaagtatgctggctcctgtggaaagactgcgctgaggactgcagaggcggcggcgaaggaggcgggcactcaagtcgagaagtccaaacgaaacgctcgttgcccttgtccgggagcagcctcaggccgcgatcgccggcgcc

SEQ ID NO: 348523 - DNA, 889 bp, Homo Sapiens
  misc_feature (21)..(21): n is a, c, g, or t
  misc_feature (45)..(45): n is a, c, g, or t
  misc_feature (47)..(47): n is a, c, g, or t
  misc_feature (781)..(781): n is a, c, g, or t
aagtatcatcggccggatacnaaatagctcccggaagtagcggangncaacaggtgcataggtcttgaaaacgaaagtcattgtagtgatagagcaggggtcaggtagctacccttcactgggaaagaagatactctcaaccacgtagaaatcttgcataaggacatcacgctctggttaggtactcaggctccccacagtgtgggtaatgcctaactagatagcacctttcaaggctgatgaggttctctttttatatgtcgtctctcctgaggaatcaacacttctatggcctatatccttgatgggcatgccagaggcataaggcacctcagatgccatgggtctcttgattccagatgctgaggacaaggtacaggaagggaccgcgggatcaaaggatgaaaaaccgaccgaagacgacggcccggaggaggccgacgccatcttagcagccccctccccctcagcggcctggctctctttcaatccggttcttcctcttctcggaatcgaatcttcccaacgtctctttacagaacccgcgttctgtgggccacctccccgccccctccggggcctccctcagacacgtcgagccggctcctggaccagctcaaggccacaccattcgcctggcatggggaagaactcacgtcccgcaccccctccacaagtttaaccgctttccacaggggatactttcccctttcacagaagagtaagcttaagctggctgctgggaccttgcgcccagaccaagccacatctgaaagaaaancgaggcatgaaaagtcccaaaggagcgaacgccccttctccgtccttcctaaccacggcctgttaatcgcccaacccggccgcttcactccgggtagccaagcaaaaa

SEQ ID NO: 348524 - DNA, 439 bp, Homo Sapiens
tctagaggatcccgcactaggcgcacttctcaaagacaaccaaagttttcgacaacttcttaatcaaacttatcctttcctcaaactcctgcccgctcataaatccctatttgaaagcccagctcgcgcccacttaccggtaacacgtaggacattcccagctacaggtaccctcttaggtctcgctcttcctcccatcgcatattcctcaccagctccctacccacgccctgccgggcttacctgaggacaaggtacaggaagggaccgcgggatcaaaggatgaaaaaccgaccgaagacgacggcccggaggaggccgacgccatcttagcagccccctccccctcagcggcctggctctctttcaatccggttcttcctcttctcggaatcgaatcttcccaacgtctctttacagaacccgcgttctgtgggcc

SEQ ID NO: 348525 - DNA, 931 bp, Homo Sapiens
ccggaccacaatgctgactcttcccaggattcagagactgggacgttttatcaaaattggagattcatgggagaagtatgtgcatggtgtcagataccagtgctactgctatggccgtggcattggggagtggcattgccaacctttacagacctatccaagctcaagtggtcctgtcgaagtatttatcactgagactccgagtcagcccaactcccaccccatccagtggaatgcaccacagccatctcacatttccaagtacattctcaggtggagacctaaaaattctgtaggccgttggaaggaagctaccataccaggccacttaaactcctacaccatcaaaggcctgaagcctggtgtggtatacgagggccagctcatcagcatccagcagtacggccaccaagaagtgactcgctttgacttcaccaccaccagcaccagcacacctgtgaccagcaacaccgtgacaggagagacgactcccttttctcctcttgtggccacttctgaatctgtgaccgaaatcacagccagtagctttgtggtctcctgggtctcagcttccgacaccgtgtcgggattccgggtggaatatgagctgagtgaggagggagatgagccacagtacctggatcttccaagcacagccacttctgtgaacatccctgacctgcttcctggccgaaaatacattgtaaatgtctatcagatatctgaggatggggagcagagtttgatcctgtctacttcacaaacaacagcgcctgatgcccctcctgacccgactgtggaccaagttgatgacacctcaattgttgttcgctcgagcagaccccaggctcccatcaacaggctacagaatagtcatattcgctcactcagtagaaggtagcagcacacgagctcaaccttcctgggtcta

SEQ ID NO: 348526 - DNA, 1707 bp, Homo Sapiens
atgaagcatctttaagagagtttccattgtttaagttttcagagttgttgaaattccataacattctccttcttggtcttttaaatttggcctgtattctttcctttatgccaaactgcagaatttttcattattctgtatatcagtcagtgccatttcagctgtgccctggtgcgggtcattattgtactagacaattgagttcttataaaatcctgtgagttgtaacttattaaggtaatgtacagaattcttatgacagatattagacatactgaatccaatcttttccatttttatttgggggtgtaacgtatctaacggcatcctgtttcatggatgcagtggcattgtttgtgcattaagacttcacaccaattttgacaacctcttctcatctccgtgcagcttagattgtcgcttcacctgcttgctaagtccgatgcacgcctgcattttaccatgcagaaatatgttcaagccactcatcctctcatgtctcttcaccagttcttttgttatgctggcatatacctttgtttttatttatattcaagtttccagacatagcattaatgcctttacttttgtgtttttatttctgtacactgtcttgctgggtctctagagatgacttggctcatctttaaccagaggtgctgcgtgagggtttttatcagagactgcaacacaaagtcaggtgcatggcttgggtgtcttgtttggggatgtttctctttttagatcactgtttcccatcataacgtgtttttgctactaaagcatcgacaggttttgcttgaaattttttccaaaaattaccgggtacgccgaaacatgatccagtctcggttgactcaagagtgtggagaagatctcagtaaacaggaggtggataaagtactaaaggactgctgtgtaagctatggtggcatgtggtaccttaaagggacagtacagtcttgacaatagtagcaaactactaacccagcaaatctaagcccaaggaagaagggcggaaccagaagtagggcctcgacttgcttcagacgacacagagcaagaggaactgaccatctcatgacctgtggcattgcacggtgcagtggacagaagggattatcctcagccagtcacagggtcagcttaagttagttagatcactcccagaagagaccagctgggaccttctttgcagtacaatttgaaattcctgatgtattttgcttattatttggtttcattctcataataaagagagtgtatactgacatgggcaggatgataaaaatcatggtttaatattttcttttgtaaacttaatgccaacaaggtctaagttatgtttacaacatgaagaaaacctcaaagttcttaatttttaaaatgcctagaagacaatatttagtcttggattatctatctgctaagacctccaccaatttcattaaaccaaattgaattattctattcttgggattctgtggccacttcacctttgacaacaacctactttatgtagcagtctcaactgtttacatgaaccatagcaaaaaaatcagaatcaaatccatctccttttaatgtttgcagaaagatgcaaacaaaaccaggtaagtatggaacaatgtgtaagtgaggttatcacactttgatgtaaaaatttctattttgtgtatttttaaaataaatgcaaacactaaacta

SEQ ID NO: 348527 - DNA, 1090 bp, Homo Sapiens
  misc_feature (4)..(4): n is a, c, g, or t
aaanactacccctgaggaaagggtggctggtagtagccatggtggtatggttaggcagtttttgatttcccatttgtattctattcactaatcataaatcgagtgttgacattgtggacagaatgtaattagctccttttcctgcaaaaatctgtgcttaccctgtttctctctcataggactgctgtgtaagctatggtggcatgtggtaccttaaagggacagtacagtcttgacaatagtagcaaactactaacccagcaaatctaagcccaaggaagaagggcggaaccagaagtagggcctcgacttgcttcagacgacacagagcaagaggaactgaccatctcatgacctgtggcattgcacggtgcagtggacagaagggattatcctcagccagtcacagggtcagcttaagttagttagatcactcccagaagagaccagctgggaccttctttgcagtacaatttgaaattcctgatgtattttgcttattatttggtttcattctcataataaagagagtgtatactgacatgggcaggatgataaaaatcatggtttaatattttcttttgtaaacttaatgccaacaaggtctaagttatgtttacaacatgaagaaaacctcaaagttcttaatttttaaaatgcctagaagacaatatttagtcttggattatctatctgctaagacctccaccaatttcattaaaccaaattgaattattctattcttgggattctgtggccacttcacctttgacaacaacctactttatgtagcagtctcaactgtttacatgaaccatagcaaaaaaatcagaatcaaatccatctccttttaatgtttgcagaaagatgcaaacaaaaccaggtaagtatggaacaatgtgtaagtgaggttatcccactttgaagtaaaatattcttattttgtgtttttttaaagtagaggcataagcttaactagaaaaaaattaatggataattattataatatggtccgtattctaggtgcctacatcatattgttaatttttgcacgcttcggcatacgtaccggcatacgtattttttgtac

SEQ ID NO: 348528 - DNA, 1220 bp, Homo Sapiens
caattttggcctgcaaagacttccttctctcgcctctactacccaactcctgtgagggactcaggcatagttcgggcggaggcagaaagagcgagcgcgcgaagaacttcggtattgaggttgctaaggcttctcctcatgtgcttcaagagaaagtagcctttaactgtggaaaggacaccaggggaccggggaaggggagagcagtggtaaaaatgagccagaagcagataaggcgactgcccgccccgcggagagctgccttctgggacttgtagtgcgcggggccccggagccggctggctgcgcaggctcggcgttgcgctggccccaccccggcgggcggagtaacggtttggaatcccccggggtcagcgagcgcttgtttcctccgcctggtgtagcaaaagtgtaaacacgcgcgctccggaaggcgccctccagtgggaggttgctcaggggatggcggagctgtgaaactcggagctagaaggaaagtctcaacgcttgtctaaattttgctttgtcgtgacgagctacctagacccacgcagagctaacttgggagagcgcttgtgacgctacgaacctctcgaacacctgacgactgggcgccagggccggatggagggtggagagccagtgcggcgcagctgcctcctcttaaccgggacaccttgcaggaatgtgcggagtggagctaacgggagcggatagaaaccgagggaggggaagagagcgcgaaggcttggccggaaggagaggttaaaaaggaaaggcctaaaatgaggaagagagttaccacaacaagcagtacctagttccagttcttggtcccaggagtttgtggttgttgctgctttcatcttcctcagccaacacaaaaggaaagtgccaaggggcgattcctaggaccttcagtgcagtctccaccttgcggacttggctcatttgtgtccactcctttctccagccttttacacttgatgctcttggatgaatagaaaggagcacaattaatggaaaacacaagcttgggagtcaagggatttgggttctattcttgtcctcccttggtgacgacatcattaccttgggttattcaagctttcagtgccagagttcctatatcaataaaagattattacattgacctcttagagaaatgttttcatggtactgaattgcaaataaagtatgtgtagcgatgtgttaaaaaa

SEQ ID NO: 348529 - DNA, 1945 bp, Homo Sapiens
  misc_feature (1692)..(1692): n is a, c, g, or t
  misc_feature (1697)..(1697): n is a, c, g, or t
  misc_feature (1699)..(1701): n is a, c, g, or t
  misc_feature (1705)..(1736): n is a, c, g, or t
  misc_feature (1741)..(1741): n is a, c, g, or t
  misc_feature (1746)..(1749): n is a, c, g, or t
gtttttatctcctgatgatgatgcacagccttcagcgggggacatttaagacgcagaacaccaggtccaggctgcagatgcgggactcagaggcgaagcttgaggggctcaggaaggacgaagaaccacccttgagagaagaggcagcagcagcggcggcagcagcagcggcagcgaccccaccactgccacatttgccaggaaacaatgctgctagcgacattcaagctgtgcgctgggagctcctacagacacatgcgcaacatgaaggggctgaggcaacaggctgtgatggccatcagccaggagctgaaccggagggccctggggggccccacccctagcacgtggattaaccaggttcggcggcggagctctctactcggttctcggctggaagagactctctacagtgaccaggagctggcctatctccagcagggggaggaggccatgcagaaggccttgggcatccttagcaaccaagagggctggaagaaggagagtcagcaggacaatggggacaaagtgatgagtaaagtggtcccagatgtgggcaaggtgttccggctggaggtcgtggtggaccagcccatggagaggctctatgaagagctcgtggagcgcatggaagcaatgggggagtggaaccccaatgtcaaggagatcaaggtcctgcagaagatcggaaaagatacattcattactcacgagctggctgccgaggcagcaggaaacctggtggggccccgtgactttgtgagcgtgcgctgtgccaagcgccgaggctccacctgtgtgctggctggcatggccacagacttcgggaacatgcctgagcagaagggtgtcatcagggcggagcacggtcccacttgcatggtgcttcacccgttggctggaagtccctctaagaccaaacttacgtggctactcagcatcgacctcaaggggtggctgcccaagagcatcatcaaccaggtcctgtcccagacccaggtggattttgccaaccacctgcgcaagcgcctggagtcccaccctgcctctgaagccaggtgttgaagaccagcctgctgttcccaactgtgcccagctgcactggtacacacgctcatcaggagaatccctactggaagcctgcaagtctaagatctccatctggtgacagtgggatgggtggggttcgtgtttagagtatgacactaggattcagattggtgaaagtttttagtaccaagaaaacagggatgaggctcttggattaaaaggtaacttcattcactgattagctatgacatgagggttcaggcccctaaaataattgtaaaactttttttctgggcccttatgtacccacctaaaaccatctttaaaatgctagtggctgatatgggtgtgggggatgctaaccacagggcctgagaagtcttgctttatgggctcaagaatgccatgcgctggcagtacatgtgcacaaagcagaatctcagagggtctcctgcagccctctgctcctcccggccgctgcacagcaacaccacagaacaagcagcaccccacagtgggtgccttccagaaatatagtccaagctttctctgtggaaaaagacaaaactcacttagtagacatgtttccctattgctttcataggcaccagtcagaataaagaatcataattcacaccacanaccanannncccnnnnnnnnnnnnnnnnnnnnnnnnnnnnnnnncccanccccnnnngggggccggcccctctaaaataatccctcaagggggcccaagtttacccggtacccaggttttcttggaacaagggggcccctaatagggagccgcattaatagcttgggccttggcccgccctttttaccaccgcctggattgggaaaaatgcctaaccttgggaatttttggggaaagaaacctttacttccgt

SEQ ID NO: 348530 - DNA, 1551 bp, Homo Sapiens
gcatctatcccatgctagggttggaaactgatattggtattacttgtgttttttcttagtgtgttttatttcccagtttcatcttcttctaaaaatgaaaatatggtgccttccctccctccaggaagactggcaaatatttccttttatttactgctgctgtggagtgatgagatatgcactttactctttaagattcagcaaaaagcttttcacttctcagtatatccagaatacatcatatctgggacttaggaaaatttgccaagcaatctttgtttttatagatactaatgttgaccctctccagcgttcaatgttataaatagaacaagtcaaggctagtgtttatctcctccccctccccaaaactgtggcacagcatataaaaatgtacctcaattaatgttctattaaaaatgggacaggggccttatgttttcataatttcccaacaatgtgccgccatatttttgcctcaaggtaaaggttttaacagatgaaaaagtacttcccaattcccccgtgctattcctaacctataatgcccaaatgttttgtgcaatgtgtagtgtgtgtgtataaatacatatattcttgaaatagacataccatcagagacatcattcacaagtaactgatgtattggcatctcattcatatttctgatgtgtgaggtatatggtactaattaccttttccttgatgtttgccaaatttgaataaaggcattggtacgaaattacagaatgtaaagaaaatgtttttggcttgaaaaattaacatattttatgacgtaccacagtatactctgcccaaccagcaccctatctatctttcctgttctttacatccctgttccccatccctacttcctcatttttggtataacacagttcttttgaagcatcattataattgcagttctatggcaattggacagttatagcatggaaacagactggtataaatagtacagtagtcaccagtgtgccacatttgcattagtaatgcaaaatatacattttataaaggacaaactttgtgttatgttttattttcattacattgtataatattgtaagactattgtatgtcctaatttgcattataaatgtttttttcctacgtaaaggcataaatatagcaactttgtataaaggtagcttattagatttttaattttttcttttataaaaaattgtccaacagtgggactaccattgccaaattgtatatgaaatatgaattttacccccatggttaatttcttttataaacattccatatttctctaataaaaagacataagtgatactgtactatgcatacattgtatcttaatgctgtttcagatcagcattttaaattttggtttgcatttttaatattggcaaaacgtaaccactgttaattaaaataaaaccttgttgtatatgtaacaacataattttccctctatcccttcccaccctttgttctctatttctccctatcagtgccaacttcatacattttgtagcatggcaataaaatataacttttacactg

SEQ ID NO: 348531 - DNA, 1006 bp, Homo Sapiens
  misc_feature (13)..(13): n is a, c, g, or t
  misc_feature (26)..(26): n is a, c, g, or t
  misc_feature (730)..(730): n is a, c, g, or t
ttcgcctactacnactatgctgcganaaagacgacagaagggttggtgcggcgtgtgagcaaggagtcctcgtagggaatcaagcaggaggggttgatggaggttggagttgctggtcctcttggagcccctgtgtccaaggggaagaaaacaagaagccgtgaatgcaataacccacctcccagtgggggtgggagatcctgcgttggagaaacgacagaaagcacacaatgcgaagatgaggagctggagcacttgaggttgcttgaaccacattgctttcctttgtctttggttccaacagaattctgtccatcacctcctgccttgaaagatggatttgttcaagatgaaggtacaatgtttcctgtggggaaaaatgtagtgtacacttgcaatgaaggatactctcttattggaaacccagtggccagatgtggagaagatttacggtggcttgttggggaaatgcattgtcagaaaattgcctgtgtactacctgtactgatggatggcatacagagtcacccccaaaaacctttctacacagttggtgagaaggtgactgtttcctgttcaggtggcatgtccttagaaggtccttcagcatttctctgtggctccagccttaagtggagtcctgagatgaagaatgcccgctgtgtacaaaaagaaaatccgttaacacaggcagtgcctaaatgtcaaacgctggggaagaaactgcagnaattcaagatgtggtttgtaaaatgccctacaaatgtggaccttccctgggatgtaagttgctcaagatgagaagaagcaaaaggatactgcctctgacagtttgcaagatgcatgttctccactgtcaggggtagaaattacaccctttactggtaggggacagctgtactcctgcctggcctcacctgaaaaaaagcttgggggtggccttgcccactgttgggggaactaaatgtgatggctggagaagccacccaaattggtgtccttgccc

SEQ ID NO: 348532 - DNA, 1812 bp, Homo Sapiens
aagccttgctaatttagtagtgatgctttccttggttgtacaggtgtacatttgtaaaccttcatgctgtaaatggaatttgttttatctctttgggatacatttgcattttagtgtacatttacgtccctgccctctttgacctggcaatatagtgttgtataatgtaaatttatttctccaaatcgagagtgattttttaaaaattttttatctttatatggtttcagaagtatgaaccagctttctttttattattgtgagatcattttgttttataacatagttgttgactgttaatatggacctgctagaatttggatcactttcaattgaagtcagggtattgtgcataatagaaagtattggactgagatatttggttaccatggaggccaatgcttttttcatcttattaaatgtgatgtgacttttttctttgtacagaagagtactgtatttttgaatagcctactcccaagtaagagcaaatctgtatgataacattttttcctctggacataagacataacagtaacacgatgtacatttacaagcggccttatgtacatttcccaacaatctttttaaggcaaaattgtgaccatatgtgtataattaaaatcgtttttaatcctttgcctatgaaaatattttggaaaaaaacttgctgtgtatattcagtttctgaaagataaagaaagtgctttgtattttgttgaagtcagtattttgtataaacatttatgttgacccacttatgttcagtgctgaaaactaaaatgaacatgctattctgtcagctgaatatggaagagatctttttttactagagatctgcagaagaaacgcaatcttctgagcacaatatggaatctaaaggttttatcacttagttgttcatattatgaacctaaaaataatggcataaagtttggggatgccaggcatactttttcatgtttggtgttgagttattttacttttctaacccaacattccttggtgagaccattaaatccaaacacttgtcaccgttccttctcatagtcactctgggtcatcagcatgtcccagtcactgcagcaacgccttgtgtttgtttcatttttttaaaacccacacaaagccgctgtctcactttttcctactttaccaacctcagagtatttcggcccgtatcgaacttttgttctcagtatcagcccatggtttcaggatcaaagctgtcatgttggagattggtaatggctttcctgtctttgtacagttgaattcctagtcttccttcatccttgccctctgttggcacaggcattatctctgcaattttagaaaatgacaagtagagaatactacattgagaaactaaaccctcttcttggggtcctgatactcattccccatttgtcccagtgctgacaacccaatcttcccaatactttcaggcctgctctacaaaagtacctgttcttgtagaaattttacagtctgccattttgggtgcccaccccaatttttaccttttagtaagttggcatgaaattttggtaaaatctgaaaatcacatttcagaataaaacaattgggcaaaactacctaggctttactcttgagtgtctccttttgatagggattgtttctggaccagtttgtctaagtcctggctcttattggttcatatgaaataatgttaacttcacttctttgtatattatgtataaattagaaaatgaaaaatgtatgaataacattgtatgaaataaacctggtcttgtgtttttctctagataaaatacccctctgtacctc

SEQ ID NO: 348533 - DNA, 1050 bp, Homo Sapiens
gagatggtgacagatcaagccttcgaggatagaataaaggaagcagagagggaagttatggacctccttcgtgaggcccaggatgtcaaagatgttgaccagaatttgatggatcgcctacagagagtgaataacactctgtccagccaaattagcagtttacagaatatccggaataccactgaagagactggaaacttggctgaacagagcgcgtgcccatgtagagaacacagagcggttgattgaaatcgcatccagagaacttgagaaagcaaaagtcgctgctgccaatgtgtcagtcactcagccagaatctacaggggacccaaacaacatgactcttttggcagaagaggctcgaaagcttgctgaacgtcataaacaggaagctgatgacattgttcgagtggcaaagacagccaatgatacgtcaactgaggcatacaacctgcttctgaggacactggcaggagaaaatcaaacagcatttgagattgaagagcttaataggaagtatgaacaagcgaagaacatctcacaggatctggaaaaacaagctgcccgagtacatgaggaggccaaaagggccggtgacaaagctgtggagatctatgccagcgtggctcagctgagccctttggactctgagacactggagaatgaagcaaataacataaagatggaagctgagaatctggaacaactgattgaccagaaattaaaagattatgaggacctcagagaagatatgagagggaaggaacttgaagtcaagaaccttctggagaaaggcaagactgaacagcagaccgcagaccaactcctagcccgagctgatgctgccaaggccctcgctgaagaagctgcaaagaagggacgggataccttacaagaagctaatgacattctcaacaacctgaaagattttgataggcgcgtgaacgataacaaggacggccgcaaaggaggcactaaggaagattcctgcccatcaccagaccatcactgaagccaatgaaaagaccagagaagcccagcaaggccctg

SEQ ID NO: 348534 - DNA, 983 bp, Homo Sapiens
  misc_feature (53)..(89): n is a, c, g, or t
aaaggcgatgtactacactcatataggcgcctggagttaacgcggggcggcgnnnnnnnnnnnnnnnnnnnnnnnnnnnnnnnnnnnnnatcaggccaaatcggccgagctcgaattcgtcgagagcgggcaaagcctgccgggagcttggtgcgctatggcgacacccagcctgcggggtcgtctggcgcggtaagggaacccgcggaagcctgtgctgaagcgccaataaacctctcattctagctaaccgcgtcggggagcggcgccgggagaagggcgaggcgacttgcatcacggagatgtcggtgatgatggcttgctggaagcagaatgaattccgcgacgatgcgtgcagaaaagagatccagggcttcctcgattgtgccgcgagggctcaggaagcccgaaagatgagatcaatacaggaaaccctgggagagtctgggagtttacttccaaataaattgaataagttgttacagaggtttcctaacaaaccttacctcagctgaaaatggacaagtattttcaatgactgaaatatagcttctgacaactatgcagaggcattttagagacattggcattgccatgccctctttggagggtagaagaggcaaaacacttttttcaccctttggaatcatagtatgggtagaagttatgatttatcttgaaataaaatcctctgaacagaacttggccttttgttgtgaattaggtactctcttcaatttgagcctccccctagaccctggaaattctttccttcctgatttgccctaggagcaggacaaataccgttgtattgtctttccctgcatttgaagtcttttacaccatttagtgcccttgcttttggatgcaataaggaagttgaagttgccttcgtctgtaaatacttagtgattgcctattttgtgcgtagtccctgcaaggtgctctctgaataataaagttaacaaactggtgacctagaa

SEQ ID NO: 348535 - DNA, 1984 bp, Homo Sapiens
  misc_feature (739)..(739): n is a, c, g, or t
atctgtctttctagcatgttgccctttttcaaccacatttgtgtttcaggtgtagagaggagagagagtgaacagggagcggggcttttgtctgttggtctccctggactgaagagagggagaatagaagcccaagactaagattctcaaaatggtttattacccagaactctttgtctgggtcagtcaagaaccatttccaaacaaggacatggagggaaggcttcctaagggaagacttcctgtcccaaaggaagtgaaccgcaagaagaacgatgagacaaacgctgcctccctgactccactgggcagcagtgaactccgctccccaagaatcagttacctccactttttttaatcgtaacacctccatttgtattacatatggtgtatgggtattgatgaggtcatggtatcatatatgggatttttttctgtgtaaatcatcaagtataagaagaaactatgggactctgagccttgctttagagaatttacagtggacaaataggtgtcatcaaaccagtttttaatcattctgactcaagtgaaaacgctcagaatttcacactgtgaatccacgtttacaacccttacaggtgggccttcaggcctggttcgctacaacaatgtcttccacaactcaaactcccaccgcgctcacacaaccggtccactcctgccttttcactcacacagctcccgactgcttcttgcagaggctgagagtccccccccnccaccttttttttcatttagatgtaacaaacctagtagtttatgttcatcaattgtctgtatatctctatattttatccatgtactcttttgatgtatagaagtagtttgaaactcattgtttccttgtggtaagtgaccgagatgctgccacaggacctgagacactgatgaatggtgctattttggactttcaacatgctccttggcgaggtagctctgatggagttattttttatttccatgttctaagaaggtgttggtactctgtttccctgaatgttgttctctagactggattgacttgttttccttgtgtcttcagtgtggctttcttcctcagtgttgtaggttgagcgaatgctaccagagtgtgagagaccattgtctcgttggctggcgctcacggacatgcagtcacggtagcgggagcaatcacaaaactgtaatttacttaccaaatctcttcctttccatagcctcgcctgcctgacttagagaaagaaaagcaataattttacaggcattttgaggtgtctctttctttgggttctttctgtttgaaaggatatttgtcgaaaaaaagagcaaaaccgttttaaataaactccccctggaaaaaaacccaaaacactggcatctgagtaggaatatgaaaatgacaccttttccaaatattaaattggaaaacaaggtctacaaaatcatgatacttttttaaaaggcagagcattcttttttcggcaattttgataagcaaggtgtagatttacatttttgtccttgctcccaacgaaatggataaacaaaaataaattaccatctactcatggaatgttgttgtgttagccagtctgaaagcccaccttaatttttatataactgtctttagctcttcttttgacagggcaggccttgttctgaactgtttcgcttctgactgttaaacaccgatgacgcatgcactgcacttcttcgttttcttcttgctcccccattggcctgagtttcttgtgcattactcctctccctccttcgttagaataggtatatcagctgtgtaaatagagcaagaaaacagtattctgcatctgtggcatttatgtagagttgcagttgtgtactgctgaaaatgcaggcttttgtaacagtgtgatctttactgatgcactcatgacaagtacccaatgtattttagctattttagtagtatttgttcaataaatacgcaagctgtaaggtaaaa

SEQ ID NO: 348536 - DNA, 717 bp, Homo Sapiens
tgtttcaggtgtagagaggagagagagtgaacagggagcggggcttttgtctgttggtctccctggactgaagagagggagaatagaagcccaagactaagattctcaaaatggtttattacccagaactctttgtctgggtcagtcaagaaccatttccaaacaaggacatggagggaaggcttcctaagggaagacttcctgtcccaaaggaagtgaaccgcaagaagaacgatgagacaaacgctgcctccctgactccactgggcagcagtgaactccgctccccaagaatcagttacctccactttttttaatcgtaacacctccatttgtattacatatggtgtatgggtattgatgaggtcatggtatcatatatgggatttttttctgtgtaaatcatcaagtataagaagaaactatgggactctgagccttgctttagagaatttacagtggacaaataggtgtcatcaaaccagtttttaatcattctgactcaagtgccttcaggcctggttcgctacaacaatgtcttccacaactcaaactcccaccgcgctcacacaaccggtccactcctgccttttcactcacacagctcccgactgcttcttgcagaggctgagagtccccccccaccttttttttcatttagatgtaacaaacctagtagtttatgttcatcaattggctggatatctctatatttta

SEQ ID NO: 348537 - DNA, 1296 bp, Homo Sapiens
tgggacacaagccatagcaggaaacagcgagcttgcagcctcaccgacgagtctcaactaaaagggactcccggagctaggggtggggactcggcctcacacagtgagtgccggctattggacttttgtccagtgacagctgagacaacaaggaccacgggaggaggtgtaggagagaagcgccgcgaacagcgatcgcccagcaccaagtccgcttccaggctttcggtttctttgcctccatcttgggtgcgccttcccggcgtctaggggagcgaaggctgaggtggcagcggcaggagagtccggccgcgacaggacgaactcccccactggaaaggattctgaaagaaatgaagtcagccctcagaaatgaagttgactgcctgctggctttctgttgactggcccggagctgtactgcaagacccttgtgagcttccctagtctaagagtaggatgtctgctgaagtcatccatcaggttgaagaagcacttgatacagatgagaaggagatgctgctctttttgtgccgggatgttgctatagatgtggttccacctaatgtcagggaccttctggatattttacgggaaagaggtaagctgtctgtcggggacttggctgaactgctctacagagtgaggcgatttgacctgctcaaacgtatcttgaagatggacagaaaagctgtggagacccacctgctcaggaaccctcaccttgtttcggactatagagtgctgatggcagagattggtgaggatttggataaatctgatgtgtcctcattaattttcctcatgaaggattacatgggccgaggcaagataagcaaggagaagagtttcttggaccttgtggttgagttggagaaactaaatctggttgccccagatcaactggatttattagaaaaatgcctaaagaacatccacagaatagacctgaagacaaaaatccagaagtacaagcagtctgttcaaggagcagggacaagttacaggaatgttctccaagcagcaatccaaaagagtctcaaggatccttcaaataacttcaggatgataacaccctatgcccattgtcctgatctgaaaattcttggaaattgttcccatgtgattaacatggaactgcctctacttaatcattctgaatgattaaatcgtttcattttctaaatgtgttataatgtgtttagccctttcttgttgctgtatgtttagatgctttccaatcttttgttactactaataatgctataaaataaatatccttgtacttctttgtga

SEQ ID NO: 348538 - DNA, 498 bp, Homo Sapiens
  misc_feature (386)..(386): n is a, c, g, or t
  misc_feature (417)..(417): n is a, c, g, or t
  misc_feature (443)..(443): n is a, c, g, or t
  misc_feature (471)..(471): n is a, c, g, or t
tgaccttggactgaaccactattgaagatttatttgataataatttgtaagttttaactcagtacctcccttctgcttttatagttcaaggagcagggacaagttacaggaatgttctccaagcagcaatccaaaagagtctcaaggatccttcaaataacttcaggctccataatgggagaagtaaagaacaaagacttaaggaacagcttggcgctcaacaagaaccagtgaagaaatccattcaggaatcagaagcttttttgcctcagagcatacctgaagagagatacaagatgaagagcaagcccctagggaatctgcctggattaatcgattggcattgggcattgaggacagagctttctttcgaggacacctttcanttccctgggggcttatggaagttcccggaanttctttggcatcttcagttttggccngggtattattccccaggtttttttgggnccattttggcccgttatggccccgagc

SEQ ID NO: 348539 - DNA, 600 bp, Homo Sapiens
gaggatccctactcttctcattgcggggagcacgcaggtctgagcttgtccggcgagggtgggagttggtcccggcggagatccagtgggaagagccggcggctgcccgggcagtgctgatggcagagattggtgaggatttggataaatctgatgtgtcctcattaattttcctcatgaaggattacatgggccgaggcaagataagcaaggagacagagtttcttggaccttgtggttgacgttggagaaactacaatctggttgccccagatcaacctggactttacttagaaaacatgcctacaagaacatccacagacatacgacctgaagacaaaacactccacgaacgtacaacgcagtctgttcaaggacgcagggacaagttacaggaatgttctccaagcagcaatccaaaagagtctcaaggatccttcaaataacttcaggctccataatgggagaagtaaagaacaaagacttaaggaacagcttggcgctcaacaagaaccagtgaagaaatccattcaggactcagaagcttttttgcctcaaagcatacctaagagagctacagatgagcgcacgccctagact

SEQ ID NO: 348540 - DNA, 341 bp, Homo Sapiens
  misc_feature (130)..(160): n is a, c, g, or t
aagtaatggtgaaatggtcccattggagagtctcctaaatagaccttccaggcagaaccgcaagctcaaaatctttgtatagttttgaaaattgaggagtagctttgtttggaagcctttctggtggtgnnnnnnnnnnnnnnnnnnnnnnnnnnnnnnnactatatgtaatacaagcctacagtatttgcactaaagaaagcttgttagaaaaagcttgctgctatggaagaaagaacatattaaaacttctttcccttgcgatttttttgggggaggggggttagcatttccactttcagttgagtagcattttgtagaataaaatgaattaagattga

SEQ ID NO: 348541 - DNA, 1841 bp, Homo Sapiens
  misc_feature (77)..(77): n is a, c, g, or t
ttcttctgattgtagcatatctccccaacataagccagattagcccttgaagctgatactatcagaagtctaccacntatcacatatgctggaacaccactgtcattttataaacctccccgaaagaagtcttgaaataaaaaaacaaaatacaagacctgctctggcctcaagagatactactgttccatgagcagagctgactcattctatttcatgagactcagaagggaggagccaggagatgtggagcaagcttgtctgtcctccaaaatgggaacagaaggcactgccaggctgaaaacttggtctattcccaggagggctggctgagaccctggaagtcagacagagcagcagcctctccacaaagcagacccttcagcttggcagcatcacccattccttggtgcctccactcttggcacctccctccctccccaccctttcaagtgtcttccagttggtttaagacttcacacagaccgagggcagactgcgctgatggcaatgccggaggtgagaggaggagctacctggaagaggcctacctttcagcttcccacagcacccaggaaccttaagagctgctgacctgctggtgggcctggccagagccttctcaccaggcacagctatgcctggtcgtcaagacaaccaacaggcagccagaactacggaaaataaacttttttatctggattccaggacccttatcctaaccttttactttactatagtacctctgcaacctacggggcaggaaaaaaagggaagaaaaaatactggggaagaaaacacagcactgtttggcagctccttttggcgcgcaggaaactgccaccccagccttggcttcctggggcccaggttcccagatgtgtgttgacaaactgcagcttcgatcatctccgtgtgcccaggatcttgtggccgcggcaaagcacctcccctatctactcttgcagcacttactggcctccattataggcataatcagccttgttgtgcattatcagcttgttgtcaacaaagtagaagctgtcagagcgggtctcgtaaggattttcaatcattagacgaatgacatcctccgaaagctggggaaactcatagatatgttcacaagtgttcctactgctggggatgcagaagccaaaatcaaagtcaaagtttttcagcaagtgttcccggaaatagtgccgttcgatcatccggaagtttgaaacaggtttgtctcccactgtgaactccaccgtagccccgactgtccggaggcggagaaatgccggtgtgaactgatagcggacaaaacgtcctgcgctgatgtccacgtctccacctccctcctcctcatcctcctcctggtctgaaacgcaaggtttggcaatctcaaaaagtactgtccctgtctccaaatctcgaattttgaagcgggtgaaatcaatactgtagatgttgtcttcgggtttacataaataatctgaacagccctgggctgcctgctatagcagctcagcagacaccatggcagccttcgatccatccagggaatgttgctgctgccacagggttaggagactgcacgccaggagtgatgggcaggccaagataggcctaactaggtgagtgcacactctctcggtgacccggctgaggcgcaggacgtgctcgggccggatggtgtccagcgccagcagctcctgctccgtgaccgctgccccgacgccgtcgtcggccgcgtggtggggcgcctgccgccgcgccttcaggcggttcaggacgccgccgcccgccttcttcttctcctccttgccagccaccagccccccgggcccagc

SEQ ID NO: 348542 - DNA, 2406 bp, Homo Sapiens
  misc_feature (35)..(35): n is a, c, g, or t
ggtagcgaggcctggggggcgaattcggcacgagngtcaaaaaagttcacttgcacatctgtgggctgctttgtcctcagacccttagtggacagactccacaaaccctctgatgagacgattgatgtggccagggtccagttagcatcagtagaaggatgtcactaggaaaggcccaggtatctggtaagtgactgtgaggtgtcacagtacctgtgacaggagagtgtcctgatgtgcttgggagaaaggccgtatgggggccagggatggaagagacagtgtgtggccacagaaattcctgtccatccaccaccagtgctgctccctgtgtgggctttagggcgagtggccccgaaccttggcccagtgctttgtcccaggccagagtcttggcaatgccacatgctggcagctttctcactgagaaggtcctagcttacccctgtgtgctggccttggattcagccccgagagaggggagagaccattcctcctgtggagtgggttccttatcaccagaccggccactctcagaactggcgtccactgtaaatccaggtgccttacgtgtggctctgtcccttatgctgcaggggaaagctgcattgccattgttcccacctcctcactggcagaaagatgccagggctgttagcactgtctcctcaccttctgtttctcattgtggctcctcaaatgggatttgcatgttcctgtcaagcgtaacaacaatcccttctctctttgacagaggcccaggtgggacagtttctactatttgatatttgagtattatctgggatgtggttctggagctgcccagagctgtgcttagtagagtgtgtcttggaaacatgcccctgggcacactgtatctgctacattagtgggctatctcttatctgcagtgttcgcttttgctagaaagaggatgtggaggaaggaggaggtgggcaatctggcttgagttgtgctgtatcctcttccttgttagcttgccttagtctcactggagaccatttgcggatagtgcttggtccatgcccagcaggacagggctttgctgcttctgaaagtctggtgttctgtatctggggctgtgggttcctgtgtctagctgctcaggaaatcttgagaagcattccactctggggtgtaaaccagtatgagtttgaaattcaagcgtttgtacctgagttggggagagaattgcaaggcatactttctctgaaagtaacagaaccattcaggctgccatgttattaaggaatctgaactgttgatagcagttaccttgtgggtgatacaatgggaggcggcaaaaaaactacctgcataggagaccctgccctttgtcaagagctgggagcacatttcatcagagtagcaggcccacctggtgccagagggcctgcccctcctgcttctgttcctttgccttgcagtctcctggagagagcctctcttttcctgtacagcctttgggccaaaatgcccttctagcttctccaaagaagatccgagtttatttcattctatgttttaagaggtaaaaggacataacaagtgaaagaagttttgggctaaagtaggctatgtctccttatgtattactcaatactgttttgcagagaaaacatttttcaagcatgtgcttcctgaagacacctcagtctttgggccatttgatttccaatacatagggtggaagaatgtgattttggggctgaccataaactggaaatttgtgaaatggcagtgattgggcaatcttcagtttattttttcagttgaagtggaactcatttctggaatggatttaataggctgtgtctaatgtacaaactgggtgagtcctgccttagtgtgtcctgccccaccggtacgcttccaggatactcttttcccctctgtaaagtcactttcttctgatggccagtgtcactatgatgtcagtgaggtctggggatgaggacagtgtgtcctgaaattcacaggactgactcctcaccccagtgcacgaggattcctgtggcatcaggtgctgctgtacctggtgtaggagcctaatcattgaaccattgtgttactcacattccatgtcacagaacatatcagcctcaagaaggatttggtggaggtggatttaccactggttttacaaaggaccgtgtaaagtcattgaagttgtgaaagtctattttttttcctgtaaatctattttttacagaatataagaaacatcaatgacctgatctgtccttcctcctccttcccgcttcccccaaaatcacattccagtttttattgtctttgtgtccaaagtaaactaggtgacttatttgtataaaatgttattttgccacatgagacagtaataaaagaaagattttcacagtaaaa

SEQ ID NO: 348543 - DNA, 1210 bp, Homo Sapiens
  misc_feature (128)..(128): n is a, c, g, or t
  misc_feature (307)..(307): n is a, c, g, or t
tacactcggccagctgccagatcaaagttttcaagcccaaaggtgcagacagaaagcaaaaaacggatagggaaaaaatggagaaacgaacacctcatgaaaaggagaaatatcagccttcctatganacaaccatactcacagagtgttctccatggcccgagatcacgtatgtcaataactccccatcacctggcttcaacagttcccatagcagtttttctcttggggaagggatggtgcgtccaaggttaaccatttatgtttgtcaggaatcactgcagttgagggagcagctacaacagcngcagcaacagcagcagaagcatgaggatggagactcaaatggtactttcttcgtttaccatgctatctatctagaagaactaacagctgttgaattgacagaaaaaattgctcagcttttcagcatttccccttgccagatcagccagatttacaagcaggggccaacaggaattcatgtgctcatcagtgatgagatgatacagaactttcaggaagaagcatgttttattctggacacaatgaaagcagaaaccaatgatagctatcatatcatactgaagtaggagtgcggcgtttcgtgcccagtggctgctccttccttcacctctgaaaacggccctcttgaagggggatatgaatggagatttgaaggtctgcaagaacctgactcgtctgactgtgtgtggaggagtccaggccatggaggcagaatcctggccctctgtgttggcccaagctcttgtggtacacacagattactgcccaatatgcagttctgcagctgttttagttaaatttctggaccttgttgttgttaaatatcagtagaaactctacataatttagagtgtatgtagggcataatgatgatgggaattgtgtgatgtttaacaggaagatcttaaattttgtgatatggagccctgtaatttttttcttatataaaaatgggtatctatattcataagactaggtcttcaatctctttgtactggtctcgaatgtactggtatctctgctttttgccacagtttgtcgctggaaactttatcagtgaggagaaatacagagattttccttttggttcgcctgtaataccacaactaatagtattttcagctaacatttatgaccaggcagttgataattttttgaatgaccatcttgtgctataaccccg

SEQ ID NO: 348544 - DNA, 1952 bp, Homo Sapiens
tgctttggtgacatatgaaacccggtttatacagcaggctggtacggtccggagttccgggatatgtcgaccacgcgtcgcgaccacgcgtcgggcgctggggcggcggacggtggaagggcctggcgagtctaggttttacgcctgtgctggactttctccttccatgtttccaggccgtggggggctacagagggcgagaagtcggctcagcggaaacctggatttggttctaagccgtggggttgagaaggggtgaccggaagtgatcgtgggactgaccggaagcgaggcctggaggggaaagagagagcgagacctgggagggagggggcctccagcagaaaggggcgggggaaaaggtgcaaaagcagcgtgggagcgccgggctggcttcctgcggctgctgctggtctgactgggaagcagcaagccaccactacgaactctcaagaggagtgggagtgcgggagtccagagctgcctctgggaagtctgcagtagttgagcaaaggggtcctcacgttcctgagagctgggcaggggggattttggaacctggggcagccaagaacgagcagccaagggtacgggagattagttgtgcacagagcagtgctggtcgggcttgggggtggctggtgggcactgcgtgggaaaccttggtttgtagttttcttggtttgcgttactcctgttgggtagaattaccctccgcgcctttgtacaagacacggtgtctcctggggcaaggaaggagccaggatggcctgggctctgaagctgcctctggccgacgaagtgattgaatccgggttggtgcaggactttgatgctagcctgtccgggatcggccaggaactgggtgctggtgcctatagcatgagtgatgtccttgcattgcccatttttaagcaagaagagtcgagtttgcctcctgataatgagaataaaatcctgccttttcaatatgtgctttgtgctgctacctctccagcagtgaaactccatgatgaaaccctaacgtatctcaatcaaggacagtcttatgaaattcgaatgctagacaataggaaacttggagaacttccagaaattaatggcaaattggtgaagagtatattccgtgtggtgttccatgacagaaggcttcagtacactgagcatcagcagctagagggctggaggtggaaccgacctggagacagaattcttgacatagatatcccgatgtctgtgggtataatcgatcctagggctaatccaactcaactaaatacagtggagttcctgtgggaccctgcaaagaggacatctgtgtttattcaggtgcactgtattagcacagagttcactatgaggaaacatggtggagaaaagggggtgccattccgagtacaaatagataccttcaaggagaatgaaaacggggaatatactgagcacttacactcggccagctgccagatcaaagttttcaagcccaaaggtgcagacagaaagcaaaaaacggatagggaaaaaatggagaaacgaacacctcatgaaaaggagaaatatcagccttcctatgagacaaccatactcacagagtgttctccatggcccgagatcacgtatgtcaataactccccatcacctggcttcaacagttcccatagcagtttttctcttggggaaggaaatggttcaccaaaccaccagccagagccaccccctccagtcacagataacctcgtaccaacaaccacaccctcaggaagctcagcagtggttgcatccaaatcgtttttctacattcacaaggcttttcacaaacttctcaagggcagatgtattgaaatgaactagagatgatgtggatccaaatctgtggcccctgcagatggaatcagactttttaatgcattaaaaagccggatgggcgtccaaagttaaccgttatgttcgtc

SEQ ID NO: 348545 - DNA, 774 bp, Homo Sapiens
gggattacaggcttgagccactgctcctggccaacatccagtattttatcttgactgtcctaaccttaccttagatgctaacagaagggtcctgctcaaataacactgggtgctatattgatgggtaaatgtgtacatcctattccttcctctttatctcacaattttgtctccactaagcaagaagtaaactaacacttcgtcactctaaagaaataacttatgtaaaactcttagtaaccctgtttgtcttcaaatgagtaaatagaccaaagtggggggacaattttctagttctgtagagggaaaaacatctgagtcaacattttcaaatgcagagggtattggtacatgacgacatggaaaagggcacttttaaacacagcttactcttcctcaagtacagagagtatatagtgaatcaaaactaactacagccattctttttaaagcccaagggatggagcaaaggtgtaaggatgttacctgtttgttttaatcagagagcaaaaagaagtcacaatagtttgggagaaaaagtagtatggtgagtaaggttatgcgtataatttcatactgaatttattactatttgggatgtacgtcaatgttctaacaaacactgccaacacgtcaattttttaaaaagcgtgggccacattgctaagaatttgttaaagcataactgtattttttgttttagggccttattgatgttttgccgttccaatgtatgcatttttttactcaataaacttgtcttaattttaaaaa

SEQ ID NO: 348546 - DNA, 464 bp, Homo Sapiens
tcgggctcctgagcttcaggatggttcgtactaagacatggaccctgaagaagcactttgttggctatcctactaatagtgactttgagttgaagacatctgagctcccacccttaaaaaatggagaggtcctgcttgaagctttgttcctcaccgtggatccctacatgagagtggcagccaaaagattgaaggaaggtgatacaatgatggggcagcaagtggccaagtaattatttccatttgtcccagtgcttggaaaatatgtctcctctttacctcctgctgggtcctgtctctgtccattgctcctacaatttcttcagcctatgttgttgactcactgtgtgatcttggaatcaacttgggaaattctgtctccttcctaactagctggaaaggagggaaggatgtgaaattgtcattttttcagcttcactttgccatccttacttttaattact

SEQ ID NO: 348547 - DNA, 2397 bp, Homo Sapiens
  misc_feature (2251)..(2262): n is a, c, g, or t
  misc_feature (2324)..(2332): n is a, c, g, or t
ggggccccaaccaggacgagtgccttgacaatcgggaagggtactgcttcacagaggtgctacaaaacatgtgtcagatcggctccagcaacaggaaccccgtcaccaaatcggaatgctgctgtgacggagggagaggctggggtccccactgtgagatctgccctttccaggggactgtggctttcaagaaactctgtccccatggccgaggattcatgaccaatggagcagatatcgatgaatgcaaggttattcacgatgtttgccgaaatggggaatgtgtcaatgacagaggatcatatcattgcatttgtaaaactgggtacactccagatataactgggacttcctgtgtagatctgaacgagtgcaaccaggctcccaaaccctgcaattttatctgcaaaaacacagaagggagttaccagtgttcatgcccgaaaggctacattctgcaagaggatggaaggagctgcaaagatcttgatgagtgtgcaaccaagcaacacaactgccagttcctatgtgttaacaccattggcggcttcacatgcaaatgtcctcccggatttacccaacaccatacgtcctgcattgataacaatgaatgcacctctgacatcaatctgtgcgggtctaagggcatttgccagaacactcctggaagcttcacctgtgaatgccagcggggattctcacttgatcagaccggctccagctgtgaagacgtggacgagtgtgagggtaaccaccgctgccagcatggctgccagaacatcattgggggctacaggtgcagctgcccccagggctacctccagcactaccagtggaaccagtgtgttgatgaaaacgaatgcctcagcgctcacatctgcggaggagcctcctgtcacaacaccctggggagctacaagtgcatgtgtcccgccggcttccagtatgaacagttcagtggaggatgccaagacatcaatgaatgtggctctgcgcaggccccctgcagctatggctgttccaataccgagggcggttacctgtgtggctgtccacctggttacttccgcataggccaagggcactgtgtttctggaatgggcatgggccgaggaaacccagagccacctgtcagtggtgaaatggatgacaattcactctccccagaggcttgttacgagtgtaagatcaatggctaccccaaacggggcaggaaacggagaagcacaaacgaaactgatgcctccaatatcgaggatcagtctgagacagaagccaatgtgagtcttgcaagttgggatgttgagaagacagccatctttgctttcaatatttcccacgtcagtaacaaggttcgaatcctagaactccttccagctcttacaactctgacgaatcacaacagatacttgatcgaatctggaaatgaagatggcttctttaaaatcaaccaaaaggaagggatcagctacctccacttcacaaagaagaagccagtggctggaacctattcattacaaatcagtagtactccactttataaaaagaaagaacttaaccaactagaagacaaatatgacaaagactacctcagtggtgaactgggtgataatctgaagatgaaaatccaggttttgcttcattaattcaccatccagagaccaaataattaaaagaaaaacaaatatagataggtagaactatattttcccccaatcagaatcatcatatcataggtacaatctttcaccaagtaaatttgtataaataagcactattctttgtattaccaaagcaaggtacaggtgactaccctagttcaaaacaaccactttctcaggcttctcatgtgtgtagctaagctaccttgtcatatgtgttgattcttgaaaactgggacgtgtatttccattgggggttggccatttatgctgacatgccatccttccagcaaacgtacgggaatgtgctttcaattgatggactactctattttttgcaaatttgtaaactttgcttctccaaatacaagtactaggttgtccatttatggtacctatttggtgctagtaaatttcaaactagattataaatgcactgtaatatgtacacaacttaaaaaaccaaatttacaagtattcaggtccaaatactttcattaaatttcaatcaacccaaaagtttaggttcagtaagctttatctccagtttattgaagtataattacaatttaccttggtaaaatttaaannnnnnnnnnnnaataacctgggaaaatccggcgggcctaatatttttttatatacccatttggggaaaaaccnnnnnnnnnattaaaacacctttagaagatattaaaattaaatatgtgcgcgccctctttttaaataggtgggt

SEQ ID NO: 348548 - DNA, 386 bp, Homo Sapiens
gaagaatagcatctttaatgagtgttctaatccttgtcatctgaagttttgaaatatatttaccagggtcagaacaatacagagatagtatttgtataatatagcttattttaaatttcatttaagccctctcatttctcctcccacagctgctgttttgttttgatgaaagagaaataaggaataaataaaaggtcaatgcttcaaactaatctacctgtgtactccctgaaaactctgggactgtatccacagaacagggaaaactattctcaaatgcacagtcactcatgcctcaggcatgaactgatgttctttcaaaagaaaaaagaacaggggcaaacttccagtcctatgtttgacacatactaaaaccccaaagagcc

SEQ ID NO: 348549 - DNA, 3377 bp, Homo Sapiens
  misc_feature (46)..(82): n is a, c, g, or t
  misc_feature (1547)..(1561): n is a, c, g, or t
  misc_feature (1955)..(1955): n is a, c, g, or t
  misc_feature (1957)..(1957): n is a, c, g, or t
  misc_feature (2060)..(2080): n is a, c, g, or t
  misc_feature (2093)..(2345): n is a, c, g, or t
tgtaactcactatagggcgaatccgcgctcatcgcggtggcggcgnnnnnnnnnnnnnnnnnnnnnnnnnnnnnnnnnnnnnatcaggccaaatcggccgagctcgaattcgtcgagagcgggctgaggtagcgctcgggcgccatgttaggacgaaggggaaggaggagaagcgcttaaagcggcgggagcggtgcgggagaggggttggacccagggctgaggcaggcccccccctccctcccgcctcagtggatcatgcccagggcggcagcggcggcggttgcgggggggaagtgactgggcggtgccggcgccggagacgatgccgtttccagttacaacacagggatcacaacaaacacaaccgccacagaagcactatggcattacttctcctatcagcttagcagcccccaaggagactgactgcgtacttacacagaaactaattgagacattgaaaccctttggggtttttgaagaggaagaggaactgcagcgcaggattttaattttgggaaaactaaataacctggtaaaagagtggatacgagaaatcagtgaaagcaagaatcttccacaatctgtaattgaaaatgttggaggaaaaatttttacatttggatcttacagattaggagtgcatacaaaaggtgctgatattgatgcgttgtgtgttgcaccaagacatgttgatcgaagtgactttttcacctcattctatgataagttgaaattacaggaagaagtaaaagatttaagagctgttgaagaggcattcgtaccagttattaaactctgttttgatgggatagagattgatattttgtttgcaagattagcactgcagacaattcctgaagatttggatctacgagatgacagtctgctaaaaaatttagatataagatgtataagaagtcttaacggttgcagggtaaccgatgaaattttacatctagtaccaaacattgacaacttcaggttaactctgagagctatcaaactatgggccaaacgccacaacatctattccaatatattaggtttcctcggtggtgtttcctgggctatgctagtagcaagaacttgccagctttatccaaatgcaatagcatcaactcttgtacataaatttttcttggtattttctaaatggtatgtgtttagattatattaaaataaaattgattgtagacactgaagtttagtcttatttctatgacatttctcagcttggtttcagattcaaattttagttcatgatgtagtcatgtaggcagccttggagatcacattgtgtataaaatggcaaactgaaactattttttttccctagtttggccaggatagtaaggcagattctatttgtacttccttgcataaacttaccctctgaataaactctgaattttagcagctaagatccaatttattgataggttgggaaatcagttactatacttttggataaaacttgtacacactacctctttcactcttttaattctctatctataggccattagtttcttgtgattgtnnnnnnnnnnnnnnngctttcagcatttatttggcctaatattaaagatacgaattttcataagaagcttttaaagaataaattaacattaagtgcttcgggacaaaaaaggaatttgagattagtcattaacccagatttttttaagtttcttcgtttcatttccacatatgtcaactatgatttaagaaaaagtagaataaaagattactgccattttatattaattgccttggcccaaaaggtgagggttcttggtttttaatcaaattaagataaatcgtccattcctgttcttatgaactcctgctcctccctctgcaaaagagatgttcttttctagtaattttataaaaattagttatttgagacaatttagagctgtgttcaactggaggaaaaataaaananaatttagaaccatgccacacttttcagtacacattctggctgttttgggatttagtagcacttataatcaggtgtgataagattaaagaatgtcagaatttcnnnnnnnnnnnnnnnnnnnnngtttgagacggannnnnnnnnnnnnnnnnnnnnnnnnnnnnnnnnnnnnnnnnnnnnnnnnnnnnnnnnnnnnnnnnnnnnnnnnnnnnnnnnnnnnnnnnnnnnnnnnnnnnnnnnnnnnnnnnnnnnnnnnnnnnnnnnnnnnnnnnnnnnnnnnnnnnnnnnnnnnnnnnnnnnnnnnnnnnnnnnnnnnnnnnnnnnnnnnnnnnnnnnnnnnnnnnnnnnnnnnnnnnnnnnnnnnnnnnnnnnnnnnnnnnnnnnnnnntgagccaccgcgtccggctgtcagaatttcttttaatgctacacatatataagcaaataatgtttttaagaagctaaccttgatgttaagagtggcaggtgttctccagtttttacctctttcatatgggaccaaagtagctagtttatggaacacatatgaaaatgtggttatgccaccaagttttactactacacttgtcttaccacttttaagtcatgaattctataattattcatacccctttgcctgtgatcagaagtaacttttaaaattatcacttgactttggatggaactagtataaaggcaggaattttgtctttcagtggagatttattctgttcaaggttgaagtggacacatcattatcttgggatggtacttctttatttaaatagtcctttaaagttctttgagtggcagagaacgtttttggtttcagtctgagaaggctaccaaatggtttaagttcatttcatagttaggagaaaaagattttgagtagtctaatgtcgtcagaaaggattaaaacgttgtatgtaccaagaaggcagaatgaagaaggatcacgttcacaaatgctgtatgtttaacaaaatacgtttagatggtaatatccaatagtcttatcaagtgctacaatctttttaaacagggaatggccaaatccagtgctattgaaacagcctgaagaatgcaatcttaatttgcctgtatgggacccaagggttagtgtattattttttcccctaccaattcacactgtgcaataacaagtaaaaatcatctgcataaactccagggagacttccagccttttacttatgaatggtcatgtccgtattacactttcttttagataacctcaactataattgtcctcaactataattgatgtgagaagcataattatgtaccctgtaaaccacatttaattgtacatagtttttaatacagattttactaacattttaatttattctatatagaactaccttgtaagtcaaagttgtgtgggcatttgtgcttt

SEQ ID NO: 348550 - DNA, 623 bp, Homo Sapiens
  misc_feature (52)..(63): n is a, c, g, or t
  misc_feature (409)..(418): n is a, c, g, or t
agcggggttatacaacttggcttgtttacctccacatgctgatgatgactannnnnnnnnnnngagttcagtgtggagacttgaaacttgaatgtcccttccaacttttatattaaaaataaaaagacaagaaaattgaagatcatttttcacctgtacaaggaatactaatggatcgtcttaaaattggtctaggaaaaaaccttggtgtgtgttatggacaattaactgttaaagttattgtaagttatctgtatttagcagagtatttccaacttgagtgatctgagctgaatttgaagactattaactaagttatgttgggaagttttaacttcaatgaagtaattatttgctgtgaaagaaacaaacattgaattactaaacaaagatggtgcaatatcttggnnnnnnnnnnatgaggctcctgagaatcaacccaactgaagcatttcaattcacttgaatgagaaacgtgtttagtatcaaaagagcccaagaagacactggtgtgaaaggtacaatctcagaggttggtcaattaccgtggcacactttctggtcactttgtacaatgtagatttgaagtacagtggtgaaaacattaaatgtgacatttgaaa

SEQ ID NO: 348551 - DNA, 1148 bp, Homo Sapiens
  misc_feature (294)..(314): n is a, c, g, or t
  misc_feature (508)..(564): n is a, c, g, or t
  misc_feature (793)..(802): n is a, c, g, or t
aaggacagtcatacattttgatatttgagccattcctaaagatttggggttttctaaaactaaagaatctaggaaccttgcctgcgaccaatcatggagccacgtgagctgatcgtggctgcacctgggggggagggtagggaggaggggcatgccacctaatgatcaagccctataattagcttctcattagagccgtgatggtgatgtgtgctgtctaaaatccaatgttgtgggtagagagaatgagttgtgtgactaggagagactaaacttttgttttccttacccagnnnnnnnnnnnnnnnnnnnnnttaatctatttttattagaagtttttctgctctttcttacataaaagaaccccaagcatgcatctttcatgtgtgtaaataattcatttctgggctaatttcaaaagaatcccaatattgctgtatagaaagagaactagcttgcacattttaggtctgtgaaattttgtgagacttttcctgcactggacagnnnnnnnnnnnnnnnnnnnnnnnnnnnnnnnnnnnnnnnnnnnnnnnnnnnnnnnnnggcacatagggaattatgtcaaatgtgtttgtgtccttaggcaaagctgtgggagtcttgaaatgtcacagtagtaaataacttattactttttgacaagttcttttttttctgttggaacactgaattcttctgtgcatatgtacatatgaatacaaatcgaaggcctctacctcctgggagttatacaacttgggcttgtttacctccacatgctgatgatgactannnnnnnnnnttgagttcagtgtggagacttgaaacttgaatgtcccttccaacttttatattaaaaataaaaagacaaggaaattgaagatcatttttcacctgtacaaggaatactaatggatcgtcttaaaattggtctaggaaaaaaccttggtgtgtgttatggacaattaactgttaaaggtattgtaagttatctgtattcagcagagtattttcaacctgagcgatctgagctgaatttgaagcactacttaatagagttatgcttggaagttttaacttcaaatgaacgtaattactctcgctgtgaaaagcaacaaacattgaattactaaacaagatggtgcatt

SEQ ID NO: 348552 - DNA, 1077 bp, Homo Sapiens
  misc_feature (861)..(861): n is a, c, g, or t
gagttagattcctctttccattctgttctatcattgccatcagatgtgcctcttcattttcactttgaaacactgttaaaaaagactgaaataaaaggcaatcttgctgaaaataaatttgtagatgaatatatcatatctccatcacctgtacatagtactctgaatcaatggagaaatggatattcacctatatgtaagcctcaaataaggtcagaatcttctgcacaactgttacagggaagaaagaaaagacatttgagtgaaacagcattaggagaaagaactaaacttgaagaatctgattttcaacacacagaatcaggatcccatagcaattttactgctgtttccaatgtcaacgttttatcaagaatccagaattcatcacgaaatactgcacgacggagattgagaagtgagagctcttatgacatagataacattgtgattcccatgtcattagtagccccagctaaattagagaaactccaatataaggaaatacttactccaagctggaggatggttgttcctcagccttttggatgaatataatttagggcaaagaagagattagaagatctttctgatgaagtcttctccctaaggcacaaaaaatatgaagagagagagcaagccaggtggtcactatgggagcaaagcaagtggcacagaagaaacagcagagcttacagtaaaaatgttgaaggacaggacttgcttttgaaagaataccctaataacttcagtagcagtcagcaatgtgctgctgcaagtcctcctgggcttccttcagagaaccaggatctgtgtgcatatggcttaccttctttaaatcaaagtcaagaaaccaagtcntttgtggtgggaacgacgggcttttccactgaagggtgaagacatggcagccttattatgtcaagatgaaaaaaaggatcaggttgaaaggtcaagcacagctttccatggtgaaatcttcggtaccagtgtaccagagaatggccaccatccaaaaaaacagtcagatggaatggaagaatacaaaaaccctttgggctaggacttactaatgtt

SEQ ID NO: 348553 - DNA, 1117 bp, Homo Sapiens
gggggcgcgcgcgccgctgcggctttttctctggcctccgccgcgcgctcctcctcgtcccagcgctagcgggcacgcggttcctttttgcgagctttccgagtgccaggcgccggccggctgcgaagacgcggtgggccgcccctccgattgaaatcacagaagatattcgtgttcttcttaagagaaaaagaggacatttgcgtactttattgtcggcttccaaagattactaacttttatctgtatcactaagattgaactgccttggctggtactgctattcttactgctgcttctattattgccttcttcagcacaataaggctttcaaaagccaaagaataacaagaaataagcaccattttagaagcctttccactatgaaacttaagctaaatgtgctcaccattattttgctgcctgtccacttgttaaataaccaaatatacagtgcccttatatttattccatggtattttcttaccaatgcccaagaagaaaaacgctatggcaaacgagaataacaagctaagcccacttcagacaaacctggaagtccatatcgctctgtcacacacttcgactcactagctgtaatagacatccctggagcagatactctggatacaattatttgaccatgctgtatccaagtttgggaagaaggacagccttgggaccagggaaatcctaagtgaagaaaatgaaatgcagccaaatggaaaagtttttaagaagttaattcttgggaattataaatggatgaactatcttgaagtgaatcgcagagtgaataactttggtagtggactcactgcactgggactaaaaccaaagaacaccattgccatcttctgtgagaccagggccgaatggatgattgcagcacagacctgctttaagtacaactttcctcttgtgactttatatgccacacttggcaaagaagcagtagttcatgggctaaatgaatctgaggcttcctatctgattaccagtgttgaacttctggaaagtaaaattaagactgcattgttagatatcaccttgtgttaaacatatcattaatgtggacaataaggctatcaataaagcagagtaccctgtggaaata

SEQ ID NO: 348554 - DNA, 1144 bp, Homo Sapiens
  misc_feature (1067)..(1102): n is a, c, g, or t
aggctggtactggtccggaattcccgggatatcgtcgaccacgcgtgccgcggcggctgagcgtggaggttcttgtctcccctggtttgtgaagtgcggaaaaccagaggcgcagtcatgtcgggattcgacgatcctggcattttctacagcgacagcttcgggggcgacgcccaggccgacgaggggcaggcccgcaaatcgcagctgcagaggcgcttcaaggagttcctgcggcagtaccgagtgggcaccgaccgcacgggcttcaccttcaaatacagggatgaactcaagcggcattacaacctgggggagtactggattgaggtggagatggaggatctggccagctttgatgaggacctggccgactacttgtacaagcagccagccgagcacctgcagctgctggaggaagctgccaaggaggtagctgatgaggtgacccggccccggccttctggggaggaggtgctccaggacatccaggtcatgctcaagtcggacgccagcccttccagcattcgtagcctgaagtcggacatgatgtcacacctggtgaagatccctggcatcatcatcgcggcctctgcggtccgtgccaaggccacccgcatctctatccagtgccgcagctgccgcaacaccctcaccaacattgccatgcgccctggcctcgagggctatgccctgcccaggaagtgcaacacagatcaggctgggcgccccaaatgcccattggacccgtacttcatcatgcccgacaaatgcaaatgcgtggacttccagaccctgaagctgcaggagctgcctgatgcagtcccccacggggagatgcccagacacatgcagctctactgcgacaggtacctgttgtgacaagggtcgtccctggggaacagggttaccatcatgggcatctactccatcaagaagtttggcctgactaccagcaggggccgtgaacagggtggggcgtgggccatcccaaagctccctacatcccgggtccgggggcattcagggtggaaaacagatgggctctgggccccaacttttttctnnnnnnnnnnnnnnnnnnnnnnnnnnnnnnnnnnnnaagttcccgccgccctgggtttgccctcccaaaaaatgtcat

SEQ ID NO: 348555 - DNA, 1442 bp, Homo Sapiens
  misc_feature (1205)..(1205): n is a, c, g, or t
  misc_feature (1329)..(1330): n is a, c, g, or t
  misc_feature (1409)..(1409): n is a, c, g, or t
gcgcttcaaggagttcctgcggcagtaccgagtgggcaccgaccgcacgggcttcaccttcaaatacagggatgaactcaagcggcattacaacctgggggagtactggattgaggtggagatggaggatctggccagctttgatgaggacctggccgactacttgtacaagcagccagccgagcacctgcagctgctggaggaagctgccaaggaggtagctgatgaggtgacccggccccggccttctggggaggaggtgctccaggacatccaggtcatgctcaagtcggacgccagcccttccagcattcgtagcctgaagtcggacatgatgtcacacctggccaagcatgtcatcactctgcacgtgagcgcactgacacagacacaggctgtggagggcgagattgacctggccaagctgaagaagtttattgcctactgccgagtgaagtgtggcccccggctgtcagcagaggctgcagagaaactgaagaaccgctacaatcatcatgcggagcggggcccgtcagcacgagagggacagtgaccgccgctccagcatccccatcactgtgcggcagctggaggccattgtgcgcatcgcggaagccctcagcaagatgaagctgcagcccttcgccacagaggcagatgtggaggaggccctgcggctcttccaagtgtccacgttggatgctgccttgtccggtaccctgtcaggggtggagggcttcaccagccaggaggaccaggagatgctgagccgcatcgagaagcagctcaagcgccgctttgccattggctcccaggtgtctgagcacagcatcatcaaggacttcaccaagcagaaatacccggagcacgccatccacaaggtgctgcagctcatgctgcggcgcggcgagatccagcatcgcatgcagcgcaaggttctctaccgcctcaagtgagtcgcgccgcctcactggactcatggactcgcccacgcctcgcccctcctgccgctgcctgccattgacaatgttgctgggacctctgcctccccactgcagccctcgaacttcccaggcaccctcctttctgccccagaggaaggagctgtagtgtcctgctgcctctgggcgcccgcctctagcgcggttctgggaagtgtgcttttggcatccgttaataataaagccacggtgtgttcagggttncccccccactaatcaaacctcatccacccacacattccgatccccagaataacacaacacactgaacataatctccctctatactcaagacgccgcgccccgtgcttatatcttaaccacacannggttttttgttgggggccttcttgggcctttaagaaatttttctaaaaacccttctttttggggggcggcgggcccccnagggggaaaggagacaaggggcacaaaacgtgt

SEQ ID NO: 348556 - DNA, 889 bp, Homo Sapiens
gggaggttcttgtctcccctggtttgtgaaggtgcggaaaaccagaggcgcagtcatgtcgggattcgacgatcctggcattttctacagcgacagcttcgggggcgacgcccaggccgacgaggggcaggcccgcaaatcgcagctgcagaggcgcttcaaggagttcctgcggcagtaccgagtgggcaccgaccgcacgggcttcaccttcaaatacagggatgaactcaagcggcattacaacctgggggagtactggattgaggtggagatggaggatctggccagctttgatgaggacctggccgactacttgtacaagcagccagccgagcacctgcagctgctggaggaagctgccaaggaggtagctgatgaggtgacccggacccggacttctgggagaggaggtgctccaaggacatccaggtcatgctcaagtcggacgccagaccttccagcattcgtagcctgaagtcggacatgatgtcacacctggcgaaagatccctggcaatcatcatcgacggactctgaaggtccgatgccaaagtccaaccggaatctctatccagttgccgcaatggccgaaagaaaccttcaaacaaacattggacaatgcggcacatgggcttcgacggggcttaatagcccttgccccactgaatgctgctacgcgcagaatcccgggcttgggagcccccaaaaatggcccattgggaaccccggtactttacttaatggcccgaacaattggcaacatggcgtggggagtttccagaaaccctgaatgctgaatggagctggcctggattgacagtcgccaaacggtggaaatgcccaaaacacattgcaggtcttatgcaacgggtccctgttgtcacaag

SEQ ID NO: 348557 - DNA, 717 bp, Homo Sapiens
ggctaggtccggattgcacgtggagggccgcccgaagggcactctcggacattaacccgcattctgtaccatggggcgcaagttggaccctacgaaggagaagcgggggccaggccgaaaggcccggaagcagaagggtgccgagacagaactcgtcagattcttgcctgcagtaagtgacgaaaattccaagaggctgtctagtcgtgctcgaaagagggcagccaagaggagattgggctctgttgaagcccctaagacaaataagtctcctgaggccaaaccattgcctggaaagctaccaaaagggatctctgcaggagctgtccagacagctggtaagaagggaccccagtccctatttaatgctcctcgaggcaagaagcgcccagcacctggcagtgatgaggaagaggaggaggaagactctgaagaagatggtatggtgaaccacggggacctctggggctccgaggacgatgctgatacggtagatgactatggagctgactccaactctgacggatgaggaggacaggtgaagcgttgcagcccattgaaagagctgctcggaagcaagaaggcccgggaagctcctgactgggatccagtggagtgaagaggagaccgaggacgaggaggaagagaaagaagtgacccctgagtcaggccccccaaaggtggaagaggcagatgggggcctgcagatcaatgtgg

SEQ ID NO: 348558 - DNA, 1097 bp, Homo Sapiens
  misc_feature (126)..(126): n is a, c, g, or t
gcgcgtccaccggctccccggctcgcgccgctccatgtagccccggctccccggcggccgcggaggagggggcgaccacaagatggcggacctctcgctgcttcaggaggacctgcaggaggacgnagacggatcccctggactttgtctcacaagatgaaatgttgacgcccctggggagattggacaagtatgctgcaagtgagaacatatttaacagacaaatggtggcccggagtttgctcgataccttgagggaagtctgcgatgatgaaagagattgtattgctgttttggaaagaattagcagattggccgatgattcagaaccaactgtgagagcggagctgatggaacaggtgcctcacatcgcactgttttgtcaagaaaaccggccttcaataccatatgctttttcaaaattcttactacctattgtggttagataccttgcagatcagaataatcaggtgaggaaaacaagtcaggcagctttgctggctctgttggagcaggagctcattgaacgatttgatgtggagaccaaagtgtgccctgtcctcatagagctgacagccccagatagcaatgatgatgtgaaaacagaagctgtggctataatgtgcaaaatggctcccatggttgggaaggatattacagagcgtcttatcctccctaggttttgtgagatgtgctgcgattgcagaatgtttcacgttcgaaaggtctgtgctgccaattttggagatatttgcagtgtagttggccagcaagctactgaagaaatgttgctgcccagatttttccagctttgttctgataatgtatggggagtccgaaaggcttgtgctgaatgcttcatggcgctttcatgtgcaacatgtcaagaaatccgacggaccaaattatcagcactttttattaatttgatcagtgatccttcacgttgggttcgccaagcagcttttcagtctctgggacctttcatatctacttttgctaatccatctagctcaggccagtattttaaagaagatatgaaaggtcccagagactgaaaagctgcttgatcccaacgaattccggaccagtaccaa

SEQ ID NO: 348559 - DNA, 812 bp, Homo Sapiens
catccggatagtttcctgccgattcctctgggtttaatccggccattgtttaaagacatcctcaaacctttcctttttcttaaatctgcctgtagctagttggattagcaaagtagatatgaaggtcccagagactgaaaacctgcttggcgaaccaacatttcttcagtagcttgctggccaactacactgcgaatatctccaaaattgccagcacagacctttcgaacgtgaaacattctgcaatcgcagcacatctcacaaacctagggaggataagacgctctgtaatatccttcccaaccatgggagccattttgcacattatagccacagcttctgttttcacatcatcattgctatctggggctgtcagctctatgaggacagggcacactttggtctccacatcaaatcgttcaatgagctcctgctccaacagagccagcaaagctgcctgacttgttttcctcacctgattattctgatctgcaaggtatctaaccacaataggtagtaagaattttgaaaaagcatatggtattgaaggccggttttcttgacaaaacagtgcgatgtgaggcacctgttccatcagctccgctctcacagttggttctgaatcatcggccatctgctaattctttccaaaacagcaatacaatctctttcatcatcgcagacttccctcaaggtatcgagcaactccgggccaccatttgtctgttaaatatgttctcacttgcagcatacttgtccaatctcccctcgtgccgaattcaccacccggcctcgtacctagcctattttgg

SEQ ID NO: 348560 - DNA, 2921 bp, Homo Sapiens
  misc_feature (1030)..(1030): n is a, c, g, or t
gcttttcagtctctgggacctttcatatctacttttgctaatccatctagctcaggccagtattttaaagaagaaagcaaaagttcagaagagatgtcagtagaaaacaaaaataggaccagagatcaagaagccccagaggatgtacaagtcaggccagaggatactccttcagatctcagtgttagtaattccagtgtcatactggaaaacacgatggaagaccatgctgctgaggcatccgggaagcctctaggtgaaattagtgttccactggacagctctttactttgtactttgtcctcagaatctcaccaggaagcagctagtaatgagaatgataaaaaacctggtaactacaaatctatgttacgaccagaggttggcaccacttcacaagattcagctctcttagatcaggaattgtataactccttccatttctggaggactcctcttcctgaaatagatctagacatagagcttgaacagaactctgggggaaaacccagcccagagggaccagaggaagaatctgagggcccctgtgcccagttctccaaacatcaccatggccaccagaaaggaactggaagaaatgatagaaaatctagagccccacattgatgatccagatgttaaagcacaagtggaagtgctgtccgctgcactacgtgcttccagcctggatgcacatgaagagaccatcagtatagaaaagagaagtgatttgcaagatgaactggatataaatgagctaccaaattgtaaaataaatcaagaagattctgtggcctttaatcagcgatgctgttgagaatatggactccactcttcactatattcacagcgattcagacttgagcaacaatagcagttttagccctgatgaggaaaggagaactaaagtacaagatgttgtacctcaggcgttgttagatcagtatttatctatgactgacccttctcgtgcacagacggttgacactgaaattgctaagcactgtgcatatagcctccctggtgtggncttgacactcggaagacagaattggcactgcctgagagagacgtatgagactctggcctcagacatgcagtggaaagttcgacgaactctagcattctccatccacgagcttgcagttattcttggagatcaattgacagctgcagatctggttccaatttttaatggatttttaaaagacctcgatgaagtcaggataggtgttcttaaacacttgcatgattttctgaagcttcttcatattgacaaaagaagagaatatctttatcaacttcaggagtttttggtgacagataatagtagaaattggcggtttcgagctgaactggctgaacagctgattttacttctagagttatatagtcccagagatgtttatgactatttacgtcccattgctctgaatctgtgtgcagacaaagtttcttctgttcgttggatttcctacaagttggtcagcgagatggtgaagaagctgcacgcggcaacaccaccaacgttcggagtgggacctcatcaatgagcttgtggagaactttggcagatgtcccaagtggtctggtcggcaagcctttgtctttgtctgccagactgtcattgaggatgactgccttcccatggaccagtttgctgtgcatctcatgccgcatctgctaaccttagcaaatgacagggttcctaacgtgcgagtgctgcttgcaaagacattaagacaaactctactagaaaaagactatttcttggcctctgccagctgccaccaggaggctgtggagcagaccatcatggctcttcagatggaccgtgacagcgatgtcaagtattttgcaagcatccaccctgccagtaccaaaatctccgaagatgccatgagcacagcgtcctcaacctactagaaggcttgaatctcggtgtctttcctgcttccatgagagccgaggttcagtgggcattcgccacgcatgtgacctgggatagctttcgggggaggagagaccttcctctcctgcggacttcattgcaggtgcaagttgcctacacccaataccagggatttcaagagtcaagagaaagtacagtaaacactattatcttatcttgactttaaggggaaataatttctcagaggattataattgtcaccgaagccttaaatccttctgtcttcctgactgaatgaaacttgaattggcagagcattttccttatggaagggatgagattcccagagacctgcattgctttctcctggttttatttaacaatcgacaaatgaaattcttacagcctgaaggcagacgtgtgcccagatgtgaaagagaccttcagtatcagccctaactcttctctcccaggaaggacttgctgggctctgtggccagctgtccagcccagccctgtgtgtgaatcgtttgtgacgtgtgcaaatgggaaaggaggggtttttacatctcctaaaggacctgatgccaacacaagtaggattgacttaaactcttaagcgcagcatattgctgtacacatttacagaatggttgctgagtgtctgtgtctgattttttcatgctggtcatgacctgaaggaaatttattagacgtataatgtatgtctggtgtttttaacttgatcatgatcagctctgaggtgcaacttcttcacatactgtacatacctgtgaccactcttgggagtgctgcagtctttaatcatgctgtttaaactgttgtggcacaagttctcttgtccaaataaaatttattaataagatctatagagagagatatatacacttttgattgttttctagatgtctaccaataaatgcaatttgtgacctgtattaatgatttaaagtggggaaactagattaaaatatttgtcttttaacta

SEQ ID NO: 348561 - DNA, 1106 bp, Homo Sapiens
  misc_feature (148)..(156): n is a, c, g, or t
  misc_feature (185)..(274): n is a, c, g, or t
  misc_feature (708)..(747): n is a, c, g, or t
agacgccccccggggtaagagatcccaagggtcgcccactcgcccgggccgggggtcggcggccaaagaggtgcaaacaccccgcctttgagtataaacaaattaaaagttgaaatttttgcccgttcggggaaggggacgtgtaatnnnnnnnnntacccacaagtgccccaaagaagcccggnnnnnnnnnnnnnnnnnnnnnnnnnnnnnnnnnnnnnnnnnnnnnnnnnnnnnnnnnnnnnnnnnnnnnnnnnnnnnnnnnnnnnnnnnntatgttgggccagtataaataccgtccacatataaaatggcatctgattacatttacaaggaaaaagaaatacgaggatggagcatcggtgaaggaaaaaaacacgtcttctcatttacacctataaggaataaacacacacactgagaaaaaatttggtcctgaattgtttttttaaagtccagcacagatttgagttgcgtttgaatcctttaaagagttaagaatgaaaaaaagctggtgataatttcgttgtaggaatcaaacatagcgccatctatctgctttttatattatcctacactattttaaaaactgctcaacagtcttatacagaaatctttaaaagatagacaggataacatgctatattaaccccaccattgaaataatccaacaccatcacgattccgattaagagaagaaaaaaatcnnnnnnnnnnnnnnnnnnnnnnnnnnnnnnnnnnnnnnnnccgaaaccactcgccctccactgactgcccctgtaccacatcaaacagtctcctctcctccacgcctccggggtctgggaagtctcacctcactgatttcacgtagaaaagaaggcggaggcccagcagccgccgccgccagctccccaacgtgcaaatccatttcagtttgaccgtgaacccccttccagttcgtgtcctcctccgcccccgcccctagctcccgctgctgcgcttccaacggggttctcgggtcatttcctagcgccggtcacactggctggcctcctcccctcaacatctcctcctccggctgcagagggggcaaggggaaaagagggaggaaaaaaaagcccccc

SEQ ID NO: 348562 - DNA, 828 bp, Homo Sapiens
  misc_feature (32)..(32): n is a, c, g, or t
  misc_feature (231)..(284): n is a, c, g, or t
gcaccggttaagtagtagaagcaaaggccagnaacaataacttctcaaaataaacctagtggtaatgatgttgaaatggaaactgaagctaatttggatacaagaaaaagtgttagtgacaaacagtctgcggtaactgaatcctcagagggtacagtatccttattgaggtctcacaagaatcttttcttatctaagttgcaacatggaacccagcaacaagaccttaannnnnnnnnnnnnnnnnnnnnnnnnnnnnnnnnnnnnnnnnnnnnnnnnnnnnncagaagagccactgaaagcagaatacctgtttcaaagagtcagccggtaactcctgaaaaacatcgagctagaaaaagacaggcatggctttgggaagaagacaagaatttgagatctggcgtgaggaaatatggagagggaaactggtctaaaatactgttgcattataaattcaacaaccggacaagtgtcatgttaaaagacagatggaggaccatgaagaaactaaaactgatttcctcagacagcgaagactgattgtgtttgtaaaagcttgatgaaaggacagttaagtattttgatcactgcattttgtttgaaacttgtgtcattgatgtaatttaaaacttttgtttaaagcattacagtatttttctgtgaccatcaattaatgagggtttgtgctaccagagttaaagcatatgctatcattgtattctttaagaaccttattttgataaaatgtaaattttgtgaaacctgccacatttagtatccccacccccaaatcctgttccaattgaaaaattaaaacctgttacg

SEQ ID NO: 348563 - DNA, 925 bp, Homo Sapiens
  misc_feature (85)..(93): n is a, c, g, or t
  misc_feature (95)..(95): n is a, c, g, or t
  misc_feature (98)..(98): n is a, c, g, or t
  misc_feature (100)..(101): n is a, c, g, or t
  misc_feature (103)..(112): n is a, c, g, or t
  misc_feature (479)..(495): n is a, c, g, or t
ggttcatttaccctaatggggcccgggcgccaaaaggaaaggttctagaaaagtttttgaggggccgaggcgggccggccatgtnnnnnnnnntnttntnntnnnnnnnnnngctttaaacaaaagttttaaaattacatcaatgaccacaggtttcaaaacaaaatgcagtgatcaaaatacttaactgtcctttcatcaagcttttacaaacacaatcagttttcgctgtctgaggaaatcagttttagtttcttcatggtctcccatctgtcttttaacatgacacttgtccggttgttgaatttataatgcaacagtattttagaccagtttccctctccatatttcctcacgccagatctcaaattcttgtcttcttcccaaagccatgcctgtctttttctaactcgatgtttttcaggagttaccggctgactctttgaaacaggtattctgctttcagtggctcttctgcnnnnnnnnnnnnnnnnngtactttgaggagttcctactcttctttctttcttattaaggtcttgttgctgggttccatgttgcaacttagataagaaaagattcttgtgagacctttttcttgtatccaaattagcttcagtttccatttcaacatcattaccactaggtttatcttgagaagttattgttcttgtccttttgctttctactacttttgccgctgccttcattagaaaggttgatgatttttcacttagcacataattcacataactcttaattttctccatcatgtggttgtagctgaagtgttgaaaaaaggaatgaaatgtatctatctgagagattatcataagcaatttgcttttgaaaggcatatgagaatttggatcaccaaatattctttcaaagacttcttctgcttctttaaagttgccattttccc

SEQ ID NO: 348564 - DNA, 1634 bp, Homo Sapiens
  misc_feature (194)..(194): n is a, c, g, or t
  misc_feature (198)..(199): n is a, c, g, or t
  misc_feature (1070)..(1086): n is a, c, g, or t
ggcctgggtggcgtcaaaaacgaggaatggcggaggatgttccctcagcggccccgagcccgcggggctgtgcggatggtagggatgccgaccctactgaggagcagatggcagaaacagagagaaacgacgaggagcagttcgaatgccaggaactgctcgagtgccaggtgcaggtgggggcccccgaagangaannagaagaggaggaggacgcgggcctggtggccgaggccgaggccgtggctgccggctggatgctcgatttcctctgcctctctctttgccgagctttccgcgacggccgctccgaggacttccgcaggacccgcaacagcgcagaggctattattcatggactatccagtctaacagcttgccagttgagaacgatatacatatgtcagtttttgacaagaattgcagcaggaaaaacccttgatgcacagtttgaaaatgatgaacgaattacacccttggaatcagccctgatgatttggggttcaattgaaaaggaacatgacaaacttcatgaagaaatacagaatttaattaaaattcaggctatagctgtttgtatggaaaatggcaactttaaagaagcagaagaagtctttgaaagaatatttggtgatccaaattctcatatgcctttcaaaagcaaattgcttatgataatctctcagaaagatacatttcattccttttttcaacacttcagctacaaccacatgatggagaaaattaagagttatgtgaattatgtgctaagtgaaaaatcatcaacctttctaatgaaggcagcggcaaaagtagtagaaagcaaaaggacaagaacaataacttctcaagataaacctagtggtaatgatgttgaaatggaaactgaagctaatttggatacaagaaaaagtgttagtgacaaacagtctgcggtaactgaatcctcagagggtacagtatccttattgaggtctcacaagaatcctttcttatctaagttgcaacatggaacccagcaacaagaccttaataagaaagaaagaagagtaggaactcctcaaagtacnnnnnnnnnnnnnnnnngcagaagagccactgaaagcagaatacctgtttcaaagagtcagccggtaactcctgaaaaacatcgagctagaaaaagacaggcatggctttggggaagaagacaagaatttgagatctggcgtgaggaaatatggagagggaaactggtctaaaatactgttgcattataaattcaacaaccggacaagtgtcatgttaaaagacagatggaggaccatgaagaaactaaaactgatttcctcagacagcgaagactgattgtgtttgtaaaagcttgatgaaaggacagttaagtattttgatcactgcattttgtttgaaacttgtgtcattgatgtaatttaaaacttttgtttaaagcattacagtatttttctgtgaccatcaattaatgagggtttgtgctaccagagttaaagcatatgctatcattgtattctttaagaaccttattttgataaaatgtaaatttgttgaaccctgccacatttagtatccccacccccaaatcctgttccaatgaaaaaattaaaaccttgatacgg

SEQ ID NO: 348565 - DNA, 575 bp, Homo Sapiens
gggggcggacacccgggtgacacattctttcggagagggagggcaagacttttctccggagcctctggcaactcgtggagtctatataagggtcagccagcagccggcccggggtgtcagccaccccacccaagtccccggtctacctggacctggcctacctgcccagcgggagcagcgcccacctggtggatgaggagttcttccagcgcgtgcgcgcgctctgctacgtcatcagtggccaggaccagcgcaaggaggaaggcatgcgggccgtcctggacgcgctactggccagcaagcagcattgggaccgtgacctgcaggtgaccctgatccccactttcgactcggtggccatgcatacgtggtacgcagagacgcacgcccggcaccaggcgctgggcatcacggtgttgggcagcaacagcatggtgtccatgcaggatgacgccttcccggcctgcaaggtggagttctagccccatcgccgacacgccccccactcagcccagcccgcctgtccctagattcagccacatcagaaataaactgtgactacacttgaaaaaaaa

SEQ ID NO: 348566 - DNA, 1735 bp, Homo Sapiens
  misc_feature (1697)..(1697): n is a, c, g, or t
  misc_feature (1717)..(1717): n is a, c, g, or t
gccagcacggtgctgaggccccacgcaagactgagaaagaagccaagaccccccgggagttgaagaaagaccccaaaccgagtgtctcccggacccagccgcgggaggtgcgccgggcagcctcttctgtgcccaacctcaagaagacgaatgcccagtgcggcacccaagccccgcaaagcgcccagcacgtcccactctggcttcccgccggtggcaaatggaccccgcagcccgcccagcctccgatgtggagaagccagcccccccagtgcatgcctgcggtctctccgtgcctcccagctggtggccacgcccagcctggagctggggccgatcccagccggggaggagaaggcactggagctgcctttggcctgccagctcaatcccaaggccacgcacaccctcccctgagtcccaccggagccccgcagagggcagcgagcggctgtcgctgagcccactgcggggcggggaggccgggccagacgcctcacccacagtgaccacacccacgggtgaccacgccctcactacccgcagaggtgggctccccgcactcgaccgaggtggacgagtccctgtcggtgtcctttgagcaggtgctgccgccatccgcccccaccagtgaggctgggctgagcctcccgctgcgtggcccccgggcgcggcgctcggcttccccacacgatgtggacctgtgcctggtgtcaccctgtgaatttgagcatcgcaaggcggtgccaatggaccaggcactgtgcgtcccccggcagctcgaatgacagcagtgcccggtcacaggaacgggcaggtgggctgggggccgaggagacgccacccacatcggtcagcgagtccctgcccaccctgtctgactcggatcccgtgcccctggcccccggtgcggcagactcagacgaagacacagagggttttggagtccctcgccacgaccctttgcctgaccccctcaaggtccccccaccactgcctgacccatccagcatctgcatggtggaccccgagatgctgccccccaagacagcacggcaaacggagaacgtcagccgcacccggaagcccctggcccgccccaactcacgcgctgccgcccccaaagccactccagtggctgctgccaaaaccaaggggcttgctggtggggaccgtgccagccgaccactcagtgcccggagtgagcccagtgagaagggaggccgggcacccctgtccagaaagtcctcaacccccaagactgccactcgaggcccgtcggggtcagccagcagccggcccggggtgtcagccaccccacccaagtccccggtctacctggacctggcctacctgcccagcgggagcagcgcccacctggtggatgaggagttcttccagcgcgtgcgcgcgctctgctacgtcatcagtggccaggaccagcgcaaggaggaaggcatgcgggccgtcctggacgcgctactggccagcaagcagcattgggaccgtgacctgcaggtgaccctgatccccactttcgactcggaggccatgcatacgtggtacgcagagacgcacgcccggcaccaaggcgctgggcatcacggtgttgggcagcaacagcatggtgtccatgcaggatgacgccttcccggcctgcaaggtggagttctagccccatcgccgacacgcccccnactcagcccagcccgcctgnccctagattcagccacat

SEQ ID NO: 348567 - DNA, 825 bp, Homo Sapiens
  misc_feature (579)..(591): n is a, c, g, or t
ggtttacttttcatttattcacatttcatggattgttacacttcctcgatgggagcattcaaaaactaatacaagctgagattatactgtctgacaattcaagtattttagttttagaaaacaatttcctatttaaagtaaaaagcaaacaatttatccatctgattgctaagaagttttacatctccattacaattgtgtctgcatcaaacggagagtccttcgtcctcagtatgattgttactggctgagaacatacggtgacctgtgttctgagtgcctgattggaaaagacctccctgtcatctgccatactacgggacaaatcagtatctactcaaattcccacttccagaaggagaggactcatccaggggtttaggagtttgcaaacccttcaaaatgtatcgtgcttgaattttgactcttctgaaatagaataactgacaaatgctcaaaaaaacaaacttgtttaacttttactgaaaaggctctcagtgaaaacttgttttgaactctactagtaaggtagaatattagtttttcttcccctccacaccagaaaaggcagttttctcnnnnnnnnnnnnnggcatgcagcatatataaaatgtgatctagaattgaaattgtaaaacagaataatcctcttaaagaaaatcagcctatgaacagtcagacttgtccttccatggaaaacataatctaaacttctttaaaaactggccatattttttcagtctgtaattcgaataatgaagatggcataacaaatttttttgcttactaggaatgcgcaagaggatgagatggatacacaggttt

SEQ ID NO: 348568 - DNA, 893 bp, Homo Sapiens
agcggagggtggttgtcggattttagaggaaggcgctcggttacattggagaactggagtggtctggagttccacggtgtagtggaccagaggccacctctcctgggcttctcagtgtctcgccggcggggttcggcctgagctggattgacatagcccttggcggatttaaacaacctaaacattaagcagtacagctgcctcaaacctttgggattttcagaatgactgacactgccgaagctgttccaaagtttgaagagatgtttgctagtagattcacagaaaatgacaaggagtatcaggaatacctgaaacgccctcctgagtctcctccaattgttgaggaatggaatagcagagctggtgggaaccaaagaaacagaggcaatcggttgcaagacaacagacagttcagaggcagggacaacagatgggggtggccaagtgacaatcgatccaatcagtggcatggacgatcctggggtaacaactacccgcaacacagacaagaaccttactatccccagcaatatggacattatggttacaaccagcggcctccttacggttactactgatagaaatgttggcagcttttagtaaaagcatttactctgttaccatgagaaaagtttgggtgtcttctgttggtcatagttttacatctgattttacagaatggattattgattttttggaagttgagactttaaaaaaaatagatcttacttgcgaaatgcgatggttgctgggaatacctgaaactgtggattatattgcttgacttctacctcagaatcttctttgtttcatgacttaatagtgctttaagtttggtatattatttgacctctaggaattctttgttttacacagaaataaaaatttta

SEQ ID NO: 348569 - DNA, 454 bp, Homo Sapiens
ggggagcctagagcgccgcggccccgagatgaagccggcggtggacgagatgttccccgagggcgccgggccctacgtggacctggacgaggcgggaggcagcaccgggctcttgatggacttggcagccaatgaaaaggccgttcatgcagacttttttaacgattttgaagatctttttgatgatgatgacatccagtgagatgccctctggctgcaggcggggccaagcccttggtacagagccgcagtgtgagcctgcgcaggacagtttcaggtggttttaaagaacacgtggaaatcccttgaatttaggacctggttaaccagaaagataagactgttcttaacgacctagatgattctgttcatctctgaacgggatcaggttttgtcctcactccaattaaaagaaagcaatgtcaaaataataaaagaaaaattctccagcgct

SEQ ID NO: 348570 - DNA, 137 bp, Homo Sapiens
aaggggggctgcacgttacagatgagggagcaacacttgatggccttctcgtcccgaggcaccagccagcccgaccccgcaactgccgcggcgggcgggcgcggaactgcggggaagccgaagagtccaacctgctc

SEQ ID NO: 348571 - DNA, 1081 bp, Homo Sapiens
ttcaggtagataataaaaatttaatagcaatatcataaaataaacacacatattaaaaaatcaagtatttagtttcggatattagaaataatatacataataaattcaacatactgatagtgctgcaagataagattttatttttcaaattacatattatcgccaaccagcctgccttggactcagaggttcaaaaactttgcttttattacgaagaacatctggactgtagacacctctaacgaaaccaggttatacttggcatattgtgattgaagctgtgtgatcaacatcttaatgacctaactaaatcctctcataacagaaagaagttcaacaggcaaacatttccctccctaggatcctagttaccaaaactgtcacagtgtcaaaataaaaataattatttcctcctttttaacatcttattgtccttgaagcttatgtatggaggaagttaaaaaccaaaagagcaactttaagctatatgctaagtcagtgttaaatccacagactaatttttcgatatagtattcctggttctggtccttaaagagaaataaaggcattaaaccaactttttatatgtcaagaaatataattttgctattctttcataatcaaatctttcaatgatttctaagactgtttctacagcctgtgtgctagttcaggagacacactgattgtaaaaggacttgagaatataaactttaaggctaaaaatttcatcttcaaaatgtatagatgtaaacagagcccttgacaaggtgatttaatgtagaactgctggccagaatgaaaacaagtactagacagaaaaaagatcatgcttaaagactccattgaaaaaccacagacaggtccttcatgacataggtaattccttcaacctaaagacatttgctgaaactcaaagttaccctattgcatagtaaatcttcaaaaccattaagtcaggttctgggtcaatgtttcctatgctttggttggatgatttaataaagtatatattttatgagcatttaaccatggaattcaatgaacaaaatagataaaatattagaatcttcattaaaaa

SEQ ID NO: 348572 - DNA, 608 bp, Homo Sapiens
atttgtagcaataaaataggcttcaagattcacatattattatctcttgcatttatcctactttttagtcacatcaagtaactgcacatttaaaataattgctttcactggaggttgtagcaaaaaagtgaattccggaaatgccctatgtggacagtagcaacccaccctcaggctgagaaatacttgctggctgtttcttgagaagcaactcctgagtccatagggcaagacaatgcatttgagtaaatgtgagaaaagaattgagaaagtggaatttcattctcccagttttgatgcagaaaagggcaaactgcccatagttatccaccccctccccaattataacaatgagaaatacaagaaaaacttaaaattctttgcttgttagtgaccttgatcatggttctctttgtacgatagttgggcatctgtatttccacttgtgtgaatttgcctttaaattttggttatgggtttcaccttttaaaataatcaaacatatttatcttttcctgtgtgataggtttttttctgtatcttttcctgttaaacacacagacccctccccaatctggacattgaataaatattcattttcctttgca

SEQ ID NO: 348573 - DNA, 543 bp, Homo Sapiens
cactattgtgctgtttgctctcaatgaagttgaataaaccaggaggcttggcatatcccctttatgttaatcccagctagagattagtaggttgactttcacagcaattgtatattgatccattttaactcatccttgccataatttccaggccagtcaccaggacagaggagatgatggggaaacagagctttagatgaaaactactatgcactactagccttagaggcactggtttcctgttaccactttggcaagtatggatggtctaagtccagtagggcttcatccatggagccattagaactgaggggggagtgttagagatgccatttcaccaggatctttttgctcaggttgtacccatgccaattgaagaacgtgttaaagatgaggaggagagatgtaccattctctcccttaataatgatgttggtttgcaaaacctaaagaaataataacaacagactatttcatactttcaagcaagtctttatactacctgttatttctctaaaattcaaataaagaatttttaaactt

SEQ ID NO: 348574 - DNA, 407 bp, Homo Sapiens
  misc_feature (101)..(109): n is a, c, g, or t
ggaactcagttttgtgaaaggtaaaaaactactatgttttaagtacactttagaaagtctcttcaaaacaaacagtcctgtatttgaactctgttcatagnnnnnnnnngaacagtttagacaaaactgctggaaattaaaccaatttcctgcattaagctgagacaagtatatatacagccctatacagtttcatagcttttcctcccccatttatgtgtattggtgacagtgggtataaaacagcctgaaagtgtatgcatgtaccataacatctagacttaatatattgtggagtattcaataaccattatgtagaaggtagataagaattaaaagggtttaatttcctagaaagaaaatggaaaaatggtcatttttaaaaaataaagtttattagatcataa

SEQ ID NO: 348575 - DNA, 748 bp, Homo Sapiens
  misc_feature (360)..(415): n is a, c, g, or t
  misc_feature (547)..(619): n is a, c, g, or t
  misc_feature (621)..(701): n is a, c, g, or t
tcatgtcacccacctatgtcatgccaatgcatctccctcagctcaccctatggcctctttggggtgggagggggtgatctctacaaccagctgacaacggaggcaaaaaccaggatgagtctgccctgcatggcaatgcaagatgaaagtgaacttctactgcactgcagctgcactcaggggtggccctgagagtccaggcagtcatccactctccatctctcaattgcatggagagagaaatggcccgaaatacatatattcccaagcagtgtgaattatctgttgtctgactgactagacagactctcaaaagagcaagattgaaagattgagaacaggctgggcacggtggctcannnnnnnnnnnnnnnnnnnnnnnnnnnnnnnnnnnnnnnnnnnnnnnnnnnnnnnnatcaagaccatcctgtgagtggtgaaaccccgtctctactaaaaatacaaaaaaattagccgggcgtggtggcgggcgcctgtagtcccagcttctcagagaggctgaggcaggagaacggcgtgaacccannnnnnnnnnnnnnnnnnnnnnnnnnnnnnnnnnnnnnnnnnnnnnnnnnnnnnnnnnnnnnnnnnnnnnnnncnnnnnnnnnnnnnnnnnnnnnnnnnnnnnnnnnnnnnnnnnnnnnnnnnnnnnnnnnnnnnnnnnnnnnnnnnnnnnnnnntctatgacgttaaacatctacagagttgaaacataatctgtcatacc

SEQ ID NO: 348576 - DNA, 652 bp, Homo Sapiens
gggggagcgttctaaatatgaatgaatgggatattttgaaatgaactttgtcagtgttgcctcttgcaatgcctcagtagcatctcagtggtgtgtgaagtttggagatagatcgataagggaataataggccacagaaggtgaacttcgtgcttcaaggacagtgctgagagtccaacagacacaatttatactgcgacagaacttcagcattgtaattatgtaaataactctaaccaaggctgtgtttagattgtattaactatcttctttggacttctgaagagaccactcaatccatccatgtacttccctcttgaaacctgatgtcagctgctgttgaactttttaaagaagtgcatgaaaaaccatttttgaaccttaaaaggtactggtactatagcattttgctatcttttttagtgttaaagagataaagaataataattaaccaaccttgtttaatagatttgggtcatttagaagcctgacaactcattttcatattgtaatctatgtttataatactactactgttatcagtaatgctaaatgtgtaataatgtaacatgatttccctccaagagaaagcacaatttaaaacaatccttactaagtaggtgatgagtttgacagtttttggacatttata

SEQ ID NO: 348577 - DNA, 832 bp, Homo Sapiens
ggggggaaaggcgggtttggtcccagccccagagggatctcagctctcgctcggggcccgacctatctcggtccatctaagggtccgaggcacagccccgccaagaggccacaagtgtcagctgcttccgcgggaagggtgagggctaccggggcacagccaataccaccaccgcggacgtaccttgccagcgttgggacgcgcaaatcccgcatcagcaccgatttacgccagaaaaatacgcgtgcaagtgaggtgggggggcgggcgttgggacgtgctgctgcgggtgagacgggaggagggtagtcacgggcttagggctggaggctggcgggctagggctgagtggagcgcctgcttagagaccttcgggagaacttctgctggaacctcgacggctcagaggcgccctggtgcttcacactgcggcccggcacgcgcgtgggcttttgctaccagatacggcgttgtacagacgacgtgcggccccaggtgaggcccaagcttgggggctacagagccggggctggaagcctggaaccggagggccggtgcgaggtctcggcctgatggtgcccagcaccggccgccagatgtaacacggcgcgggggagcaggtacgcggcacggtcagcaagactcgcaagggtgtcagtgacagcgctgttccgtgagagccgcacagctgagtgagtcctggtggtcccggcccgcagggcctaccctgggctggatgaatggtgttggacacaagcctgcaaatggttgagaataccatgcacgattgccccgacccgctggtaaatacttcgaatggtggcaatgcgga

SEQ ID NO: 348578 - DNA, 1637 bp, Homo Sapiens
  misc_feature (1132)..(1132): n is a, c, g, or t
  misc_feature (1511)..(1511): n is a, c, g, or t
  misc_feature (1577)..(1577): n is a, c, g, or t
ctcatggctcctgtcaccaggtctcaggtcagggtccagcaggccctgagctgacgtgtggagccagagccacccaatcccgtagggacaggtttcacaacttcccggatggggctgtggtgggtcacagtgcagcctccagccagaaggatggggtggctcccactcctgctgcttctgactcaatgcttaggggtccctgggcagcgctcgccattgaatgacttccaagtgctccggggcacagagctacagcacctgctacatgcggtggtgcccgggccttggcaggaggatgtggcagatgctgaagagtgtgctggtcgctgtgggcccttaatggactgccgggccttccactacaacgtgagcagccatggttgccaactgctgccatggactcaacactcgccccacacgaggctgcggcattctgggcgctgtgacctcttccagaagaaagactacggacggacctgcataatgaacaatgggatagggtaccggggcaccatgaccacgaccgtggatggcctgaccggccaggattggagccacaagtgcccaaatgatcacaagtacacgcccactctccggaatgccctggaagagaacttctgccgtaaccctgatggcgaccccggaggtccttggtgctacacaacagaccctgctgtgcgcttccagagctgcggcatcaaatcctgccgggaggccgcgtgtgtctggtgcaatggcgaggaataccgcggcgcggtagaccgcacggagtcagggcgcgagtgccagcgctgggatcttcagcacccgcaccagcaccccttcgagccgggttcctcgaccaaggtctggacgacaactattgccggaatcctgacggctccgagcggccatggtgctacactacggatccgcagatcgagcgagagttctgtgacctcccccgctgcgggtccgaggcacagccccgccaagaggccacaactgtcagctgcttccgcgggaagggtgagggctaccggggcacagccaataccaccactgcgggcgtaccttgccagcgttgggacgcgcaaatccctcatcagcaccgatttacgccagaaaaatacgcgtgcaagtgaggtggggngggttgcgggcgttgggacgtgctgctgcgggtgagacgggaggaaggtagtcacgggctcaaggctggaggctggcgggctagggctgagtggagcgcctgcttagagaccttcgggagaacttctgccggaaccccgacggctcagaggcgccctggtgcttcacactgcggcccggcatgcgcgcggccttttgctaccagatccggcgttgtacagacgacgtgcggccccaggactgctaccacggcgcaggggagcagtaccgcggcacggtcagcaagaacccgcaaggggtgtccagtgccaacgctggtccgctgagacgccgcacaaaccgcagttcacgtttacctccgaaccgcatgcacaactggnggagaacttctgccggaacccaaatggggatagccatgggccctggtgctacacgatggaaccaangaccccattcgactactgtgccctgcgacgctgcgctgatgaccagccgccatcaatcct

SEQ ID NO: 348579 - DNA, 1325 bp, Homo Sapiens
agcggtgaagagtttgggaaggttatctaactgaatcactactgagttgaatcatggctatcattagccacaggtactgctgattataaggccagtaaaattttagtacctggaggtttgactctaatttttgcactgatggtgccaagggccctgagtcaaaaggatagccaagggtggagtggaaaaagatatggtgaaggcagaactgctcacaccagctccagaagcacgtcctctgacttcactgccgcagctctttccacacggggccgtgattgaccctaaaaattgcagaccagcacatacactggacactgcaggcaaggtgttggtaactgcctgctctaggatgaatagtagcgttagcagcaccctacagagggtaagtttcagaattgtaatttgagaactccttcaattatattgactttctttggttttccttgtgcattaggtatatattttttgaagtatttttgccaactaaaatgaagtctgtaaattctgttaataaacaaggagttcatccgttgctcacatctttcattggtgccctctgaactctgtgggttgctaggatgtaattttaatgcttccctgcagtccaaagatgattttttcaccacaaatggtaagggatgcccacctacttttataaacaccactgcaacttaacaagtttatttatctatgtccagatttctgtttctgtcctaaattgatctgtgttaaaggtggatcaacttggatctttagacctcatctataaattgaaacttatattttaagtcataaggccaagtacaatctaactcagaattgggcattaaaaattttagaagcagaagctaatatataaatgaagtttgggatttggaactttctgtatctcttaggaggaacaagtaaaaaccaaatggttacattgtgctgctagaaataatgtcattctcaattaaaagggttacacctgtagccacttgacactaacaccatcgagggcaattaatcaggagaaaagtaaatataaaaactttgctcttaacgtcacacactacagggtaattatgtaattctctagcactcaattaagaagcttgtaggttagcaaaatttcagtttctctagttcagccagtgtcttgtccttagtaattatttgctttccctgcagttcaatttctccttgggaactctaacagggactaactgggaggaatactttggaccataggctctaggtactttcccaaattaaattccatattctaggattttttcaaacaaaggccccaaggatggaaggtcttaatttctggaaaa

SEQ ID NO: 348580 - DNA, 1211 bp, Homo Sapiens
  misc_feature (528)..(696): n is a, c, g, or t
  misc_feature (710)..(720): n is a, c, g, or t
  misc_feature (760)..(768): n is a, c, g, or t
  misc_feature (812)..(866): n is a, c, g, or t
  misc_feature (995)..(1006): n is a, c, g, or t
  misc_feature (1080)..(1080): n is a, c, g, or t
  misc_feature (1089)..(1089): n is a, c, g, or t
  misc_feature (1151)..(1151): n is a, c, g, or t
gggcagaaaggtactgttagtgactgataaggatgcctttgttttgtacatgaaccaaatctttgttttacatttcttttatccaaaatatttaggcatctgacattttcaaccagaatttcaattatatactgtgatttttatttgttgccaatacattacaatttccagaggtacctttggggcctcaaaagcctaggatttcctaagtccagtatgtgcatttcacacgataaagctgttaatggtgagcaaagtattatatactaactagatttttccacatctgtatagtatattatatgtattttgtggtattgagagtatagaaagtttagagtgtcaaacatgcgtttaatgtgtatttttaaacaaatttatggcaattaaaatatttggagacaagggtatcacatttcaatttgtaaagatctttttaactctactgtgtcattaagatgctttgtacaatgccaaaccatagttggagaaactaagtttaataaatatcaaatagattttctgtannnnnnnnnnnnnnnnnnnnnnnnnnnnnnnnnnnnnnnnnnnnnnnnnnnnnnnnnnnnnnnnnnnnnnnnnnnnnnnnnnnnnnnnnnnnnnnnnnnnnnnnnnnnnnnnnnnnnnnnnnnnnnnnnnnnnnnnnnnnnnnnnnnnnnnnnnnnnnnnnnnnnnnnnggggggggggcggnnnnnnnnnnnagaaaaaaggagcacaagcaccgcggccgcggcgcggcgnnnnnnnnngggcgggaacaacaaggccgccccaacacccaccccacaaaaannnnnnnnnnnnnnnnnnnnnnnnnnnnnnnnnnnnnnnnnnnnnnnnnnnnnnngccggggaccacaaccagcaccctccaacaacaaccaccagaggggaagcgagtcgagggggagccaataggggcacccaccacccggccccgccacacacagggagacttgcctaaatacattatttnnnnnnnnnnnntcgcataccactcccatatcaaatcttggatttgattactatgaacaacctttctctcccggcgctgggaaccntctctttcntggcggctcggtggtcagcaacatctcctcccccccgggggctacaaccaccaaaaccgccngccatcaacacataaatacagtttctctcctgcgccgagaaataaacaaccgccgcacct

SEQ ID NO: 348581 - DNA, 1418 bp, Homo Sapiens
gggtcgccggggaagcggtctttctctaatacacagaattctaggaaggaggctgttcttttagccaaaatgaaacaccctaatattgttgccttcaaagaatcatttgaagctgaaggacacttgtatattgtgatggaatactgtgatggaggggatctaatgcaaaagattaaacagcagaaaggaaagttatttcctgaagacatgatacttaattggtttacccaaatgtgccttggagtaaatcacattcacaagaaacgtgtgctacacagagatatcaagtccaagaatatcttcctcactcagaatggaaaagtgaaattgggagactttggatctgcccgtcttctctccaatccgatggcatttgcttgtacctatgtgggaactccttattatgtgcctccagaaatttgggaaaacctgccttataacaataaaagtgacatctggtccttgggttgcatcctgtatgaactctgtacccttaagcatccatttcaggcaaatagttggaaaaatcttatcctcaaagtatgtcaagggtgcatcagtccactgccgtctcattactcctatgaacttcagttcctagtcaagcagatgtttaaaaggaatccctcacatcgcccctcggctacaacgcttctctctcgaggcatcgtagctcggcttgtccagaagtgcttaccccccgagatcatcatggaatatggtgaggaagtattagaagaaataaaaaattcgaagcataacacaccaagaaaaaaaacaaaccccagcagaatcaggatagctttgggaaatgaagcaagcacagtgcaagaggaagaacaagatagaaagggtagccatactgatttggaaagcattaatgaaaatttagttgaaagtgcattgagaagagtaaacagagaagaaaaaggtaataagtcagtccatctgaggaaagccagttcaccaaatcttcatagacgacagtgggagaaaaatgtacccaatacagctcttacagctttggaaaatgcatccatactcacctccagtttaacagcagaggacgatagaggtggttctgtaataaagtacagcaaaaatactactcgtaagcagtggctcaaagagaccccggacactttgttgaacatccttaagaatgctgatctcagcttggcttttcaaacatacacaatatatagaccaggttcagaagggttcttgaaaggccccctgtctgaagaaacagaagcatcggacagtgttgatggaggtcacgattctgtcattttggatccagagcgacttgagcctgggctagatgaggaggacacggactttgaggaggaagatgacaaccccgactgggtgtcagagctgaagaagcgagctggatggcaaggcctgtgcgacag

SEQ ID NO: 348582 - DNA, 615 bp, Homo Sapiens
  misc_feature (206)..(206): n is a, c, g, or t
tcaccaccttctagctgacttggaacaggagaccagggaggccctgaagtccctgtacggctttccagagtcccggaagcgccgagaggcggagtcctggaactccgtctcagagggaaagcagcctagatttctcccaccggatcccgctgctgatctttgatcaggatgagaggggctaggccagggacttcttcacaaggganggaagccggaaagtcggcggtagcatcattcacaaggcttcaaatgtcatgcacatcgagtccaagcaagtggtgggattccaactgtgctcaaatgacacctccgactgtgccacctacaccttcagctcgggaatcaatgccattcaggagtggtataagctacactacatgaacatcatggcacaggtgcctctggagaagaaaatcaacatgagctattctgctgaggagctgctggtgacctgcttctttgatggagtgtcctgtgatgccaggaatttcacgctttttcaccacccgatgcatgggaattgctatactttcaacaacagagaaaatgagaccattctcagcaccttcatggggggcagcgaatatggctgcaaggtcattttgtcataaacga

SEQ ID NO: 348583 - DNA, 510 bp, Homo Sapiens
atattctaattacttcttagtagtaagtgtgtcttactgaacaagtaataatagttgagtggtaaaaaacaaaagcccaatgatggaagtatagaagtaataaagcaaagagaagtaaggccttctagaattggtaagaaagaataaatgcacaaaaagagccaaggtaaaaggtacccaactagatatcaagatacatcatgaagcagtaaaaagagtagcatcattgcattagtaaacaaaatagacacacatttaatcgtcctatacttacaagaagaaaatatctatattctcaaggttgagaaggcttcttaagatccagaaggcaaaaatataagcgaaaggattgatgaatttgatcattacaaaatgtaaaatttctttatgacctacttttggtataagataaagcaacagactgaggaaagatatgtgacttatgcgtaatgtatgaatgttaaaatctagaacataagaactatcatttaataaaaaagcaaacaagtt

SEQ ID NO: 348584 - DNA, 734 bp, Homo Sapiens
taatgtataagaaaagaggtttaattggcttacggttctgcaggctgtacagaaagcatggcagcatctgcttctggggaggcctcagagaactctgaatcatggcggaaggcaaagggggaccaaggcatctcacatggtaggagcaggagcaagagagaagggggaggtgccacacacttttaaaccaaccagatctcgtgagaattcatcatcacggcgacagcaccaggggacgatggtgttaaaccatgagaaaccaccaccatgatccaatcatctcccaccaggccccacctccagcattggggattacatttcaacataagatttgggtagggatggagatccaaaccatatcaggtaacaggacttgtttattccattttttacttataatctgaatttaaatgttccctaattataaaaactgaattaattattttagagataggatctcactttgtcacataggttgaagtgcagcgttgtgcagtttgaactccaggcctcagcttcctcagcagctagtactacaggtgagtgagtgccactatgcttggataaacattttattttaaatttttttgtagagatgtggtcctgctatgttgcccaagctgatcttcaactcctggcctcaagggatcctcccgcttcagcctcccaaagcattgggcttacaggtatgagccaacatgccctctaatctattattctctaataaaaagttg

SEQ ID NO: 348585 - DNA, 985 bp, Homo Sapiens
tggaccggtccggaattctccggataaaacctgcagaaggatcaactactgtgcactgaacaaaccgggctgtgagcatgagtgcgtcaacatggaggagagctactactgccgctgccaccgtggctacactctggaccccaatggcaaaacctgcagccgagtggaccactgtgcacagcaggaccatggctgtgagcagctgtgtctgaacacggaggattccttcgtctgccagtgctcagaaggcttcctcatcaacgaggacctcaagacctgctcccgggtggattactgcctgctgagtgaccatggttgtgaatactcctgtgtcaacatggacagatcctttgcctgtcagtgtcctgagggacacgtgctccgcagcgatgggaagacgtgtgcaaaattggactcttgtgctctgggggaccacggttgtgaacattcgtgtgtaagcagtgaagattcgtttgtgtgccagtgctttgaaggttatatactccgtgaagatggaaaaacctgcagaaggaaagatgtctgccaagctatagaccatggctgtgaacacatttgtgtgaacagtgaccactcatacacgtgcgagtgcttggagggattccggctcccctgaggatggggaaaacgctgcccaacagaaagggatgtcccgccaaaatctaacccccccaatggtttgccgaaacaccatttttgtggttaaattaattggggaatttcctatcctctttgccaaaatgcttcaataatcggactttgttttccaaccgctgaaatgacccggaaaaatacggctgccaagaaaaatgcccactcgaaaaggcccctctaatttgtaaccctgtgcaccttctttgtcggatctccctggggacttcccaaagaaagcttcttgtgaacacaaaacagaaaactttttttatagggcttcccgcgtaaaatacaacagcttgtggttctacaa

SEQ ID NO: 348586 - DNA, 441 bp, Homo Sapiens
gggggagaatttccattaggcaaagctgtatgcagtggaattttccttttaggagacacacaattaagactctctggttctgtccttgctttggagactttaagacatttcctaaagcacaaataaaagcctcgtatttccccattgagagttttgttccaaggaatatgaagtgagacatatgggtgagtcataataatcaaaataatttatgaagagctgggtctgcaatagctagtctaaaaactacttgtgtgtcagtcctctggttatagtatataagagcctgaggaggtctggcaagatagatggtgtattatttatggatcaggctgctgcatacaaaccttgcatactattatgcagcttacctaactctcagactattctgagtaatgcttgcttgctaatggaatgtatagggagaccacattggaattg

SEQ ID NO: 348587 - DNA, 1196 bp, Homo Sapiens
  misc_feature (775)..(823): n is a, c, g, or t
ccccaaatatttttgacccacagtgggctgaatcacagatgcgaagcctatggacatggagggccaactggagaagcataagcaggggatactttttaggttgctacttcagcaggcaacattcagaccatggaagtctagagaaagattataaatctgaacttaccgctaaaaattttaaaatgggaaataaatccaaggagtttttagtcatgcattatgattttaatctatgttatgccaagtacagcattccaaaatatacatctagagactaaaagtaaatgctctatagtgaagaagtaataattaaaaaatgctactaatatagaaaatttataatcagaaaaataaatattcaggcagctcaccagaagaataaagtgctctgccagttattaaaggattactgctggtgaattaaatatggcattccccaagggaaatagagagattcttctggattatgttcaatatttatttcacaggattaactgttttaggaacagatataaagcttcgccacggaagagatggacaaagcacaaagacaacatgataccttaggaagcaacactaccctttcaggcataaaatttggagaaatgcaacattatgcttcatgaataatatgtagaaagaaggtctgatgaaaatgacatccttaatgtaagataactttataagaaatctgggtcaaataaaattctttgaagaaaacatccaaatgtcattgacttatcaaatactatcttggcatataacctatgaaggnnnnnnnnnnnnnnnnnnnnnnnnnnnnnnnnnnnnnnnnnnnnnnnnnttattttgtattctataacatacaagactgtaaagatgtgacagtgtacattatatgacaatgcacattagccagcaagtcttttataggtggtttcagcagcaacgataagtaatgcagaattcagctccagcactttatttcaaaagaaatttcctgcctccctccaagatgcagggtgaggaggtagcttggggttgctattggagaagtattcagtttgctactttgtgtcaccccttgccattcttttatccccagttaattattatctgcatataatataaatctgctagaccataaattaacagctttcaggacagatgccttgaaagttcttagggaggttaaacaaatattgtagcctaaaacc

SEQ ID NO: 348588 - DNA, 670 bp, Homo Sapiens
ataaggacttgacatcaaggactttagtatcctagggggttcttggaacccatcacccataggggcaccataggacaactatagtaccgtgtttatttcctattaattcaggttccgtttagagtctaaaactaaaacctaatcatttagtcacagtgtaaaaacaaatggaaataacagctcaaatcttcaaaatattactatagcattatgtttaaaataatctacaacaaaaatgtaccattttcaagcagtactacattaggagcccttttatagaaaataatttcttctttacccccgttccagtgtgaatctagtattctgttaacatttgtgtggcatttggagtttgtcatccccattgaagggagagccttctcagacatgaagcaagggaaacatactgaatagttttacacaaatttgatctggcttccatttgtccccctcatttcccaaatgtttaaatgtattggatttggattctcaatgtataagttgccttatctgttaatgtctatcttctgtctctttaattttgtatatctgctgttttgcttttggatacattttctaattagaagtcacatgataaatataatcagtatagtaataataccataatgtgcacatactcaataaataaatgactgcattgttgtaaatg

SEQ ID NO: 348589 - DNA, 678 bp, Homo Sapiens
  misc_feature (21)..(21): n is a, c, g, or t
  misc_feature (531)..(579): n is a, c, g, or t
caagatagattccaaaatatncatttagagctaaaagtaaatgctctatagtgaagaagtaataattaaaaaatgctactaatatagaaaatttataatcagaaaaataaatattcagggagctcaccagaagaataaagtgctctgccagttattaaaggattactgctggtgaattaaatatggcattccccaagggaaacagagagattcttctggattatgttcaatatttatttcacaggattaactgttttaggaacagatataaaacttcgccacggaagagatggacaaagcacaaagacaacatgataccttaggaagcaacactaccctttcaggcataaaatttggagaaatgcaacattatgcttcatgaataatatgtagaaagaaggtctgatgaaaatgacatccttaatgtaagataactttataagaaatctgggtcaaataaaattctttgaagaaaacatccaaatgtcattgacttatcaaatactatcttggcatataacctatgaaggnnnnnnnnnnnnnnnnnnnnnnnnnnnnnnnnnnnnnnnnnnnnnnnnnttattttgtattctataacatacaagactgtaaagatgtgacagtgtacattatatgacaatgcacattagccagcaagtcttttataggggtttcagc

SEQ ID NO: 348590 - DNA, 536 bp, Homo Sapiens
  misc_feature (54)..(321): n is a, c, g, or t
ctatagttgtcctatggtgcccctatgggtgatgggttccaagaaccccctagnnnnnnnnnnnnnnnnnnnnnnnnnnnnnnnnnnnnnnnnnnnnnnnnnnnnnnnnnnnnnnnnnnnnnnnnnnnnnnnnnnnnnnnnnnnnnnnnnnnnnnnnnnnnnnnnnnnnnnnnnnnnnnnnnnnnnnnnnnnnnnnnnnnnnnnnnnnnnnnnnnnnnnnnnnnnnnnnnnnnnnnnnnnnnnnnnnnnnnnnnnnnnnnnnnnnnnnnnnnnnnnnnnnnnnnnnnnnnnnnnnnnnnnnnnnnnnnnnnnnnnnnnnnngacatggagggccaactggagaagcataagcaggggatactttttaggttgctacttcagcaggcaacattcagaccatggaagtctagagaaagattataaatctgaacttaccgctaaaaattttaaaatgggaaataaatccaaggagtttttagtcatgcattatgattttaatctatgttatgccaagtatagcattccaaaatatacat

SEQ ID NO: 348591 - DNA, 390 bp, Homo Sapiens
  misc_feature (38)..(38): n is a, c, g, or t
  misc_feature (85)..(85): n is a, c, g, or t
tttaacccccgttcccagtgtgaaatcctagtataccngttaaacatttgtgtggccatttggagtttgtccatccccccattgnaagggagagcccttcctcagacatgaagccaagggaaacatactgaatagttttacacaaatttgatcctggcttcccatttgtccccctcatttccccaaatgtttaaatgtattggatttggattcctcaatgtataagttgccttatctgttaatgtctatcttctgtctctttaattttgtatatctgctgttttgcttttggatacattttctaattagaagtcacatgataaatataatcagtatagtaataataccataatgtgcacatactcaataaataaatgactgcattgttgt

SEQ ID NO: 348592 - DNA, 423 bp, Homo Sapiens
  misc_feature (63)..(63): n is a, c, g, or t
gcccccccggtagtgcaattaccggccaagccaggaaaggtaaaagtatttaaattaaaatanaaaagaaaaccctcctaaattgggtaaattggaattaccccccctgtagcctttaatagtttgtgacatttccttgacccttgcctagttcctttcattagatctgcgcaagatcctagtcatctggttaaggattttaagcagatgcaactataaacccaagaaactgtattactattactgttggtcatactaaacctgtctatttcctgaagtatatgacccacaaggatgtggaataactaggagaaactgtttttgtacactgtacatccttagtatttttacacgtatatgatagggatgaacatgattttccttcgtacagacagcttaaataaagcactatgtcaatctgct

SEQ ID NO: 348593 - DNA, 2001 bp, Homo Sapiens
  misc_feature (85)..(94): n is a, c, g, or t
  misc_feature (1585)..(1598): n is a, c, g, or t
ctacctgagtgaagttcatccttagtattgagtaggaagttacagtaaatggtagttcattcttacttacacacatagctaatcnnnnnnnnnncacttggaattatgttgaatgtttcattttgacaaaaaagtagactagaaggtatgttctttaagttgtcttgcatccattatataagaaagaaacaggtgagaggaagagcagaaagctgagactggctgatgttcagagcacttactcctctagagggaaagcatgacaccgaacactaagcacacagctttttgttgttttggttttttctcccgcaaatcttaaagtgattcccatgaccttggccaaggacacttcttaaagattaatgactggcactgacattgccccaggcgggccactcctcacactggctctcagttcccagccatgcctggggctcagtcacttctattccaccctctgagactccattggtgtcacacaaggtgtcttcttggctttgattttgagaatcccctattttcacttccagatctgtcagctgccatggaggaataatagaaaaccagaaatgcgtgtagagggagatttctaaaacttcccttgtgtcgcccatagttgtagttttgggttctggcaggtggaacaccctgaaacctggaatcattctatgagaatacagttcagactttgcagactccagcccatactaactgtcatgaagcttgacttcttgtcataatgcagccatcttggaggaaattggccatttctgcttagatggttggcagggtcgcgctcagctttgctttctacactaattacatagcattattcaagtattgttttccatttcccatccctgatttccagcttcttaaagctgactgttcttgcaggggccacttgcttctcctagagtacaaaagtaagggccttccttactaactgcagggtctctctattacacctcaacatacacactttgctgctactgtttgtactgtctacagtagaatttcccttaacttgctcctggtagtgcattacaggcaagcatgaaatgtaaagtatttatttaaataaaaagaaaacctctaaattggtaattgaattacctccctgtagctttatagtttgtgacatttcttgaccttgctagttctttcattagatctgcgcaagatctagtcatctggttaaggattttaagcagatgcaactataaacccaagaaactgtattactattactgttggtcatactaaacctgtctatttcctgaagtatatgacccacaaggatgtggaataactaggagaaactgtttttgtacactgtacatccttagtatttttacacgtatatgatagggatgaacatgattttccttcgtacagacagcttaaataaagcactatgtcaatctgctacttctctgtttattgttgttggatgtggttctataatccccccaaattaaatcttctttaatgaaaacatgatttttaatagccccagctggtattaacctaccttgtataaaatgtgacaggaaaatatagaaataattccttgtagctnnnnnnnnnnnnnntaggggatcatttttacttcagtgaaatggcagtagtgcggttgtgcaaactttgatgaacggctgcttctgaggggaaacgctgacctctcagcactggatttaggatggatgtactgtgaagccagggatgaaggaggtctcagaccctggggacattcagacccgaatcatctatacaacacacggtttggacccagaatctgaaggaatgtagcttttcattaacgtcttcctgataatgtactgctctgcatatttcctttcttagagtgtatttctaacaacatgtcatgggcaaattaacaaacttagacgtgggtgatgtagatggggtaggatggctggactgcagtcttgacttcacgtttgaatcctttctgggatgggggccctttttctg

SEQ ID NO: 348594 - DNA, 1137 bp, Homo Sapiens
ttcccctccttccctcggcgccggttgcggttttagcagctggtaccggtccggattttcggatcagctgttaaggacaaagcctgacaagccaacgacacagctaaagatgtactggcacagattacagagctccaccagaacctcgatggcctgaagaagaattacaataaactagcagacagcgtcgccaaaacgaatgctgtggttaaagatccttccaagaacaaaatcattgccgatgcagatgccactgtcaaaaatttagaacaggaagctgaccggctaatagataaactcaaacccatcaaggaacttgaggataacctaaagaaaaacatctctgagataaaggaattgataaaccaagctcggaaacaagccaattctatcaaagtatctgtgtcttcaggaggtgactgcattcgaacatacaaaccagaaatcaagaaaggaagttacaataatattgttgtcaacgtaaagacagctgttgctgataacctcctcttttatcttggaagtgccaaatttattgactttctggctatagaaatgcgtaaaggcaaagtcagcttcctctgggatgttggatctggagttggacgtgtagagtaccccagatttgactattgatgactcatattggtaccgtatcgtagcatcaagaactgggagaaatggaactatttctgtgagagccctggatggacccaaagccagcattgtgcccagcacacaccattcgacgtctcctccagggtacacgattctagatgtggatgcaaatgcaatgctgtttgttggtggcctgactgggaaattaaagaaggctgatgctgtacgtgtgattacattcactggctgcatgggagaaacatactttgacaacaaacctataggtttgtggaatttccgagaaaaagaaggtgactgccaaggatgcactgtcagtcctcaggtggaagatagtgaggggactattcaatttgatggagaaggttatgcattggtcagccgtcccattcgcctggtaccccaacatctccactcgtcatgttcaagttcagaacattttcttcgagtgcgctttctgatgtatccttgccacagaacctgagagttctccgtcgaact

SEQ ID NO: 348595 - DNA, 1148 bp, Homo Sapiens
ctgggcttatcgtggaaggagtggattgtacatttactgcattatcagtattcaagtaaagtgtgctgaagatgataactgtgacttaagccaagaaaggataaatttatttaccatttggctccagttgaaaaatcacatggcagactgcaaaacagaacatcaagatcacaaaagaaaaaatccaagtcacctgagagaagtaaatactgtataaatgcaaaaaactacgaacagcctacaatttcttcaaaatcacactctccatctccctacacaaaaagacgcatgtgtgagctatctgaagacaccaggcggcggctggcccatttaaatctgggaccctatgagttcaaaaaagaaacagataaacctccattttgtgattagacatgttgatcccccaagtcccagggctgatactttattgggatcttctggaagagactgtgaaagagatggatggtcaagggtgcacaatgatcattctcatcttggctgctgccgacccaaggattataaggttatcaggacaccccatgggagagacttcgatgactctttagaaaaatgtgaagagtatttgagcccaaggtcgtgtagtaagccccggcattcagcgaggaccttgctagtccattcagcaccctcaacaatgccaaagcattctccaagccctgtgttaaatagagcttctctcagggaacagatttcattctgattggtgttcaccttcaaactgcgatgagatccatgaccgggtaaaaaatgtcttgaaatcacatcaggctcatcaaagacatttatatgatgagagagacctagagaaagatgatgaactggaactgaaaagaagtcttttatgtagagactctgcctatgacagtgaccccgagtatagctcatgtcagcagccacgtggcactttccatttggatgacggtgaatactggtccaacagggcagcctcttataagggaaaatcccaccgacccatctttgagaacagcatggacaagatgtaacaggaacttatacaaaaaggcctatagttctgcttcacatacacaggaaagcttctgagaccatccatgataaacctcattagtgtccgtgtcaatttctcaatgaaaatgtttggtgtgatc

SEQ ID NO: 348596 - DNA, 435 bp, Homo Sapiens
gagacctagagaaagatgatgaactggaactgaaaagaagtcttttatgtagagactctgcctatgacagtgaccccgagtatagcactgttcacaggagcaaagtcttggaaccaacccaaatgcccatcaacgatagactggatacagaaatgtggaatgcaccatatgtcctcatctgaaagtctctgcaggatggtctgactcacgcgagtggttttgagataagttgtgttatacctcaagttaggtaaagtcgagagatgaactaacttaaaaagtagtgatgtttacatagaatctaaattggaaaagacaataatatcagcattagaaagtttgcctttaagtaaaaaaaattattagccataataggttttacattcttcgtaatagaatatcctaaagcaataaaacctccactatgtgaactct

SEQ ID NO: 348597 - DNA, 1728 bp, Homo Sapiens
  misc_feature (1012)..(1021): n is a, c, g, or t
tataatgactgttcagtgaatatcagacttccgtgtcattaaaagtcatgagagacagcacagagaggttataggttgccttggtgtacttttgtccaggagtaacagggacagaatactttctttccttccttcaagtacaagaaggctttctctaccatttgcgtctacactttattttaaaagctatccttttctagtagtattttatcatggcaatggcatgatgacaacaacagtctttcattacagactgaagggaagcatgtccttacttaaaatagttctgctactttccctcctattataaggaaattttacagattctaaaaataccttaatttttctttgatttttattttaccaagtcacaaatgtctttttgatgttttgagaattgttctcatagaatcacaaatactgacatttcattagatgattattttcctagaatccccaaagagcagtggcagtccatggcttggttgaagctagaaattttcctgcccctggtgacctggtaagcctcctgctcggaaccgtgtgagtgggtgaggaagatgagagatggtcagatggaagagaggaatacatgaactgctctggcctctctggttctgttcttggcccagagtttttgaaaagcagcggagcatgactgacttcacatgctcagctttctcagccttttgtttattttgttgtccttagatttccctgttgtaaaaggggcaagaaaagtaactcatcatctctaacacaccatggcagcttagccaggtagtcttagtggtggtgtttaggcataagatatgctgatcatcagtctcaggccacagtttccttcactaatcgtccagcttgagtgttctgttctcttcctgcccatttccttgaacctcctgctctagccttggcggagggagagtgctgtttgcttttgttctccctctgtcttaggaaaagccatctttaatatagttcttcaccaccgttggggttgttttgtgannnnnnnnnncttccgaagaactcctggttgttattggattttgtattttaatacaaattattgaattttataagcttgtacacaatatttaattagtgtgaaaggaaacaaagaatgcaggaaaaataatttaatcaacctcagttgacaaggtgctcagattattcaattcgggatcctccttttgttaggtttttgagacaaccctagacctaaactgtgtcacagacttctgaatgtttaggcagtgctagtaatttcctcgtaatgattctgttattactttcctattctttattcctctttcttctgaagattaatgaagttgaaaattgaggtggataaatacaaaaaggtagtgtgatagtataagtatcctaagtgccagatgaaagtgtgttatatataccccattcaaaattatgccaagttagtaattacctcagggttaactaaattactttaatatgctgttgaacctactctgttccttggctagaaaaaattataaacaggactttgtagtttgggaagccaaattgataatattctatgttctaaaagttgggctatacataaattattaagaaatatggatttttattcccaggatatggtgttcattttatgatattacgcaggatgatgtattgagtaaaatcagttttgtaaatatgtaaatatgtcataaataaacaatgctttgacttatttcc

SEQ ID NO: 348598 - DNA, 473 bp, Homo Sapiens
  misc_feature (13)..(13): n is a, c, g, or t
  misc_feature (22)..(22): n is a, c, g, or t
aaccggcggcctnccccgggcncccggggccgggaaaatttccctagcctccaacccaagcccagggactgcccactgctcctttggggattcctaggaaaataatccatcctaatgaaatgtcagtatttgtgattcctatgagaacaattcctcaaaacatcaaaaagacatttgtgacttggtaaaataaaaatcaaagaaaaattaaggtatttttagaatctgtaaaatttccttataataggagggaaagtagcagaactattttaagtaaggacatgcttcccttcagtctgtaatgaaagactgttgttgtcatcatgccattgccatgataaaatactactagaaaaggatagcttttaaaataaagtgtagacgcaaatggtagagaaagccttcttgtacttgaaggaaggaaagaaagtattctgtccctgttactcctggacaaaagtacaccaaggcaa

SEQ ID NO: 348599 - DNA, 1341 bp, Homo Sapiens
  misc_feature (852)..(852): n is a, c, g, or t
aaaaaagtagtagacagctgagataatggtggggcagaggtggaagggtgcagtgttggaggtgggggcgggggtctacatagctaggacctggccctggggggtggacgtcttatcaggacggaggaaacagaggtcagaagttccggaggtgggcagtcctttgttaacagatcatttgtttttccaggggtgaagagaggagctccagagacctgagtaggatggggggcagctgtccagtgacatctagggaagcccagcccccagcagcagcaggaactcttggggacagtctgtcttgttgcaaagccagcacagcaagcagcctccgcattagttccatagcttgactggcttctaagatgggcatgtcaagatccagaatctcaaagcatcccctctttggctccatcatccaagggtgagaaacagcagagcctaagtgagagtctgagtcaacaccttggctcagttttcaaatgaattttaaatatcctcagtcaaaagaaaaatagcaggaggcagaaacaaaaggtacgaacccatcccaaagctgttgggcactgccacttctggatggctctagcgccagcggagcccccattcccctccacgtcagacgtaattcttggtagggtactcagagggcccccgagagatggcaggggcagatgttgagtagcgggccatgtaatggctggggccctgggacccccccgaggggcaagtgcagcacagcaaccccccacccagcaacaaaaggcctgaggccgcccagcccaagtagagggaggcccccagctcccgcttttgggcctcagccaccagggggttatagaagtcccggantgacgcatgcgccgtccagcacacggggattagcgtcaggacccctgagatgacaaagacaatcccagaggtgagcaccaggcgggccttggaatccttctcctccacacaggtggtacacttggccccagcaaggtagaccagcaagccgaacagggccacaaggagggcgatgacacagagggcacgtgcagcctgcaggtcctgtggcagcgccagcagtgagtcgtacaccttgcactgcatctggccggtgctctgcaccacgcaggacatccacaggccctcccacaccacctgggccaccacgatgctgttgccgatgaaagcggtcaccttccacatgggcagggcacaggagaccaggccattcacccagcccagcagtgtcaggacgactcccaggatctgcattccggcagaggccatggcgaggttgaaggagctgcactgcgaaggagataagggaaattcctaggccgagtgtcg

SEQ ID NO: 348600 - DNA, 1073 bp, Homo Sapiens
  misc_feature (957)..(957): n is a, c, g, or t
aggctggaccggtccggattcccgggatcagctgtcggctggaaggaactggtctgctcacacttgctggcttgcgcatcaggactggctttatctcctgactcacggtgcaaaggtgcactctgcgaacgttaagtccgtccccagcgcttggaatcctacggcccccacagccggatcccctcagccttccaggtcctcaactcccgcggacgctgaacaatggcctccatggggctacaggtaatgggcatcgcgctggccgtcctgggctggctggccgtcatgctgtgctgcgcgctgcccatgtggcgcgtgacggccttcatcggcagcaacattgtcacctcgcagaccatctgggagggcctatggatgaactgcgtggtgcagagcaccggccagatgcagtgcaaggtgtacgactcgctgctggcactgccgcaggacctgcaggcggcccgcgccctcgtcatcatcagcatcatcgtggctgctctgggcgtgctgctgtccgtggtggggggcaagtgtaccaactgcctggaggatgaaagcgccaaggccaagaccatgatcgtggcgggcgtggtgttcctgttggccggccttatggtgatagtgccggtgtcctggacggcccacaacatcatccaagacttctacaatccgctggtggcctccgggcagaagcgggagatgggtgcctcgctctacgtcggctgggccgcctccggcctgctgctccttggcggggggctgctttgctgcaactgtccaccccgcacagacaagccttactccgccaagtattctgctgcccgctctgctgctgccagcaactacgtgtaaaggtgccacgggctccactctgttcctctctgctttgttcttcccctggactgagctcagcgcaggctggggaccccagggagggccctggcacgggccactggnctggctgggggactgggggaactggggcagagactgagccccagggcaggaaaggaaccaacccttcaaccctcttctgggcccaattcggacaactttcccaagggccggccttc

SEQ ID NO: 348601 - DNA, 702 bp, Homo Sapiens
ccagcccacgtacaggcccgcgcccatctcgcgcttctgcgcctcgggccaccacgggggttgtagaagtcccggataatggtgttggccgaccaggacaccggcacgagggtgagcagggcggcgagaaggaacagcacgcctgccacgatggtgatcttggccttggccgtgtcgtcctgcacgcagttggtgcactgggcgcccaccagcgccactagcagcccgaaggcggccagcaggatggccaccacgatgagggcgcgggccgcctgaaggtcctgtggcagtgccagcagcgagtcgtacaccttgcactgcatctggccggtgctctgcaccacgcagttcatccacaggccctcccagatgttctgcgacgtgatgatgttgctgccgatgaaggccgacacgcgccacatgggcaacgcgcagcacacgatggtgcccagccagcccagcacggccagcgcggtgcccgtgatctccaggcccatggacatggctgccgcggcaaggcccgctccaccgggtggctccgggtgcggggagacgaggggccggggccgctgggcctggcgggagctgcggcgccccgacggacggacggacggacggactgactcaccgacggcgcgcgctaacggctcggctccatacgctctcgccgcggctgcgcctgcacctgcctgtggctttgtg

SEQ ID NO: 348602 - DNA, 1612 bp, Homo Sapiens
  misc_feature (1416)..(1416): n is a, c, g, or t
  misc_feature (1528)..(1528): n is a, c, g, or t
  misc_feature (1542)..(1542): n is a, c, g, or t
  misc_feature (1562)..(1562): n is a, c, g, or t
ctggtctgctcacacttgctggcttgcgcatcaggactggctttatctcctgactcacggtgcaaaggtgcactctgcgaacgttaagtccgtccccagcgcttggaatcctacggcccccacagccggatcccctcagccttccaggtcctcaactcccgcggacgctgaacaatggcctccatggggctacaggtaatgggcatcgcgctggccgtcctgggctggctggccgtcatgctgtgctgcgcgctgcccatgtggcgcgtgacggccttcatcggcagcaacattgtcacctcgcagaccatctgggagggcctatggatgaactgcgtggtgcagagcaccggccagatgcagtgcaaggtgtacgactcgctgctggcactgccgcaggacctgcaggcggcccgcgccctcgtcatcatcagcatcatcgtggctgctctgggcgtgctgctgtccgtggtggggggcaagtgtaccaactgcctggaggatgaaagcgccaaggccaagaccatgatcgtggcgggcgtggtgttcctgttggccggccttatggtgatagtgccggtgtcctggacggcccacaacatcatccaagacttctacaatccgctggtggcctccgggcagaagcgggagatgggtgcctcgctctacgtcggctgggccgcctccggcctgctgctccttggcggggggctgctttgctgcaactgtccaccccgcacagacaagccttactccgccaagtattctgctgcccgctctgctgctgccagcaactacgtgtaaggtgccacggctccactctgttcctctctgctttgttcttccctggactgagctcagcgcaggctgtgaccccaggagggccctgccacgggccactggctgctggggactggggactgggcagagactgagccaggcaggaaggcagcagccttcagcctctctggcccactcggacaacttcccaaggccgcctcctgctagcaagaacagagtccaccctcctctggatattgggggaggggacggaagtgacagggtggtggtggctggaagtggggagcttggcttcttgctggccacgaatggctttaaccctgaccttctggaatcttgccgccatccggggctggcccatgttccccatttttcctttttccccaaatctgtgtctgcaggccctctcccccagtattccgtgatagccctttacatatcccctgcttgggacatggtgcctttgccccccccgcaaaacgtgatgcctgcatggatgcatggcttgaaaggcccttttgtgcagtctcactgcaatgcaaacaaagattaggaccttgcactctgtcttggcgtacatacacctcgatcactgcgaggtctatccgtcccgcnacaacgactggtattctaagtgccctgtgattgctatatctggctcaaaatgtcacatatattcagtgatgaaaaagatttgctctacccgcccagttcccttatgtcattncacgtctaagcganaaacaaatgattcccgtctnatgccttttaagcagtatagacctaacccagacgcggcacaacacaggcg

SEQ ID NO: 348603 - DNA, 430 bp, Homo Sapiens
aagtttttctgtttgtttctgcaaggcctagctatcttattacaatttagtatttgctctgcaacaactacaagaggtaggcataaagcatgaaaaagtttctcagttagtacctcgccatgtgttgttcactgcacaaaaccattcactttggacatgaatagtcattccttctattatcttctaaactctaaagcaaagctgctgccacccgtaaatgttctaaaagagtgtactcacaagtaagaaactttctctactgaaggatactgtcacagagtttgttgcagagcatctatatatatatttatttatttattttaaaaaaataaacaacaatgatgaacgaacccaggttcctagaaccaattctcttgattctctacttccacaaaataaagtgtatcatttggccaagactacagatgtg

SEQ ID NO: 348604 - DNA, 915 bp, Homo Sapiens
  misc_feature (810)..(810): n is a, c, g, or t
  misc_feature (847)..(847): n is a, c, g, or t
  misc_feature (884)..(884): n is a, c, g, or t
gcctactggggttattgggcagaagcctcccattacggagcacgaaagagtccatgaaggtccccgcgactcccggactggagaaaacggctcttgcgatggggcgaagtccgagctgcggcgggcgttggtccgtgcagggaagtgggaatcgttaggttcgttctggacccgccgccccatggcccaggcgtctcgctcaggtagcctgcctccactcgttatcgtgcccccgctgagggcgcaacccgggggcactggggaggagcagtgggagagaagtcgaacgggcggtcttcgctgggaggttcactgctggccgagcggaacttctggagggacgccgtggtggccgacgccggcggatgtgagcgaggactacgaggctgatgctgcggcctggaggcgggggcccgcaggtggcggcccgatccctcccgcgctgcagcgtctccgggcggtgttgctgcggctgcatcgcgagcgggagcagctcctccaggcccgagactgcgcctaccacctacagtcggctgtgcgactcatgaagaccctgagtcctggctcgccatccggcggccctaaccccttgccccaaaggtgcctgcgacctgcaactgcacccttcccaaggggcggttctgcgaatcggccctggggagactctcgagccgctgctgctagcgcgccccatcggactagccgcccagtgcctggaggctgtcatcgagatgcagcttcgctgctctcggccgggagccgtaggaaaggctggggtgggaactggctcaggctggataactatttcanctggagctgctccatcttcatcttcacggagtttctnatgggcacagcgaccaatgtcagcatttttaaaaggncacaggactttgcaaaagtccatgggggtca

SEQ ID NO: 348605 - DNA, 1506 bp, Homo Sapiens
atggactttgcaaggcctgtgtccttcaaaaatgctgacattggtcgctgtgcccatcagaaactccgtgaagatgaagatggagcagctccagctgaaatagttatccagcctgagccagttcccaccccagcctttcctacgcccaccccagttctgacacatggtccttgtgctgcagaatcagaaccagctcttttgatagggagcaagcagttcgggctttcaagaaacagtcacattgcaattgcatttgatgacaccaaagttaaaaaccgtctcacaattgagttggaagtaagaaccgaagctgaatccggcttgcttttttacatggctcgcatcaatcatgctgattttgcaacagttcagctgagaaatggattgccctacttcagctatgacttggggagtggggacacccacaccatgatccccaccaaaatcaatgatggccagtggcacaagattaagataatgagaagtaagcaagaaggaattctttatgtagatggggcttccaacagaaccatcagtcccaaaaaagccgacatcctggatgtcgtgggaatgctgtatgttggtgggttacccatcaactacactacccgaagaattggtccagtgacctatagcattgatggctgcgtcaggaatctccacatggcagaggcccctgccgatctggaacaacccacctccagcttccatgttgggacatgttttgcaaatgctcagaggggaacatattttgacggaaccggttttgccaaagcagttggtggattcaaagtgggattggaccttcttgtagaatttgaattccgcacaactacaacgactggagttcttctggggatcagtagtcaaaaaatggatggaatgggtattgaaatgattgatgaaaagttgatgtttcatgtggacaatggtgcgggcagattcactgctgtctatgatgctggggttccagggcatttgtgtgatggacaatggcataaagtcactgccaacaagatcaaacaccgcattgagctcacagtcgatgggaaccaggtggaagcccaaagcccaaacccagcatctacatcagctgacacaaatgaccctgtgtttgttggaggcttcccagatgacctcaagcagtttggcctaacaaccagtattccgttccgaggttgcatcagatccctgaagctcaccaaaggcacaggcaagccactggaggttaattttgccaaggccctggaactgaggggcgttcaacctgtatcatgcccagccaactaataaaaataagtgtaaccccaggaagagtctgtcaaaacaagtatatcaagtaaaacaaacaaatatattttacctatatatgttaattaaactaatttgtgcatgtacatagaattctttctgtattcagatggtgctaattcagactccagactgaattttaattcaagttctttctcaagtctataaataatattaaactgattatttcattct

SEQ ID NO: 348606 - DNA, 520 bp, Homo Sapiens
  misc_feature (48)..(188): n is a, c, g, or t
  misc_feature (475)..(475): n is a, c, g, or t
gtggatcccccgggctgcaggtgggaatacaggtgcccatcaccatgnnnnnnnnnnnnnnnnnnnnnnnnnnnnnnnnnnnnnnnnnnnnnnnnnnnnnnnnnnnnnnnnnnnnnnnnnnnnnnnnnnnnnnnnnnnnnnnnnnnnnnnnnnnnnnnnnnnnnnnnnnnnnnnnnnnnnnnnnnnnncccttcctctccctttctctttggggttcccttcacaaacaggtgaggcagctttttcaagggcattccaagcacaaaagaccttgttgtacctaaatactataagggacctgtcattgaggacgaaccatcacagcaagaggaattatctcgtgccgcatcttcgcataactgacaggatccctggcaaggatgtctcaatgcagaaagttggctaagtgaactgcagtatctaccttggacctaaaagaacttgctaatgttttcaagactacaattcagaggcntgtcagatttaatctttgcatttacaaaaacacccttttacgtac

SEQ ID NO: 348607 - DNA, 1237 bp, Homo Sapiens
  misc_feature (63)..(78): n is a, c, g, or t
  misc_feature (224)..(256): n is a, c, g, or t
  misc_feature (932)..(932): n is a, c, g, or t
ggtaccggtccggaattcccgggatcgcagcgccgctaaagcgcagttctcgttggtgtaacnnnnnnnnnnnnnnnncagccacttccggctcctgcgtcgctccggaagcctgcgagttccggaagccttggtaatccagattcggctaggaaaagacaagctttccagagaatgtttcagagaaagttacgtggagcgtgggcgtttcgcagactcctaannnnnnnnnnnnnnnnnnnnnnnnnnnnnnnnncttctggcaagtatgaggcaaggatttcacagaagaacttggagcaaaaattcccactgtcatagctataggctgtccagtcttgagggagctgcaggaacaggaaaaagagaccttcagagaagacatggcttccagaaaagagaatgcgaagagtgcaaacagagtgctaagaataagccagttggatgcacttgaactaaacaaggccctggagcagctagtttggtcccagtttactcagtgctttcatggatttaaacctgggctgttagctcgctttgagccagaggtgaaagcgtgcttatgggttttcttgtggagattcaccatctactccaaaaatgccacagtgggacagtcagttttgaatattaagtacaaaaatgatttttcccctaacctgagatatcagccacccagtaaaaatcaaaaaatctggtatgctgtttgtacaattggtggcaggtggttagaagaacgatgctatgatttgtttcgaaaccatcatttagcatcatttgggaaaagtcaagcagtgtgtgaattttgcgattggacttttgaaattaggtcgggctgattaatttttttgattttcccttcagagggggaaaagtttgcactttgacagaacgtctcctaggtattcattctgtattttgcaagcctcaanacatacgtgaaggttggctttgaatacaatgatagggaacttctctggcatggttttgctgaatttctgatttttctctacccactatcaatgtcagaaattgaaagcccagctgcctttctgggggtatccctcctactggtggcacctaataagggcaataccttaaccaccaatgggcaagaatgcgcctctattgggagagtggccaaccatgcctcccaccataagatgggggacatattttctgttatttccggggccaaaaggaattccctttttggacgggactttatactgggcca

SEQ ID NO: 348608 - DNA, 1596 bp, Homo Sapiens
agcgtggagttccggaagccttggtaatccagattcggctaggaaaagacaagctttccagagaatgtttcagagaaagttacgtggagcgtgggcgtttcgcagactcataagcttctggcaagtatgaggcaaggatttcacagaagaacttggagcaaaaattcccactgtcatagctataggctgtccagtcttgagggagctgcaggaacaggaaaaagagaccttcagagaagacatggcttccagaaaagagaatgcgaagagtgcaaacagagtgctaagaataagccagttggatgcacttgaactaaacaaggccctggagcagctagtttggtcccagtttactcagtgctttcatggatttaaacctgggctgttagctcgctttgagccagaggtgaaagcgtgcttatgggttttcttgtggagattcaccatctactccaaaaatgccacagtgggacagtcagttttgaatattaagtacaaaaatgatttttcccctaacctgagatatcagccacccagtaaaaatcaaaaaatctggtatgctgtttgtacaattggtggcaggtggttagaagaacgatgctatgatttgtttcgaaaccatcatttagcatcatttgggaaagtcaagcagtgtgtgaatttagtgattggacttttgaaattaggtgggctgattaattttttgattttccttcagaggggaaagtttgcaactttgacagaacgtctcctaggtattcattctgtattttgcaagcctcaaaacatacgtgaagttggctttgaatacatgaatagggaacttctctggcatggttttgctgaatttctgatttttctcttaccacttatcaatgtccagaagttgaaagccaagctgtcttcatggtgtattcctcttactggtgcacctaatagtgacaatacattagccaccagtggcaaagaatgcgctctatgtggagagtggcccaccatgcctcacaccataggatgtgagcatattttctgttatttctgtgctaagagtagtttcttatttgacgtgtactttacttgtcctaagtgtggcacagaagtacacagtctgcagccactgaaatcaggaatcgagatgtcagaagtaaatgctctttagaaactaaaattgcttcctttgaggaaaaaaatgcaccgtgtttaaattcttaatattagtcatcctaagtataccatttatgtatcctttataaggaatgtgctcctagccactgtcttctcctttccaggcatgactgaaatctaatcactggaaaccatgtgattctaaatatattatgtaaatgttaatgtattatgttttttaaatcattgcattcaatttttaatgtcaagaataatggacagcttttgtcaggtgactactaacaatgctccttcattttactacttcttaaaacaaggttggattctaaagataaagattttggagactctgggatgagtgtgcgtttgttttcagagttgacataatatgataatgtgacgagttatgagactgttttaaaccttaagacctgatgcctcagttgtaac

SEQ ID NO: 348609 - DNA, 442 bp, Homo Sapiens
  misc_feature (63)..(63): n is a, c, g, or t
caacgccggtacggtaagcttggatccctctagagcggccgccctactaactactatgctgcnagaagacgacagaaggggtctccctgcagggtgggaggaacgctggttgtctctttttcttcctgcccctttgtttgacttcaccattctctgtttccttttcgctccgctgtagttacgtgactcacctttcattcagtacctcccttcaaggaaagccctgtctcctgtccttggactgggatcacacagagttcttgggatgaccctggctctcccgcgccagccgctctgctgccaagtgcaagcattcgctcccagatgcttcgcccagttctttgcaaatgtcatccaatcagtgtccaggtgttcacggctcatcactggcttacgtgctcgtggtctacatagcttgggacaatgctgtttatgcaggtat

SEQ ID NO: 348610 - DNA, 601 bp, Homo Sapiens
aaaggattttataggagcatgtctgcttcatatgctggtatatcagagactgttatccattttgttatatatgaaagtataaaacaaaaactactggaatataagactgcttctacaatggaaaatgatgaagagtctgtgaaagaagcatcagattttgtgggaatgatgctagctgctgccacctcaaaaacttgtgccacaactatagcatatccacatgaagttgtaagaacaagactacgtgaagagggaacaaaatacagatctttttttcagactctatctttgcttgttcaagaagaaggttatgggtctctttatcgtggtctgacaactcatctagtgagacagattccaaacacagccattatgatggccacctatgaattggtggtttacctactcaatggatagcagcacgaggactgctgtactgcaaaaaaagaagaccaaaagattacagtggaccatgggatacagaagccagcatggcagacagaagaaaaatagtttgggaacatgtaactattctaagtggaagttttgttgtaggaattatagtaatcacaccacattacttggcctttcggtaatgtga

SEQ ID NO: 348611 - DNA, 398 bp, Homo Sapiens
  misc_feature (224)..(351): n is a, c, g, or t
gcagaatgtcatctagaatttgctgtaaaataatctagttggagatgaaaggatagcaaagaggcctagatgaaaccagatgggccatttgtttctaattatagaagctgagtgttaaatatgtacaaatttattatactatgctccctatttttatgtgcttcagaacgtccataataaaagtggggggaggatatttatggttaagaaattaaaggaggccnnnnnnnnnnnnnnnnnnnnnnnnnnnnnnnnnnnnnnnnnnnnnnnnnnnnnnnnnnnnnnnnnnnnnnnnnnnnnnnnnnnnnnnnnnnnnnnnnnnnnnnnnnnnnnnnnnnnnnnnnnnnnnnnttgtgccactgcactccagcctgggcaaaagagcgagactccgtctc

SEQ ID NO: 348612 - DNA, 2055 bp, Homo Sapiens
  misc_feature (67)..(67): n is a, c, g, or t
  misc_feature (170)..(170): n is a, c, g, or t
  misc_feature (325)..(325): n is a, c, g, or t
  misc_feature (370)..(370): n is a, c, g, or t
  misc_feature (611)..(611): n is a, c, g, or t
  misc_feature (1042)..(1042): n is a, c, g, or t
  misc_feature (1400)..(1400): n is a, c, g, or t
  misc_feature (1842)..(1842): n is a, c, g, or t
  misc_feature (1846)..(1846): n is a, c, g, or t
cgaggcaggaacgagaagagttaagaggaggagaggctaccgaattactcagtggacgaaataggcngtacgaagaggtgacacgaaccgagtatcggcacgcatcaatagccgaggcggtgcgttaactgcagcgacaggtgaacacaagcagtgtggggcagacgagnagacggttagtgggagcggcaagagtggactgtggcggcgaataacactaatatgcaagcgcgcgagtgcttagagggatggtgctagggagtgcaagggtgacgtgagctaagagggaacgttgtaatacaagtttgatgtgagggcgagcggnggtcgtgcggtgggcatatattaactccgacatgtgtcggatggnccataggcgagatgacgttaggtcaaaacggtatagcttagaagactacaggtagtaatacaatatgggacgtgcagtgagtgtgcagtggcgagcggagaagagagtatttatagaagtgtgaaagcgatagatggtctatcaggcgtcgatagatggctagcgagtgttggtatggtatgctttattgtaattctacgtgcagtggggggcggtgcgtctgttagaggcattgtgaggnatatatacaccgagtacgcggagagagaatgcgcgtacggaaaatggactagtatgaagaaagcaaggggtaaagggggtattattgcatgacgaacgaacgaggaggttgtcgcaaatggtgggtgcagtgcggagcggggggggtataggaaacgaggagggaaaaggatggtagtgattgatcggagtgttgggagtgatacgccagagctttatccgtggatagggcgcgcaccacgatgggatgagggaggaatgggccgccgacggagctgcgaaaaacaagagcggggacagagggtggcagaaacaggcagagggggtgtcatagagggagagggagcgggacctagatggaccaaggacagagacatggggtgggggcagaagtgggaaggaggggaggatgccagggtggaggctacctcntgagcacccctgccccctcggcctggagaccagtatcggcttcggaaccttcggagcagcatgaggaacatgatgaccagcaggtcaaagacgagctcagccatctccaccacagacaacaccgaggagccgaaccacaggctccactggctgcccaggttggacaggagggtgaccatcgtgacagagggagactcagaattggttttgtagttcagctccttgaagaagatgttgactttggccactccattcctcttgttgttgacggtgtaattgttctgtcgcgatagcatctggaagacccattcctgggatgtcaccgagggccatcgtgagtaaccagcagagagctggnagctggtcccgctgcatggcttccggcacttggtgaaacagcccaggtggtctgaggagaagtaaacctggagcttatagtagcagtacccccaggaactgtgctttctgtagtcacagtactccacgttctggggccgcggatagaagatgtaagcacagccacactccttgatcatgctctcctggaagcaggagtgaatacacacctgctgtgtgtactttgaagggtaaaggttctcaacaggaacatcactgccattcttggtgcagtcgccataatcgcccccaagtctgtccagggtttccttcctcatgctgatggaggtctccacgccaggccgcaagttaaagccaccatcatccataaaggcaggttcatcctgcccgtgcaccattacccgggccccagtcactgtggacagcaggggaatgaagtcatntctntctgcgcgcagcatcagggacagaccgttgttgattccaggcatggaagacatccagaggttggagttgttcttgtcattgaaagtatagcagtttccatacatcgggtggtggaagtgagagtaattcctcgagctgtgtcctgattctgtctctgccccaggactgcagggctccaggaggtctgggctgcctccagcttcccactc

SEQ ID NO: 348613 - DNA, 725 bp, Homo Sapiens
  misc_feature (594)..(594): n is a, c, g, or t
  misc_feature (599)..(599): n is a, c, g, or t
  misc_feature (601)..(618): n is a, c, g, or t
  misc_feature (643)..(643): n is a, c, g, or t
  misc_feature (665)..(665): n is a, c, g, or t
  misc_feature (670)..(670): n is a, c, g, or t
  misc_feature (684)..(684): n is a, c, g, or t
  misc_feature (711)..(711): n is a, c, g, or t
atagtttttaatcagcctcaaaaattccccttatttccagtatcttatttttactatttcattgatgtttcaagtggaatcaaatattccaactgttttccactggaagaagatgaatttcaggtacaattcagtagcaaagaacacccatgttttcaaaataatggagaaatttttttctcatatgaagttatgattaaatttgtgaattgcacaagcttggaattctgctgcaggatgcctacattctgtattgctttattttggtcatatattacaaatggaatatttcccagctcatttatatacagttcctggttgctgaaattttactggcaagctttgtgaactaattttacttctcaaagatactaggaataaagtgaaaatagggtcttttctctcataggtctaaaagatacttctttcctttaaccattacattctgggaggtgtaattaatccaaccctgctgtaggatagggatctcattattaaaggattctagggtaaacagtctttctaggcaggaaatggatctttttgggttcagtcttggcaggcatttccctaaaaattgctaggtgtacggtngtaantnnnnnnnnnnnnnnnnnnaatttccctaaaatgcccgtgtacnggagtggattgttaggggtaanggggnaatccgggcttggntttacccaccaccccctgtggcacctnccaaccaacacaca

SEQ ID NO: 348614 - DNA, 466 bp, Homo Sapiens
ttgttaggtaaatgagaaaatcaggcttgatttaccaaccaccccatgtgcacatacaaacaaacacacaccccacaccaaagccacggaaccccgccaacaaagttcctatttacccccgaggagatataaaactttgtgactgccactaaattatttttttgaaaaataataccagaaatttgtaagcagacacaacagctctagtttatcccaccaaataacaatataaatgggacaagcaaagagaaactgtaatttgaagatttttgagtgtgatacttataaaagtgtgtgtgtttgtgtgtagaaatgtattgaatttgagagtaatttatggaaagtgctgtcagcatggtatttcaaatgcttcacaatttgaatttaaactagtcaatgggatcattaagattattatgcatgttttccaaagagtttgaattcaaatgacaacttaaaagaaaaa

SEQ ID NO: 348615 - DNA, 1536 bp, Homo Sapiens
ggaagccgaggggcggcatcttggctccgtgaggctctgaggtgccggggtgcggcggcggcagcggcggccagcagggcggaggctgaggcagcaagctcgctagagagggagaagcagtcgggcgcaggcgcctcctccgcagcccgctccatggtcggcgcccacagcccgcggcggcctgtcttgcgctccacttccttcacatcctcctccgcctcctcgttttcaggcgccgccggcggcgctgtgtggaggcccgcgagctgaaattcgcggtgcgacgggagggagtggagaaggaggtgagggggcccaggatcgcggggcgccctgaggcaaggggacgccggcgggccgaagcgcagcccgccgcccgcaggctcggctccgccactgccgccctcccggtctcctcgcctcggccgccgaggcagggagagaatgagccccgggacccgccgggggacggcccgggccaggcccgggatctagacggccgtagggggaagggagccgccctccccacggcgccttttcggaactgccgtggactcgaggacgctggtcgccggcctcctagggctgtgctgtttgttttgaccctcgcattgtgcagaattaaagtgcagtaaaatgtccactaggaccccattgccaacggtgaatgaacgagacactgaaaaccacacgtcacatggagatgggcgtcaagaagttacctctcgtaccagccgctcaggagctcggtgtagaaactctatagcctcctgtgcagatgaacaacctcacatcggaaactacagactgttgaaaacaatcggcaaggggaattttgcaaaagtaaaattggcaagacatatccttacaggcagagaggttgcaataaaaataattgacaaaactcagttgaatccaacaagtctacaaaagctcttcagagaagtaagaataatgaagattttaaatcatcccaatatagtgaagttattcgaagtcattgaaactgaaaaaacactctacctaatcatggaatatgcaagtggaggtgaagtatttgactatttggttgcacatggcaggatgaaggaaaaagaagcaagatctaaatttagacagattgtgtctgcagttcaatactgccatcagaaacggatcgtacatcgagacctcaaggctgaaaatctattgttagatgccgatatgaacattaaaatagcagatttcggttttagcaatgaatttactgttggcggtaaactcgacacgttttgtggcagtcctccatacgcagcacctgagctcttccagggcaagaaatatgacgggccagaagtggatgtgtgggagtcctgggggtcattttatacacactagtcagtggctcacttccctttggatggggcaaaacctaaaggaactgagagagagagtattaagagggaaatacagaattcccttctacatgtctacagactgtgaaaaaccttctcaaacgtttcctggcgctaaatccaattaaacccggcactccta

SEQ ID NO: 348616 - DNA, 2713 bp, Homo Sapiens
  misc_feature (31)..(31): n is a, c, g, or t
  misc_feature (162)..(172): n is a, c, g, or t
gtgcattacaacacctccatcggaactacanctgttgaaaacaatcggcaaggggaattttgcaaaagtaaaattggcaagacatatccttacaggcagagaggttgcaataaaaataattgacaaaactcagttgaatccaacaagtctacaaaagtttgnnnnnnnnnnnagctcttcagagaagtaagaataatgaagattttaaatcatcccaatatagtgaagttattcgaagtcattgaaactgaaaaaacactctacctaatcatggaatatgcaagtggaggtgaagtatttgactatttggttgcacatggcaggatgaaggaaaaagaagcaagatctaaatttagacagattgtgtctgcagttcaatactgccatcagaaacggatcgtacatcgagacctcaaggctgaaaatctattgttagatgccgatatgaacattaaaatagcagatttcggttttagcaatgaatttactgttggcggtaaactcgacacgttttgtggcagtcctccatacgcagcacctgagctcttccagggcaagaaatatgacgggccagaagtggatgtgtggagtctgggggtcattttatacacactagtcagtggctcacttccctttgatgggcaaaacctaaaggaactgagagagagagtattaagagggaaatacagaattcccttctacatgtctacagactgtgaaaaccttctcaaacgtttcctggtgctaaatccaattaaacgcggcactctagagcaaatcatgaaggacaggtggatcaatgcagggcatgaagaagatgaactcaaaccatttgttgaaccagagctagacatctcagaccaaaaaagaatagatattatggtgggaatgggatattcacaagaagaaattcaagaatctcttagtaagatgaaatacgatgaaatcacagctacatatttgttattggggagaaaatcttcagagctggatgctagtgattccagttctagcagcaatctttcacttgctaaggttaggccgagcagtgatctcaacaacagtactggccagtctcctcaccacaaagtgcagagaagtgtttcttcaagccaaaagcaaagacgctacagtgaccatgctggaccagctattccttctgttgtggcgtatccgaaaaggagtcagaccagcactgcagatagtgacctcaaagaagatggaatttcctcccggaaatcaagtggcagtgctgttggaggaaagggaattgctccagccagtcccatgcttgggaatgcaagtaatcctaataaggcggatattcctgaacgcaagaaaagctccactgtccctagtagtaacacagcatctggtggaatgacacgacgaaatacttatgtttgcagtgagagaactacagctgatagacacttcagtgattcagaatggcaaagaaaacagcactattcctgatcagagaactccagttgcttcaacacacagtatcagtagtgcagccaccccagatcgaatccgcttcccaagaggcactgccagtcgtagcactttccacggccagccccgggaacggcgaaccgcaacatataatggccctcctgcctctcccagcctgtcccatgaagccacaccattgtcccagactcgaagccgaggctccactaatctctttagtaaattaacttcaaaactcacaaggagaggcttccaactgaatatgagaggaacgggagatatgagggctcaagtcgcaatgtatctgctgagcaaaaagatgaaaacaaagaagcaaagcctcgatccctacgcttcacctggagcatgaaaaccactagttcaatggatcccggggacatgatgcgggaaatccgcaaagtgttggacgccaataactgcgactatgagcagagggagcgcttcttgctcttctgcgtccacggagatgggcacgcggagaacctcgtgcagtgggaaatggaagtgtgcaagctgccaagactgtctctgaacggggtccggtttaagcggatatcggggacatccatagccttcaaaaatattgcttccaaaattgccaatgagctaaagctgtaacccagtgattatgatgtaaattaagtagcaattaaagtgttttcctgaacactgatggaaatgtatagaataatatttaggcaataacgtctgcatcttctaaatcatgaaattaaagtctgaggacgagagcacgcctgggagcgaaagctggccttttttctacgaatgcactacattaaagatgtgcaacctatgcgccccctgccctacttccgttaccctgagagtcggcgtgtggccccatctccatgtgcctcccgtctgggtgggtgtgagagtggacggtatgtgtgtgaagtggtgtatatggaagcatctccctacactggcagccagtcattactagtacctctgcgggagatcatccggtgctaaaacattacagttgccaaggaggaaaatactgaatgactgctaagaattaaccttaagaccagttcatagttaatacaggtttacagttcatgcctgtggttttgtattacctgttttgtgtttttttagtgcaaaaggtttaaattaatagttgtgaacattgcttgcgagtagttcttctaagtagattcacaagataattaaaaattcactttttctc

SEQ ID NO: 348617 - DNA, 1168 bp, Homo Sapiens
gctacagtgaccatgctggaccagctattccttctgttgtggcgtatccgaaaaggagtcagaccagcactgcagatagtgacctcaaagaagatggaatttcctcccggaaatcaagtggcagtgctgttggaggaaagggaattgctccagccagtcccatgcttgggaatgcaagtaatcctaataaggcggatattcctgaacgcaagaaaagctccactgtccctagtagtaacacagcatctggtggaatgacacgacgaaatacttatgtttgcagtgagagaactacagctgatagacactcagtgattcagaatggcaaagaaaacagcactattcctgatcagagaactccagttgcttcaacacacagtatcagtagtgcagccaccccagatcgaatccgcttcccaagaggcactgccagtcgtagcactttccacggccagccccgggaacggcgaatcgcgcaagcatataatggccctcctggcctctcccagcctgtcccatgaagccacaccattgtccctagactcgaagccgaggctccactaatctctttagtaaattaacttcaaaactcacaaggagtcgcaatgtatctgctgagcaaaaagatgaaaacaaagaagcaaagcctcgatccctacgcttcacctggagcatgaaaaccactagttcaatggatcccggggacatgatgcgggaaatccgcaaagtgttggacgccaataactgcgactatgagcagagggagcgcttcttgctcttctgcgtccacggagatgggcacgcggagaacctcgtgcagtgggaaatggaagtgtgcaagctgccaagactgtctctgaacggggtccggtttaagcggatatcggggacatccatagccttcaaaaatattgcttccaaaattgccaatgagctaaagctgtaacccagtgattatgatgtaaattaagtagcaattaaagtgttttcctgaacactgatggagatgtatagaataatattcaggcaataacgtctgcatcttctaaatcctgatgtgaaacgtctgaggacgagagcacgcctgggagcgaaagctggccttggactacgaatgctctacatcaagatgtgcaactatgcgcccctggcctacttccgtaacctg

SEQ ID NO: 348618 - DNA, 767 bp, Homo Sapiens
tgggtcaggcttggtctgggaccggctggcacgggctggttcgggtcgctgctcgagcccaaggtggcgtttttaattcacgtacagcctcttgctccggcgcttcttgagcccttcgatgtatcgctgcagctccttagtcaggaagtggtccctgccgatccctaactggtagctccggagggctttggtgaggatttccagagcttcattctccatgagttccatcaggggcagtggcagcctgctctgctgctctgcccagtaggctcgatggggcatgtgcttcgcaatattgagtgatgacattgaggaagacttttcggcctcgatctgggatgcagtgtccttctcccccagattgatttccatggagctgccgcggtgcaactccagctccaccagcgcgtgctcgtccagttcctccggcttgtggctggccttgtacccctcgtccaacgagccccgccccaggctgtgccacccgcgggtcttgctaatgttgcggccctcctcgtcgaagccctcgcagacctcggacagcggcatgttcagctgtgcctgggacagcgtggtcgtggtccacaggtcccgagtgtcgctatgcacgctctcctcgtccgagccttggcggtcggaagacttgagcgacactttcgaaggcttttcctccatggttctgccccaacggaaccagacgccacaggcctcgagattcggagaattccgcgccggaaaggcgaaggggaagcggggagggggaagaa

SEQ ID NO: 348619 - DNA, 2194 bp, Homo Sapiens
  misc_feature (2140)..(2140): n is a, c, g, or t
  misc_feature (2159)..(2159): n is a, c, g, or t
  misc_feature (2166)..(2166): n is a, c, g, or t
agagtgtgcgccggggtggggggcaacggtcagccgtcaccctgagacgggcggcggcgggatggcaacagcctccggggcctcggacttgtctggctccggagcgcccccgcccggtgtgggagctcaagcggcggcggccgctgatgaggaggagcgagaggtggtgcgggtccgagtcaaggcccattgctagaagactgggacataatcagccccaaagatgtcattggctccgacgtgttgctggctgagaaacggtcatcactgacgactgccgccctgccctttacacagtccatcctcactcaggtgggccgtaccttgtctaaggtccaacaagtgctgagctggtcgtatggggaagatgtcaagcccttcaagccacccctgagcgatgctgagtttcacacgtacctgaaccacgagggccagctctcccgacccgaggagttgcgcctgcggatctatcatggcggtgtggagccctcgctgcgaaaggtggtgtggcggtacctgctgaacgtgtatccagatggactgacaggccgagagcggatggactacatgaaacgcaagagccgcgagtatgagcagctcaagagcgagtgggcccagcgagcgagccctgaggacctggaattcatccgcagcacggtcctcaaggatgtactgcgcactgaccgggcccacccctactatgcggggcctgaggatggcccacatctacgggcgctgcacgacctgctcaccacctatgccgttacccacccacaggtgtcctactgccagggcatgagtgaccttgcctcacccatcctcgctgtcatggaccatgagggccatgcctttgtttgcttttgtggcatcatgaaacgcctggccgccaacttccaccctgacggccgcgccatggccaccaagtttgcacacttgaagctgttgctgcgacacgctgaccctgacttttatcaatacctgcaagaggcaggcgctgatgacctcttcttctgttaccgctggctgctgctggaactcaagcgtgagttcgccttcgacgatgccctccgcatgcttgaggtcacttggagttcgctgccccctgatcctcctgaacatgaggtagagctggttggaccccccagccaagtggcagacgctggttttggtggccacagggggtggcccgtgcgacagaggcacatgctgaggcctgctggtggaggaggtagtacctttgaagatgctgttgaccacctggccacagccagtcaggggcctggtggtggggggcgtctcctgagacaggccagcttggatggcctccagcaactcagggataacatgggctccaggagggaccctctggtccagctgccccacccagctgcccttatcagctccaagtccctctctgagcctttattgaactccccagacccactgctctcctccttttcccaccctgattccccatcttcctcatctccaccatccacccaggaggcctctcccactggtgatatggctgtaggatcccccttgatgcaagaggtaggctccccgaaagaccctggaaagtccctgccacctgtaccaccaatgggcctgcccccaccccaggagtttggccgggggaacccattcatgctgttcctctgcctggccatcctgctggagcaccgcgaccacatcatgcgcaatgggctggattataatgagctggccatgcactttgaccgccttgtgcgaaaacaccacctggggcgcgtcctgcgccgggctagggctctctttgctgattacctgcagtcagaggtgtgggactcagaggagggggctgaggccacagccgcatcttgatcaggctttctcaagccctccatcggccccaccagatctccattctttgccatgagggccaacacatgagaccccacctccctccctgcctgccagccctagacttgttggagcatagagcccttcctccccaggcctaagtatgtggagctctgctttggcactgccccgcagaggccacgcctatttattctgtttctgttgttttgtttttaacaactatactttgcacacatgaaggtcactgtgggtttgtgtgtttctctggcctcctccnggggtttttgctgttagantggaatnctcaaggggccttttaaccgatgggagg

SEQ ID NO: 348620 - DNA, 1109 bp, Homo Sapiens
gaggtccggacactggcggccatggaactcaccggtaatagaggacacatctcttaactgggttgctctaagaactgatgtctaaaccgtctcagcatggcctgtagaggaggagctgggaatggccaccgtgcctcagctacactctctcgggttagccctggaagtctttacacatgtagaacccgtacccataatatatgcatggtatctgactttttctacccaaatatgggaggcgttggaaagccacatttaccagctctctcagtgcctgattgaaagagggcataaggttataattgtcacccatgcttatggaaatcgaaaaggcatccgttacctcaccagtggcctcaaagtctattacttgcctctgaaagtcatgtacaaccagtctacagccacgaccctctttcacagtctgccattgctcaggtacatatttgttcgggagagagtcacgataatccattcacatagttctttttctgctatggcccatgatgctctcttccacgccaagacaatggggcttcagacagtcttcacggaccattccctttttggatttgctgatgtcagctcggtgcttacaaacaagcttctaaccgtgtctctttgtgatacaaaccacatcatttgcgtgtcttatactagtaaaaggaacatactgtactaagagccacactgaatcctgaaaatagcgtcccgtcttcctaatgctgtagatcctactgacttcactccagacccctttagaaggcatgatagaataactattgttgttcgccacagacttgtttaccgaaaagggaccaatttggcttaggggtataataccttgaactctgtcagaaaatttccccatttaaatttccatacttggagggagagggacccaaaataaatcctttttgggaacaagttcgggggaaaaataccaacttgcttgaaagggttgcgtccttttggggagtttaaaacccccgggatgtatataaaatggccttacttccaggaacaaattttttttggagtcctctcccttactgcaaatatttctgcatgccgacatcggggaaacaatcccacttgggcggttcaac

SEQ ID NO: 348621 - DNA, 1161 bp, Homo Sapiens; identical to SEQ ID NO: 254653
  misc_feature (875)..(1028): n is a, c, g, or t
  misc_feature (1041)..(1052): n is a, c, g, or t

SEQ ID NO: 348622 - DNA, 856 bp, Homo Sapiens
  misc_feature (248)..(248): n is a, c, g, or t
  misc_feature (617)..(617): n is a, c, g, or t
  misc_feature (714)..(715): n is a, c, g, or t
  misc_feature (756)..(757): n is a, c, g, or t
  misc_feature (784)..(784): n is a, c, g, or t
  misc_feature (789)..(789): n is a, c, g, or t
  misc_feature (791)..(791): n is a, c, g, or t
  misc_feature (801)..(801): n is a, c, g, or t
  misc_feature (804)..(804): n is a, c, g, or t
  misc_feature (813)..(813): n is a, c, g, or t
  misc_feature (831)..(831): n is a, c, g, or t
cgtcgtttataaggggagctgtgacaatcttcttgccagccctcttcctcccactcggctcctcttacggagtcctcattccaccccccttgtttccgcattcatcctgagtggctggtgggaacgtgaaaagggagaggaaaaggcgcaagaagccagagagaggggtgtgggaaaagcgaaaacaggctgccaaatcaggggattccttccaatttaaaaaggaaagtctgctgacgttagttagnttaaatttaacatctttttatgtgtaacacttgactttggaagcaaaaatgaactttgcggagagagagggctctaagagatactgcattcaaacgaaacatgtggccattctctgtgcggtggtggtgggtgtaggattaatagtgggacttgccgtgggcttgaccagatcgtgtgactccagcggggacggcgggccgggcactgcgccagctccttcccacctgccttcttccacggccagcccctcaggtcctcctgcccaggaccaggacatctgcccggccagtgaggatgagagcggacagtggaaaaactttcgactgccggacttcgtcaacccagtccactacgacctgcacgtgaancccctgttggaggaagacacctacacgggcaccgtgagcatctccatcaacctgaacgctcccacccggtacctgtggctgccctccgggaaaccannatcacccggctcccggaactgaaaaggcctctggggaccanntgcaattccggaagtttttccattacnaaaancnggaattcctngtngtccaagcngaagaaaacttacccccncattggaaatggctttttctcctga

SEQ ID NO: 348623 - DNA, 1419 bp, Homo Sapiens
gcggcgaccccaaaagtaggctaggtagcgaggccgggtggtgaatcggcacgaggggcacagcgaggcgctagggggaacgctggcctctgaaactagctctgggaccggggtctgcggccggcccctagctggccccgtctcccatccccagaagggtattcactggggattctgagctttggctactccagtttcccacgacacgatgttccctttctacagctgctggaggactggactgctactactactcctggctgtggcagtgagagaatcctggcagacagaagaaaaaacttgcgacttggtaggagaaaagggtaaagagtcagagaaagagttggctctagtgaagaggctgaaaccactgtttaataaaagctttgagagcactgtgggccagggttcagacacatacatctacatcttcagggtgtgccgggaagctggcaaccacacttctggggcaggcctggtgcaaatcaacaaaagtaatgggaaggagacagtggtagggagactcaacgagactcacatcttcaacggaagtaattggatcatgctgatctataaagggggtgatgaatatgacaaccactgtggcaaggagcagcgtcgtgcagtggtgatgatctcctgcaatcgacacaccctagcggacaattttaaccctgtgtctgaggagcgtggcaaagtccaagattgtttctacctctttgagatggatagcagcctggcctgttcaccagagatctcccacctcagtgtgggttccatcttacttgtcacgtttgcatcactggttgctgtttatgttgttggggggttcctataccagcgactggtagtgggagccaaaggaatggagcagtttccccacttagccttctggcaggatcttggcaacctggtagcagatggctgtgactttgtctgccgttctaaacctcgaaatgtgcctgcagcatatcgtggtgtgggggatgaccagctgggggaggagtcagaagaaagggatgaccatttattaccaatgtagattgcactttatatgtccagcctcttcctcagtcccccaaaccaaagctacacagccagatttctcaagcagtctcaactccagtccctcatctcacccttactattgctcttgctttccagtttgcttttgatttgcatcttctcactagtaaaactgccttccctttgttccttattttctgttttttctctagagaggtacagttgtaagtcagagttaatataatagggcctgtgaaaacagaggcttttgcattgtctcttgacatcagaagttacaataggcatatgggcaaaatggtgtagcaggctcactggccgtttgttttttaaacacattttcacaagtttttgagacactggatttctttaatt

SEQ ID NO: 348624 - DNA, 746 bp, Homo Sapiens
  misc_feature (194)..(194): n is a, c, g, or t
gagcgggctcacacttaagcgtctgtgacaggagccggaatcgcattctcccttgtaccatggttctagccaaagatctggctgagtgagccctaagaggtagaatggaggctggaggacatgatgagcgagagtagtcactggagttcctgaagaggatgttcccttgtctacagctgctggaggactggacntgcatactactatctcctggcatgtggctacgtgcagcagaactcctggcatgactagaacgaaaaagacttgtcgaccttggtacggagaaaagggtaaagagtcagagaaagagttggctctagtgaagaggctgaaaccactgtttaactaagaagctttgagagcagctgtgggccatgggttgcagacacatacatctacatcttcagggtgtgccgggaagctggcaaccacacttctggggcaggcctggtgcaaatcaacaaaagtaatgggaaggagacagtggtagggagactcaacgagactcacatcttcaacggaagtaattggatcatgctgatctataaagggggtgatgaatatgacaaccactgtggcaaggagcagcgtcgtgcagtggtgatgatctccctgcatcgacacaccctagcggacaatttaaccctgtgtctaaaggagcgtggcaagtccaagattgtttctacctctttgagatggatagcagcctggcctgttcaccgagatctccaccctcgtgtgtgttc

SEQ ID NO: 348625 - DNA, 1467 bp, Homo Sapiens
  misc_feature (1390)..(1426): n is a, c, g, or t
ctcccacacaaaatgtattttattccagccaattatatctcccgcaaggagccattcgccttttgcttccctaaaaaaaatttctgatacggctggttccccacacccacaaaacatctcatcaaattcggatccagaagcataataaaaaggaacatcagcttctcccgccacagctcgggcaagaagtgtctttccagtccctgggggtcccaactaaaagaattccttttggaagtttacctcccaagaatagtaaatttttgtggatttttcaagaattcaacaacttcctgtaattcttgtttagcttcctccacccctttaacatgttcaaaggtgacatttttcatctggacaggatctactgcagaatcaagccctgttgttgtccggaagcggacagataaaaatgggttttttagaagtccataaatgccgaatagcagcagaacgaagagaatcagacgggttcgccttagggaatcattggttttttgtgtgagtgcttgagctttcagaaaaccttccgcaaaaccagttttaaatgcatcttggtgagcttcaggtatatttttggttttcatgagttggtccaaactctcaacatctgatcctctgtcccgcaaaagaaaccccttcacgaatgatggcgctatattctgtgtttcagctaatctctcggaggtagactggagacgtcgtgtccttgatttcaaagttttaaaaccccgagactgtatgaaaactggccagtactgaagatctgaacaaatgctttgaagagctcttgaatgatgtcgatacaagcaagaggaacgtaatgtactaaatatatctaagttaccatatttattttcaaagaaggattgtgcagagacatgggatgtatgccaatgggaagaaatgtttttgcctttacaaaatccaggaagtagattttctaccagctgatcaatctgtccaatttttagttcagataatccaaggtcccttaagttaagtgaaggctcactgctgggagcctcatgctcaggaactacatctcgatgctggttttgagaaactgacactccactgagagaaacagaagtgttttttggtgtatggaaggcattgatgagatgactcagaggaactgtaacctggggttgcaccgtgctcgacaaggaaaacatctccggcgggccctcagcgacctcacccgcctgccgaaactgtgcccctctgtccacggcccggcggggaggcgctgagcccttcttttttcctttttctccgacccgttgcccctcactcctcccagaaacggaaaatggcctccccttcctactagctactgcaacgacccgctctcgacgaattcgagctcggccgatttggcctgatnnnnnnnnnnnnnnnnnnnnnnnnnnnnnnnnnnnnncgccgccaccgcgatgagccgagtccccatagtagtcatca

SEQ ID NO: 348626 - DNA, 1245 bp, Homo Sapiens
  misc_feature (1204)..(1204): n is a, c, g, or t
  misc_feature (1209)..(1209): n is a, c, g, or t
gcagacatgagggccagagcagcagggcagcaggaggccaggacccgggctcgcctgggtccctgcccatgccccagggtgttgcccaaactggggcaccctccaaggtggactcaagtattcagctcccagcaaagaagaacgcagccctaggaccctcggaaccaaggatcactgtggtcacatggaacgtgggcactgccatgcccccagacgatgtcacatccctcctccacctgggcggtggtgacgacagcgacggcgcagacatgatcgccatagggttgcaggaagtgaactccatgctcaacaagcgactcaaggacgccctcttcacggaccagtggagtgagctgttcatggatgcgctagggcccttcaacttcgtgctggtgagttcggtgaggatgcagggtgtcatcctgctgctgttcgccaagtactaccacctgcccttcctgcgagacgtgcagaccgactgcacgcgcactggcctgggcggctactggggtaacaagggtggcgtgagcgtgcgcctggcggccttcgggcacatgctctgcttcctgaactgccacttgcctgcgcatatggacaaggcggagcagcgcaaagacaacttccagaccatcctcagcctccagcagttccaagggccgggcgcacagggcatcctggatcatgacctcgtgttctggttcggggacctgaacttccgcattgagagctatgacctgcactttgtcaagtttgccatcgacagtgaccagctccatcagctctgggagaaggaccagctcaacatggccaagaacacctggcccattctgaagggctttcaggaggggcccctcaacttcgctcccaccttcaagtttgatgtgggtaccaacaaatacgataccagtgccaagaaacggaagccagcttggacagaccgtatcctatggaaggtcaaggctccaggtgggggtcccagcccctcaggacggaagagccaccgactccaggtgacgcagcacagctaccgcagccacatggaatacacagtcagcgaccacaagcctgtggttgcccagttcctcctgcagttttgcctttcagggacgacatgccactggtggcggctgggaggtgggcagattgagtgggttgcggcccgagcaggcggttggtgaggttaccgcttgggaaacatttttcngcccngcagttcctggggatttggttccgtttttaaactaa

SEQ ID NO: 348627 - DNA, 633 bp, Homo Sapiens
gggctggccaggttccctgggcttccctacgggcctcatcccgtgaaccccgtgggtgccaccggaacccctcacccaagagcccgccgcctgtccggagtggctcctgacagaagcagtaatggcagcagccggggcagtagtaaaaaggggccctctgggttgcctggcccctgggccttcccaccagctgtgcctcgaagcctgggcctgttgcccgccttgcgcctagagactgtagaccctggtggtggtggctcctggggacctgatcgggaggccctggcgcccaacagcctgtctcctagtccccagggccatcgggggctggaggaagggggcctggggccctgagggtggggtaggcagatgggccaaggtgaccaccattctgcctcaatcttttgcaagcccacctgcctctctcctgctgctcctccagctgtatctgcacctgcctctctgtcctggccaggggtggacaactggggtcccccaaaactcagtcctggcacctcaactgtgacaatcagcaaagccccacccaggcccccatctgggatgatgggagagctctggcagatgtcccaatcctggaggtcatccattaggaattaaattctaccagacctc

SEQ ID NO: 348628 - DNA, 629 bp, Homo Sapiens
gaaaaattcgctgcaagtacagcactttctagattgctcctggagtgtgggaacaacagtctctcctgtccacgttactgaatccagaaaaaagaaacaaattcaaggagcagcagccaaatacctacgttggctttaaagagttctctagaaagtgttcggaaaaatggagatccatctcaaagcatgaaaaggccaaatatgaagccctggccaaactcgacaaagcccgataccaggaagaaatgatgaattatgttggcaagaggaagaaacggagaaagcgggatccccaggcacccagacggcctccatcatccttcctactcttctgccaagaccactatgctcagctgaagagggagaacccgaactggtcggtggtgcaggtggccaaggccacagggaagatgtggtcaacagcgacagacctggagaagcacccttatgagcaaagagtggctctcctgagagctaagtacttcgaggaacttgaactctaccgtaaacaatgtaatgccaggaagaagtaccgaatgtcagctagaaaccggtgcagagggaaaagagtcaggcagagctgatggatccagtttgaaaaaacaaaatgccattcaaccgtaaaaaaa

SEQ ID NO: 348629 - DNA, 756 bp, Homo Sapiens
  misc_feature (81)..(81): n is a, c, g, or t
  misc_feature (85)..(86): n is a, c, g, or t
  misc_feature (88)..(89): n is a, c, g, or t
  misc_feature (109)..(110): n is a, c, g, or t
  misc_feature (113)..(113): n is a, c, g, or t
cgggcgcacagagatcccggacagggcccctcctgccaacccctgaggggaaagggaaggaatctttcgaacgcgggggcnaganngnnccgttacaaaaaaaggaagnngcnccgggccacgttactgaatccagaaaaaaggtgaactcacgaacatgggaaaagaaatccagctaaagcctaaggcaaatgtctcttcttacgttcactttttgctgaattacagaaacaaattcaaggagcagcagccaaatacctacgttggctttaaagagttctctagaaagtgttcggaaaaatggagatccatctcaaagcatgaaaaggccaaatatgaagccctggccaaactcgacaaagcccgataccaggaagaaatgatgaattatgttggcaagaggaagaaacggagaaagcgggatccccaggcacccagacggcctccatcatccttcctactcttctgccaagaccactatgctcagctgaagagggagaacccgaactggtcggtggtgcaggtggccaaggccacagggaagatgtggtcaacagcgacagacctggagaagcacccttatgagcaaagagtggctctcctgagagctaagtacttcgaggaacttgaactctaccgtaaacaatgtaatgccaggaagaagtaccgaatgtcagctagaaaccggtgcagagggaaaagagtcaggcagagctgatggatccagtttgaaaaaacaaaatgccattcaaccgt

SEQ ID NO: 348630 - DNA, 760 bp, Homo Sapiens; identical to SEQ ID NO: 10654

SEQ ID NO: 348631 - DNA, 875 bp, Homo Sapiens
ggggaaagcagttgccatggagttgctctgagtaaccctgaggcagtgggacgccaagactggagaggaagcgactgcggggagtatttccattttaaccggaaacaatccctgaacccacaggaatgaatgcctaatggtggagtttcagccatcagtgacaggctgaacccagactcccagggcacctgcttgcacctttgaatgatggcctgaactatgaacaaacgggactatatgaacacttcggtacaggagccccctcttgactactccttcagaagcatccacgtcattcaagatctggtaaatgaggagccaaggacaggactacgaccactgaagcgttcaaagtcggggaaatcactgacccagtccctgtggctgaataacaatgttctcaatgatctgagagacttcaaccaggtggcttcacagctgttggagcacccagagaacctggcctggatcgacctgtcctttaatgacctgacttccattgaccctgtcctaacaactttcttcaacctgagtgtcctctatcttcacggcaacagcatccagcgcctgggggaggtgaataagctggctgtccttcctcggctccgtagcctgacactccatgggaaccccatggaggaagagaaagggtataggcaatatgtgctgtgcaccctgtcccgtatcaccacgttcgacttcagtggggtcaccaaagcagaccgcaccacagctgaagtctggaaacgcatgaacatcaagcccaagaagggcctggaccaagcagaatacactttgaggctcccacgaccctagtagtcctaaaggcctaagcatagacagcatggtttgacaataaataatttgagctgttg

SEQ ID NO: 348632 - DNA, 1065 bp, Homo Sapiens
  misc_feature (557)..(568): n is a, c, g, or t
  misc_feature (698)..(698): n is a, c, g, or t
  misc_feature (966)..(968): n is a, c, g, or t
  misc_feature (970)..(973): n is a, c, g, or t
  misc_feature (976)..(979): n is a, c, g, or t
  misc_feature (981)..(981): n is a, c, g, or t
  misc_feature (987)..(987): n is a, c, g, or t
  misc_feature (989)..(993): n is a, c, g, or t
  misc_feature (1013)..(1013): n is a, c, g, or t
  misc_feature (1023)..(1023): n is a, c, g, or t
tggtagcttttgattggaagtaacatcaaagtagttgtcaaaatactagggaatgttatttttggattgtaaggtgagacttgtttagctttggaaaaaaatgcccaagttgtaataggggaggaaaaataattttctgtttttggaattcttagatgggatgctctgtaaaaactgacagattaaaatgagaaaaacagaaaagttgaaaaacacgtataccttatggttacatgggagatattcagggaaaaatgagtaaatctccaacaggtggctttcaattcaagcataaatactgtcttcaacttaaagaaagaagatttgaggtgcagtattggggagttaaccagcaaaagcacattagacaagggtaaggttcattatacagacttaagtccatgcattctccattgataagactctttagtgatttagttatccttctcttcttggtgtcgagagaggtagcttttaaatggtgatttcctttatagatgtaaattttccttacacaagtgtaacttctctgttttcacaacttcctttgttagcannnnnnnnnnnncaaaataattagcttggaataattcttaagccaaagggacatattttggggttgcatattctggtttcctaccattatattttggggtggcatattttggtcttatacactgtgttccaccggcaatganaagagttcttgtttttcctccagcaatttgtcatttgttaaagagtttagcagttctaagagatatagaccagctgtgctatctttttgtggttttcagttctctagtatgttgagcatctttttgtaagtgtacttgccatctgtagatcttctttggtgaggcgtctgttcagatctgtgtgcatttttaatggggctgtttaacctaatggttagttttaacaattttttatgtatttttgaataacaaattctcagatcccaannnannnnaannnnanaaacanannnnnccattgtcgggccgccttcnggcccttcgnaggaagctttcctaaaacccatttcgttttgcccgccgcggg

SEQ ID NO: 348633 - DNA, 1111 bp, Homo Sapiens
  misc_feature (28)..(28): n is a, c, g, or t
  misc_feature (767)..(789): n is a, c, g, or t
caatggaggaaatttatttattacaggngaaattggttatacaggcattagagggctgaaaagcaaaatactaaaggctgaaaaaccaaaagtcatctaggaaataataacttcagaaagcagctaccacctctagggctggaggaacaaaaggaaaaatatgaagtaaccagaacttagaagcccagaattgcaaccacaatctttgtggaaggtagaaccatctggctgctgtggataatctctgagcgggtacagggccaatcactgaggctgattccagtagtgctgaaagaagctcaagtggcactgccactgctgggagaagtgtctctaggtgaagaagcattgctggtcctgtaagcaacattaacaagaacagaaaaaacaggaagcatattctctccttctgcctcccagtctctctctagtgacccctattggcagaactgaacaggaagcaagcttaaaaagaagtctgagaaacagtttgaggacaactagccccatcattacagggaagaagagtacagaaggtagatttagaggggaagggcaataagtaaatgactcgcacagatggtgttcatgctcaatgtttctcttctgaacaattttcagatttggtgttaaagcaccttcgggccaggcgtggtggtttacgcctgtaatcccatcacttcgaaaggcggagtcgggtggggattgcttgaggccaggagttcaagactaccctaggcaacatagtgagatgctcgtctctattnnnnnnnnnnnnnnnnnnnnnnnggggacccaaggccatatatctgtttcattcctagaaactctccacagtgtcagatgaagactgcaaatccagtggtcctacattcacagataattcctagcctttggttagtgaggagaatgggatgggaggacacaaaatgagaacttttttgtggtatgctcaattcgtatctggcagtacccaggaatctgcattctcgacaagcgtccgcgccgacggggctagtgaagtttgagaacaattgcttcctacccagccgctccgctatcacctaggtagcacggccgctgcggctgaggctgtgactgcggctgcccc

SEQ ID NO: 348634 - DNA, 677 bp, Homo Sapiens
  misc_feature (219)..(294): n is a, c, g, or t
  misc_feature (517)..(543): n is a, c, g, or t
atcagcccttgtaactacagtatctttagataagattcctctttccagtcagtcctgggaaatgtttctgttgcagagttaggcggtagatgggaagctgtgatggcagagctactatctaataaagtaacaactcgtagttgaggcttcctttctgtgtgtgatgggggatagggagttagctcccctgttgtctcagcactaagaaattgaggtcannnnnnnnnnnnnnnnnnnnnnnnnnnnnnnnnnnnnnnnnnnnnnnnnnnnnnnnnnnnnnnnnnnnnnnnnnnntgagcaactgctcctggcccaaaacatctctttctacatacacttgagtaggtggcataaaatgcactgtcaatatatagaaaacatgaaattttccaaatatttccgatcagagaatcacaagagcagcaaatgtggtttcatcaagtgggaagaaagcagcaatttaaaataactttttgggagactgaattgagtaataataaaacttcagtctttcgcnnnnnnnnnnnnnnnnnnnnnnnnnnncaacaacttattgaatgtggccagctcactagatgaggaaagaggaaggcattttctgcattcttgcctagttttccttataagcaccactaagttaatagctctgtctttttggtgtttgcactatgtaatgc

SEQ ID NO: 348635 - DNA, 1039 bp, Homo Sapiens
cggggcatatttttccccgccggagacttgtgagacgttttccccaacatcccgccacaataaacccccggaagtgggccatttcatttccaacggggccgacagctaaatatcggcggtatcaaatccacacctaccctcaggaaccggaagatcaatatacagggtaatagctttggctcagagctccaataatgtgcttcagatctgtccatgtggaaatgctttcatccaaatttttaaattggtggttacccaaagagttccacaaaacaggtttgtatgtagcacctttcatgcaaggcatgcaaaaagcctattttaaaatcactgtgcatattatagagttgtagccacctcacaatgaagtactacagcctgtgctgtcttaatggtttatgtcaggaaatgaaaaagatactgtaccaaatctggaattacaatggggagtaataatgtatactaaatgacttttgtattttaagttactttttgtgagtggtgaatttttgtgtttttcttttcagctacacttagtcctgagatgtattttttctttaagtcttgaatgaatacaaaaggagcccattttataatataaaccttgatgtacatgttgagatatttggacaatgaaaatgccttaaaaggaatgcatatggataaagttgcacttataacacccttcaacaaaatctaattttaaattgtctttttcttttctattaagggttttctttttcagtgtctaccattgtacttataactgttattaaataccaaatcaaataatataaaagctgtaacatttcctttaaaactaatgctaataagggatttagagttgaatggcaaaatgtttattacttggcaatacctgatgtcagtcacaggcatccaactcatgacaagagataccactgtttgttttttaaaaaacatttttcattttgtttctccttcaaaaattaagttggactaacattcacgtatcaaactaatataaaaagaaataaaaccaagaggtgatttttgtaac

SEQ ID NO: 348636 - DNA, 399 bp, Homo Sapiens
  misc_feature (17)..(17): n is a, c, g, or t
  misc_feature (61)..(61): n is a, c, g, or t
ggaagtggtaggccccncccctcacaatgaaagtaacctacagccctgtgcctgccctaanggtttatgtccagggaaatgaaaaaagatacctgtacccaaacctggaattacaatggggagtaataatgtatacctaaatgacttttgtattttaagttactttttgtgagtggtgaatttttgtgtttttcttttcagctacacttagtcctgagatgtattttttctttaagtcttgaatgaatacaaaaggagcccattttataatataaaccttgatgtacatgttgagatatttggacaatgaaaatgccttaaaaggaatgcatatggataaagttgcacttataacacccttcaacaaaatctaattttaaattgtctttttcttttcgt

SEQ ID NO: 348637 - DNA, 800 bp, Homo Sapiens
gcggccgcagcagggactccacagggacccaatcaatcatgcggcccaagttgaggaagcggaggcggctgaagccctcgaaggtgaaatccttaaccagcacctggcaggtggggttgacgaggtactcatcttcacagccccctgggttctcctcctcatagaaaatgtttgtacagccgaagaggctcaaggacaccagggtgtggctgaagctcctcagtgtctgcaggctcttggcggacagcttctcgcagttagtcaggtacagctccaccaggtcctgcttgcggatggcctccaggtcctggtcctgcaccaggtcctcacggaggtggatccgcgtgaggcgggtgctgcgggggtccgaaaagaggctgaagaagctctcgtgtggctcgaagttacaggcagcgttcaccagctccacatactcattgacgagccggtcacagatctcgctgggcaagaagatgtcccgatgtagccgcagggtctccttgtccagcaggtagcccagggtgccatccaggttgcgcaagcagaagtcagtacagagggccatcagcgactcgggagtgtcggacgccatgctgggggcaagcaggtgggccactccaggacaaggatccccaggggcaacagtgattcctgaatactcacaggatcattggcagagccactgccttgcccttagggctgccggcggggctgaggctcctgggcccggcccctcccccgatccggctcctacggctcggagccttgcagccgccgccgcctccgctgtcaacaaaccc

SEQ ID NO: 348638 - DNA, 1755 bp, Homo Sapiens
  misc_feature (1525)..(1553): n is a, c, g, or t
  misc_feature (1555)..(1564): n is a, c, g, or t
gccgacttcctgttgtttgaggccgggttgggggtgtgcgattgtgtgggacggtctggggcagcccagcagcggctgaccctctgcctgcggggaagggagtcgccaggcggccgtcatggcggtgtcggagagccagctcaagaaaatggtgtccaagtacaaatacagagacctaactgtacgtgaaactgtcaatgttattactctatacaaagatctcaaacctgttttggattcatatgtttttaacgatggcagttccagggaactaatgaacctcactggaacaatccctgtgccttatagaggtaatacatacaatattccaatatgcctatggctactggacacatacccatataatccccctatctgttttgttaagcctactagttcaatgactattaaaacaggaaagcatgttgatgcaaatgggaagatatatcttccttatctacatgaatggaaacacccacagtcagacttgttggggcttattcaggtcatgattgtggtatttggagatgaacctccagtcttctctcgtcctatttcggcatcctatccgccataccaggcaacggggccaccaaatacttcctacatgccaggcatgccaggtggaatctctccatacccatccggataccctcccaatcccagtggttacccaggctgtccttacccacctggtggtccatatcctgccacaacaagttctcagtacccttctcagcctcctgtgaccactgttggtcccagtagggatggcacaatcagcgaggacaccatccgagcctctctcatctctgcggtcagtgacaaactgagatggcggatgaaggaggaaatggatcgtgcccaggcagagctcaatgccttgaaacgaacagaagaagacctgaaaaagggtcaccagaaactggaagagatggttacccgtttagatcaagaagtagccgaggttgataaaaacatagaacttttgaaaaagaaggatgaagaactcagttctgctctggaaaaaatggaaaatcagtctgaaaacaatgatatcgatgaagttatcattcccacagctcccttatacaaacagatcctgaatctgtatgcagaagaaaacgctattgaagacactatcttttacttgggagaagccttgagaaggggcgtgatagacctggatgtcttcctgaagcatgtacgtcttctgtcccgtaaacagttccagctgagggcactaatgcaaaaagcaagaaagactgccggtctcagtgacctctactgacttctctgataccagctggaggttgagctcttcttaaagtattcttctcttccttttatcagtaggtgcccagaataagttattgcagtttatcattcaagtgtaaaatattttgaatcaataatatattttctgttttcttttggtaaagactggcttttattaatgcactttctatcctctgtaaactttttgtgctgaatgttgggactgctaaataaaatttgttgcatnnnnnnnnnnnnnnnnnnnnnnnnnnnnnannnnnnnnnnaaaagggcggcccgctctagaatatcccttcaaggggccaagctttcgcgaacccagcttttcttgaaccaagggggtcccttataggggactcgaattattaagcttaggcactgggcccgtcctttttacaaccttcctggactggggaaaaactggccaaccttgggggaatctttggtgaaagggaa

SEQ ID NO: 348639 - DNA, 917 bp, Homo Sapiens
  misc_feature (51)..(89): n is a, c, g, or t
  misc_feature (150)..(215): n is a, c, g, or t
  misc_feature (570)..(665): n is a, c, g, or t
gacctagcaaagccactgttaaagctatgcaagaagctctggctaagcttnnnnnnnnnnnnnnnnnnnnnnnnnnnnnnnnnnnnnnncgtataaaacggcttgaagaattagaagccaagcgtaaagaagaggaacgattggaacaannnnnnnnnnnnnnnnnnnnnnnnnnnnnnnnnnnnnnnnnnnnnnnnnnnnnnnnnnnnnnnnnncttttaactaaatcccagagagaagccagagccagagccgaagctactcttaaactgctacaagctcagggtgttgaagtgccatcaaaagactctttgccaaagaagaggccaatttatgaagataaaaagaggaaaaaaataccacagcagctagaaagtaaagaagtgtctgaatcaatggaattatgtgctgctgtagaagttatggaacaaggagtaccagaaaaggaagagacaccacctcctgttgaaccagaagaagaagaagatactgaggatgctggattggatgattgggaagctatggccagtgatgaggagacagaaaaagtagaaggaaacaaagttcatnnnnnnnnnnnnnnnnnnnnnnnnnnnnnnnnnnnnnnnnnnnnnnnnnnnnnnnnnnnnnnnnnnnnnnnnnnnnnnnnnnnnnnnnnnnnnnnnagtgaaggcagtgaaggtgatgaggaagatgaaaaggtgacagatgagaaggattcagggaagacattagataaaaagccaagtaaagaaatgagctcagattctgaatatgactctgatgatgatcggactaaagaagaaagggcttatgacaaagcaaaacggaggattgagaaacggcgacttgaacatagtaaaaatgtaaacaccgaaaagctaagagcccctagaggtggggtgccgagctcgaat

SEQ ID NO: 348640 - DNA, 554 bp, Homo Sapiens
  misc_feature (410)..(477): n is a, c, g, or t
tgattggctgatggtcgatctctagaggtatccccctcaacgcttgatcttctatatgaactgtgtttccttctactttttctgtctcctcatcactggccatagcttcccaatcatccaatccagcatcctcagtatcttcttcttcttctggttcaacaggaggtggtgtctcttccttttctggtactccttgttccataacttctacagcagcacataattccattgattcagacacttctttactttctagctgctgtggtatttttttcctctttttatcttcataaattggcctcttctttggcaaagagtcttttgatggcacttcaacaccctgagcttgtagcagtttaagagtagcttcggctctggctctggcttctctctgggatttagttaaaagnnnnnnnnnnnnnnnnnnnnnnnnnnnnnnnnnnnnnnnnnnnnnnnnnnnnnnnnnnnnnnnnnnnngttccaatcgttcctcttctttacgcttggcttctaattcttcaagccgttttatacgttcttcctcttctctcttc

SEQ ID NO: 348641 - DNA, 1051 bp, Homo Sapiens
  misc_feature (54)..(54): n is a, c, g, or t
  misc_feature (82)..(82): n is a, c, g, or t
  misc_feature (87)..(87): n is a, c, g, or t
cagaaaagaagggttaaaatccaaataaaatcattcccttaagtccacccaaanagcaaagataaaataccatagaccaagnctgcnttaagtccccaatattttataaccccacccacccatgtacatcctacacgaacccccccaaagctgtggccttaggaatttctgaccaaacaattagcctgagtaaaattcaataaacacttttaattcccccttgagaagcatggttacttctttaattttacattatagtcattgagacagattacgaaacaactttgccagaaagagagttgtgagcaggaagtaagagaatttcagacatcggaaatggataataagttagaaccaatttcgaaaatgaggatcagttccaaagtatgttttcgtgtactcagtcaagattgaaacattggctctgtccacacaaaggtttatttgtacaatttaaaaggtaaattgtaataaatagaaatatataaccaaaaactctggacaaggctggaaccaaggggacccactttgtaatgctttgttattatcattccaagaacccatttggccctgtattcacttggctaatgtggggatggagaaagtataactttggaatcatatatctatgtgtaggtagtctttaaatacaaatgaataaatatttaaattatatgataaagaaaaactggggaataagaaagtcctatgtttatcaactaatagtatatttacaatgagtgttttctgcctgacacctaatctttgtctattagagttcctcaatgtgcaatttatagaaggcaacagttcatattgccttaaaggagccctgtttagctcagaatcagcctgtcccagatgctctgctccctgaaaaaccttcacacttgtgtgcataaatatctgagattacaagtaggtgcacatgtgcaacatgtacttatctaaagggggagctaattagcttgactaaagtctaaatcaataacctaaattgctattccccaacccaaacccacatctaactcggcggccggtcgacatagga

SEQ ID NO: 348642 - DNA, 589 bp, Homo Sapiens
ggggcaaacagccggggctccagcgggagaacgataatgcaaagtgctatgttcttggctgttcaacacgactgcagacccatggacaagagcgcaggcagtggccacaagagcgaggagaagcgagaaaagatgaaacggacccttttaaaagattggaagacccgtttgagctacttcttacaaaattcctctactcctgggaagcccaaaaccggcaaaaaaagcaaacagcaagctttcatcaagccttctcctgaggaagcacagctgtggtcagaagcatttgacgagctgctagccagcaaatatggtcttgctgcattcagggcttttttaaagtcggaattctgtgaagaaaatattgaattctggctggcctgtgaaagacttcaaaaaaaccaaatcacccccaaaagctgtccctcaaaaggcaagggaaattatattacttgactttcataggaaaaaggaagcctcccaaaagagattaacctttggatttttccaaacccaaaaactctggattgcccccggaaatttccaagaaggccttccaaattgggctggctttttacaaccgggcccc

SEQ ID NO: 348643 - DNA, 1480 bp, Homo Sapiens
  misc_feature (54)..(90): n is a, c, g, or t
ggaatgtatagactcactatagggcgaactggagctctatcgcggggcggccgnnnnnnnnnnnnnnnnnnnnnnnnnnnnnnnnnnnnnatcaggccaaatcggccgagctcgaattcgtcgagagcggaaacagccggggctccagcgggagaacgataatgcaaagtgctatgttcttggctgttcaacacgactgcagacccatggacaagagcgcaggcagtggccacaagagcgaggagaagcgagaaaagatgaaacggacccttttaaaagattggaagacccgtttgagctacttcttacaaaattcctctactcctgggaagcccaaaaccggcaaaaaaagcaaacagcaagctttcatcaagccttctcctgaggaagcacagctgtggtcagaagcatttgacgagctgctagccagcaaatatggtcttgctgcattcagggcttttttaaagtcggaattctgtgaagaaaatattgaattctggctggcctgtgaagacttcaaaaaaaccaaatcaccccaaaagctgtcctcaaaagcaaggaaaatatatactgacttcatagaaaaggaagctccaaaagagataaacatagattttcaaaccaaaactctgattgcccagaatatacaagaagctacaagtggctgctttacaactgcccagaaaagggtatacagcttgatggagaacaactcttatcctcgtttcttggagtcagaattctaccaggacttgtgtaaaaagccacaaatcaccacagagcctcatgctacatgaaatgtaaaagggagcccagaaatggaggacatttcattctttttcctgaggggaaggactgtgacctgccataaagactgaccttgaattcagcctgggtgttcaggaaacatcactcagaactattgattcaaagttgggtagtgaatcaggaagccagtaactgactaggagaagctggtatcagaacagcttccctcactgtgtacagaacgcaagaagggaataggtggtctgaacgtggtgtctcactctgaaaagcaggaatgtaagatgatgaaagagacaatgtaatactgttggtccaaaagcatttaaaatcaatagatctgggattatgtggccttaggtagctggttgtacatctttccctaaatcgatccatgttaccacatagtagttttagtttaggattcagtaacagtgaagtgtttactatgtgcaacggtattgaagttcttatgaccacagatcatcagtactgttgtctcatgtaatgctaaaactgaaatggtccgtgtttgcattgttaaaaatgatgtgtgaaatagaatgagtgctatggtgttgaaaactgcagtgtccgttatgagtgccaaaaatctgtcttgaaggcagctacactttgaagtggtctttgaatacttttaataaatttattttgataaataatattgaaaaaa

SEQ ID NO: 348644 - DNA, 460 bp, Homo Sapiens
  misc_feature (45)..(45): n is a, c, g, or t
  misc_feature (53)..(53): n is a, c, g, or t
  misc_feature (94)..(94): n is a, c, g, or t
cacccctgaaaagccgggaaaggtaaagatggaggaaaggagacnatggtaanaccggtgggccccaaaagccattttaaaaatccaatagaanccgggaattaatgtggcccttaggtagcctggttgtaacatcctttcccctaaatccgatcccatgttacccacatagtagttttagtttaggattcagtaacagtgaagtgtttactatgtgcaacggtattgaagttccttatgacccacagatccatcagtactgttgtcctcatgtaatgcctaaaactgaaatggtccgtgtttgcattgttaaaaatgatgtgtgaaatagaatgagtgctatggtgttgaaaactgcagtgtccgttatgagtgccaaaaatctgtcttgaaggcagctacactttgaagtggtctttgaatacttttaataaatttattttgataaataatattgaac

SEQ ID NO: 348645 - DNA, 3004 bp, Homo Sapiens
cgggatggggcgggctgtgagcggaccgcgagcgctgggcgggtccgcggcgcggtcggtcggcgcctgttctcgggctgtttggcggacgaagcttcacaaaagatgtctaagcaacagccaactcagtttataaatccagaaacacctggctatgttggatttgcaaacctccccaatcaagttcaccgaaaatcagtgaaaaaaggttttgagttcacactgatggtggtcggtgaatcaggtctaggaaaatcgactctcataaacagcctattcctaactgatctgtacccagaaagagtcatacctggagcagcagaaaaaattgaaagaactgtccagattgaggcttcaactgttgaaattgaagagcgaggggtcaagctacgcctgacagtggtagatacccctggctatggtgacgctatcaactgcagagattgttttaagacaattatctcctatattgatgagcaatttgagaggtacctgcatgacgagagcggcttgaacaggcggcacatcattgataatagggtgcattgttgcttttactttatttcaccttttggacatggacttaagcccttagatgtggcgtttatgaaggcaatacacaacaaggtgaatattgtgcctgtcattgcaaaagctgacactctcaccctgaaggaacgggagcggctgaagaaaaggattctggatgaaattgaagaacataacatcaaaatctatcacttacctgatgcagaatcagatgaagatgaagattttaaagagcagactagacttctcaaggctagcatcccattctctgtggttggatccaatcagttgattgaagccaaaggaaagaaggtcagaggccgcctctacccctggggtgttgtggaagtggagaacccagagcacaatgactttctgaagctgagaaccatgctcatcacccacatgcaggatctccaggaggtgacccaggaccttcattatgaaaacttccgttctgagagactcaagagaggcggcaggaaagtggagaatgaggacatgaataaagaccagatcttgctggaaaaagaagctgagctccgccgcatgcaagagatgattgcaaggatgcaggcgcagatgcagatgcagatgcagggcggggatggcgatggcggggctctcgggcaccacgtgtaaggtgatgtgcacatatcaagaagtcagagaaaacactttcctggataaaaaagaaaacattccagatgcatgatccagctgtgtgttttcaatccttgggagggtgccatccacattttaacagtacctgtgcctgagaatttaatttttaaaagactttgatgtgtttttgtatgaagtacttttaacgtatgtatttcattgctgtgtcacactctgtgttttgtgaggtgaatgtcttccttttctttctccctaaccactaatgttagaattgatttccaagaatcggcatgtatacttaatactgaatttctttgatttaactgacttaacaactgactaaccattgatgagcactcctgatttttatctagaacattcagatttaccataatgttccttagtggtagaggtgtgtgcctagtgatgtagaaagatacactgacttggtgcaaggccatctgcttaccacatcacaccacttggagatctttgcttccttgcttttatgtttgtacacaacacctaaaaccagttttgctgctataattctatactgttgattcgtctgcgattttatctgttaaccaaataaaacataatagaatttcctaatgagatatatctttatacttaaacagcttttttagaggtgagttttaaagaagtctcttaattctgatgctaggttgtttttaaaaccactatgcaaagaactcaccacaagccaccttttgtagtgttctccactaatactggttatcctgtgctacagagaaaatcaaagcagtcataagctccagttttcgtattgcaaataagactcttacctacaaaatgagattcagtgaactaatttggtttttactcaaccaaattaaaaatttttttaaggaaaattagcagttggtctattcagaatcaaacctttttatattttatactgcactttagtgtattttctgtcactgtaggtatagaagatctgcctcccctgtggaaattggggtctgttggtgggcttgcccctgaagcctggcttgggttgaaaagtgttcccgccctaaggccttggtgccctgaacctctgatgcctaccgggttctcctgatttgagtttcctttaaatactccctttttgagtaattttctgatgggaggaaagtagcagtcatcatctttttgtgtgcaggctgtctcatttatttttagccattgtcgtttcattcattttgtgtaatataaaccgtgtgtcatgtcaaagtgaaagacatttcaaatctgtagcataggctagtgggcaggtccgcacagtcgaagccacacctggtctgttttctgtgcactgtagccttagtgtcacctttcttcttgtgtctccttatggtacactccagcggttgccttttttatcatttctactgaagttgggaaattcaaccccagaaattgacagatgaaaggagacaatggttgtgtagggagatggagaaaatgcttaatctgaggatgagacagggttttttcatttttgtggggggctagaaaaaaacataaaatgagggcagtttaaataataatagttaatggaacggtgtgctacagaaaataatctggtgttcttgctaactttgcccttcactgttgcttaattgtgaacagccaaaagctatatgttatggcttattgtgctgaaaggttaactaagaaggtggtgttccatgacttcagagtacatccatgcggagatccattatttgaggtttgagcatttataacctttgcttggaaaatctgtaacaaagcaaaa

SEQ ID NO: 348646 - DNA, 954 bp, Homo Sapiens
  misc_feature (46)..(46): n is a, c, g, or t
  misc_feature (783)..(783): n is a, c, g, or t
  misc_feature (811)..(837): n is a, c, g, or t
tcgaaagcccaaaccggtccgtttcccgtgccacgtaaacccctantgtccacccttcctcctgtgtccctccttatggtacactccagcggttgccttttttatcatttccactgaagttgggaaattcaaccccagaaattgacagatgaaaggagacaatggttgtgtagggagatggagaaaatgcttaatctgaggatgagacagggttttttcatttttgtgggggctagaaaaaacataaaatgaggcagttaaataataatagttaatgaaggtgtgctacagaaaataatctggtgttcttgctaactttgcccttcactgttgcttaattgtgaacagccaaaagctatatgttatggcttattgtgtgaaggtaactaagaagtggtgttccatgacttcagagtacatccatgcggagtccattatttgagtttgacatttaataactttgctggaaaatctgtaaaaaagaaaaacaagtttgctagtgactaagccccgcatatgtgagtgaaagtacttcaggcacgctgcctcctggtaacagctatgcagggagggaggacccacactgctacacttctgatcccctttggttttactacccaaatctaaatagatacttttgataatagataactgctcttttactaagacatagtctctacctatagaaatgtattttgaaaacacttattttacacagcaattttgtatccatttaaactaaccttttatcaataaagcactattgttttagatattcaccanacccacaatttttcactggcgcaaactnnnnnnnnnnnnnnnnnnnnnnnnnnntttcccactaatatccgtgttcccccttgtcaccttttcaccccgccataatatcgagtctgccccatacccgccccccggctctatcaatatccccccccttgttgtgcggcgccc

SEQ ID NO: 348647 - DNA, 550 bp, Homo Sapiens
  misc_feature (505)..(505): n is a, c, g, or t
tttgatttaactgacttaacaactgactaaccattgatgagcactcctgatttttatctagaacattcagatttaccataatgttccttagtggtagaggtgtgtgcctagtgatgtagaaagatacactgacttggtgcaaggccatctgcttaccacatcacaccacttggagatctttgcttccttgcttttatgtttgtacacaacacctaaaaccagttttgctgctataattctatactgttgattcgtctgcgattttatctgttaaccaaataaaacataatagaatttcctaatgagatatatctttatacttaaacagcttttttagaggtgagttttaaagaagtctcttaattctgatgctaggttgtttttaaaaccactatggcaaaggaactcaccacaagccaccttttgtaggtgttctccacttaatactgggttatcctgtgctacaggggaaaatcaaggcaggtcataaggtccagttttcggnattgccaattagggctcttacctacaaaatggggattcggtggac

SEQ ID NO: 348648 - DNA, 398 bp, Homo Sapiens
ttatgtttgtacacaacacctaaaaccagttttgctgctataattctatactgttgattcgtctgcgattttatctgttaaccaaataaaacataatagaatttcctaatgagatatatctttatacttaaacagcttttttagaggtgagttttaaagaagtctcttaattctgatgctaggttgtttttaaaaccactatggcaaagaactcaccacaagccaccttttgtagtgttctccactaatactggttatcctgtggctacagaggaaaatcaaaggcagttcattaaggctccagttttcgtattggcaaataaggactctttacctaacaaaatgaggattcaggtggaactaaattggggttttttacttcaacccaaatttaaaaa

SEQ ID NO: 348649 - DNA, 642 bp, Homo Sapiens
  misc_feature (64)..(64): n is a, c, g, or t
aattccaactccttcagaagcagctttctatgatcaccccagttggtctgtttgccatatttcnttcatattttaaatcactatctgaaattaacatttgtgtttcccttcaactctagaatgtaagcatcatgagacaggctttgtcaagtttcccattgccctccagtggtgaatgaatagactccctcaccttctctgtacctggtctggaattttgcctaacagcattaacatctaacttaatgacaaggaggaaggagattcttagaggcagtagaaaatggtcaagtgttcagaagatggcctttcattatatatctttagttctttctggcagatttggttatactgtcttaatctatcaggttgggtaagtagcccagggtgtcttcatccattcttttctgtatgccttatctcaagcattaccatcttccctaggctttcaaggattaggaactcggtcatcttttgacttcttttcttccaaagtcagtaagttatccaagtcctcctgattctacctttctgtgaatggtttcctgaattcatcccctgctgcttcagtcagaccctcacaatcctctgcctttagccatctgtttggtttctactttgtctcttctcaccttctcaccg

SEQ ID NO: 348650 - DNA, 697 bp, Homo Sapiens
  misc_feature (32)..(32): n is a, c, g, or t
  misc_feature (53)..(53): n is a, c, g, or t
  misc_feature (110)..(110): n is a, c, g, or t
  misc_feature (129)..(129): n is a, c, g, or t
ttgcggctcaggttcatgaagaaccagggttngggttccaggcttgttcgctnttggccacaaaattgaaggggatgaagctttcttggcccgtggtcagggactgcgcnttccaccactcgcccgctntgctccaggatgcggatctgttcccccttctcaaagcccagatctcccgtcgtgagagggctcatagctgtgcagagcgataaccaggttgtctgtaaagacaaggggcgtcagggagaaccgagctgggatcggcaggaagcctggagttacagggtgggggacaaggaaggcaagaccggggagaaagtaggtgggggagaggtggaagccaacagccagggatccgcaggccttgtctttcaggccctgctgcctggggtcaccttgcagtggggaagccggcggattggagccttcgtaggtaaccagtgggtcccgcacctcagagccatttcggatgagcagcgtgcccttgccatccagtgggactatgggataatggcagttctcacacacatcgatgttttccatctagtcatcttccgggtgtgagctgcagccacagcccatggtccctgcccagcccgggagccctctggccccattcacatggtcctcctggcctaacctggctgcctggacagtctcagctcccttcgccgtcgtagccaccacctgtctcccc

SEQ ID NO: 348651 - DNA, 629 bp, Homo Sapiens
  misc_feature (26)..(26): n is a, c, g, or t
  misc_feature (39)..(39): n is a, c, g, or t
  misc_feature (110)..(110): n is a, c, g, or t
  misc_feature (119)..(119): n is a, c, g, or t
gattcagaacttggagcgaggttacngcatgttgcgccntgacaactgtccagaggactgtaccaaatcatgaggttgtgttggaaggagcgcccggaggccggcccacntttgatacntgcgcagtgtgcttggaggattcttcaacggccacagaggccagtaccagcctcagccttgagaggccatgagaggccatggggttctccccctttctctccagcctgacttggggagatggagttcttgtgccatagtcacatggcctatgcacatatggactctgcacatgaatcccacccacatgtgacacatatgcaccttgtgtctgtacacgtgtcctgtagttgcgtggactctgcacatgtcttgtacatgtgtagcctgtgcatgtatgtcttggacactgtacaaggtacccctttctggctctcccatttcctgagaccacagagagaggggagaagcctgggattgacagaagcttctgcccacctacttttctttcctcagatcatccagaagttcctcaagggccaggactttatctaatacctctgtgtgctcctccttggtgcctggcctggcacacatcaggagttcaataaatgtctgttgatgactgttgt

SEQ ID NO: 348652 - DNA, 902 bp, Homo Sapiens
  misc_feature (207)..(216): n is a, c, g, or t
ggagttttagagtagtaatgaaattctacctagaatgcaaaattgggtatatgaattacatagcatgttgttgggattttttttaatgtgcagaagatcaaagctacttggaaggagtgcctataatttgccagtagccacagattaagattatatcttatatatcagcagattagctttagcttagggggagggtgggaaagtttnnnnnnnnnnttgtgaagatttagggggaccttgatagagaactttataaacttctttctctttaataaagacttgtcttacaccgtgctgccattaaaggcagctgttctagagtttcagtcacctaagtacacccacaaaacaatatgaatatggagatcttcctttacccctcaactttaatttgcccagttatacctcagtgttgtagcagtactgtgatacctggcacagtgctttgatcttacgatgccctctgtactgacctgaaggagacctaagagtcctttcccttttttgagtttgaatcatagccttggagggggcctccttgtttaatgggccctggttcctaaaagtaaaagggcctttaacttgcttcctggggtggaatttggggtaacaattgggaattcaaaattcttaactggggttattctttgaaattggctttttaacaataaaacccaattttaataatccctttaaaattttattcaacctttttttacactttttggggtaaatcttctcggtccaagggcccttcccctaaaaacccccctttttggtgatggtgatggggcaacaccacctgcgatctttgggaaatgtttctccaaaatctttccccaacagccaccttattattctacctagataacattaaaaatcctctttttttaagaaaagag

SEQ ID NO: 348653 - DNA, 783 bp, Homo Sapiens
  misc_feature (489)..(489): n is a, c, g, or t
gagagctatgccacctcgagtgctcctggctaagcagtgttccttgggctaaactttgaacacaaagtaactgactgaactggttttcccctgagttcacactcttttgggtacttccccatgaagagtataggcattttctgacttctcatagttcgcaaaggaataaataagaacaaactctaaattaccacagtgacagtgactcatgaccatagcaccagaaaagacccttggagccagagtactttggttgtgtgaattcccaggtgtgggcttagagagatagtgggatctttttttgtagtggtcttgctcaagtggaaaccctgcaatgtttcagcagctgttaaggggtgcaacaaatatttaaacccacacaagtggcaaaggctgctgagctgctatttatgtaaatattgtaatttgggcctgaaaggaattagattttgtatattaataaataaaattgggagtaaaagaaataanatcatctatctttaccacctttctttgcaggcctctagcttgatttctgtatctcttaaagacttatttaggatgaagatattggtcatacagccttgtaggcattgctatatcaagataattttttcctcatttagattctgccaagacagccatttgtcggtcagctcaggggaaaaccagttcagtcagttactttgtgttcaaagtttagcccaaggaacactgcttagcctcaggagcactcgaggtggcatagctctcaaaaaatgtaagaatgtaagtcaggtgcat

SEQ ID NO: 348654 - DNA, 499 bp, Homo Sapiens
  misc_feature (29)..(29): n is a, c, g, or t
  misc_feature (92)..(92): n is a, c, g, or t
ttggccaaagctgactaccggaccaaccnatcaaaggggatattccttccttttctccatggaacaaaatgtaatttgcccaaaggatactntactcttgatttgaaaagcagagataaagatgtgacaatagttcctagtactggagaaccaactactctaagcagtgagacacatatacccgaggaaaaaagtttgctaaatcttagcacaaatgcagattcccagagctcttctgattttgaagttccctcaactccagaagctgagttacctaaacgagagcatttacaatatttatatgagaagctggcaactggtgagagtatagcagtcaaaaaaagaaaatgctcactcttagatacctaagaattcaaagcgtttcaacctagagcaaccactaaaaaacctgcacagagatgacagtcaatattacaatagagaaaatacagtacttaaaaatgttcaaataacctggttgggtgtggtggctcacact

SEQ ID NO: 348655 - DNA, 742 bp, Homo Sapiens
acacgagcgcatgcctctctctgatcacaggtagcactcagattaccctgcctgctctgtgctttgctgcagaccatgtgaccagaacgtgtgcagctcagacagccacagaactggaatttttcagagagcagggggagcatggagtttggactgttgctgagcaactgaagtggagcgcagagcttgctcgcttacagagagagcatcatggatggcaaacaagggggcatggatgggagcaagcccgcggggccaagggactttcctggcatcaggcttcttatcaaacccatagatgggcgatgctgtgtctgattggtctcctatgcatgaagctgcaatccacggacatcagctgtctctgaggaacctcatcagacaggggtgggctgtgaacatcatcacggcagatcatgtgtccaccactccatgaagcctgtcttggaggtcatctctcttgtgtgaagatcttattaaagcatggagctcaggtgaatggtgtgacacgcagactggcacactaccactgtataatgcttgtgtcagcggcacctgggatcgtgtgaatttgcttctgcagcacggcagccagcgtacaacctgagagtgatctggcatcccccatccatgaagctgctaggagaggccacgtggagtgtgtcaactctcttatagcttatgggggcaacattgaccataagatcagccacctgggcactccactctatttggcttgtga

SEQ ID NO: 348656 - DNA, 1409 bp, Homo Sapiens
tagtggtataaaagcctgcctcgtatcaagtcatcacataagttcaatgtcagcaaaacctgttatttgaatttgactcctctatccttactctggaaagattggacatcttgacccacgtggctgtgagggctaaattagatgatgcagaaagtgcttggcatgcacgctagatatgcaacaacaataacttatgacactctccaagtcagggaaaaacagtcttcatgccttctaactaactaatacaaacgtatgcagtgtctttccaccctggcttgagtttaacaaatacaaattgaatagaaacaaattagtcaaactccataaacaagtttataacaaatacaaatctaatcgaaaaaactagtcaaactctataaatccaacttgattttaaaacttctagtggctacaacactcaatactgttttcacatcgtttgtgaatccattccctagatgcatttacagatgtaggagaaactgtttcagatcctctgggaggacgagtttggttatcttatgatgctgctggattccaagaacacttccgaattctaaggcggcgataactgcatcatagaagggggcccttctcatctccaagaagagctgggccaaggggctctctggaggcaccagctccacaggacgtttgccttcagcattcttggcctgggtgtccgctccaaaatccatgagcaggcaggccagctcttcactggctgtcctggccaactgcatgaagtggggaatcctgacctttcccttggttcacgtccgctcctgactccagaagcttcttgacacaggctctctgttggttttcacaagccaaatagagtggagtgcccaggtggctgatcttatggtcaatgttgcccccataagctataagagagttgacacactccacgtggcctctcctagcagcttcatggatgggggatgccagatcactctcaggttgaacgctggctccgtgctgagctccatgctttaataaaatcttcacacaagagagatgacctccaagacaggcttcatggagtggggaaacatgatctgccgtgatgatgttcacagcccacccctggctgatgaggttcctcagagacagctgatgtccgtggattgcagcttcatgcataggagaccaatcagacacagcatcgcccatcaatgggtttgaaagaagcctgatgccaggaaagtcccttggccccgcgggcttgctcccatccatgcccccttgtttgccatccatgatgctctctcctaagcgagcaagctctgcgctccacttcagttgctcagcaaagtccaaactccatgctccccctgcctcctgaaaaattccagttctgtggctggctgagctgcacacgttctggtcaaatggtctgc

SEQ ID NO: 348657 - DNA, 1632 bp, Homo Sapiens
  misc_feature (1443)..(1503): n is a, c, g, or t
accgtcctgtcagctccttgacctatgagctggggcctgactaggaaaagttgggagttaaggaggaaattagcattccttaatgttttgttttggtgctctgaatttcttctttattatagtcctatagttttactcctcagttcctcaccatcatcatcttgtctaagacccccattataatattcatgcgctgctttttcatcaaaacctaccctgtcctagagatctatgggcatttggtggatgataatgagcagcccctcccagatagaatgtcaatatttgagcagtaggatattgggcatttgttagttaaaggcttaaatcaaaagaatgtccaatggtaggaatttcaaggtgtaggtcagatatttgagaataggggatttttttgatgtgccttaaattataccaaagattactaattattcctctttgcccaaaatacttgcatccaaggttctagtctctgttgctgtgctggtctttagccccactgcttgcactgatgtccctccttttcacggagacctatctgaggtacaggatggggctggcaccagatgatgtcccaccacagtccctcacctccggcctccacatgacagaaccaatttacactcaaccatgacctcacccctccttggtttctccctcgatctgtggccctttttggatgtattcttatctaacaacacaatccggaaagactgaattgaatatttatactaatggttcatatcctttattgctcaatgatctaattaaagggatcattgccacatttcatgtttatatttctacaatttgtttagaaaacatctcctgaccatatcagtagctcgtgttatctttttatcaactgcttcccagagtcctaaaacaatagaaattttggattgaaaagttcagcataaggagtttgagtcagtaaaggatgggataaaggagtcgagatgattcaatgaaaagtatcacaaaaaagagattgatcaacaagagaaataaaaaagcccaagaggaagtggtaggggaaggaatttaagaacagcaataagtaaaactcttaagtaactccaaaaagaaaatggtacattttgccaaagaccacttatacttgagaacatggaagaatttgcctgatactctctttggggaaaagagtctctcctcttttcctcaaaccccagtacactcagcctctctgccccaccttctcctgactttgtcctcacttgcttctgcagtacattggaacctgaattgaaagaaagtcttccttgaataattggagtttgtcttgagaggcaaatatagccccaagaatcacaagattcgaggaccatgtaggtcttttacgtagcccaaatccataaattagtctcactttttgtatttatcgtttcatattaaaccctctatatcaaatgttcatcatgnnnnnnnnnnnnnnnnnnnnnnnnnnnnnnnnnnnnnnnnnnnnnnnnnnnnnnnnnnnnnatggtaaattcttaaactgtggaaaccactgaaggtgcttattaactgttctcccagatttgtacaagtattggatgattccttgagtttacagctgtacaaatagtgtggaaaataaactttttttaa

SEQ ID NO: 348658 - DNA, 657 bp, Homo Sapiens
  misc_feature (164)..(362): n is a, c, g, or t
  misc_feature (420)..(429): n is a, c, g, or t
cggaagcgcctggttggttcagaaaatcggaccgcagcgggagggcgggcaccggcgcgtggtctcagtggccccaggcgaaccctgatgagcagcagccgcaagtggcttactaaaggagccactttctacgtttgtctggaatttacgtgaattaagctggnnnnnnnnnnnnnnnnnnnnnnnnnnnnnnnnnnnnnnnnnnnnnnnnnnnnnnnnnnnnnnnnnnnnnnnnnnnnnnnnnnnnnnnnnnnnnnnnnnnnnnnnnnnnnnnnnnnnnnnnnnnnnnnnnnnnnnnnnnnnnnnnnnnnnnnnnnnnnnnnnnnnnnnnnnnnnnnnnnnnnnnnnnnnnnnnnnnnnnncctgagccagaccgctctggactgttttaattttttcagccttaatacctgccagaannnnnnnnnnactatgtatctttgtccttacgtatataaattttatatacaattgagattatcctgtatttgcttttcccccctcacttttatatgggtgacttttctcatgttaggctgaatactaacattttggaaactgtcggcctgaaaacgagcggagacacagtttctctaagtagagagtttatttgggccacacttgagcacaaattcaaggcgccctgaatgtgtactc

SEQ ID NO: 348659 - DNA, 325 bp, Homo Sapiens
aaagaatgagccgatattggcttagtgctcactaggggacatgcacatggaagctcacctctaagaaagggctgggcagatggatttattttttcccacctgtgaatatgtaaaacaaaaccattatctttgagggagtttttaataccagtgacagaacagagatttgtgtgctcatcttaagagccagagccatataagcatcttgggaaagcaagtttgaaccagctgctggtgtaatgtacagttatatttgtctataaatggagctgtttatggcaatttaataccattctctttgtaaagtgaataaatattcatcttt

SEQ ID NO: 348660 - DNA, 567 bp, Homo Sapiens
  misc_feature (311)..(371): n is a, c, g, or t
gttccatgagtgaggttcaaacatgtcatcgacaccattagtacaaaagggcatgactacttctgtgcaggcctgatagctccaacccagtgttcccagactgctagttgctgtctctgaaatattcaggcatttcacctggcccgaataattgtaatatacattcagagcttggaaaatattctgcagcagcagtgaatcagatacattgggatttttcaaatactggcacactacctatagactcagctactcaggaagctgaggtgggaggattgcttcagtcaggagttccaggctccagtgctatnnnnnnnnnnnnnnnnnnnnnnnnnnnnnnnnnnnnnnnnnnnnnnnnnnnnnnnnnnnnnaaacggaagagatttttccatcttatgtcattatttcactatatctatctacatgcacagcagcctatgctgaaatatttgagaagttatcagctgaaatgtgattccaaaattaacaaattacagcatcctttaaagttgctctttaagctgggaagaaacctagtagttttcatgctgacagaacagtcaaaat

SEQ ID NO: 348661 - DNA, 2591 bp, Homo Sapiens
  misc_feature (2225)..(2367): n is a, c, g, or t
  misc_feature (2384)..(2419): n is a, c, g, or t
  misc_feature (2431)..(2443): n is a, c, g, or t
ctcggggatgggggcggagtggctgtggtgacctggcttgggcggcgtctctgaggagctggctggctttgggtttcccctgggaggagcggttttgcggcgggcggagctgcaggctgggcagggcttagcctgtgcgcttctgctggcctccttttcgccctcccacccgcactgcagtctccagcctgagccatgggccgccgagccctcctgctcctgcttctgtcttttctggcgccctgggccaccatagccctccggccggccttaagggccctcggcagcctacacttgccaaccaaccccacatccctcccggctgtagccaagaactattcggttctctacttccaacagaaggttgatcattttggatttaatactgtgaaaacttttaatcagcggtacctagtagctgataaatactggaagaaaaatggtggatcaatacttttctacactggtaatgaaggggacattatctggttttgtaataacacggggttcatgtgggatgtggctgaggaactgaaagctatgttggtgtttgctgaacatcgatactatggagagtctctcccctttggtgacaactcattcaaggattccagacacttgaatttcctgacatcagaacaagctctggctgattttgcagagttaatcaaacacttgaaaagaacaatcccaggagctgaaaatcaacctgtcattgccataggaggctcctatggtggcatgcttgccgcctggtttaggatgaaatatcctcatatggtagttggagctcttgcagcttctgcccctatctggcagtttgaggatttagtaccttgtggtgtatttatgaagatcgtaactacagattttaggaaaagcggtccacattgttcagagagcatccacaggtcctgggatgccattaatcgactctcaaatactggcagtggtttgcagtggcttactggagcccttcacttatgcagcccattaacttctcaggacatccaacatttgaaagactggatctctgaaacctgggtgaatctggcaatggtggactatccttatgcctctaactttttacagcctttgcctgcttggcctatcaaggtagtgtgccagtatttgaaaaatcccaatgtatctgattcactgctgctgcagaatattttccaagctctgaatgtatattacaattattcgggccaggtgaaatgcctgaatatttcagagacagcaactagcagtctgggaacactgggttggagctatcaggcctgcacagaagtagtcatgcccttttgtactaatggtgtcgatgacatgtttgaacctcactcatggaacttaaaggaactttctgatgactgttttcaacagtggggtgtgagaccaaggccctcctggatcactactatgtatggaggcaaaaacattagttcacacacaaacattgttttcagcaatggtgaactagacccctggtcaggaggtggagtaactaaggatatcacagacactctggttgcagtcaccatctcagagggggcccaccacttagatctccgcaccaagaatgccttggatcctatgtctgtgctgttagcccgctccttggaagttagacatatgaagaattggatcagagatttctatgacagtgcgggaaagcagcactgagaaacttttgattgttttcaatttcttcttttatgttcacaccaccacattcccattcactttgattttctacatgtaattaccttcttttgtttatcattagatttgatggggccaaagttgagatagaatagagggtgatgacggtaagagcaagtgtcccatgaatgtgatttcctgggttctcactgtctttgcaccacgtctaggaagaatcttcttgatagctctcccacaccatcagtggccctcataactggagtagagttcctggttgcttttcataagagggagagttactttctttgtatctctgcaagcagagatttctctttggttttgaggttgaagtgtctttggcccatttgtaagtccccatccctaccctacacaaagtaaaagcagaagatagataaaaaatgatgtaattgcagctggtaggatgtctggtgccaatccaggaagtgagagccatttcttttgtaccggatttaatgactttgaactgtgctgtaaataaataatacagctggaccttnnnnnnnnnnnnnnnnnnnnnnnnnnnnnnnnnnnnnnnnnnnnnnnnnnnnnnnnnnnnnnnnnnnnnnnnnnnnnnnnnnnnnnnnnnnnnnnnnnnnnnnnnnnnnnnnnnnnnnnnnnnnnnnnnnnnnnnnnnnnnnncacacgaaccctaaacnnnnnnnnnnnnnnnnnnnnnnnnnnnnnnnnnnnntttttgttgggnnnnnnnnnnnnnacaaaaaaaactttttaaacaaccttctcgtgggggcgggcgggggcccaataaaaggaaaaagagaaagtgggcgctcctttcgtgttccccccaagaaaaacacgtcgcaaaaagaaaaaacagggttgtgtaatctccacacaac

SEQ ID NO: 348662 - DNA, 511 bp, Homo Sapiens
  misc_feature (301)..(301): n is a, c, g, or t
  misc_feature (406)..(406): n is a, c, g, or t
  misc_feature (481)..(481): n is a, c, g, or t
caagcttggaacaagggctgcataacttctcaaatatttcagcataggctgctgtgcatgtagatagatatagtgaaataatgacataagatggaaaaatctcttccgtttgtcttggtgtttggtagtgtgccagtatttgaaaaatcccaatgtatctgattcactgctgctgcagaatattttccaagctctgaatgtatattacaattattcgggccaggtgaaatgcctgaatatttcagagacagcaactagcagtctgggaacactgggttggagctatcaggcctgcacaganagtagtcatgcccttttgtactaatggtgtcgatgacatgtttgaacctcactcatgggaacttaaaggaacttttctgatgactgtttttcaacagtgggggtntgaggaccaagggccctcctggggtccactactatgtatggggggggcaaaaacctttggtttcacacacaaacnttgtttttccggcatgggtgaaccggaccc

SEQ ID NO: 348663 - DNA, 371 bp, Homo Sapiens
  misc_feature (59)..(59): n is a, c, g, or t
accccccactgttgaaaaacagtccatccagaaaagttccctttaaagttccccatgantgaggttccaaaacatgtccaccgaacacccattagtaacaaaagggccatgactacttctgtgcaggcctgaatagctcccaaccccagtgttccccagactgcctagttgctgtctctgaaatattcaggcatttcacctggcccgaataattgtaatatacattcagagcttggaaaatattctgcagcagcagtgaatcagatacattgggatttttcaaatactggcacactacctatagtctcagctactcaggaagctgaggtgggaggattgcttcagtcaggagttccaggctccagtgctat

SEQ ID NO: 348664 - DNA, 494 bp, Homo Sapiens
  misc_feature (24)..(24): n is a, c, g, or t
  misc_feature (41)..(41): n is a, c, g, or t
  misc_feature (106)..(106): n is a, c, g, or t
ctccttttgtttaaccaataaaanttgaaggggccccaaanttgaagaatagaaatagagggtgatgacggtaaagagcaaatgtcccccatgaaatgtgaatttnccccgggttcctcactgtcctttggcacccacgtcctaggaaagaatccttccttgaatagctctccccacacccatcagtggcccctcataactggaagtagagttccctggttgcttttcataagagggagagttactttcctttgtaatactctgcaagcagagatttctctttggttttgaggttgaagtgtctttggcccatttgtaagtccccatccctaccctacacaaagtaaaagcagaagatagataaaaaatgatgtaattgcagctggtaggatgtctggtgccaatccaggaagtgagagccatttcttttgtactggatttaatgactttgaactgtgctgtaaataaataatacagctggaccttaaaaaaaa

SEQ ID NO: 348665 - DNA, 1011 bp, Homo Sapiens
gtgcaaacgtaaatttagtttgaaaggttaatattctttctaaactatggcatatactatataatagcacgcttaaatatatttatatataattatttgcacatgaaatttagaaggaatttgcagatttactttgatacactgatctcatttcaactgtcaaggtttagggtgcttctgtaatactgtcatttgaaggtggggcatcaggatcaggctcagaggaaggagctgcagatgcttcaataaccgcaggtgggaaatgacggcggcacacagggcatgttcccgacttttgtagccaaattgagacacaaggtttgtgaaagaaatggtgacagggcaactctgttgctatatcatccttaatatactcactgcaacagattggacagcattgttcctgaccaatagcagtgtgatcttcaagaacaagggtctctggaagaccatcaatgctttccttactagctggtggattggccacctcaacatccactgcaagagactctaaatgggccagagcagtctccatagcctgggctaagcgttcttctagtgccatgtaggtaaggaactgaggatccacatatgaaatagcttcagcaactcctagtccatctgcaaagccatcaaataggctccaatccacatctaagtcttcactcacactggagtcatcctccaggttattgttaccatccaacatgaaagctgactgtgcaaattcattggcaggttcatttccctcatcactgctgctttcattgacttcattgtactgtaaccaaggaatttctccctcttccaaggatgtctgttccccttcctgaagagataattcttggttttcttcttcagggccactgctatcactttgtagctcaggttcattctcatcttttcctggcagagtctcccagctttcatcacttgaggattgatctttttctgtaccagccaatcgatgaggcaaagaagcagaccattccccatcactgcattcagaac

SEQ ID NO: 348666 - DNA, 316 bp, Homo Sapiens
gctgcgagaagacgacagaagggattcatagtgcgtttttttgtaatttatgattgtaaagtaagcttgacttataaattgacattgtaattgtgtacataattggatatatgtgttaaaatttaacatttagatttacttaattgtagaaaatacaaatgtaaaacttacacatggaaagaactgtatgcagttgactttactatgtaaattggagggaaacaaagttttagatccattttctttcaaaattttctttattgtaaagtatgcaaaatatatattcataccatttattaaatcagaatgtttatac

SEQ ID NO: 348667 - DNA, 842 bp, Homo Sapiens
agcggggtcttccagcagggaaaatggcgctggccatgctggtcttggtggtttcgccgtggtctgcggcccggggagtgcttcgaaactactgggagcgactgctacggaagcttccgcagagccggccgggctttcccagtcctccgtggggaccagcattagcagtacagggcccagccatgtttacagagccagcaaatgataccagtggaagtaaagagaattccagccttttggacagtatcttttggatggcagctcccaaaaatagacgcaccattgaagttaaccggtgtaggagaagaaatccgcagaagcttattaaagttaagaacaacatagacgtttgtcctgaatgtggtcacctgaaacagaaacatgtcctttgtgcctactgctatgaaaaggtgtgcaaggagactgcagaaatcagacgacagatagggaagcaagaagggggcccttttaaggctcccaccatagagactgtggtgctgtacacaggagagacaccgtctgaacaagatcagggcaagaggatcattgaacgagacagaaagcgaccatcctggttcacccagaattgacaccaaagatgttaaaaggataacttcacagtaaatcatttctcctgaaatagaggaagattctttacgttgttgtgcttgtttttaaatcatcagtatagtttaacacattctttctaagcagttttgtgtgggataatttgaagaatatattatgagtaaactccgaaaattttgtttatccaaaggctcaatggattatgtttctattatatacaaggttttaagtaaacataaaatttccagaacaat

SEQ ID NO: 348668 - DNA, 819 bp, Homo Sapiens; identical to SEQ ID NO: 75234

SEQ ID NO: 348669 - DNA, 854 bp, Homo Sapiens
  misc_feature (755)..(771): n is a, c, g, or t
aattttatgtttcttaaaaccttgtatatatagaaacataatcattgagccttggataaacaaaattttcggagtttactcataatatattcttcaaattatcccacacaaaactgcttagaaagaatgtgttaaactatactgatgatttaaaaacaagcacaacaacgtaaagaatcttcctctatttcaggagaaatgatttactgtgaagttatccttttaacatctttggtgtcaattctgggtgaaccaggatggtcgctttctgtctcgttcaatgatcctctcgccctgatcttgttcagacggtgtctctcctgtgtacagcaccacagtctctatggtgggagccttaaaagggcccccctcttgcttccctatctgtcgtctgatttctgcagtctccttgcacaccttttcatagcagtaggcacaaaggacatgtttctgtttcaggtgaccacattcaggacaaacgtctatgttgttctttaaaacaataaacaaaaacgtattttaacatgaggcaatataacgaacaaataaccactgacaggagcaatgcttacattttaactttcttaggatgttcaggctacatgaggtcatcatacaccatccagttccacctcactttaacaggaagactgaagacaagcaacactgagtttgaattagagaaaaactagaactagaattcagccaacctgaatctggtatctttacttaaacacagcagttgtagttatgtnnnnnnnnnnnnnnnnntactcatttcccctaactccaaatactaaatatcaaataaggaatttgtcaacataatgaagtgacccaaacaatcagcatct

SEQ ID NO: 348670 - DNA, 1151 bp, Homo Sapiens
  misc_feature (597)..(605): n is a, c, g, or t
cggtgcgacttgttaatgtccggttttctttagccgattgcttagcatatggcgtattcgtaccccgtaagctcacgtgttcaagatacagaactatgtattactctatgttaaagttaagaggcacgttatggttttccacagatatcagcactgtattccaacataatattcacacaacgtatggcatttgcattatgtggaacattgacaaaaagatactgttgcagttcatcaatttgtcattctgatgtacttacagtgcaatgctccttgaaggaacacaatcaaggatgatacacagcacagtcctcctcacccctacagagctagttctatactggctggatcaaacctgcacttcaacagaccatggcaagacagactgtatttgcatgtagtctaatatattaatatgcacaagagcccaccaatatgccaagagtaaaaccatggatttcaaccaaatatcagaacttcagcatgagtgttaaagagtaataaaatgacttcaagtacataaaaaaattaagttgattcaatgattggactttgtgcatttacaaaacaaagcttatctatacctgcataaagagnnnnnnnnngcttgaacgtttccataccccatttatgtttcaatggcagatgcaatgtagctatactttttgcacactattcacttttctatcctaaatttagaaagaaacacactaacattatatacattgaaagagttgcttcacatggaaaaaaactgttcttattagactactcatattcactatctgaaaactgtttaaaattagttatgccgaaacagtcctggaaatcaagtattatcaaattaagaacagaaaggttaactgttatagcagcagtacaggtctgaaacagtggtcatgtataaaaggaaatttcactgttaatgcaatggaagtatgccaaaagatcattgtacacacatgcagtttttaatcaaacagaaggaaaaaaaatgaagatatcaggattacttgtgctgaaagagccaatacaataaatggaaaagatcctccaatctaccactatactgcaaggggggaaaaacatgccagtgtttaaaaactcaatatttcatggggaaagcttatatatttgtgtatatgtatccc

SEQ ID NO: 348671 - DNA, 1918 bp, Homo Sapiens
  misc_feature (23)..(23): n is a, c, g, or t
tcttccgtacagacaaaactccnaggtcgtggcccttcagttctggctgttccacacacttggagtcattttctggacggtagtagccaaaatcacagagaaagtcctccagggaacagaggcagatggagggctgcttggtcacaacatagtctcgaccattctgacacacggatgactcggtagccgcagaaactgttctttgtagcccaaaatgcagccatcttcataatcttcgagggtctgtggagtgtgccagccatatggtatagtccttctcttcacagttcctttcaaggatatctttaaaatcaatggtgtaggagacccactggctggtcaggaaagattctgtgaagccccaaatgctgatattcatggacctagctccaggttctgaagctaggccagtgaaatagatggggtccctggtgaacgtgtaggtttgccagcattgaccttcgtctgtggagaacttaatcacattgataggacggctgctgtgctcaatggccacaatgatgcctccagaatccaggatggtgtaatagtggggtccttccagcatctttgtccaggagtaacccccatcatctgagatgtacacatctggaaccatcactgagatggcatcccccacgctaccatgagcaatgacaatgcctacggcattcggctctgagagtggggccattggaacattcagtttctgggagatgctgtaggaagcatgaatatgaaggctgcactcattcttgttttttgctgtagcatcacattcactgttttcaggcttcctcaggtgcgtccaccttcctccttggtcaaaagtgatcatggtctggatagaattatcttcggagagcacgcttgttatgtagacgccgcggagggaggtcacgttggtaaagtccgtctctccgcctgtggtagtgtagagatgtcggtccaaagacttggaatagacaatgcctcgatcatctgaggtaaagattgtgccaaacccagtgtctccaggttcatctacatgcatgaataccatgtcatcatttgctgccagaatagaatagaactgttcctgtcccacggaggggagctgggccatgctccatgtgtccccttgatctgttgaaacgtggatccttcttgtggtatccttatcagccatcacagaggcaaaaaggaaacgtcccccaagaccaaatgagtagattttcacaccaatagttttgaagctttttcccaagtctgaagttctccataattccagagccccaaggtcagctttgcaggagccatttgcataggttgtaaagaagatggtgttgtctgatccccatttggccaaacatactgctttgtggatttcttcccattttcccccaaaattcttggacacccacaggccattttcagtgctgagagctaaaagataatcagaattctgagggctatacatcatctgagtgagaggatgaaaagggagatctgtttgcacaaaattcttcgcaaaatctgatgatctaaagattcttcctccacgacttcctccagacacctctgctgttaacaccacctttccagagttctcaggaccaatagccatgccaaattcagtccgaataaaggtgttattgatgagatctgtaatatccttaaagttcttcccataatcctcacttcgatatagcttggactgtccaaaagtcataattaccagtggtacatggaaggtagtcaagactagaatgaccccagtgctatctccaacccaggacaagaatactgagcctctgagatcatcaaacacatgctggtgcgtgttgttggccagcttggcgacgaagtcccggacccggccgcactcctcgtcctcgcccggcgcgctgcgacgccaacggccgccgcggggaaacgc

SEQ ID NO: 348672 - DNA, 950 bp, Homo Sapiens
gcactgatcatgctctctgtcataacctatcataactccagttcaacagctttttgaggaattatgttccctttacttgaaaacatactccttgtacattttttgcagccttaaatataagggttacttaaaaatcactctagtttttaaacaaacaaaaaaacttggagggcaacctttttaaaattgtgaactttatcccataagtttctttcaaatttagtcctacttcctacctaccatatcaatgtatttgtggcagcctgagtttgaacccaccacagttccttactggaaatccatcagcttcccccaatgtctctgagggacagattgtaacttttggctgattgattatgacaattatacattaaaattgacactcatcccagaagaaaagatatttcatttcttccttttcatgttttgtgatctccatttgagacatgtagagaactttaattaatacagaatatcaagaaatctccacattcttaggttattggaccaatgtttcatgcttgtttcaaacagaagaacttatctgcacaaggatattttccaaagcacgaaaaaagcaaatgttgtagactgaagatccttttaaataaagacgaaatctgaaatgtgtttgccccccactaagggattgcataccttctatttctgaagtattcctgaggacattgtttttttagactctgacaattgaatttttttagtaaaagtcctatattctgaacaattttaaagataccatggaatatagctgaaagaaaaaataataccaacgatcattttttccaacaaatatcttggaaaaataaagattgccatcctattttcaaatataaaatattttatgattaaccagtaaaattttaatgtattttaaaacttaaataaaagaatcacaggattatggctcccagaatgaatggccggtccgg

SEQ ID NO: 348673 - DNA, 960 bp, Homo Sapiens
  misc_feature (914)..(914): n is a, c, g, or t
gcctgggtggcgaattcggcacgaggggccagtgggccgaacagccggtcacgggctgcagctgtgctccggggttcgaggcagctgaggggaacaccaagtgccgagcctgtgcccagggcaccttcaagcccctgtcaggagaagggtcctgccagccatgcccagccaatagccactctaacaccattggatcagccgtctgccagtgccgcgtcgggtacttccgggcacgcacagacccccggggtgcaccctgcaccacccctccttcggctccgcggagcgtggtttcccgcctgaacggctcctccctgcacctggaatggagtgcccccctggagtctggtggccgagaggacctcacctacgccctccgctgccgggagtgccgacccggaggctcctgtgcgccctgcgggggagacctgacttttgaccccggcccccgggacctggtggagccctgggtggtggttcgagggctacgtcctgacttcacctatacctttgaggtcactgcattgaacggggtatcctccttagccacggggcccgtcccatttgagcctgtcaatgtcaccactgaccgagaggtacctcctgcagtgtccgacatccgggtgacgcggtcctcacccagcagcttgagcctggcctgggctgttccccgggcacccagtggggctgtgctggactacgaggtcaaataccatgagaaggggcgccgagggtcccagcagcgtgcggttcctgaagacgtcagaaaaccgggcagagctgcggggggctgaaacggggaagccagctacctgggtggggggacaaggggcggctctaaagagcggggtacagggggccttcagaacaaggaggggtgggaaaacagagcggggcatagaattaaaaaacgnggggatggggcaaaaaggcggcttggggcgcgggaacaaaaaagag

SEQ ID NO: 348674 - DNA, 428 bp, Homo Sapiens
  misc_feature (16)..(16): n is a, c, g, or t
  misc_feature (33)..(33): n is a, c, g, or t
  misc_feature (41)..(41): n is a, c, g, or t
gtacaattaccttttntccccccacacttgttntcctttgnttttgttttttatggcaactggaaagtatttactatgggattcatttatgtctgtctttctatcataaagaattgatcaatatgtaaatatgtgatttgaaccatggttgacttacaagtgtcactacagctttttagaaaacatagccctaatatatgttaagcaggacccgggtgagccagtgggcttgcgctttatgtagagctggaagaaggccgtccatcctgtctcttgggcggacagtgtactttcctaatagggaagggaagcacaatggaaatacccctgaaccgttttattgcagtaatttttttcatatctgaaactattatttaatattttgaataagattttaaaaaataaatggcaaagatataaatttttgg

SEQ ID NO: 348675 - DNA, 1245 bp, Homo Sapiens
agctggtacggtcggaactgttttggattcgtcgaccacggcgtcgtcgcagccgagggaacaagccccaaccggatcctggacaggcaccccggcttggcgctgtctctccccctcggctcggagaggcccttcggcctgagggagcctcgccgcccgtccccggcacacgcgcagccccggcctctcggcctctgccggagaaacagcaggatggcccaatggaatcagctacagcagcttgacacacggtacctggagcagctccatcagctctacagtgacagcttcccaatggagctgcggcagtttctggccccttggattgagagtcaagattgggcatatgcggccagcaaagaatcacatgccactttggtgtttcataatctcctgggagagattgaccagcagtatagccgcttcctgcaagagtcgaatgttctctatcagcacaatctacgaagaatcaagcagtttcttcagagcaggtatcttgagaagccaatggagattgcccggattgtggcccggtgcctgtgggaagaatcacgccttctacagactgcagccactgcggcccagcaagggggccaggccaaccaccccacagcagccgtggtgacggagaagcagcagatgctggagcagcaccttcaggatgtccggaagagagtgcaggatctagaacagaaaatgaaagtggtagagaatctccaggatgactttgatttcaactataaaaccctcaagagtcaaggagacatgcaagatctgaatggaaacaaccagtcagtgaccaggcagaagatgcagcagctggaacagatgctcactgcgctggaccagatgcggagaagcatcgtgagtgagctggcggggcttttgtcagcgatggagtacgtgcagaaaaactctcacggacgaggagctggctgactggaagaggcggcaacagattgcctgcattggaggcccgccccacatctgcctagatcggctagaaaactggataacgtcattagcagaatctcaacttcagacccgtcaacaaattaagaaactggaggagttgcagcaaaaagtttcctacaaaggggacccccatttgtacagcacggcccgatgcttggaggagaaaaatcgtgggagctggtttaaaaactttaaatgaaaagtgcctttttgtgggtggaaacggcaagcccctgtcatgcccccatggaatccctggacccgggcccc

SEQ ID NO: 348676 - DNA, 917 bp, Homo Sapiens
agggtaaggtcctctcgtaaaatgcctgggagccaaaccaactgggaaggactaggtaaacaagagtgctactgccaccctgaggacagagccacttcaccgcagaaccacaaggggcatcgggcacttgtgggattcgggagctggctcttcagggctcagacaggactggaacatctccagctgctctgggcttgcaagggtcttcaacagggtgttctcacgctctagctgggagttcttctccaccagctctcggatctgctccttcaggatctccacctcctctctcacagcatacatcagatgattcttcaccagatccatggcctgttcgatcttgttgtctatggccaccacgctggctccggaggcactgtggaagaagagcaggatggagagcatggtctggtcgatgttgcggttgcagatgccctcgttgatcaggtagcaggggtcccgcagcaccggctctagcgaatcctgccgcattatgctgttgagcttgtcggtattgaggttctcaaagaccagcttttcctgcagctgccgaaagttgctcactgtagggctgcccgggttgttgttctccccgctgctgcctcgctggagcccactccgatgggccaggtccaggcagcagttgcagcagtcgaggccgacaggtgagcggcaatcgagcttggactgggccatcttctcaggctcggaggtcgcctggcctgcgaggtcaggggcggctggcaggtgcgcgcccaccgagctggcctgaggggactccagggtgcctggaaaagacaagctgtgaggaaaagagttggaaattagcgcctaaagccagccaccttcggctcggcccccttctggctgtactgctccgggtgcgaatagaaacagctggacaaacagctccgagc

SEQ ID NO: 348677 - DNA, 2515 bp, Homo Sapiens
  misc_feature (1943)..(1943): n is a, c, g, or t
  misc_feature (1945)..(1945): n is a, c, g, or t
  misc_feature (1947)..(1948): n is a, c, g, or t
  misc_feature (1955)..(1970): n is a, c, g, or t
  misc_feature (2147)..(2147): n is a, c, g, or t
ttcccggatctggcggcgtggagttgtgacatacgaggtgacacccctcgagtcacttcccttcaactccagctggagcgcctgcttggctttgggttcgttctgcagccttcgccccgctcctagcctcagggccggactccagcgcagagcccagcccagcgcagcctgccagcagccacccagccgcccagccgcccagccccgcacgaaacccggccagagcttcctagcagcccgagccatgaacaccgaaatgtatcagacccccatggaggtggcggtctaccagctgcacaatttctccatctccttcttctcttctctgcttggaggggatgtggtttccgttaagctggacaacagtgcctccggagccagcgtggtggccatagacaacaagatcgaacaggccatggatctggtgaagaatcatctgatgtatgctgtgagagaggaggtggagatcctgaaggagcagatccgagagctggtggagaagaactcccagctagagcgtgagaacaccctgttgaagaccctggcaagcccagagcagctggagaagttccagtcctgtctgagccctgaagagccagctcccgaatccccacaagtgcccgaggcccctggtggttctgcggtgtaagtggctctgtcctcagggtgggcagagccactaaacttgttttacctagttctttccagtttgtttttggctccccaagcatcatctcacgaggagaactttacacctagcacagctggtgccaagagatgtcctaaggacatggccacctgggtccactccagcgacagacccctgacaagagcaggtctctggaggctgagttgcatggggcctagtaacaccaagccagtgagcctctaatgctactgcgccctgggggctcccagggcctgggcaacttagctgcaactggcaaaggagaagggtagtttgaggtgtgacaccagtttgctccagaaagtttaaggggtctgtttctcatctccatggacatcttcaacagcttcacctgacaacgactgttcctatgaagaagccacttgtgttttaagcagaggcaacctctctcttctcctctgtttcgtgaaggcaggggacacagatgggagagattgagccaagtcagccttctgttggttaatatggtataatgcatggctttgtgcacagcccagtgtgggattacagctttgggatgaccgcttacaaagttctgtttggttagtattggcatagtttttctatatagccataaatgcgtatatatacccatagggctagatctgtatcttagtgtagcgatgtatacatatacacatccacctacatgttgaagggcctaaccagccttgggagtattgactggtcccttacctcttatggctaagtctttgactgtgttcatttaccaagttgacccagtttgtcttttaggttaagtaagactcgagagtaaaggcaaggaggggggccagcctctgaatgcggccacggatgccttgctgctgcaaccctttccccagctgtccactgaaacgtgaagtcctgttttgaatgccaaacccaccattcactggtgctgactacatagaatggggttgagagaagatcagtttgggcttcacagtgtcatttgaaaacgttttttgttttgttttgtaattattgtggaaaactttcaagtgaacagaaggatggtgtcctactgtggatgagggatgaacaaggggatggctttgatccaatggagcctgggaggtgtgcccagaaagcttgtctgtagcgggttttgtgagagtgaacactttccactttttgacaccttatcctgatgtatggttccaggatttggattttgattttccaaatgtagcttgaaatttcaataaactttgctctgtttttctaatantnanncatattnnnnnnnnnnnnnnnncaaacgcatagccataacaacactcctacagtcaaaaatccacattaaaatctttataaaacagaaccggtccaaaatcaccagccccccttcccccgtaattacagcgagttaccaatctgttgcgccgaccatttcccccaccacaaagagaaacataaataaaatgcgtgcagnggacataaccgccgccggcagggaattcccgtatccataagtcactaagcagcgcagcagaacgccccgccacactcacataagatcgacattccccacattccctctgttacaaaccgaagctaaggccgccacagatgccgcgtaatcggttctccccaccacgacatacgaaaaaaagccgcgcggaggcggcactaattatgctcgcgtaataaaccacataacgggagagggcgcgtttcctatgtgtttttcacggttcaggatgataatataccagaaggccctacgaaaagccgaaaatgagtgatggttcaataaggcacagagcccgcgctgtgcctaacacggaatgtaggagaacg

SEQ ID NO: 348678 - DNA, 1021 bp, Homo Sapiens
  misc_feature (48)..(84): n is a, c, g, or t
ggaattacgacatatgggcgaactggagcttcaccgcggggcggccgnnnnnnnnnnnnnnnnnnnnnnnnnnnnnnnnnnnnnatcaggccaaatcggccgagctcgaattcgtcgagagcgggctgcgccgtgaaaaccagctgctgcagccgcagaggcagccggaggcagaggggcggcgggcaggaccagacagggctgggcagggggctggccgagcgccgtgcgccgcttgggagaaggccggaagcttaccagccgagaaggaattcctagctagcttcagagccggtgcctccggagccagcgtggtggccatagacaacaagatcgaacaggccatggatctggtgaagaatcatctgatgtatgctgtgagagaggaggtggagatcctgaaggagcagatccgagagctggtggagaagaactcccagctagagcgtgagaacaccctgttgaagaccctggcaagcccagagcagctggagaagttccagtcctgtctgagccctgaagagccagctcccgaatccccacaagtgcccgaggcccctggtggttctgcggtgtaagtggctctgtcctcagggtgggcagagccactaaacttgttttacctagttctttccagtttgtttttggctccccaagcatcatctcacgaggagaactttacacctagcacagctggtgccaagagatgtcctaaggacattggccacctgggtccactccagcgacagacccctgacaagagcaggtctctggaggctgagttgcatggggcctagtaacaccaagaccagtgagcctctaatgctactgcgccctgggggctccatgggctgggcaactttgttggactggcaaggggacggtgttggcgggtgacaccagttgttcccaaagttagggctgttccatctcagggcatttcaagtctgaacatgtctttagaacctgtttaagggaccctctcctgttgaggggacaaggaaagaccccctgttgtttc

SEQ ID NO: 348679 - DNA, 480 bp, Homo Sapiens
gcccttgtgcggagccctgccaaggattagtcccagcctgctcctccattggccatctgaacaactcccagtatgatgggcagatggaaagagagtggcttgtgacgctctccacacaatgaagaaagaaacatgccttctctcctcaacacacagcagctccctgtcatgaccccctgctgccgttacaaagtcattagcatctactgtgcccctgggggtgagggaaagccaaaccccggaacaatatcatctctgctaaagacacaaaacttttgcttatggcacaggcacagagaattctggataaacaggctcagggttttctggcacccagtgagtggctacctcagaaagtcaccttggtttgacaaggggcccatgagaaggatggagtttggggcatttttctcttaatcctcacaagttatggggagaaagagctactattctggaaattctgcccccaaatttattctt

SEQ ID NO: 348680 - DNA, 3110 bp, Homo Sapiens
  misc_feature (2688)..(2688): n is a, c, g, or t
cagcacctggtgccccggtgcgtcgtgcggcgcggcgctcggcgagagctggcggtcaccatggcaatgcgggagctggtggaggccgaatgcgggggtgccaacccgctcatgaagctcgccgggcacttcacccatgacaaggcccttcggcaggagggattgaggcctggcccctggccccccggagccccggcctctgaggcattggtggctgaattcctgcaggaccagaatgcaccccttgtgtcccgtgcccctcagaccttcaagatggatgacctcctggctgagatgcaacagattgagcagtcaaacttccgccaggctccccagagagcccctggtgtggcagacttggccttgtctgagaactgggcccaggagtttcttgcagctggagatgctgtggatgtaactcaggattataatgagactgactggtcccaagaattcatctctgaagttacagaccccttgtctgtgtcccctgcccgctgggctgaggaatatttggagcaatcagaggagaagctgtggctgggagaacctgagggaacagccaccgatcgctggtatgatgaatatcatcctgaggaggatctgcagcacacggccagtgactttgtggccaaagtggatgaccccaaattggctaattctgagggtacatcagatgcctgggttgaccagttcacaagaccagtaaacacatctgccccttgatatggagtttgaaccagccaagtcagctatagaatcctgatgtcgatttctgggacaagttgcaggcaaagttgggaggaaatggcaaaacgggatgctgaggcccaccccgggctttctgactatgatgaccttacggcagctacctatgataaggggtaccagtttgaggaggagaaccccttgcgtgatcaccctcagccttttgaagaagggctgcggcgccttcaggagggggacctgccaaatgctgtgctgctttttgaggcagctggtcagcaggatcctaagcacatggaagcttggcagtatctgggtaccacccaggcagagaatgaacaagaactattagccatcagtgcattgcggaggtgtctggagctaaagccagataaccagacagcactgatggcgctggctgtgagcttcaccaacgagtccctgcagcgacaggcctgtgaaaccctacgagactggctgcggtacacaccagcctatgcccatctggtgacacctgctgaagaaggggctggtggggcaggactgggccccagcaagcgtatcctgggatctctcttgtctgactccctgtttcttgaagtgaaagagctcttcctggcagctgtgcggctggaccctacctccattgaccctgatgtgcagtgtggcttgggagtccttttcaacctgagtggggagtatgacaaggccgtggactgcttcacagctgccctcagcgttcgtcccaatgactatttgctgtggaataagctaggcgccaccctggccaatggaaaccagagtgaagaagcagtagctgcgtaccgccgggccctcgagctccagcctggctatatccggtcccgctataacctgggcatcagctgcatcaacctcggggctcaccgggaggctgtggagcactttctggaggccctgaacatgcagaggaaaagccggggcccccggggtgaaggaggtgccatgtcggagaacatctggagcaccctgcgtttggcattgtctatgttaggccagagcgatgcctatggggcagccgacgcgcgggatctgtccaccctcctaactatgtttggcctgccccagtgacagtgggacgggctgccctgtgagtgtccacctggagggatccccgctttggatgtgattccctctccccaaatgggcctaccaagggggcgggctgatgaccataagcggtacggcctttcaggagctgcctcaacgtaggggtgggtagtctgtgttctagttcctacataattgtaggaaaatgagctgtgtcatctctgagtcccttggtaattcaagggctgtacatccagctacagatctctctgctcatcatgccctttcttggtgctgctttttgggtaggaccccacgatttagggtaactgttatcatcagctgccatttctgatagggtctaccacatctgtaatgtctgtcctttcccccacttttactgggaattgatagtccagcttccttgggcagtgtaagtaggaggttcatctgctgtgcgcctctaatgtctgtctggatgggatgtgttaggagttggcctgttgggttgaattgttgatttggctgagcagagctgagttttggtaggagtgctcatggttctgtcattcttggacctctcctggctgagctctgattccctgtgagcacgatgctgatgcaatagtcctgtgtcatcactgcagcggtcctcaggagctgccagggcccaattgctaccagagtgtctgggtgtgtggcataggaggaaggtttgcttgtgaaatgaggctgggtgggagcggggagggactagatcagaagagatcaagggctgtattcaggaacgttggtgggaggacagagcaagtgggaagggggtatggtgagtgcggcaatcccctcatcccccttagaagcaccctgtgaatngggaattgagcccaactgttaatagaaaattggttcaagaaagtgcaatcttgcccagatttcctagcaaataggttcaagtgttacccataagcctttgctgtacttcttgaaatgtttctaggggagagcattggaaaatccccttcccccatctagatcgaaggaagatgagggagcagcttggattcttctcagttgtcccctgcatggggagatacactaacccccagaaatgactgctaagcctcttgccttgtctttagtagctaatgatcagagagattttctttttaaactaccatggtcccaggattccatcctgaaatttatttttctttgtatgaatatgtgtaaatgatttaaaaataaaactgtaaaatatttgtacgaagaataaatggaactgatgtgggtaaaaa

SEQ ID NO: 348681 - DNA, 840 bp, Homo Sapiens
gctggtacccggtccggaattccctgcatgcacctggtgccccggcgggtcgtgcggcgcggcgctccgcgagagctggcggtcaccatggcaatgcgggagctggtggaggccgaatgcgggggtgccaacccgctcatgaagctcgccgggcacttcacccaggacaaggcccttcggcaggagggattgaggcctggcccctggccccccggagccccggcctctgaggcagcctccaagcctttgggagtagcttctgaagatgagttggtggctgaattcctgcaggaccagaatgcaccccttgtgtcccgtgcccctcagaccttcaagatggatgacctcctggctgagatgcagcagattgagcagtcaaacttccgccaggctccccagagagcccctggtgtggcagacttggccttgtctgagaactgggcccaggagtttcttgcagctggagatgctgtggatgtaactcaggattataatgagactgactggtcccaagaattcatctctgaagttacagaccccttgtctgtgtcccctgcccgctgggctgaggacatatttggagcaatcagaggagaagctgtggctgggagaacctgagggaacagccaccgatcgctggtatgatgaatatcatcctgaggaggatctgcaagcacacggccagtgacttttgtggccaacagtggattgaccccaaattggctaattctgagggtacatcagatgcctggggttgaccaagttcacaagatcaggtaaacacaatcttgccttgatatggcagttggaacgagcccagtcagctattgacgtccgctg

SEQ ID NO: 348682 - DNA, 1579 bp, Homo Sapiens
aagtttctgccgcggctttgcggggacgggggagtggtagtgggggctgcagctgccggacccaggcactgacccttgacctccggtggctcccccatctctcaggcgcgatggctacgggcgcggatgtacgggacattctagaactcgggggtccagaaggggatgcagcctctgggaccatcagcaagaaggacattatcaacccggacaagaaaaaatccaagaagtcctctgagacactgactttcaagaggcccgagggcatgcaccgggaagtctatgccttgctctactctgacaagaaggatgcacccccactgctacccagtgacactggccagggataccgtacagtgaaggccaagttgggctccaagaaggtgcggccttggaagtggatgccattcaccaacccggcccgcaaggacggagcaatgttcttccactggcgacgtgcagcggaggagggcaaggactacccctttgccaggttcaataagactgtgcaggtgcctgtgtactcggagcaggagtaccagctttatctccacgatgatgcttggactaaggcagaaactgaccacctctttgacctcagccgccgctttgacctgcgttttgttgttatccatgaccggtatgaccaccagcagttcaagaagcgttctgtggaagacctgaaggagcggtactaccacatctgtgctaagcttgccaacgtgcgggctgtgccaggcacagaccttaagataccagtatttgatgctgggcacgaacgacggcggaaggaacagcttgagcgtctctacaaccggaccccagagcaggtggcagaggaggagtacctgctacaggagctgcgcaagattgaggcccggaagaaggagcgggagaaacgcagccaggacctgcagaagctgatcacagcggcagacaccactgcagagcagcggcgcacggaacgcaaggcccccaaaaagaagctaccccagaaaaaggaggctgagaagccggctgttcctgagactgcaggcatcaagtttccagacttcaagtctgcaggtgtcacgctgcggagccaacggatgaagctgccaagctctgtgggacagaagaagatcaaggccctggaacagatgctgctggagcttggtgtggagctgagcccgacacctacggaggagctggtgcacatgttcaatgagctgcgaagacgacctggtgcctgctctacgagctcaagcaggcctgtgccaactgcgagtatgagctgcagatgctgcggcaccgtcatgaggcactggcccgggctggtgtgctagggggccctgccacaccagcatcaggcccaggcccggcctctgctgagccggcagtgactgaacccggacttggtcctgaccccaaggacaccatcattgatgtggtgggcgcacccctcacgcccaattcgagaaagcgacgggagtcggcctccagctcatcttccgtgaagaaagccaagaagccgtgagaggccccacggggtgtgggcgacgctgttatgtaaatagagctgctgagttccgaaaaaacg

SEQ ID NO: 348683 - DNA, 1060 bp, Homo Sapiens
ggtccggaattcccgggatctttgcggggacgggggagtggtagtgggggctgcagctgccggacccaggtgcggaagtgcgagggcccaggtggctgaaggggccgttaggaacatccaagcggtggggcacaggcagatccccgacctgacctggaccacccttctcctcttggcccgccccttcaactcgcctccgcttaggtctggattggccccgccccctgacctgagcctggtccttcttcaggcactgacccttgacctccggtggctcccccatctctcaggcgcgatggctacgggcgcggatgtacgggacattctagaactcgggggtccagaaggggatgcagcctctgggaccatcagcaagaaggacattatcaacccggacaagaaaaaatccaagaagtcctctgagacactgactttcaagaggcccgagggcatgcaccgggaagtctatgccttgctctactctgacaagaaggatgcacccccactgctacccagtgacactggccagggataccgtacagtgaaggccaagttgggctccaagaaggtgcggccttggaagtggatgccattcaccaacccggcccgcaaggacggagcaatgttcttccactggcgacgtgcagcggaggagggcaaggactacccctttgccaggttcaataagactgtgcaggtgcctgtgtactcggagcaggagtaccagctttatctccacgatgatgcttggactaaggcagaaactgaccacctctttgacctcagccgccgctttgacctgcgtatagtggtatccatgaccggtatgaccaccagcagttcaagaagcgttctgtggaagacctgaaggagcggtactaccacatctgtgctaagcttgccaaccgtgcgggactgtgccaggcacagaccttaagatcccaggtatttgaatgctgggcacgaacgaggcggaaggacagcttgagcgtctctacaacggacccaagcaggtggccgaaggaggagtactggcaagagagctggccaggatgaggcc

SEQ ID NO: 348684 - DNA, 558 bp, Homo Sapiens
  misc_feature (29)..(29): n is a, c, g, or t
  misc_feature (69)..(69): n is a, c, g, or t
tgaaaaataaactggtactccctgctccnaataacacaggcacctgcaaaaatcttaatgaaacctggncaaaagggtaatccttgcccctccctccgctgcaacgtcgcccaatggaaaaaaaaattgcctcccgtccttgcgggcccgggttggtaaatggcatcccacttcccaaggccgcaccttcttggagccccaacttggccttcactgtaacggtatcccctggccagtgtcactgggtagcagtgggggtgcatccttcttgtcagagtagagcaaggcatagacttcccggtgccatgccctcgggcctcttgaaagtcagtgtctcagaggacttcttggattttttcttgtccgggttgataatgtccttcttgctgatggtcccagaggctgcatccccttctggacccccgagttctagaatgtcccgtacatccgcgcccgtagccatcgcgcctgagagatgggggagccaccggaggtcaagggtcagtgcctgggtccggcagctgcagcccccactaccactcccccgtccccgaaaag

SEQ ID NO: 348685 - DNA, 548 bp, Homo Sapiens
gggtcaagcttcattggacaacacagatgatgaacaaccaaaacaaccaattaaaactacaatgttattgaaaattcagcaaaacataggtgtgattgcagcatttacagttgcagtccttgctgcgggtatctcctttcattacttcagtgattagggtgaggcacaaagagtttcttgatcatccagagaacattgacagacaattatgaataataaagatgttaacaatccatctgtatttaaaacactagcagccagatctgctgccatgatgcctatttggtgtgtttctgattaaaatgaaatcacaagctgccttgtttagcctgctttacattgtaggtggcccgcatttccagaaataacgttatgcatctagatggaagctgcatgtaacaaatcattattatctatttttaaaagcttcaaaatgatgggatatgatcatagattttagtcttactaatctgaatcacatattaatcaggacattaaaaactttaacagaggcatgatggctcacacggtataatcctaatgctttg

SEQ ID NO: 348686 - DNA, 691 bp, Homo Sapiens
  misc_feature (281)..(281): n is a, c, g, or t
ggggccaaatacaaaaagaagatcgagggaatggtcaggagacccgatatatctgagatagaagaggccacgactccatgtccattctgcaaatttcttctccagagtgtgaactcctctgtcctggatgtaaaaacagtatcccatattgcattgcaacaggtcgacacatgtcgaaagatgactggacggtgtgtccacattgtgactcccctgctctatactcagaattgaagatcatgctaaacactgaaagcacatgtcctatgtgttccagaaangattaaacgcttgctcagctgaaaaagatttccagactgtacccagtacctgcgaacggaggaggaactgtgattggcacgtgcagatacaatgctcctgagaagacagcattttccacaggaggctgtttcctcccctggtggatttaaggagacggtcctttctggatacagagaaatgaaacaacggtgacctctccaggtcggcactttccacttctgtacggtggcaaaacgatgacatgtaaccttgctgtttattgtactttgtatattatttcctcttcaaagtctttcttacatactctatcctctgcactgttaatagtaacctatgacataattgtaaatattcagctttttgctaacttttgtattttgaaaaactttaaaataaaattgttgactag

SEQ ID NO: 348687 - DNA, 815 bp, Homo Sapiens
gggaggaggaggaggagggactcggcgggaggatgggcttgctctcaattttgcgcaagttgaaaagtgcaccagaccaggaggtgagaatacttctcctgggcttggataatgctggcaagaccactcttctgaagcagcttgcatctgaagacatcagccacatcacacctacacagggtttcaacatcaaaagtgtacaatcacaaggttttaaactgaatgtatgggacattggtggacagaggaaaatcagaccatactggaagaattattttgaaaataccgatattcttatatatgtaatcgacagtgcagacagaaaaagatttgaagagacgggtcaggaactagcggaattactggaggaagaaaaactaagttgtgtgccagtgctcatctttgctaataagcaggatttgctcacagcagcccctgcctctgaaattgcagaaggactgaacctgcataccatccgcgaccgagtctggcagatccagtcttgctcagctctcacaggagagggcgttcaggatggcatgaactgggtctgcaaaaatgtcaatgcaaagaagaaataaaatctagacgaatggagatgcaggagctgcgggagccgaattcggtcctgaaaaacactaatttgctgctttctgaccaaatgtttttccatctgtgtacagctccagctgtttgaagagagggaacaacacgggtttagaaagatcccccattccaccaggagatttaactggacctctgaaggtccagaatcattttttcaattaaagggaaattatattattttcctcctg

SEQ ID NO: 348688 - DNA, 843 bp, Homo Sapiens
  misc_feature (356)..(404): n is a, c, g, or t
tccggatgacaaatgccaccagttacagcccgccttgaaaactggcccgggtgagaggaggacctgggctggggaactgcccccacgcccgccccacgcccctccttttcgaccaatcccaggccgggaggctcccgccagccacgtgggcaggctttctccactccctggtccaggcgagccggcggcggcctctgcagctcccgtagcccgcccactgcgtgggcgggcgccttagcgcacttgcgcactctggggaaagcggagctgcaccccgccccgtattgctgctcagctcctcagctgtgcgtgcgagggacgtcgggggtggcgccgcagcagttgcccctggtaannnnnnnnnnnnnnnnnnnnnnnnnnnnnnnnnnnnnnnnnnnnnnnnntggtgagtgtgggggcctgggcccccttggagccggccggttatccccctcccgtccccaggcccagggcggagcactgcgcttaaagccaaggagggaatgggacgtcgctcagcctgctatctggggcttgctctcaattttgcgcaagttgaaaagtgcaccagaccaggaggtgagaatacttctcctgggcttggataatgctggcaagaccactcttctgaagcagcttgcatctgaagacatcagccacatcacacctacacagggtttcaacatcaaaagtgtacaatcacaaggttttaaactgaatgtatgggacattggtggacagaggaaaatcagaccatactggaagaattattttgaaaataccgatattcttatatatgtaatcgacagtgcagacagaaaaagatttgaagagacagatact

SEQ ID NO: 348689 - DNA, 1205 bp, Homo Sapiens
  misc_feature (924)..(949): n is a, c, g, or t
agcgggggggaggaggagggactcggcgggaggatgggcttgctctcaattttgcgcaagttgaaaagtgcaccagaccaggaggtgagaatacttctcctgggcttggataatgctggcaagaccactcttctgaagcagcttgcatctgaagacatcagccacatcacacctacacagggtttcaacatcaaaagtgtacaatcacaaggttttaaactgaatgtatgggacattggtggacagaggaaaatcagaccatactggaagaattattttgaaaataccgatattcttatatatgtaatcgacagtgcagacagaaaaagatttgaagagacgggtcaggaactagcggaattactggaggaagaaaaactaagttgtgtgccagtgctcatctttgctaataagcaggatttgctcacagcagcccctgcctctgaaattgcagaaggactgaacctgcataccatccgcgaccgagtctggcagatccagtcttgctcagctctcacaggagagggcgttcaggatggcatgaactgggtctgcaaaaatgtcaatgcaaagaagaaataaaatctagacgaatggagatgcaggagctgcgggagccgaattcggtcctgaaaaacactaatttgctgctttctgaccaaatgtttttccatctgtgtacagctccagctgtttgaagagagggaacaacacggtttagaaagaatccccattccagcagtagatttaactgatctctgaggttcagtatcatttttcaaataaaggaattatattatttcctctgcataattgaaatagtattaaatgtctcaaagcacatgattagaaaatgagatcttttaaatgagcaagagattgcattgcagtttagacaattccagtgggcttttttttcctctnnnnnnnnnnnnnnnnnnnnnnnnnngaggaagaagcagctttgctgagttcatttatttactgacccgtcccttgcattccctccatggttttgaaaccacagacagtgtttgctggtgctgtcagtgatttttaccgtcactagcccagccaggcttcagtctgtccgacaggaagctgctgggtgggggtggggggagaaaaggcagataattaaaccatctcatcgtcttgcaggtcggagactacgtatgtaatcctcactctttggacaaaaaaaa

SEQ ID NO: 348690 - DNA, 1008 bp, Homo Sapiens
  misc_feature (122)..(158): n is a, c, g, or t
  misc_feature (409)..(464): n is a, c, g, or t
aatcaaagtaagcaataatgacaggtttattgaaaatttccagtagagaaaacccactagttttggaataaaagtactcaatgtacgagagcataagtgaatacaaaagattaacagaaggnnnnnnnnnnnnnnnnnnnnnnnnnnnnnnnnnnnnngtttgaaatgaattcaaactgggatgttctttaaatcctccaaatatttaacagagttactaagttcggcaaaaaattcacttgaaaattaaagcctatttctgtactgtaaactccgtaaaaactgcttattaaattcaagcactccatataactggtattgaaacatgtaggcaatttcagaatagcaggaattattcatttgctctcacagttacatgaattaaccagctgcagaactgctttttgannnnnnnnnnnnnnnnnnnnnnnnnnnnnnnnnnnnnnnnnnnnnnnnnnnnnnnnctggaaacacagcaaaattcaggtatcagtttgtttctttaaagcaacaaactgaatttttacagtatagtctacatttgcagttgtcatttccctcttccccccacccacctcaaatactcctaaattcactagtctaatcaattcttaacttccaaatactctgtacatacatatttagcaagaaagattattatgtatatcatcaagattaacctttacttaaacgaacaaaaccatcgctaaacaaatagttttaaaatattatgaaaacccatgaaaagaagactcaacatgggctctaaacctgataaaacacgtttcagaacaactattaatgctaaacttctgcccaacgatgaccttaaagtgccaaacaccaaagaatctcttaggaccgttttctaatagacaatttgtccctggcttggccatctctcctttaactgtacacaaagtcctgctaaaagtctgaattttagttgattttacaatagaatgttacaatgtaaactaaacaggttcttgatatcaacagtatgtt

SEQ ID NO: 348691 - DNA, 1214 bp, Homo Sapiens
  misc_feature (1193)..(1193): n is a, c, g, or t
agcgggggtcgcgggcggatgacgcgccggggccggcggaggagcagccacttcctggggccgccggccggggccgctggctgcactcagcgccggagccgggagctagcggccgccgccatgtcccaccagaccggcatccaagcaagtgaagatgttaaagagatctttgccagagccagaaatggaaagtacagacttctgaaaatatctattgaaaatgagcaacttgtgattggatcatatagtcagccttcagattcctgggataaggattatgattcctttgttttacccctgttggaggacaaacaaccatgctatatattattcaggttagattctcagaatgcccagggatatgaatggatattcattgcatggtctccagatcattctcatgttcgtcaaaaaatgttgtatgcagcaacaagagcaactctgaagaaggaatttggaggtggccacattaaagatgaagtatttggaacagtaaaggaagatgtatcattacatggatataaaaaatacttgctgtcacaatcttcccctgccccactgactgcagctgaggaagaactacgacagattaaaatcaatgaggtacagactgacgtgggtgtggacactaagcatcaaacactacaaggagtagcatttcccatttctcgagaagcctttcaggctttggaaaaattgaataatagacagctcaactatgtgcagttggaaatagatataaaaaatgaaattataattttggccaacacaacaaatacagaactgaaagatttgccaaagaggattcccaaggattcagctcgttaccatttctttctgtataaacattcccatgaaggagactatttagagtccatagtttttatttattcaatgcctgggatacacatgcagtataagagagcggatgctgtattctagctgcaagagccgtctgctagaaattgtagaaagacaactacaaatggatgtaattagaaagatcgagatagacaatggggatgagttgactgcagacttcctttatgaagaagtacatcccaaagcagcatgcacacaagcaaagttttgcaaaaccaaaaggtcctgcaggaaaaagaggaattccaagactaattaggggcccagcgggaaactgaagctactactggattaaagtcacacattaaccntgtaatacagtttttaaatca

SEQ ID NO: 348692 - DNA, 548 bp, Homo Sapiens
  misc_feature (38)..(38): n is a, c, g, or t
tgctataggagtaatagggaatttttagaggactagtntcaaaattacacacctgcagaagttttcattgttctacctactgtgaggtatggtattacaaactaagaagcattaatggagaataactaaagggtctcataactgagttgtatataatattgctatcttgctattgttaaagatagccctgattttaggatgtagctattttagagagtcaaaatggaaataacacattgtccacatagctactgtgaaagctgtaatacagagttatcctttattttgacacatttttaaaaaactgtgaatataactttgtaactaataagggatgttcacatgaagcagttcttaagccttctaacttcttaagggatctcttaaccagcataaatggaactgtttcaaggccatgacattaacagacctttttaggtcccagtagcctgctagtctgtaaaagaaaacaatgctatccactccattaaaatacagaaggcatacagtattgaacagtgcctaaaataaaaaggagaggaggactg

SEQ ID NO: 348693 - DNA, 907 bp, Homo Sapiens
  misc_feature (53)..(53): n is a, c, g, or t
  misc_feature (100)..(100): n is a, c, g, or t
  misc_feature (122)..(122): n is a, c, g, or t
  misc_feature (798)..(858): n is a, c, g, or t
gtgtgtttcacattagggtacattgtggatgcttaatccccccaaatttttgngaagccacattgtgtttcactgccaagaattctctctcttgagtaangatgacattggttggaagtacntaaggaacaggatgccaaggaggagagccacctgctcaacagttggcatgactaatctcaatgatttgtcatgaaaacctgtgtaaaggaaacaattaattgactagctttctataaaagcaaaaaaaagatatttagtattacctcatatgcccactcaaataggtttatttgtcagtttcataggagttccatcagtatattttattctgtaaaaaaattaccttccaacttaactactatagtgattgccaaaagtaaaatttttgaatgcagatatcaaggtgttgaaaggaaaaaaatggatatggtatttacataaactatattttgaatttggctatattttcagttttgttcaaaatgatttttatctgaatatattagctgcctactacttatatacattcaggtatattctgatggaatcagctcatataattagtagttaactcattaataacattcagcacagacttagctgctaggcatcctagcctgtagcgaggtgaggggaaagtactgagtctcattctatgccttagagaaatattgcattcggcccactaatcacacacactccagcatgaaggtttcagcagggatgcaatgatatcctcaaccacctgtcatcaagtggcagtaacagcttttcatcttaaccttcttgagcttnnnnnnnnnnnnnnnnnnnnnnnnnnnnnnnnnnnnnnnnnnnnnnnnnnnnnnnnnnnnncgtaattagggtacaaagaagaattaaggttgctaatcagctgaccttt

SEQ ID NO: 348694 - DNA, 1149 bp, Homo Sapiens
ctcgtgccgctttggtgttgtgtatgtctcttcatttcctctcaaatcttcaactcttgccccatgtctccttggcagcaggatgctggcatctgtgtagtcctcatactgtttactgataacccacaaattcattttcatggcagacctaagctcagaccctgccttgtcctggcaagcataggttttcccagaccacaatgctgatatatcttatttaatgcagactgtattcttgcagcgtgttgtttcctttgtgactcaaggttgaattaaaatgcctgtgaactgcaaacttgcttatgattgacttggtgcaataaagttcctttctaaccatttctggtttagaaaacattcagccatcctagaaactagcaatatttatttttgcctctttcgttttaccttcatttttagatgaggtaaatgttttgtctttttactttaagggtactaagcaaggtccactctagtgtagctgaagagaatgcatatttggctacactatttctgtttactgtattttgcttcctactttatgtctaaatgctattgtttgtttaaaatcctaataatgtctcatttccaatatgctattttcagataactaaggttttgctactaatgtcagccattaactctcccactaattgggattattttttaaaagaggtctttctccccgaaatacaagttttagaaaatcttagaagaggggtgggtgcatgtcttaatgctgggaagcggcaactttggggttgaacttacttgaatggattaaaaattgcattgtgttacagagctagaaaattttatgtatgaaaaacgataatagccttacactgagtacaaataatactttaagagcatgtgaagatgtgatcatttgtgatgttacttgtaaaaaaaagtatatatacatatcttttgaagtgttaaaaggaaactagtactttatattctttatcatatcactttttgtaagtgttgaatatattcctgtttatttttctatgttctgttttgtagccttaagaagtgtttcaaacatatctgaatgtataaaataagagtaaatgccctacatggtgtgatgctgcattatatataaaactgtgtgcatatattaaattttgtctcttgaaa

SEQ ID NO: 348695 - DNA, 732 bp, Homo Sapiens
agtacttgccaataactcacctgtgcttctagtttaatttaattttggacacacacttctcacagtgatgctaaactctttacaagatagacccgcagcttcctgcctctgcctctctcttagttctatttgtccaggccctgctgatttctgggactctcatatggtcaagatctatttcaggcatgacctatcttatgacagttctaagatgcttggtaatgtctgtctgtggaagtggccaaggggcaacagaaatgtgaaagagcttctgttgtttcatttgaataagggccctggaaagtcaaccctgggaaaactcgcacttggtgtggcctttttcctgataagatcaagacttcactggccccaccagcacaagaagggaatgctgaggacagggccatttcccaagataaaactagtttgggatcgtgtggccaaataagctgatggactctgtttccgacatttcagctcatttgcttagtgctaggtcactctacctctcgtttaaaagaatatagctatgctcacatctgtgactctgaatttatcaagcatttgactttctttatcaggagatgaagaaactgtgctttggatccatcatgattttacttatccagcttactttttacagttattaaaatcttactcaataccttctctctgggccaaactcagaagcaggcattgctgactagacagtgaattcaactcagtcatccc

SEQ ID NO: 348696 - DNA, 1723 bp, Homo Sapiens
gggtccggaattcccgggatccacgtgtggtggagttaaatgctcctagccggcagaggagctagggagtgtggcactgagccggctcaggcagagacgcggcaccatggctagcaagaaagtctgcattgtaggctccgggaactggggctcagccatcgccaagatcgtgggtggcaatgcagcccagctggcacagtttgacccacgggtgaccatgtgggtatttgaggaagacattggaggcaaaaagctgactgagatcatcaacacgcagcatgagaatgtcaaatacctgccagggcacaagttgcccccaaatgtggtggctgtcccagatgtggtccaggctgcagaggatgctgacatcctgatctttgtggtgccccatcagttcatcggcaagatctgtgaccagctcaagggccatctgaaggcaaacgccactggcatatctcttattaagggggtagacgagggccccaatgggctgaagctcatctcggaagtgattggggagcgcctcggcatccccatgagtgtgctgatgggggccaacattgccagcgaggtggctgatgagaagttctgtgagacaaccattggctgcaaggacccggcccagggacaactcctgaaagagctgatgcagacaccaaacttccgtatcacagtggtgcaagaggtggacacagtagagatctgtggagccttaaagaatgtagtggccgtgggggctggcttctgtgatggcctgggctttggcgacaacaccaaggcggcagtgatccggctgggactcatggagatgatagccttcgccaagctcttctgcagtggccctgtgtcctctgccaccttcttggagagctgtggtgttgctgacctgatcactacctgctatggagggcggaaccggaaagtggctgaggcctttgcgcgtacaggaaagtccattgagcagctggagaaagagttgctgaatgggcagaaactgcaggggcccgagacagcccgggagctatacagcatcctccagcacaagggcctggtagacaagtttcccttgttcatggctgtgtacaaggtgtgctacgagggccagccagtgggtgaattcatccactgcctgcagaatcatccagaacatatgtgagtggggccagggcccaggccaggccgcttttttaccccagtggagaccagcagaagcctggggtacctagtcaccaggatctccaggactcccagggagcagagtcttctcatcttttcactggaggacaggaggctatggggcccagctacgcacctggagatcctgaactgtcaagccactggcagcctcatgccaccacatttgccagaaatgcagttgccctgtccctctccagatgtggggctttctccatatcctctgggaggggtggaatcaagccccagtgctgcctgcttggtggcgggggtgatgtatgtggagaagggttgggggagaggccggtagggcaggggctgctagtggctgtctcacatacaccagtaatcctgttaaagggctgaagaagtatcttagccacaggagcgatgaggcaaggattgtcagggaggggtctgggcttctgagctgatgcaggccccaaggacccctttgctgacctctgccaggacccacacagcttcgatggatctcagtgtttgttaacaaaatacaaagatctcaaac

SEQ ID NO: 348697 - DNA, 2413 bp, Homo Sapiens
  misc_feature (98)..(98): n is a, c, g, or t
  misc_feature (2228)..(2236): n is a, c, g, or t
ttagataatagttcaggatgtaaatcatagtggtattcactaatctgggagggaacgagtactgcagctttgcatgccatttagtacgatgattgtanagtagcttgtatagtgtaagataagagtgatctttagatgggagtgtttatcatgacatgttatatatattgtgtaggggtcaaaaaaatgctgatggataacctatatgatctatagtttgtacatgcattcatacaggcagcgatggtctcagaaaccaaacagtttgctctaggggaagagggagatggagactggtcctgtgtgcagtgaaggttgctgaggctctgacccagtgagattacagaggaagttatcctctgcctcccattctgaccacccttctcattccaacagtgagtctgtcagcgcaggtttagtttactcaatctccccttgcactaaagtatgtaaagtatgtaaacaggagacaggaaggtggtgcttacatccttaaaggcaccatctaatagcgggttactttcacatacagccctcccccagcagttgaatgacaacagaagcttcagaagtttggcaatagtttgcatagaggtaccagcaatatgtaaatagtgcagaatctcataggttgccaataatacactaattcctttctatcctacaacaagagtttatttccaaataaaatgaggacatgtttttgttttctttgaatgctttttgaatgttatttgttattttcagtattttggagaaattatttaataaaaaaacaatcatttgctttttgaatgctctctaaaagggaatgtaatattttaagatggtgtgtaacccggctggataaatttttgggtgcctaaggaaaactgcttgaatattcttatcaatgacagtgttaagtttcaaaaagagcttctaaaacgtaggattatcattcctttataggaatgttatgtgggttaaaaccagaaagcacatcttcacacattaatctgattttcatcccaacaatcttggcgctcaaaaaatagaactcaatgagaaaaagaagattatgtgcacttcgttgtcaataataagtcaactgatgctcatcgacaactataggaggcttttcattaaatgggaaaagaagctgtgcccttttaggatacgtgggggaaaagaaagtcatcttaattatgtttaattgtggatttaagtgctatatggtggtgctgtttgaaagcagatttatttcctatgtatgtgttatctggccatcccaacccaaactgttgaagtttgtagtaacttcagtgagagttggttactcacaacaaatcctgaaaagtatttttagtgtttgtaggtattctgtgggatactatacaagcagaactgaggcacttaggacataacacttttggggtatatatatccaaatgcctaaaactatgggaggaaaccttggccaccccaaaaggaaaactaacatgatttgtgtctatgaagtgctggataattagcatgggatgagctctgggcatgccatgaaggaaagccacgctcccttcagaattcagaggcagggagcaattccagtttcacctaagtctcataattttagttcccttttaaaaaccctgaaaactacatcaccatggaatgaaaaatattgttatacaatacattgatctgtcaaacttccagaaccatggtagccttcagtgagatttccatcttggctggtcactccctgactgtagctgtaggtgaatgtgtttttttgtgtgtgtgtctggttttagtgtcagaagggaaataaaagtgtaaggaggacactttaaaccctttgggtggagtttcgtaatttcccagactattttcaagcaacctggtccacccaggattagtgaccaggttttcaggaaaggatttgcttctctctagaaaatgtctgaaaggattttattttctgatgaaaggctgtatgaaaataccctcctcaaataacttgcttaactacatatagattcaagtgtgtcaatattctattttgtatattaaatgctatataatggggacaaatctatattatactgtgtatggcattattaagaagctttttcattattttttatcacagtaattttaaaatgtgtaaaaattaaaaccagtgactcctgtttaaaaataaaagttgtagttttttattcatgctgaataataatctgtagttnnnnnnnnngtgtctttttacctacgcagtgaaatgtcagactgtaaaaccttgtgtggaaatgtttaacttttattttttcgtttaaatttgctgttctggtattaccaaaccacacatttgtaccgaattggcagtaaatgttagccatttacagcaatgccaaatatggagaaacatcataat

SEQ ID NO: 348698 - DNA, 1362 bp, Homo Sapiens
  misc_feature (45)..(81): n is a, c, g, or t
  misc_feature (957)..(970): n is a, c, g, or t
  misc_feature (1087)..(1155): n is a, c, g, or t
  misc_feature (1212)..(1212): n is a, c, g, or t
  misc_feature (1242)..(1242): n is a, c, g, or t
  misc_feature (1258)..(1258): n is a, c, g, or t
  misc_feature (1286)..(1286): n is a, c, g, or t
  misc_feature (1305)..(1305): n is a, c, g, or t
  misc_feature (1317)..(1317): n is a, c, g, or t
  misc_feature (1338)..(1338): n is a, c, g, or t
  misc_feature (1349)..(1349): n is a, c, g, or t
atatagatcatataggggaactggagctctacgcggtggcggcgnnnnnnnnnnnnnnnnnnnnnnnnnnnnnnnnnnnnnatcaggccaaatcggccgagctcgaattcgtcgagagcggactattggccagttccgttcaacgaagtggttgctttttttagttccggcaatgagttgcgccggggcggcggcggctccccgcctttggcggctgcgcccgggggcccggcggtccctctcagcttatggaagaagaaccagtgtcagatttcgcagttcaggaatgactttagacaatatcagtcgggcagctgtggatcgaataatccgggtggatcatgcaggcgaatatggagcaaaccgcatctatgccgggcagatggctgtcctgggtcggaccagcgtcgggccagtcattcagaaaatgtgggatcaagaaaaggaccatttgaaaaagttcaatgagttgatggttatgttcagggtccggccaacagttctgatgcccttgtggaacgtgctggggtttgcactgggggcggggaccgccttgctcgggaaggaaggtgccatggcctgcaccgtggcggtggaagagagcatagcacatcactacaacaaccagatcaggacgctgatggaggaggaccctgaaaaatacgaggaacttcttcagctgataaagaaatttcgggatgaagagcttgagcaccatgacataggcctcgaccatgatgcagaattggctccagcctatgccgtcctgaagagcattatccaggccggatgcagagtggcgatatatttatcagaaagattataaagtgtgtccagttttgcctgtctataaaagatgatagtaatttaccaagtgacatttgcagagaaacaggtgtacagttatcgttgtacttttgtacaatgtgaattttgttaataaattataaggtttgnnnnnnnnnnnnnnaaactctgcagtgttgatttttctctgggttgttttttctgccatgagaccaacaggtcaccagccttgttcaagttacagcaaacgaagctgggccttgtttggtctcatacttannnnnnnnnnnnnnnnnnnnnnnnnnnnnnnnnnnnnnnnnnnnnnnnnnnnnnnnnnnnnnnnnnnnngggagacaggggcctcgctcttttgtccaggggcggggtcacaactcactgcagccnggggccctcctaggccttcaaggcaatccnccccaccttcaggccnttcccagtaggctgggggactacagggngttggcacccaccacaggnggggccaattcnaattttttttaggaggggcgnagtcttcactnggtcgcagggggt

SEQ ID NO: 348699 - DNA, 1564 bp, Homo Sapiens
cacgggagccggggcacccggcggacaccagcgcgccgcgcgcaccgcgcccggcgccccgcagacaacaggccgggctccgcgctcccgcattcgcccgggatggccgattcttccgcaatccacgagtttttctgagcccaggcacagaggaccgctgtgcccgacagtggcggaacgagatgcaagaaccacccctatattaagatggtgatggaacaaggagattggctgattggaggacatcttcaagtcttggatcgagtttattggaatgatggtcttgatcagtatcgtcttactcctactgagctaaagcagaaatttaaagatatgaatgctgatgctgtctttgcatttcaactacgcaacccagtgcacaatggacatgccctgttaatgcaggatacccataagcaacttctagagaggggctaccggcgccctgtcctcctcctccaccctctgggtggctggacaaaggatgacgatgttcctttgatgtggcgtatgaagcagcatgctgcagtgttggaggaaggagttctgaatcctgagacgacagtggtggccatcttcccatctcccatgatgtatgctggaccaactgaggtccagtggcattgcagagcacggatggttgcaggagccaacttttacattgttggacgagaccctgctggcatgcctcatccagaaacagggaaggatctttatgagccaagtcatggtgccaaagtgctgacgatggcccctggtttaatcactttggaaatagttccctttcgagttgcagcttacaacaagaaaaagaagcgtatggactactatgactctgaacaccatgaagactttgaatttatttcaggaacacgaatgcgcaaacttgctcgagaaggccagaaaccacctgaaggtttcatggctcccaaggcttggaccgtgctgacagaatactacaaatccttggagaaagcttaggctgttaacccagtcactccacctttgacacattactagtaacaagaggggaccacatagtctctgttggcatttctttgtggtgtctgtctggacatgcttcctaaaaacagaccattttccttaacttgcatcagttttggtctgccttatgagttctgttttgaacaagtgtaacacactgatggttttaatgtatcttttccacttattatagttatattcctacaatacaattttaaaattgtctttttatattatatttatgcttctgtgtcatgattttttcaagctgttatattagttgtaaccagtagtattcacattaaatcttgctttttttccccttaagaaagaccgaggattaccaaacaataaacttggctagaccttgttttgaggattttacaagacctttgtagcgattagattttttttctacattgaaaatagaaactgcttcctttcttctttccagtcagctattggtctttccagctgttataatctaaagtattcttatgatctgtgtaagctctgaatgaacttctttactcaataaaattaattttttggcttctta

SEQ ID NO: 348700 - DNA, 279 bp, Homo Sapiens
aaggctcggggtgcctttccttcctctgtccccgcccccacccccagcacccggtccagatcctccaggtgttgcagaactccgcggtcggggccgggatcacgggggagacgcaggatgcggtccctcgccggtggcccctgccagcccccgggtccccttctcctccatcagccggtagtggctccgggagcgccgaggtgatggaagttgagactggggcttttatttcaaatggggagggcgaagtgaggggacagacagggtggtaggcaaatt

SEQ ID NO: 348701 - DNA, 1033 bp, Homo Sapiens
  misc_feature (372)..(471): n is a, c, g, or t
  misc_feature (629)..(696): n is a, c, g, or t
  misc_feature (709)..(754): n is a, c, g, or t
  misc_feature (825)..(836): n is a, c, g, or t
aagtgtcaagataaagtgagtcagctgtacatgaatccaaaggcctggaacccaatggtactcaaaaacatagctgcctcggggaaattctccagtgaccgaacaattaaagaatatgcccaaaacatctggaacgtggaaccttcagatctaaagatttctctatccaatgaatctaacaaagtcaatggaaattgaactctagaattgtctctagaaaacacagcttcttactgaacttgaacatttttacaacattcactggtttttgttttgttagctaataatctataatagttgagtatctctgggaatggggagggaaattatatgtaatagagcttaaaaataaagtgtcaatttccaagggcnnnnnnnnnnnnnnnnnnnnnnnnnnnnnnnnnnnnnnnnnnnnnnnnnnnnnnnnnnnnnnnnnnnnnnnnnnnnnnnnnnnnnnnnnnnnnnnnnnnncccttgtccgccccccctcgccccctcgaaaaagtttttctaaaacatttctttttggccccccggcccccggaaggaaaaggggaactgggccaatacctggtttcccaaagaaaacccgggggccaaagaccaaagggtttggaattccccccccnnnnnnnnnnnnnnnnnnnnnnnnnnnnnnnnnnnnnnnnnnnnnnnnnnnnnnnnnnnnnnnnnnnngggaagtttcctnnnnnnnnnnnnnnnnnnnnnnnnnnnnnnnnnnnnnnnnnnnnnntccccaaaggggggaggcttctccaaataatacaaaaattttaaaccccccccgcgccccggtgggccccnnnnnnnnnnnnggaaaaagaaaagggtggggggaaaaattctcccctttaaaaaaaccttttttccggcgcccccacaagtggggaaaaaacccctctctcccaaaaagcgggggggttttggggtgaaaacccccctggaaatactccccccccgggggggagaaatcaacacaacacccctttttgtggcgccccccctggggggg

SEQ ID NO: 348702 - DNA, 1363 bp, Homo Sapiens
ttctctctctgttctccagttggtattcagaatttggagctgattgtgtctgctttgatcttatgggtaagttaacatactggggaattgcctgtataagaccatgaagggtacctaatgttcctggattaccttgttagaggtatatctgccctagaccatctgattacctctcgtattagttaggtgagtatttaacttacttcgatcttatatgcaggttggcctggtggcttgacatatttcactacagaagggaaagatgtcagaaggagagtttcaaaggactcaggcaacaccctaggaaagtcaattcgcaaatcacttcagcaacaggtcagtaaatagtaactatcaaaccagttgtgccttctactccatctctaggatagaagcccagccacatcctctgagggaaggaagaggctcttattacagcacaatccaaacataaaatgcagcatgttcaccattggcctgggacaaatccttaatagttggggatacggactatttcccccaccagtaccaggcaggggacattcctgtcctacctttcccctaaaaggaggcaaggtccaaacttctccactcttcataattaccattcttgaggaccaggccaaatccagtaaggcacggagtaaaacagctgatggggggctatgtgtgagagtcagggggttggggaggggactcagccccagaacaaaagccacagctgagaaccagagaaggagagtagagtccatgtctaccctgggtttctggggtccagggacctgaaagtcagcacctgctcctcctgtggagtacccctggtgacagagctcagctggcagctgctcatcactaacgaatccccagccaccggcacctgctgctgcttgcggatcttgttgaagagttccatgtactggaccatggtatctgctgggccgtagaccgcatcatgtctgttcccaaacactgcgggagcccctggtgtgtggctgcctagaaaactctgtaggaactcgagcagcagactccagcagtcactagctaccacacaggggccatactccaccttggctgccaagggtagaggcggccgtatggtaagtctcacagtccacacaaaatgttccttgcttctctgccccaagcatctccaatttccgggtaaggagctctacggtttgctgaacactcttgccctcggccacaggcatctgggacacacaagtcactcccatggcgtcgggccaggaaggtggcagaatcacacagtagaaacgcagggttccctgtccgcccacagaaactgcttcagttccccaacacaccttcgtctcagaagggatccaaggaattccggacc

SEQ ID NO: 348703 - DNA, 912 bp, Homo Sapiens
  misc_feature (176)..(176): n is a, c, g, or t
cagacaaagccacagctgagaccagatgaaggagactagagtccaagtcctacctggtttctggggtccagggacctgaaagtcagcacctgctcctcctgtggagtacccctggggacagagctcagcggccagctgctcatcactaacgaattcccagcccaccggcacctgcntgctgcttgcggatcttgttgaagagttccatgtactggaccatggtatctgctgggccgtagaccgcatcatgtctgttcccaaacactgcggggagcccctggtgtgtggctgcctagaaaactctgtaggaactcgagcagcagactccagcagtcactagctaccacacaggggccatactccacctccacagagatgccccgggcactgggccccattgtgaccgtgcccaccttcaccaggaagtcacagtactggtacctggtgccccgggtctcaatcttgctggccttagcactctggaaaaagcccttgagcttcaccataagcacatcaaagttggtgtcagcaataaggcaagggccattctcaaagagggcgaaacagctcaatgggtactctgagttgtgcatcacatacatcagcttcccggtctgaccttggctgccaagggtagaggcggccgtatggtaagtctcacagtccacacaaaatgttccttgcttctctgccccaagcatctccaatttccgggtaaggagctctacggtttgctgaacactcttgccctcggccacaggcatctgggacacacaagtcactcccatggcgtcgggccaggaaggtggcagaatcacacagtagaaacgcagggttccctgtccgcccacagaaactccttcagttccccaacacaaccttctgtctcagaagggactccggaaatacccc

SEQ ID NO: 348704 - DNA, 2079 bp, Homo Sapiens
ggaattcttgggatgtggcctcgacgggcaagcggcgataagaggtggcgtcctccgcggcattgcgagcaccgccagtctgcgccgccaggcgtaggcggggtggcccttgcgtctcccgcttccttgaaaaacccggcgggcgagcgaggctgcgggccggccgctgcccttccccacactccccgccgagaagcctcgctcggcgcccaacatggcgggtgggcgctgcggcccgcagctaacggcgctcctggccgcctggatcgcggctgtggcggcgacggcaggccccgaggaggccgcgctgccgccggagcagagccgggtccagcccatgaccgcctccaactggacgctggtgatggagggcgagtggatgctgaaattttacgccccatggtgtccatcctgccagcagactgattcagaatgggaggcttttgcaaagaatggtgaaatacttcagatcagtgtggggaaggtagatgtcattcaagaaccaggtttgagtggccgcttctttgtcaccactctcccagcattttttcatgcaaaggatgggatattccgccgttatcgtggcccaggaatcttcgaagacctgcagaattatatcttagagaagaaatggcaatcagtcgagcctctgactggctggaaatccccggcttctctaacgatgtctggaatggctggtctttttagcatctctggcaagatatggcatcttcacaactatttcacagtgactcttggaattcctgcttggtgttcttatgtctttttcgtcatagccaccttggtttttggcctttttatgggtctggtcttggtggtaatatcagaatgtttctatgtgccacttccaaggcatttatctgagcgttctgagcagaatcggagatcagaggaggctcatagagctgaacagttgcaggatgcggaggaggaaaaagatgattcaaatgaagaagaaaacaaagacagccttgtagatgatgaagaagagaaagaagatcttggcgatgaggatgaagcagaggaagaagaggaggaggacaacttggctgctggtgtggatgaggagagaagtgaggccaatgatcaggggcccccaggagaggacggtgtgacccgggaggaagtagagcctgaggaggctgaagaaggcatctctgagcaaccctgcccagctgacacagaggtggtggaagactccttgaggcagcgtaaaagtcagcatgctgacaagggactgtagatttaatgatgcgttttcaagaatacacaccaaaacaatatgtcagcttccctttggcctgcagtttgtaccaaatccttaatttttcctgaatgagcaagcttctcttaaaagatgctctctagtcatttggtctcatggcagtaagcctcatgtatactaaggagagtcttccaggtgtgacaatcaggatatagaaaaacaaacgtagtgttgggatctgtttggagactgggatgggaacaagttcatttacttaggggtcagagagtctcgaccagaggaggccattcccagtcctaatcagcaccttccagagacaaggctgcaggccctgtgaaatgaaagccaagcaggagccttggctcctgagcatccccaaagtgtaacgtagaagccttgcatccttttcttgtgtaaagtatttatttttgtcaaattgcaggaaacatcaggcaccacagtgcatgaaaaatctttcacagctagaaattgaaagggccttgggtatagagagcagctcagaagtcatcccagccctctgaatctcctgtgctatgttttatttcttacctttaatttttccagcatttccaccatgggcattcaggctctccacactcttcactattatctcttggtcagaggactccaataacagccaggtttacatgaactgtgtttgttcattctgacctaaggggtttagataatcagtaaccataacccctgaagctgtgactgccaaacatctcaaatgaaatgttgtggccatcagagactcaaaaggaagtaaggattttacaggccagttt

SEQ ID NO: 348705 - DNA, 885 bp, Homo Sapiens
agcggggggggcaagcggcgataagaggtggcgtcctccgcggcattgcgagcaccgccagtctgcgccgctaggcgtaggcggggtggcccttgcgtctcccacttccttgaaaaacccggcgggcgagcgaggctgcgggccggccgctgcccttccccacactccccgccgagaagcctcgctcggcgcccaacatggcgggtgggcgctgcggcccgcagctaacggcgctcctggccgcctggatcgcggctgtggcggcgacggcaggccccgaggaggccgcgctgccgccggagcagagccgggtccagcccatgaccgcctccaactggacgctggtgatggagggcgagtggatgctgaaattttacgccccatggtgtccatcctgccagcagactgattcagaatgggaggcttttgcaaagaatggtgaaatacttcagatcagtgtggggaagcgtagatgtcattcaagaaccaggaatcttcgaagacctgcagaattatatcttagagaagaaatggcaatcagtcgagcctctgactggctggaaatccccggcttctctaacgatgtctggaatggctggtctttttagcatctctggcaagatatggcatcttcacaactatttcacagtgactcttggaattcctgcttggtgttcttatgtctttttcgtcatagccaccttggttttttggcctttttatgggtctggtcttggtgggactatccagaatgtttctatgtgccacttccaaggcatttatctgaagcgttctgagcagaatccggagatcagagggaggtcatagaagttgaacacagtgcacggatgcggaggaggaacaagatggattcaagtgaaacaa

SEQ ID NO: 348706 - DNA, 1109 bp, Homo Sapiens
ttgttaaggaggggaggaagaaaaacataccggctaggtacgaggcccgggtggctgaaatcggcacgagggatttgtgcaggtggatgatggcagaaagattgtatttgtcccagggtgttccataccattaaccatagtaaaatcagatggaggttatacctatgatacatctgacctggctgctattaaacaaagactatttgaggaaaaagcagatatgattatctatgttgtggacaatggacaatctgtgcacttccagacaatatttgctgctgctcaaatgattggttggtatgaccctaaagtaactcgagtcttccatgctggatttggtgtggtgctaggggaagacaagaaaaagtttaaaacacgttcgggtgaaacagtgcgcctcatggatcttctgggagaaggactaaaacgatccatggacaagttgaaggaaaaagaaagagacaaggtcttaactgcagaggaattgaatgctgctcagacatccgttgcgtatggctgcatcaaatatgctgacctttcccataaccggttgaatgactacatcttctcctttgacaaaatgctagatgacagaggaaatacagctgcttacttgttgtatgccttcactagaatcaggtctattgcacgtctggccaatattgatgaagaaatgctccaaaaagctgctcgagaaaccaagattcttttggatcatgagaaggaatggaaactaggccggtgcattttacggttccctgagattctgcaaaagattttagatgacttatttctccacactctctgtgattatatatatgagctggcaactgctttcacagagttctatgatagctgctactgtgtggagaaagatagacagactggaaaaatattgaaggtgaacatgtggcgtatgctgctatgtgaagcagtagctgctgtcatggccaaggggtttgatatcctgggaataaaacctgtccaaaggatgtaatccttcataggtttgaacactgtgtgtttttaccaaagtggccattggcactgtttgcttttttacaatcatgtggacacaagcataagtaaagaaaatttgtcaacccaaa

SEQ ID NO: 348707 - DNA, 476 bp, Homo Sapiens
aagcttcgcacgaggcacattcattcagcaaattctggatgcctgccttgtgcagcctctagtacttgagtatgcagagctgaatgtaacagacatagttttcatctcttgtggagtttgcagaccagttgaagaaacaaccaagtaaacagatattactaaatggtgatgtactggcatgtaaatattagtggttcctaatggaatatagttcctctaatttaacttaaccatctttattatttaaaaaatgattatatattctctgattggtgttaggttaaatcatgtaggagactgggggaccagttttgggcatgctcatcgctcacctgcaagacaaatttccagattatctaacagtttcacctcctattggggggatcttcaggtcttttataagggattctaaggaaggaggttttgatactgagggagggaattttaaggaggcgagccttttcagtgtgttagtt

SEQ ID NO: 348708 - DNA, 1530 bp, Homo Sapiens
taggctaggtacgaggcgggtgttaatcggccgagggtgagacgctgatgggaggatggacatactggtgtctgagtgctccgcgcggctgctgcagcaggaagaagagattaaatctctgactgctgaaattgaccggttgaaaaactgtggctgtttaggagcttctccaaatttggagcagttacaagaagaaaatttaaaattaaagtatcgactgaatattcttcgaaagagtcttcaggcagaaaggaacaaaccaactaaaaatatgattaacattattagccgcctacaagaggtctttggtcatgcaattaaggctgcatatccagatttggaaaatcctcctctgctagtgacaccaagtcagcaggccaagtttggggactatcagtgtaatagtgctatgggtatttctcagatgctcaaaaccaaggaacagaaagttaatccaagagaaattgctgaaaacattaccaaacacctcccagacaatgaatgtattgaaaaagttgaaattgctggtcctggttttattaatgtccacttaagaaaggattttgtatcagaacaattgaccagtcttctagtgaatggagttcaactacctgctctgggagagaataaaaaggttatagttgacttttcctcccctaatatagctaaagagatgcatgtaggccacctgaggtcaactatcataggagagagtataagccgcctctttgaatttgcagggtatgacgtgctcaggttaaatcatgtaggagactgggggacccagtttggcatgctcatcgctcacctgcaagacaaatttccagattatctaacagtttcacctcctattggggatcttcaggtcttttataaggaatctaagaagaggtttgatactgaggaggaatttaagaagcgagcatatcagtgtgtagttctgctccagggtaaaaacccagatattacaaaagcttggaagcttatctgtgatgtctcccgccaagagttaaataaaatctatgatgcattggacgtctctttaatagagagaggggaatccttctatcaagataggatgaatgatattgtaaaggaatttgaagatagaggatttgtgcaggtggatgatggcagaaagattgtagttgtcccagggtgttccataccattaaccatagtaaaatcagatggaggttatacctatgatacatctgacctggctgctattaaacaaagactatttgaggaaaaagcagatatgattatctatgttgtggacaatggacaatctgtgcacttccagacaatattttgctgctgctcaaaatgatggttgggtatgaccccaaaagtaactccaagtctttccatgcctggattttggtgtggttgctagggggaaagaacaagaaaaaaagttaaaaacaccgtttcggggtggaaaacagtgccggcccccatgggaattcttcctgggggaggaaggggacttaaaaaccgaattcccttggggaccaaaattttgaa

SEQ ID NO: 348709 - DNA, 455 bp, Homo Sapiens
  misc_feature (16)..(16): n is a, c, g, or t
  misc_feature (34)..(34): n is a, c, g, or t
  misc_feature (60)..(60): n is a, c, g, or t
  misc_feature (75)..(75): n is a, c, g, or t
  misc_feature (92)..(92): n is a, c, g, or t
cttgaaaaggggaaangggaaaaaaccaagcccnggtgcaatttttaaggggtccccccntgaaaattccctgcnaaaaggaattttagganggacccttaatttcctcccacacactcccctgtgaattaataataataatgaagcctggccaacctgcctttccacagagttcctatgaatagcctgcctactgtgtggagaaaagatagacagactggaaaaatattgaaggtgaacatgtggcgtaatgcctgcctatgtgaaagcagtagctgctgtcatggcccaaggggtttgatatccctgggaataaaacctgtccaaaggatgtaatccttcataggtttgaacactgtgtgtttttaccaaagtggccattggcactgtttgcttttttacaatccatgtggacacaagcataagtaaagaaaatttgtcaaccagaaaaaaaa

SEQ ID NO: 348710 - DNA, 1086 bp, Homo Sapiens
  misc_feature (934)..(934): n is a, c, g, or t
  misc_feature (947)..(947): n is a, c, g, or t
  misc_feature (1009)..(1009): n is a, c, g, or t
  misc_feature (1031)..(1031): n is a, c, g, or t
  misc_feature (1052)..(1052): n is a, c, g, or t
agcggagaaggtgatctccgcccgtgctcagaatccaggggcccggggctgtaggtaggagttaagtgggtaggatcccttaaccaggttgtccggtgcaggtggtgtgtgttgtttcgcctaacgtgtcagtggcacaaatcacgcgaacttcataaacattgtgcgttcggaagcctttccaagatgcatttaatccctgcgtgagcccacgttaggcattcacgaaggcatgtgcactgttctctcggaagcggctggccggcttcccctcctcgcgcgcggctgtgggtgcaggtcctcacttcccagcctcccatgggcccaaggccttctgggctccaatttgaggcgagccaccccagatccgtaatttttctgcagtgatttatttttacctttctgagatccggaaaatgaggcccataggaaacaagtgacttgctgagtccagataacactgactgtcagagagaaacatgaaccagaagctactgaagttggagaacttgctacgatttcacactatttataggcaactgcacagtctgtgtcaaagaagagcattaagacagtggaggcatgggttttcatctgcttaccctgtgtggacagctcaactgtgtgcctggccctggccaacagatgtgctcaatggggctgctttatctcagtataggcttctagtaacaaaaaaggaagaaggaccatggaaatctcagttatcttcaacaaaatctaaaaaggtggtagaagtatggattggaatgactattgaggaactggccagggcaatggaaaaaaacacagattatgtatatgaagctttattgaacactgatattgacatagattcactggaagcagaatcacatttagatgaagtctggatcaaagaagtgataacgaaggcagggatgaagttaaagtggantaaattaaaacangacaaagtcagaaaaaataaagatgctgtaagaagtctctctgccttctggggaaaagatancttttccttgatactccaggancatgctgcctttctcagcaangacagccagaggtgctcaggtcactgacattgtc

SEQ ID NO: 348711 - DNA, 1139 bp, Homo Sapiens
  misc_feature (46)..(82): n is a, c, g, or t
tgatgttgactatatagggaccgggagtttacgcggtggcggccgnnnnnnnnnnnnnnnnnnnnnnnnnnnnnnnnnnnnnatcaggccaaatcggccgagctcgaattcgtcgagagcggagtcgcgccgccagcgggctgagggtaggaagtagccgctccgagtggaggcgactgggggctgaagagcgcgccgccctactcgtcacactttccaggtgtgtgatcctgtaaaattaaatcttccaagatgatctggtatatattaattataggaattctgcattccccagtctttggctcatccaggcttttttacttcaattggtcagatgactgatttgatccatactgagaaagatctggtgacttctctgaaagattatattaaggcagaagaggacaagttagaacaaataaaaaaatgggcagagaagttagatcggctaactagtacagcgacaaaagatccagaaggatttgttgggcatccagtaaatgcattcaaattaatgaaacgtctgaatactgagtggagtgagttggagaatctggtccttaaggatatgtcagatggctttatctctaacctaaccattcagagacagtacttttcctaatgatgaagatcaggttggggcagccaaagctctgttacgtctccaggatacctacaatttggatacagataccatctcaaagggtaatcttccaggagtgaaacacaaatcttttctaacggctgaggactgctttgagttgggcaaagtggcctatacagaagcagattattaccatacggaactgtggatggaacaagccctaaggcaactggatgaaggcgagatttctaccatagataaagtctctgttctagattatttgagctatgcggtatatcagcagggagacctggataaggcacttttgctcacaaagaagcttcttgaactagatcctgaacatcagagagctaatggtaacttaaaatattttgagtatataatggctaaagaaaaagatgtcaataagtctgcttcagatgaccaatctgatcagaaaactacaccaaagaaaaaaggggttgctgtggattacctgccagagagacagaagtacgaaatgctgtgccgtggg

SEQ ID NO: 348712 - DNA, 1509 bp, Homo Sapiens
  misc_feature (932)..(953): n is a, c, g, or t
ccacaggattccgtcgacggaagcactctgacattttgcaggatttggagttttcttctgggtccccaggtaaagagacgaatgagagtcttggagatcagacctgttgatagatgaaaactgtttgctttctcctctggcgggagaagacgattcattccttttggaaggaaactcgaatgaggactgcaagcctctcattttaccggacactaaaaccaaaattaaggataatggagatctggttttgtcaagccccttagtaatgtaacactgccccaagtgaaaacagaaaaagaagatttcatcgaactctgcacccctggggtaattaagcaagagaaactgggcacagtttactgtcaggcaagctttcctggagcaaatataattggtaataaaatgtctgccatttctgttcatggtgtgagtacctctggaggacagatgtaccactatgacatgaatacagcatccctttctcaacagcaggatcagaagcctatttttaatgtcattccaccaattcccgttggttccgaaaattggaataggtgccaaagatctggagatgacaacttgacttctctggggactctgaacttccctgggtcgaacagttttttctaatggctattcaagccccagcatgagaccagatgtaagctctcctccatccagctcctcaacagcaacaacaggaccacctcccaaactctgcctgggtgtgctctgatgaagcttcaggatgtcattatggagtcctaacttgtggaagctgtaaagttttcctcaaaagagcagtggaaggacagcacaattacctaagtgctggaaggaatgattgcatcatcgataaaattcgaagaaaaaactgcccagcatgccgctatcgaaaatgtcctcaggctggaatgaacctggaagctcgnnnnnnnnnnnnnnnnnnnnnnggaattcagcaggccactacaggagtctcacaagaaacctctgaaaatcctggtaacaaaacaatagttcctgcaacgttaccacaactcacccctaccctggtgtcactgttggaggttattgaacctgaagtgttatatgcaggatatgatagctctgttccagactcaacttggaggatcatgactacgctcaacatgttaggaaggcggcaagtgattgcagcagtgaaatgggcaaaggcaataccaggttttcaagaacttacaccctggattgaccaaatgacccctactgcagtactccttggatgtttcctatgggcattttgctctgggggtggagatcctttaggacattccaggtgcaaaacctgcttgtgtttttgcttcccggaatctggaatatttaatggaaccaaaagaatggactccttccccctggcatggtacccaacccaattggtaaaaccccatgggccgggaagggttttccccccccgagagttatcaccaggggcctcttccggggttaatcctttttatgtgaaagaag

SEQ ID NO: 348713 - DNA, 1424 bp, Homo Sapiens
gggggcctcccgaagaaaagggagccgcgcagcgcctacgggagtccggcggcagcagccggtaccggcaaccacgggcagctctcagggaatctccgtcgtgaggccagaggctccagtccccgcgagtccagatgcctgtccagcctccaagcaaagacacagaagagatggaagcagagggtgattctgctgctgagatgaatggggaggaggaagagagtgaggaggagcggagcggcagccagacagagtcagaagaggagagctccgagatggatgatgaggactatgagcgacgccgcagcgagtgtgtcagtgagatgctggacctagagaagcagttctcggagctaaaggagaagttgttcagggaacgactgagtcagctgcggttgcggctggaggaagtgggggctgagagagcccctgaatacacggagccccttggggggctgcagcggagcctcaagattcgcattcaggtggcagggatctacaagggcttctgtctggatgtgatcaggaataagtacgaatgtgagctgcagggagccaaacagcacctggagagtgagaagctgctgctctatgacacgctgcagggggagctgcaggagcggatccagaggctggaggaggaccgccagagcctggacctcagctctgaatggtgggacgacaaactgcacgccagaggcagctccaggtcttgggactccctgccgcccagcaagaggaagaaggcacctctggtttctggcccatacatcgtgtacatgcttcaagagatcgacatcctggaggactggacagccatcaaaaaggctagggcagctgtgtcccctcagaagagaaaatcggatggaccttgaccctgctgttcacagccagggggaccctcagagcagctggcactgcacccaggattctcgtcttcctcctgcaaacaggcggacccacaggcccctcagggtctgcccagccaggctcctgtggtgctgctgggccctcccactccatctggcactggcctggactcctcctctgccctcctcgaggcctgcacagctgtggccgtggagctgacctgaccaggcaaggctgctgtctccatccctgagccgcctgccacctcccactcctgaagatccatctcttggggctcccctgacagagaagacagccgaagtcaaagccacatcctcttgctgatgttggatgcaggctgtccggcctcagggccagggagccagtttccactgtgcgggaactctgagtcagacgtgattatctgggggtctgtccaccctggctggatctggaggcaaaatgccaggccccccaggtgttctcagggcagtttttggtgtctgcttctcagattccaaggactggaattaaaacctttcctgggactttgg

SEQ ID NO: 348714 - DNA, 878 bp, Homo Sapiens
  misc_feature (513)..(670): n is a, c, g, or t
agcgtgggatgggaagagggtatagaaccacccacagacctgccacctgaatgcgaatcttgaggctccgctgcagccccccaaggggctccgtgtattcaggggctctctcagcccccacttcctccagccgcaaccgcagctgactcagtcgttccctgaacaacctgcgtggtaaaaaggcagccgtgcacccatttgctcacccatcgctcttgggcaaacacatacccagcacccattccacagcaaagcccggtgttaggcgcgcacttcctgggcaccaaccacgcctgcccagtaccaggcccaccacctcctcatcccagatcctagcagacccagcccaaggtgtccccacgctcacttctcctttagctccgagaactgcttctctaggtccagtatctcactgacacactcgctgcggcgtcgctcatagtcctcatcatccatctctgggacaagaggccagtaagggctagctctggggaggagtggtgggtacccgcnnnnnnnnnnnnnnnnnnnnnnnnnnnnnnnnnnnnnnnnnnnnnnnnnnnnnnnnnnnnnnnnnnnnnnnnnnnnnnnnnnnnnnnnnnnnnnnnnnnnnnnnnnnnnnnnnnnnnnnnnnnnnnnnnnnnnnnnnnnnnnnnnnnnnnnnnnnnnnacggggctgtgtgaccgatgtaacttgtgtgaaggggccatgtatagtgtgcctaacatgcatggtgtgtaggaggctggggagtgcctagcatgatataaaaaggagcgggttaacgatgattgcgacagggtgcaccaacagagacaatatgcaacctacagaaaacccaagaagtgcccaatcaacgaaacaagaaatcaagacg

SEQ ID NO: 348715 - DNA, 655 bp, Homo Sapiens
tggagtggccattagagtactgaggaaggacagctgttggaaactgtactttaaccagtgcaatttaagctttttttgcttttgttctttagtaataaaatacttccggagggataaaattttcttgcaatggtgtctcatacaaaacacgagtctaaaagggtaagaaaagacggttctaaagcaacaccattagcgtcgtccccactctaggctggtttccacccagagatgtggatgtgggtgtgttcacacgtgggcgtctgggtgagagatgtctgtcaagtccatatgctccatgccacactggacgtatgggaaaaaggttaacagtcaaatattcagttcctgaaatggaatacattgttacttggtcagtgtaatttaaatacaaactccgagccttgagtagtagtattttagaaaacagtagttgtactgattataaacctgcatagaaagaaagactattgagatacagtcagaaaagccatctcataaggcacacaagaaaatagacagtaaatgtgaatgtgttaactcctattccaatgtacagcagaagttcatgaacatgcataaataataacgaaggaatcacttaacactttcaaagctataaatggtttacaaagtggtaaggattattttggaa

SEQ ID NO: 348716 - DNA, 1018 bp, Homo Sapiens
cgtgtgttcaaaggtgggagtatgggtaagaaatgtctgtcaagtccatatgctccatgccacactgaaaggatgggaaaaaggtaacaagtcaaatattcagttcctaaaatgaaatacattgtagaaaacagtagttgtactgattataaacctgcatagaaagaaagactattgagatacagtcagaaaagccatctcataaggcacacaagaaaatagacagtaaatgtgaatgtgttaactcctattccaatgtacagcagaagttcatgaacatgcataaataataacgaaggaatcacttaacactttcaaagctataaatggtttacaaagtggtaaggattattttggaacttcagtgttgggagactgtcttgtttggattaggtgtggccttatgaagaaatgtgcctgtaagtagttcagtaaagtaagtacatttttaaagaaaaatcctttctgaataagagcctaatgtctatactgaagagaggagacagcatgtcatcctcctttttttggcctctctcaaaagttactgcccaaactgccatgagaacagaacctccagtttgcagcctgtggtgcgcaggtctctcctgcactgatcatacgtatgtgtcagtcaggaaatctggctgatgacttgtcacaaacagcagatgaggaaaacgtcaaaaggaacgtaatttggggggcacgacgacgggggggaacaaaatgtacatagaaattgtaggtagctgcctcaatatcatttaaaatataaaatagcaatttttaaacccttgagttttttaggaaaaggagtatttaaaaatctacaatgaaagatatacaggactttgaattttgctcatggcacaagcccagtaagtggatgaacttgctatcatccattagttgtcttcctgaaagaataaggccttgttcaaaatccaagctgagggtggcactaattccaattagaatggcaagagtcatgccaaggaccggcaccctaagagtgttt

SEQ ID NO: 348717 - DNA, 617 bp, Homo Sapiens
  misc_feature (517)..(517): n is a, c, g, or t
  misc_feature (558)..(558): n is a, c, g, or t
  misc_feature (597)..(597): n is a, c, g, or t
  misc_feature (607)..(607): n is a, c, g, or t
aaacgaagttgtaaacacagactccagcctgctccactgtaaggcccacacgtctaccagcccgtgccaagtcctcatgcctcccactctcttccatcctgttctgtgttttcctttttgtgagacgggcatttcaggcaaacataggcctatgacatcttagttaaacaggaacattgcagtgccagacatgtatgaataagtgtcacatgtgcccttaaacagattgtaggcaaaacaaaacaatgctcagaatgaaactgacactaattgatttttgtttgcttggacaagaagaaatcatggtctgttctgggtagttttccaagtgcattaaagtaattagaaataccggtaactgttaaatttcaagttgtccaaaaaattaaagtatatcgatgaagataactgacaaatctaagtaaattccatcttaattattccccttctgtctgcactccccaactcactggtatagaaagaccttataatacagaatgttgggtcaaactaggcnactattttagtgtgatgttttgttatatactaccaaccaanccccaactcccaacctaactcagcccctgaaaatggtcncttgtatcantgtaaacagg

SEQ ID NO: 348718 - DNA, 605 bp, Homo Sapiens
  misc_feature (28)..(28): n is a, c, g, or t
  misc_feature (30)..(30): n is a, c, g, or t
  misc_feature (54)..(54): n is a, c, g, or t
  misc_feature (59)..(59): n is a, c, g, or t
ttagaggagtatgacgtcgcatgcacgngnagtaagcttgatcttgtagagcgnccggntatactatatgctggagaagacgacagattggtcggcaggaaggactttgctctctgctgctgggcggggaggggtacgctatctgccgggactccctaaccctttagaaggagcaagtgcgtccaaatggtttgaaagtggacctttattgttttccaggagtagaagatagaacagttgaccagttttgtttgtaaaacttctttccttgcctcggacctgtgctataaagtgaccagggcgtagtgagtacagttagtaccgcacacgttagcacgctcgaccttaacgatctttttatagagacaataaacctgcagcgtttcatgccacgtctttgtacgcatcggatgtctctccgtgttgttactaggtgaaatcctcttggcgtgcgcaaattaggttaaaaaaatagctgtcaaacctgagacaggagttggaggagtagagggtggcgcttgttatgtgaaacatttaaccaggaatggtattgtgtgccatcctgtattaaacaatgtatagacagagtggaacaacagcatagc

SEQ ID NO: 348719 - DNA, 855 bp, Homo Sapiens
  misc_feature (183)..(183): n is a, c, g, or t
ggggtgtaagggagctacagctgactctagcccaaaaggaacaggagattctggagctgagggagacccagcaaaggaacaacctggaagccttaccccacagccacaaaacctccccaatggaggaacaatctctaaaacttgattctttagagcccaggctgcagcgggagctggagcggnctacaggcagccctgagacagacagaagccagggagattgagtggagggagaaggcccaggacttggcactctccctagcgcagaccaaggccagtgtcagcagtctgcaggaggtagccatgttcctacaagcctctgtcctggagcgggactcagaacagcaaaggctgcaggatgaactggagctcaccagacgggctctggagaaggagcggctacacagcccaggtgcaaccagcacagcagaactggggtccagaggggagcagggtgtgcagctgggagaggtctcaggagtggaggctgagcctagtcctgatggaatggagaagcagccaggagcacacagacagaagactgtgtcatgggtcatggcccctccgcacacctacaggtttgccaaaggaaaagcctggctctgttaggcacccaggagccccaggtcggcgggtgttcccaggaagaggaagtaaatctgcaaccctggggaggaccccaactcacctgggaatgaggcaaattgcatttgcttgctccctatggaatcacccagaggggtgccttgccctggctgagggacatgtactgcctctcatctagaatttattttcctagcacttcaccacctccttcatcttctccttcaacaataaaccctgagatctttgcaa

SEQ ID NO: 348720 - DNA, 915 bp, Homo Sapiens
ctgagtcctagtcctgatggaatggaagaagcagtcatggagtacaaaggcttgaacacctgcagcaagcagtggcccggctggagattgacaggagcaggctgcagcgccacaatgtccagctgcggagtaccttggagcaggtggagcgagaacggaggaagctgaagagggaggccatgcgtgcggcccaggcagggtccctagagatcagcaaggccacggcttcttcacccacacagcaggatgggagaggacagaagaactcagatgccaagtgtgtggctgaactgcagaaagaggttgtcctgctgcaagctcagctgactttggagcggaagcagaagcaggactacatcacccgctcagcacagaccagccgtgagctagcaggccttgcaccacagcctctcacactcacttcttgccgtggcccaggcccctgaggccactgtcctggaggcagagacccgcaggctggatgagtccctgactcaaagtctgacatccccagggccagtcctgctacaccccagccccagcactacccaagccgcctccaggtagcagccacagccaggagcacacagacagaagactgtgtcatgggtcatggcccctccgcacacctacaggtttgccaaaggaaaagcctggctctgttaggcacccaggagccccaggtcggcgggtgttcccaggaagaggaagtaaatctgcaaccctggggaggaccccaactcacctgggaatgaggcaaattgcatttgcttgctccctatggaatcacccagaggggtgccttgccctggctgagggacatgtactgcctctcatctagaatttattttcctagcacttcaccacctccttcatcttctccttcaacaataaaccctgagatctttgccttcc

SEQ ID NO: 348721 - DNA, 605 bp, Homo Sapiens
  misc_feature (19)..(19): n is a, c, g, or t
gataggttgaatagagagntgttttagaaaattcttctaagtatgtggttgaaattgattgcaaataatacaacagtggaacggaggtttagctcatggattggcggctccattctagcctctttgggtacctttcaacagatgtggatttccaagcaagaatatgaagaaggagggaagcagtgtgtagaaagaaaatgcccttgagaaagagttcccaagcttctaccttccttttgtcaccttacgtttcatagctttagtatactcaggaaaagaatgaccatcttttgtagaatgtttatacatttttgcatatttcaatttccacttaaattttttaaagctttaactggctctataaattaagtttgtgctttccttgaaatgcacttattcttattacaagcattttataattttgtataaatgtctattttctctaaatattttgctttcagtaaaatgctttccaactctgtttagtgtattaattaccagtggattggtagaactgctttttattgactagtaaaagttactgcctatgctttttaccttaggcttacagaattaaataaaaattagccattccagaaatataa

SEQ ID NO: 348722 - DNA, 1368 bp, Homo Sapiens
gacgacagaaggggggtgtggacggagaaagtgaaaggtgaggcacggccctgcagaattttccagcggatcccccggtggcctcatgtcgcgcaatggaaccgatcctcagcaacgccagcaggcgtcagaggcggacgccgcagcagcaaccttccgggcaaacgaccatcagcatatccgctacaacccgctgcaggatgagtgggtgctggtgtcagctcaccgcatgaagcggccctggcagggtcaagtggagccccagcttctgaagacagtgccccgccatgaccctctcaaccctctgtgtcctggggccatccgagccaacggagaggtgaatccccagtacgatagcaccttcctgtttgacaacgacttcccagctctgcagcctgatgcccccagtccaggacccagtgatcatccccttttccaagcaaagtctgctcgaggagtctgtaaggtcatgtgcttccacccctggtcggatgtaacgctgccactcatgtcggtccctgagatccgggctgttgttgatgcatgggcctcagtcacagaggagctgggtgcccagtacccttgggtgcagatctttgaaaacaaaggtgccatgatgggctgttctaacccccaaccccactgccagggtatgggccagcagtttcctgccagatattgcccagcgtgaggagcgatctcagcaggcctataagagtcagcatggagagcccctgctaatggagtacagccgccaggagctactcaggaacgcaacgtctggtcctaaccagtgagccactggttagtactggtccccttctgggcaacatggccctaccagacactgctgctgccccgtcggcatgtgcggcggctacctgagctgacccctgctgagcgtgatgatctagcctccatcatgaagaagctcttgaccaagtatgacaacctctttgagacgtcctttccctactccatgggctggcatggggctcccacaggatcagaggctggggccaactggaaccattggcagctgcacgctcattactaccctccgctcctgcgctctgccactgtccggaaattcatggttggctacgaaatgcttgctcaggctcagagggacctcacccctgagcaggctgcagagagactaagggcacttcctgaggttcattaccacctggggcagaaggacagggagacagcaaccatcgcctgaccacgccgaccacagggccttgaatccttttttgttttcaacagtcttgctgaattaagcagaaagggccttgaatcctggcctggaatttgggcagatatagcattaataaaactgtgcatctcaaacttttatcacat

SEQ ID NO: 348723 - DNA, 876 bp, Homo Sapiens
caggggataagaaagttagggacctcctttgggacacagggcttggctctgtcccaccttcctgagtagcttccttgcggctggacctccaattagcatgggcctcttccatgctgactcttataggcctgcttgagatcgctcctcacgcctgggcatatatctggcaggaaactgcttggccccatacctggcactggggctgggggttagaacagcccatcatggcacctttgttttcaaagatctgcacccaagggtactgggcacccagctcctctgtgactgaggcccatgcatctacaacagcccggatctcagggaccgacatgagtggcagcgttacatccgaccacggggtggaagcacatgaccttacagactcctcgagcagactttgcttggaaaaggggatgatcactgggtcctgaggtaaaggagtatcactctctgcagcagaagtccctcaagaggtctagccaccctcctccccagcagcagttggagccaggttacctggactgggggcatcaggctgcagagctgggaagtcgttgtcaaacaggaaggtgctatcgtactggggattcacctctccgttggctcggatggccccaggacacagagggttgagagggtcatggcggggcactgtcttcagaagctggggctccacttgaccctgccagggccgcttcatgcggtgagctgacaccagcacccactcatcctgcagcgggttgtagcggatatgctgatggtaggcctgcagactgtacgccttgtcggtctggctcgggatgagcgttccaaccttcggaggggacgaaagcttcctaaggaaggggagggctcggctccgcgccccagcgagtc

SEQ ID NO: 348724 - DNA, 861 bp, Homo Sapiens; identical to SEQ ID NO: 75071

SEQ ID NO: 348725 - DNA, 539 bp, Homo Sapiens
  misc_feature (274)..(306): n is a, c, g, or t
atcccccgggctgcaggctcgtgccggttcatcctttctgtcagcatggatcaagcccctaaaatgtggtaagtgttgtcagagcagggcaatatctctactctcaagtatgaggggaatagaaacaaagcagcagttttagccagggttcaatgatagagtggaggtaaattaagagcctccaggctgtgattcaccatttgagacattatacataatttgtttttgttataagccatttgaatttttaaaaaatttcatacatgcaatggannnnnnnnnnnnnnnnnnnnnnnnnnnnnnnnngctaaagtataaagagtaataataatgacaataaacaaacccctgtgtgcctaccacccaccttattgcctttcctttgaggtaccgtgtgcggtttcctgaacctatctctatccctgtctgatagagggaacccctgtactgaactttgtgttgaccatagccttcttgtctttcatcactttatctccatgtatgtatccttaaagaataataaatggaattaaactgaa

SEQ ID NO: 348726 - DNA, 1141 bp, Homo Sapiens
  misc_feature (440)..(449): n is a, c, g, or t
  misc_feature (763)..(763): n is a, c, g, or t
tctgatcacttgattgttacaacagggatttctggaaacatctgtaggacaatatgtggaggtaagagtttccattactaaaacaagtctagaatatctaactttttcacccaggtgttattacaaagcatgggaactgtgatgtttgtaactgattctgcagcaaaaatcttcaacaccctttgtcaaccagcgctgctttttttccttctgattcaaagattctaacaacttggcagacatatttcaaaggtgcaatccaggcagcttaaagagaagtgggtttacgcaattccggcatctactataacctagggcagatccaacattttctctctgacggtgctacccacttatctttcagtcattaagaaagtacacctgtaacaggtgacggtatttccaggtgagtgaggcaactgcaggcaaatagaataagnnnnnnnnnntccaccacctgatttggtttaaagcaatcatgcaattctcattatagccacatctttcaaaaacaccttttccgtggccaagcaaagttactgataatgcgtgtggcttttgtcacagtgatgcattaggtaagcatgtgtgtgctgagtaccaggggtgcttcaaaatgcatctccgtcatcttccactcttcttctctaaggttctgcctttgatgccaaccgtggtttcaggcctaaaaatgaaaagactgtgttgctttccttggattcaaaaaaactgtcataatctccacagtatcggtcgccattanatatctgaggtggcagggggttgccctgagtgggtttcttttccggggggacgtttttgtacatccattgcctctgttcttctgacattgtggtatccacctcctcaaactctatcttgttggcttccagaaatctaaccacatcttgctgcttcttctttatcgccacgaagcccgaggaagaggcgatgaacacgcggatgaccatcctctcgctgcgcccgggacagaccccttgccccccgggctccgggctggcgtggacgcagagctgaacccagctacgagccgccggcagcctctgggtaaagcgctgccgtcggggaagatcgctgggatctggctccctcccggcgggtccgcagataaaagcccgct

SEQ ID NO: 348727 - DNA, 2143 bp, Homo Sapiens
  misc_feature (1297)..(1297): n is a, c, g, or t
  misc_feature (1920)..(2070): n is a, c, g, or t
  misc_feature (2073)..(2073): n is a, c, g, or t
  misc_feature (2085)..(2098): n is a, c, g, or t
gggggcacttcacgtgacgccggtgccgggcgaacatggcggcggccaccggaccctcgttttggctggggaatgaaaccctgaaggtgccgctggcgctctttgccttgaaccggcagcgcctgtgtgagcggctgcggaagaaccctgctgtgcaggccggctccatcgtggtcctgcagggcggggaggagactcagcgctactgcaccgacaccggggtcctcttccgccaggagtccttctttcactgggcgttcggtgtcactgagccaggctgctatggtgtcatcgatgttgacactgggaagtcgaccctgtttgtgcccaggcttcctgccagccatgccacctggatgggaaagatccattccaaggagcacttcaaggagaagtatgccgtggacgacgtccagtacgtagatgagattgccagcgtcctgacgtcacagaagccctctgtcctcctcactttgcgtggcgtcaacacggacagcggcagtgtctgcagggaggcctcctttgacggcatcagcaagttcgaagtcaacaataccattcttcacccagagatcgttgagtgccgagtgtttaagacggatatggagctggaggttctgcgctataccaataaaatctccagcgaggcccaccgtgaggtaatgaaggctgtaaaagtgggaatgaaagaatatgagttggaaagcctcttcgagcactactgctactcccggggcggcatgcgccacagctcctacacctgcatctgcggcagtggtgagaactcagccgtgctacactacggacacgccggagctcccaacgaccgaacgatccagaatggggatatgtgcctgttcgacatgggcggtgagtattactgcttcgcttccgacatcacctgcctcctttcccgccaacgggcaagttcactgcagaccaaaaggccgtctatgaggcagtgctgcggaactcccgtgccgtcatgggtgccatgaagccaggtgtctggtggcctgacatgcaaccgcctggctgaccgcatccacctggaggagctggcccacatgggcatcctgagcggcagcgtggacgccatggtccaggctcacctgggggccgtgtttatgcctcacgggcttggccacttcctgggcattgacgtgcacgacgtgggaggctacccagagggcgtggagcgcatcgacgagcccggcctgcggagcctgcgcactgcacggcacctgcaggccaggcatggtgctcaccgtggagccggggcatctacttcatcganccacctcctggaatgaggcccgggcggacccggcccgcgcctccttccttaaccgcgaggttcctgcagcgctttcgcggttttggcggggtccgcatcgaggaggacgtcgtggtgactgacagcggcatagagctgctgacctgcgtgccccgcactgtggaagagattgaagcatgcatggcaggctgtgacaaggcctttacccccttctctggccccaagtagagccagccagaaatcccagcgcacctgggggcctggccttgcaacctcttttcgtgatgggcagcctgctggtcagcactccagtagcgagagacggcacccagaatcagatcccagcttcggcatttgatcagaccaaacagtgctgtttcccggggaggaaacacttttttaattacccttttgcaggctcccacctttaatctgttttataccttgcttattaaatgagcgacttaaaatgattgaaaataatgctgttctttagtagcaactaaaatgtgtcttgctgtcatttatattccttttcccaggaaagaagcatttctgatactttctgtcaaaaatcaatatgcagaatggcatttgcaataaaaggtttcctaaaatggtcnnnnnnnnnnnnnnnnnnnnnnnnnnnnnnnnnnnnnnnnnnnnnnnnnnnnnnnnnnnnnnnnnnnnnnnnnnnnnnnnnnnnnnnnnnnnnnnnnnnnnnnnnnnnnnnnnnnnnnnnnnnnnnnnnnnnnnnnnnnnnnnnnnnnnnnaanaaaatgtggggnnnnnnnnnnnnnnaaaaaattttttaaacaactttttggggggcccggccccccaaag

SEQ ID NO: 348728 - DNA, 1024 bp, Homo Sapiens
  misc_feature (935)..(935): n is a, c, g, or t
  misc_feature (958)..(958): n is a, c, g, or t
cggtccggaattcccgggatcggtgccgggcgaaatggcggcggccaccggaccctcgttttggctggggaatgaaaccctgaaggtgccgctggcgctctttgccttgaaccggcagcgcctgtgtgagcggctgcggaagaaccctgctgtgcaggccggctccatcgtggtcctgcagggcggggaggagactcagcgctactgcaccgacaccggggtcctcttccgccaggagtccttctttcactgggcgttcggtgtcactgagccaggctgctatggtgtcatcgatgttgacactgggaagtcgaccctgtttgtgcccaggcttcctgccagccatgccacctggatgggaaagatccattccaaggagcacttcaaggagaagtatgccgtggacgacgtccagtacgtagatgagattgccagcgtcctgacgtcacagaagccctctgtcctcctcactttgcgtggcgtcaacacggacagcggcagtgtctgcagggaggcctcctttgacggcatcagcaagttcgaagtcaacaataccattcttcacccagagatcgttgagtgccgagtgtttaagacggatatggagctggaggttctgcgctataccaataaaatctccagcgaggcccaccgtgaggtaatgaaggctgtaaaagtgggaatgaaagaatatgagttggaaagcctcttcgagcactactgctactcccggggcggcatgcgccacagctcctacacctgcatctgcggcagtggtgagaactcagccgtgctacactacggacacgccgggagctcccaacgaccgaacgatccagaaatgggggatatgtgccctgtttcgacatgggccgggtgaagtattactggcttcgctttcggacatcacctggctccctttccccgccgaacgncaaagtttcactgtcagaaccanaaagggcccgttctaattaagggcaattggcttgccggagcctcccgcgtgcccggccatgggagg

SEQ ID NO: 348729 - DNA, 866 bp, Homo Sapiens
  misc_feature (748)..(748): n is a, c, g, or t
  misc_feature (791)..(791): n is a, c, g, or t
  misc_feature (855)..(855): n is a, c, g, or t
aaaaaaagtaggctaggacgaggccgggtggtaagtcggcacgaggggcggcggccaccggaccctcgttttggctggggaatgaaaccctgaaggtgccgctggcgctctttgccttgaaccggcagcgcctgtgtgagcggctgcggaagaaccctgctgtgcaggccggctccatcgtggtcctgcagggcggggaggagactcagcgctactgcaccgacaccggggtcctcttccgccaggagtccttctttcactgggcgttcggtgtcactgagccaggctgctatggtgtcatcgatgttgacactgggaagtcgaccctgtttgtgcccaggcttcctgccagccatgccacctggatgggaaagatccattccaaggagcacttcaaggagaagtatgccgtggacgacgtccagtacgtagatgagattgccagcgtcctgacgtcacagaagccctctgtcctcctcactttgcgtggcgtcaacacggacagcggcagtgtctgcagggaggcctcctttgacggcatcagcaagttcgaagtcaacaataccattcttcacccagagatcgttgagtgccgagtgtttaagacggatatggagctgggaggttctgcgctataccaataaaatctccagcgaggcccaccgtgaggtaatggaaggctgtaaaagtggggaatggaaagaatatggagttgggaaagcctctttcgagcactactgcttactcnccgggggcggcatgcgccacagcttcctacacctggcatcttncgggcagttggttgaggaacttcagccgtgcttacatttacgggacacggccggagttttcccnacggacccgaa

SEQ ID NO: 348730 - DNA, 416 bp, Homo Sapiens
cccagcccagaaaaaccccaacgctaccccgggggccccggccctgccaaccctccttttccgtgaatggggcagacctgacgggtacagcaactccccagtagcgagaagacggcaccccagaatccagatccccagcttcggcatttgaatcagacccaaacagtgcctgtttccccggggaggaaacacttttttaattacccttttgcaggctcccacctttaaactgttttataccttgcttattaaatgagcgacttaaaatgattgaaaataatgctgttctttagtagcaactaaaatgtgtcttgctgtcatttatattccttttcccaggaaagaagcatttctgatactttctgtcaaaaatcaatatgcagaatggcatttgcaataaaaggtttcctaaaatg

SEQ ID NO: 348731 - DNA, 506 bp, Homo Sapiens
  misc_feature (38)..(38): n is a, c, g, or t
accctgcggcccccgcaactgtggaaaaaaaatgaaancatgccatggcaggctgtgaaaaaggccctttaaccccccttcctctggccccccaagtagagcccagcccagaaaatccccagcgcaccctggggcccctggccttgccaacctcttttccgtgatgggcagccctgctggtcagcactcccagtagcgagagacggcacccagaatccagatccccagcttcggcatttgatcagaccaaacagtgctgtttcccggggaggaaacacttttttaattaccccttttgcaggctcccacctttaatctgttttataccttgcttattaaatgagcgacttaaaatgattgaaaataatgctgttctttagtagcaactaaaatgtgtcttgctgtcatttatattccttttcccaggaaagaagcatttctgatactttctgtcaaaaatcaatatgcagaatggcatttgcaataaaaggtttcctaaaatggtc

SEQ ID NO: 348732 - DNA, 880 bp, Homo Sapiens
ttaaaataactttcagtgtagaaaaatcatacgaaagtcttttccagggaactgtccggcagagattactggggcaaaaggtaaaaagagttctgtggttgaaaaatgccaggtgacacgagctttgagagggccagcctcctctgagcctccaggcagagtgggtgatgcctgtctgaccaggcccagctcaggggcctgcttccatctggtgttgagtgttcctctggggactgaaggttgcctttgaagtaattcacacacatctcccattttcaggctctggcatcctgctgtttatcttccatgcaaactttttgggtaaagaagttattgctcggctctgtggaccgggtagtgtacaagctgtagttctgaatgataaatttcagcttcctgtttttctggtaagatactctgtatttcactactgaaaagtacattcttctaatcaaaagcacagatgacttaattttaaattcctgtgtcttaataaaatataagcattcagaaaacgatccagtaatagtggttgggaatgaggcaatacccataaagtaaaattatcctaagttttgtcagtaggaatttttcctgcttattttttgccttaaattgtgctcaccatactgtcttagggccagcattgttctgaatataaatacttaatgatctcaaagattctttgtacataattactttgccactgttagaattatttccttggactgaattaagcaaaatttgctagatatagacattttaacacttgtactgtatattgctgggggcattctaatccagtttcccagattgattctgtcattgtatatttttaataaatcaagggaaaaataaaatccgcaggaattccggaccg

SEQ ID NO: 348733 - DNA, 985 bp, Homo Sapiens
  misc_feature (114)..(160): n is a, c, g, or t
  misc_feature (633)..(937): n is a, c, g, or t
ccatgcaaactttttgggtaaagaagttattgctcggctctgtggaccgtgtagtgtacaagctgtagttctgaatgataaatttcagcttcctgtttttctgacagggtctcnnnnnnnnnnnnnnnnnnnnnnnnnnnnnnnnnnnnnnnnnnnnnnnggagtcttgacttcccaggcacaagcaatcctcccacctcagcctcctaactacctgggactaaaaatgacagtcattttgtttactcattcagccctgttgcaggtcccaataaactcttcataaggttgacagaagcaccctctgccaaggttaagttgctaataggtgcatacagagtgcagctgcagtgaccaaacagaagggactgggcggagttctcttcagaccgattcctatactctctttgacagcagtttggaattcttctagcacatctatgtaaagttttgtctgtaaacctcttgcagttaagcctgttgtctgttgtagtctgtaagatgcgacatagctgtgtctgtgccagtatgccggaatctcagtgcagtgtccagactgcgtatttcagtttttccacaatgtggatagtacatatgaggattatttaagaaaattaaagacttcactttctnnnnnnnnnnnnnnnnnnnnnnnnnnnnnnnnnnnnnnnnnnnnnnnnnnnnnnnnnnnnnnnnnnnnnnnnnnnnnnnnnnnnnnnnnnnnnnnnnnnnnnnnnnnnnnnnnnnnnnnnnnnnnnnnnnnnnnnnnnnnnnnnnnnnnnnnnnnnnnnnnnnnnnnnnnnnnnnnnnnnnnnnnnnnnnnnnnnnnnnnnnnnnnnnnnnnnnnnnnnnnnnnnnnnnnnnnnnnnnnnnnnnnnnnnnnnnnnnnnnnnnnnnnnnnnnnnnnnnnnnnnnnnnnnnnnnnnnnnnnnnnnnnacttgaaattttctactagccctggtgaaattatgtgcttaaaaaaaa

SEQ ID NO: 348734 - DNA, 615 bp, Homo Sapiens
  misc_feature (33)..(33): n is a, c, g, or t
  misc_feature (526)..(526): n is a, c, g, or t
  misc_feature (590)..(590): n is a, c, g, or t
tgcgacagtgctaacaatgtgcttgtgtacganttgctgaagaaccatttagagacactttcaagagtagcagaagagacaataaaggattactttgaagctcgccttgctctgctagaaccagtttttccaatcgcatgtcatcgactctgtgagggtccagatttttcaacagatttcaattacaaacccccacagaacataccagaaggctctggcatcctgctgtttatcttccatgcaaactttttgggtaaagaagttattgctcggctctgtggaccgtgtagtgtacaagctgtagttctgaatgataaatttcagcttcctgtttttctggacagtcattttgtttactcattcagccctgttgcaggtcccaataaaactcttcataaggttgacagaagcaccctctgccaaggttaagttggctaataggtgcatacagagtggcagctgccagtggaccaaacaggaagggactggggcggagttctctttcagaccgatttcctatactttntttggacagcagtttgggattcttctaggcacattttgtaaagttttgtctgtaaaccccttgnagttaggctgttgtctgttgtaggt

SEQ ID NO: 348735 - DNA, 522 bp, Homo Sapiens
  misc_feature (39)..(39): n is a, c, g, or t
cccttcaagtgagtgctgagaaacggacgggagccttgnttggtttcctcctcctcaggacaaacaggagagtgtggtgggcagatgggaggagaccaatgtgcaaactgtccgctcagcagactgtgcagtttctgttcttggttgtgctgggggtctcagaaatcttattcaaaattttgctttcctcccccactggttgtccttttcatagacatctcacccatgatagaagggaatcagtccctctaaactattccctaagaacaacaaaaagattatgaaggtgatgatgaggataaagaggatgacgacagacaccatggcatcatgaacccttaactgaaggcttcctaaaggccaggctctgagctctgtgctctatgcagctggtttcatttcatctgcatagtctccacgttattagtgcacatttcatgatgattttacagactagaaaaggcgcaacggagtttcatgtagcttgtaccagatcatgaagtcaaaaagggtcaagtcatc

SEQ ID NO: 348736 - DNA, 844 bp, Homo Sapiens
  misc_feature (363)..(364): n is a, c, g, or t
  misc_feature (601)..(601): n is a, c, g, or t
  misc_feature (665)..(666): n is a, c, g, or t
ttatgaagaagaaattattcattttaagaaagaacttcgagaaccacaatttcgggatgctgaggaaaagtatagagaaatgatgattgttatgaggacaacagaacttgtgaacaaggatctggatatttattataagactcttgaccaagcaataatgaaatttcacagtatgaaaatggaagaaatcaataaaattatacgtgacctgtggcgaagtacctatcgtggacaagatattgaatacatagaaatacggtctgatgccgatgaaaatgtatcagcttctgataaaaggcggaattataactaccgagtggtgatgctgaagggagacacagccttggatatgcgaggacgatnngcagtgcttgggaacaaaaggggtatttagcctcactcatcattcgcctggccctgcctgaaacgttctgcctcaactgtggcatcattgccttggatgagccaacaacaaatcttgaccgagaaaacatggaatctcttgcacatgctctggttgagataataaaaagtcgctcacagcagcggaacttccagcttctggtaatcactcatgatgaagattttgtggagcttttangacgttctgaatatgtggagaaattctacaggattaaaaaagaacatcgatcagtgctcaaaanncatacactcaccccaccccaaataacaataaaaattgtcgggccgcctcgggccctcgaaaaaacttttctaaacccttccttttggccccccgggcccctttaggtaaattgaacctgggtcaataacctgttttccctaaggaaaacccgggggcaaggacaagagggcttgggaa

SEQ ID NO: 348737 - DNA, 1196 bp, Homo Sapiens
  misc_feature (86)..(94): n is a, c, g, or t
  misc_feature (131)..(189): n is a, c, g, or t
  misc_feature (1179)..(1179): n is a, c, g, or t
ggggctgcgggcgcctgagcggctcttcagcgtttgcgccggcggctgccgcgtctctctcggctcccgcttcctttgaccgcctnnnnnnnnnggcccggcggcgcccgcctcctccacggccactccgnnnnnnnnnnnnnnnnnnnnnnnnnnnnnnnnnnnnnnnnnnnnnnnnnnnnnnnnnnncgccgccaccgcccaggaccgccggccgggggacgagctcggagcagcagccagagtttattaaccacttaacctctcagaactgaacaaagacaacattgttcctggaacgccctctttttaaaaaagaaagcataacccctactgtagaactaaatgcactgtgcatgaaacttggaaaaaaaccaatgtataagcctgttgacccttactctcggatgcagtccacctataactacaacatgagaggaggtgcttatcccccgaggtacttttacccatttccagttccacctttactttatcaagtggaactttctgtgggaggacagcaatttaatggcaaaggaaagacaagacaggctgcgaaacacgatgctgctgccaaagcgttgaggatcctgcagaatgagcccctgccagagaggctggaggtgaatggaagagaatccgaagaagaaaatctcaataaatctgaaataagtcaagtgtttgagattgcacttaaacggaacttgcctgtgaatttcgaggtggcccgggagagtggcccaccccacatgaagaactttgtgaccaaggtttcggttggggagtttgtgggggaaggtgaagggaaaagcaagaagatttcaaagaaaaatgccgccatagctgttcttgaggagctgaagaagttaccgcccctgcctgcagttgaacgagtaaagcctagaatcaaaaagaaaaccaaccccatagtcaagccacagacaagccccaaaatatgggccagggggatccatcccgattaaccgaactggccccaaatccagcagggaaaaaaaggagaaaggagccagaagtacacgcctcctcacaggaccggagggcttcccgggcccgcaggggaggtttgtggaagccacggggaaaggttggaaaaaccccccctgcccaaaagaaacgggcacccaacccagaaggggggcccaaggcgccaatggcagnccggaaaaacttgccgg

SEQ ID NO: 348738 - DNA, 1335 bp, Homo Sapiens
  misc_feature (57)..(57): n is a, c, g, or t
  misc_feature (82)..(82): n is a, c, g, or t
  misc_feature (134)..(192): n is a, c, g, or t
ccgggatccgcgggcgcctgagcggctcttcagcgtttgcgccggcggctgccgcgntctctctcggctcccgcttcccttnaccgcctccccccccggcccggcggcgcccgcctcctccacggccactccgnnnnnnnnnnnnnnnnnnnnnnnnnnnnnnnnnnnnnnnnnnnnnnnnnnnnnnnnnnncgccgccaccgcccaggaccgccggccgggggacgagctcggagcagcagccagagtttattaaccacttaacctctcagaactgaacaatagacaacattgttcctggaacgccctctttttaaaaaaggtagaactttagacttcatagcactgaattaacctgcactgaaagctgtttacctgcatttgttcacttttgttgaaagtgaccatgtctcaagttcaagtgcaagttcagaacccatctgctgctctctcagggagccaaatactgaacaagaaccagtctcttctctcacagcctttgatgagtattccttctactactagctctctgccctctgaaaatgcaggtagacccattcaaaactctgctttaccctctgcatctattacatccaccagtgcagctgcagaaagcataacccctactgtagaactaaatgcactgtgcatgaaacttggaaaaaaaccaatgtataagcctgttgacccttactctcggatgcagtccacctataactacaacatgagaggaggtgcttatcccccgaggtacttttacccatttccagttccacctttactttatcaagtggaactttctgtgggaggacagcaatttaatggcaaaggaaagacaagacaggctgcgaaacacgatgctgctgccaaagcgttgaggatcctgcagaatgagcccctgccagagaggctggaggtgaatggaagagaatccgaagaagaaaatctcaataaatctgaaataagtcaagtgtttgagattgcacttaaacggaacttgcctgtgaatttcgagtctttccctctgaaacaggtggcccgggagagtggcccaccccacatgaagaactttgtgaccaaggtttcggttggggagtttgtgggggaaggtgaagggaaaagcaagaagatttcaaagaaaaatgccgccatagctgttcttgaggagctgaagaagttaccgcccctgcctgcagttgaacgagtaaagcctagaatcaaaaagaaaacaaaacccatagtcaagccacagacaagcccagaatatggccaggggatcaatccgattagccgactggcccagatccagcaggcaaaaaaggagaaggagccaga

SEQ ID NO: 348739 - DNA, 692 bp, Homo Sapiens
atcaggccaaatcggccgagctcgaattcgtcgagagcggtcgggccacgcccacctgtcctgcagcactggatgctttgtgagttggggattgttgcgtcccatatctggacccagaagggacttccctgctcggctggctctcggtttctctgctttcctccggagaaataacagcgtcttccgcgccgcgcatggagcctcccggccgccgcgagtgtccctttccttcctggcgctttcctgggttgcttctggcggccatggtgttgctgctgtactccttctccgatgcctgtgaggagccaccaacatttgaagctatggagctcattggtaaaccaaaaccctactatgagattggtgaacgagtagattataagtgtaaaaaaggatacttctatatacctcctcttgccacccatactatttgtgatcggaatcatacatggctacctgtctcagatgacgcctgttatagagaaacatgtccatatatacgggatcctttaaatggccaagcagtccctgcaaatgggacttacgagtttggttatcagatgcactttatttgtaatgagggttattacttaattggtgaagaaattctatattgtgaacttaaaggatcagtagcaatttggagcggtaagcccccaatatgtgaaaaggttttgtgtacaccaccttcc

SEQ ID NO: 348740 - DNA, 850 bp, Homo Sapiens
  misc_feature (33)..(33): n is a, c, g, or t
  misc_feature (45)..(45): n is a, c, g, or t
  misc_feature (122)..(122): n is a, c, g, or t
aggaaagacagtggtggcaatgctgagagagtnccgaggaaagantggagagtttgtagccaagacgaacatttatagtaagctcccaacagccaaggacttgaaagccatcaccgtccagntggacacgagagcaagaatttcactacatcctgccgggcccttgctagttgtgcagagcacaaggtcctaggcaagccagtgtcggggttaaaacactgcttccgtcgaaagtagagttaagaatggaatggaaaaagactgaggcctgcatagcgcacgccacggggatttcaaaatggattcgaaaacactccacaatgcaatcttgggagatcgcacatgaaaaggaaggaattcaatgcaggtgagcctcaatagacacccggcgtgcttctgaaatagatgaaaattgaactgttttccaaatactttgagagggttaccaatgacaggaatcctgttcgtctgatcactaatcatcatctcgcttacacagtcaggacagctgtggagtaggtcggcttagagggattctcagggcaggttcaggctagtgttcagtctggccttgaattgtgttctgcagagtcccacagcaggctccgcaggaggccagggtaccccttctagaaaacccaagttttccagctggacaggcctgactcctagtcctgtttctagccctcgtttaactatgcaaccagggcaagctacacaacctttctgagtctgtcatctatacacacaggagtgttaccttgtagggctgttatgaagcctaaacaaataatgtgtgcaaacacctagcaccgacgcgtgggtcgacgatatcccggacttcgggacc

SEQ ID NO: 348741 - DNA, 1288 bp, Homo Sapiens
gcttctttatctcgggactctcaggcgcagcgggggcgggatataaagctggttgacgtcaattacaaccactcgtcaagcagactgaacttgaagaactgataactctacgaattgcatctcaagaaaaggctgttatcccagctctctactcccattggatttttgtgagaccttgagggtgggagcttttggcggcaaccaatcgagggtcagcgaggaggaggaggaggcggggcaggtgggctatggttgcttggagagtgcatccggcccggtacttgtgatcggaggagagccggatcgtccttccttgaaccctctgggtagggctgtgctgaggggctgggcggggagcacaggccgtgtccgctcgcttgcaccttttcagactgccgtgtcaggcctcgagccgggcccacctggagccctcccctgcccatcccggcccccagcggcccgatatcctgccgcccgtgcccatgaatgggccgggctcggtcatccccagtcccgtcgcggccactgacccttgagatcagcccctcccctccccaccttccccgtcccaggccaagcccagggcccgaagccccacccactcgcgtctctagcagccgctcttgtcctctgggtacggctcgcggggagtgttggttaccatggtgaagcttggcagcctaaatgcatcctgtgcaggagacccagcagtgggcaagaccgccctggcacagatcttccgcagtgatggagccccatttccagataaagctacaccctgacaacaggtaatggattaggtggtgaagacagtgccagttcctgacacgggagacagtgtggaactcttcatttcttgactctgctggcaaggagctgttttcggaaatgctgcgataaattctgggagagccccaatgtcttatgtctcgtctatgatgtgagccaatgaagaatccttcaacaactgcagacaagtggctaggagaaggctcggtcacaggctaccaggcatctctcttccaggtgtatttagttgggaagcaagacagacctggccggcagacgagcagtggaatcagctgaggacccagtcatgggcgctggatcagggcatggaatgttctgaaacatccgtgaaagatgatggaaaacttcgaagcccgtttccactgccttgcaagacagttccaccagctgtacccgggagaaggtggaggttttccgggcctagcatgacgagctggagcagatcgtgctgcacaacataaccccgatgtttacctcc

SEQ ID NO: 348742 - DNA, 815 bp, Homo Sapiens
gggcctgaatgccacccactcgcgttctagcagcgctcttgtctctgggtacggctcgcgggagtgttggttaccatggtgaagctggcagccaaatgcatcctggcaggagacccagcagtgggcaagaccgccctggcacagatcttccgcagtgatggagcccatttccagaaaagctacaccctgacaacaggaatggatttggtggtgaagacagtgccagttcctgacacgggagacagtgtggaactcttcatttttgactctgctggcaaggagctgttttcggaaatgctggataaattgtgggagagtcccaatgtcttatgtctcgtctatgatgtgaccaatgaagaatccttcaacaactgcagcaagtggctggagaaggctcggtcacaggctccaggcatctctctcccaggtgttttagttgggaacaagacagacctggccggcagacgagcagtggactcagctgaggcccgggcatgggcgctgggccagggcctggaatgttttgaaacatccgtgaaagagatggaaaacttcgaagcccctttccactgccttgccaagcagttccaccagctgtaccgggagaaggtggaggttttccgggccctggcatgacgagctggagcagatcgtgctgcacaaccggagaagacagaattacctctgctcttttaatatataatgatggctttaaataaaattaggagaaaatgtcgaagaatggcatatctgacgtgtgtacctcaattggaaccggttgtgatatgaagaaaatcgaggggcgccactaaaca

SEQ ID NO: 348743 - DNA, 598 bp, Homo Sapiens
  misc_feature (515)..(515): n is a, c, g, or t
  misc_feature (524)..(524): n is a, c, g, or t
  misc_feature (530)..(530): n is a, c, g, or t
  misc_feature (536)..(536): n is a, c, g, or t
  misc_feature (539)..(539): n is a, c, g, or t
  misc_feature (544)..(544): n is a, c, g, or t
  misc_feature (555)..(555): n is a, c, g, or t
  misc_feature (566)..(566): n is a, c, g, or t
tttttttagagaaagtctggaggtttactcaacaacgttcacaatcacaattgtacatggtaaatcagtctttcacaaaggcttatttttccaggcaggaggagaggctggtggtcttgagcttttggcctggaattccagtctgaattttcaaatattccctgcctccaacccctttgggatcctagtcttcaagccaataacagagcaggagtctgaccctgttctgttgcctggcacggctgaatcaaagccattctggaagcagatgttaaggtgaacttgtcacttggtatgtaggtccgactcccatcccagaggtggcagtgggccttggctcaagatcaagtttgaactaaaatattacttggatttttcacaaagagtgtccgttgaaagcaataaggaattccagaacagaactgcacttcttgtccctctctcacacttacaaagcttcagaaaacattaaaaatgcattacctcctaggaattacaaaagatcacccaactgnacaaactanatatcnccgaancanagacnccgatccccanttaccaacggnaaagggcttgcaaccccttttggggaccccaa

SEQ ID NO: 348744 - DNA, 985 bp, Homo Sapiens
  misc_feature (4)..(4): n is a, c, g, or t
  misc_feature (10)..(11): n is a, c, g, or t
  misc_feature (15)..(15): n is a, c, g, or t
  misc_feature (19)..(19): n is a, c, g, or t
  misc_feature (22)..(23): n is a, c, g, or t
  misc_feature (26)..(26): n is a, c, g, or t
  misc_feature (30)..(30): n is a, c, g, or t
  misc_feature (34)..(34): n is a, c, g, or t
  misc_feature (37)..(37): n is a, c, g, or t
  misc_feature (49)..(49): n is a, c, g, or t
tcangttggnncttntganaanntanaatntcanccncctgtacacctnttttgctcaattcaaggacaatagctcagggatttctcttccaagaatcctcagggtagctgccatacagcttctgcgattcaggacaacgtcaatgttctgggccaccaaatctgggtctgaacggaggcctttgaggtcaagggcttgttgggagccatcgtatcgtttgctcatgatcagctttagctgttctacttgttctggcttcagttcattcagtatagtgtggggtggagcagaagagttgatgatgatagatatccttcggttctcccgatccaaaatcttatagttgacagccttcaatgcagaggcagtactggcgtcttcaacgaagaactgggcccgtgtattctcatagtgaaactcaataggggtgaagggcacactgcacttgctctgaatcatgctcaggagccatgccttgtcatactttctgccataaggaattgtaatcttgaaccagttctttgaggtcccatcctggctggtgccagcccctcctctctctggaggagctctgtctctccgcacagtaacatgaatgcgatctcgatcatgccaagtatcaccccgacggttaggtcgggtggtataggggttgtatcgtactcggggaccatcctgggcatcactcattgccacatctccatcatcttcctcaaggcgggaagaccgaataccagaaccgcctcttccagacctacggtttccttcaccatatttccaccggaagggaccccggcctttcttctttctttgagggaaattaacgcgttcatcatcgtgttcgctgtacgacttcccctcgtccgccatgccacagcgaagatcaagggcgggctcaggcgctggccgctacgccggcaaacaacctaactcccaagcgctcgccacccaggcctcgctaccttaaaccgttagagtactgcg

SEQ ID NO: 348745 - DNA, 973 bp, Homo Sapiens
  misc_feature (883)..(883): n is a, c, g, or t
  misc_feature (904)..(904): n is a, c, g, or t
  misc_feature (915)..(915): n is a, c, g, or t
  misc_feature (932)..(932): n is a, c, g, or t
  misc_feature (940)..(940): n is a, c, g, or t
  misc_feature (952)..(952): n is a, c, g, or t
  misc_feature (958)..(958): n is a, c, g, or t
ggccagcgcctgagcccgcccttgatcttcgctgtggcatggcggacgaggggaagtcgtacagcgaacacgatgatgaacgcgttaatttccctcaaagaaagaagaaaggccggggtcccttccggtggaaatatggtgaaggaaaccgtaggtctggaagaggcggttctggtattcggtcttcccgccttgaggaagatgatggagatgtggcaatgagtgatgcccaggatggtccccgagtacgatacaacccctataccacccgacctaaccgtcggggtgatacttggcatgatcgagatcgcattcatgttactgtgcggagagacagagctcctccagagagaggaggggctggcaccagccaggatgggacctcaaagaactggttcaagattacaattccttatggcagaaagtatgacaaggcatggctcctgagcatgattcagagcaagtgcagtgtgcccttcacccctattgagtttcaccatgagaatacacgggcccagttcttcgttgaagacgccagtactgcctctgcattgaaggctgtccaactataagattttggatcgggagaaccgaaggatatctatcatcatcaactcttctgctccaccccacactatactgaatgaactgaagccagaacaagtagaacagctaaagctgatcatgagcaaacgatacgatggctcccaacaagcccttgacctcaaaggcctccgttcagacccagatttggtggcccagaaacattgacgttgtcctggaatcgcagaagctgtatgggcagctacccctgaggaatcatttgaaggaggaacatccctggaggtatttgttccttggaactttgaggcaacaacagggntgttacagggtgggatggacntgttttaggcnttgtttcaggaaggggnacccaacntggaaggttccntaaacntttttgggaattgga

SEQ ID NO: 348746 - DNA, 2326 bp, Homo Sapiens
aaaatgcgggggcgcccggcgtagggacacttcggtcctgagcgcttgggagttaggttgtttgccggcgtagcggccagcgcctgagcccgcccttgatcttcgctgtggcatggcggacgaggggaagtcgtacagcgaacacgatgatgaacgcgttaatttccctcaaagaaagaagaaaggccggggtcccttccggtggaaatatggtgaaggaaaccgtaggtctggaagaggcggttctggtattcggtcttcccgccttgaggaagatgatggagatgtggcaatgagtgatgcccaggatggtccccgagtacgatacaacccctataccacccgacctaaccgtcggggtgatacttggcatgatcgagatcgcattcatgttactgtgcggagagacagagctcctccagagagaggaggggctggcaccagccaggatgggacctcaaagaactggttcaagattacaattccttatggcagaaagtatgacaaggcatggctcctgagcatgattcagagcaagtgcagtgtgcccttcacccctattgagtttcactatgagaatacacgggcccagttcttcgttgaagacgccagtactgcctctgcattgaaggctgtcaactataagattttggatcgggagaaccgaaggatatctatcatcatcaactcttctgctccaccccacactatactgaatgaactgaagccagaacaagtagaacagctaaagctgatcatgagcaaacgatacgatggctcccaacaagcccttgacctcaaaggcctccgttcagacccagatttggtggcccagaacattgacgttgtcctgaatcgcagaagctgtatggcagctaccctgaggatcattgaagagaacatccctgagctattgtccttgaacttgagcaacaacaggctgtacaggctggatgacatgtctagcattgttcagaaggcacccaacctgaagatcctaaacctttctggaaatgaattgaagtctgagcgggaattggacaagataaaggggctgaagctagaagagctctggctcgatggaaactccctgtgtgacaccttccgagaccagtccacctacatcagcgccattcgcgaacgatttcccaagttactacgcctggatggccatgagctacccccaccaattgcctttgatgttgaagcccccacgacgttaccgccctgcaagggaagctattttggaacagaaaacttgaagagtctggtcttgcacttcctgcaacagtactatgcaatttacgactctggagaccggcaagggctcctggatgcctaccatgatggggcctgctgttccctgagcattcctttcattcctcagaaccctgcccgaagcagcttagccgagtatttcaaggatagcagaaatgtgaagaagcttaaagaccctaccttgcggttccggctgctgaagcacacgcgtctcaacgttgttgccttcctcaatgagttgcccaaaacccagcacgacgtcaattccttcgtggtagacataagcgcccagacaagcacattgctgtgtttttctgtcaatggagtcttcaaggaagtggacggaaagtcccgggattctttgcgagccttcacccggacattcattgctgttcctgctagcaattcagggctatgtattgtaaatgatgagctatttgtgcggaatgccagttctgaagagatccaaagagccttcgctatgcctgcacccacgccttcctccagcccggtgcccaccctctctccagagcagcaggaaatgttgcaagcattctctacccagtctggcatgaacctcgagtggtcccagaagtgccttcaggacaacaactgggactacaccagatctgcccaggccttcactcatctcaaggccaagggcgagatcccagaagtggcattcatgaagtgatcgtagtcatgcctcagaagcagtcccccctgtaaatagtccttggatattaccgtctggttgtcgtctgtcatctcctcctgtctggcccgaggccgccccgtgactgtgaccgagggagggagggctgcctgatccctctcctcgcctgccttctggaagacttcagaagattgagcctcactggtgccaggaagccaaagcttactttgtagaactgacactaaactacccgaaggacttaggtgctttgtgtacttaaccccaggacctccttactttttaatataaagagtgatgttgtatttcgtgttctgcactttttaatataaagagtgatgttgtatttcgtaa

SEQ ID NO: 348747 - DNA, 1000 bp, Homo Sapiens
ggacggcagtactctccagggtataaggtagcgaggctgggtggcgagcgcttgggagttaggttgtttgccggcgtagcggcagcgcctgagcccgccctggatcttcgctgtggcatggcggacgaggggaagtcgtacagcgaacacgatgatgaacgcgttaatttccctcaaagaaagaagaaaggccggggtcccttccggtggaaatatggtgaaggaaaccgtaggtctggaagaggcggttctggtattcggtcttcccgccttgaggaagatgatggagatgtggcaatgagtgatgcccaggatggtccccgagtacgatacaacccctataccacccgacctaaccgtcggggtgatacttggcatgatcgagatcgcattcatgttactgtgcggagagacagagctcctccagagagaggaggggctggcaccagccaggatgggacctcaaagaactggttcaagattacaattccttatggcagaaagtatgacaaggcatggctcctgagcatgattcagagcaagtgcagtgtgcccttcacccctattgagtttcactatgagaatacacgggcccagttcttcgttgaagacgccagtactgactctgcattgaaggctgtcaactataagatttgggatcgggagaaccgaaggatatctatcatcatcaactcttctgtccacccaaatatactgaatgaactgaagccagaacaagtagaacagtaaagctgatcatgaagcaaaacgatacgatggtcccaaaaagcctttgacctcaaaggcctccgttcaagacccaagattgggtgggccaagaaccattgacgttgtcctgaatcggcagaagctggtatgggaggtaccctaagggtcttggaggagaacatccctgaggtattggtgttggacttggagcacaccggctgtgcagggtgggttgacagtctagctttggtccgagggaccactgagatcg

SEQ ID NO: 348748 - DNA, 485 bp, Homo Sapiens
  misc_feature (31)..(31): n is a, c, g, or t
  misc_feature (38)..(38): n is a, c, g, or t
  misc_feature (56)..(56): n is a, c, g, or t
  misc_feature (74)..(74): n is a, c, g, or t
  misc_feature (126)..(126): n is a, c, g, or t
  misc_feature (222)..(222): n is a, c, g, or t
  misc_feature (269)..(269): n is a, c, g, or t
agggtgcccttcaaggaacaaacaaatgggnaactaanacccaaaatctgccccangcccttcaactcaacctnaaaggcccaagggccgaagatcccccagaaagtggccattccatgaaagtgnaaacgtaagtcatgccctcaagaaagcagtcccccctgtaaaatagtccctggaatattaccgtctggttgtccgtctgtcatctccctccctgtnctgcccgaggccgccccgtgactgtgaaccgagggagggagggctgncctgatccctctcctcgcctgccttctggaagacttcagaagattgagcctcactggtgcccaggaagccaaagcttactttgtagaactgacactaaactacccgaaggacttaggtgctttgtgtacttaaccccaggacctccttactttttaatataaagagtgatgttgtatttcgtgttctgcactttttaatataaagagtgatgttgt

SEQ ID NO: 348749 - DNA, 457 bp, Homo Sapiens
  misc_feature (89)..(89): n is a, c, g, or t
  misc_feature (94)..(94): n is a, c, g, or t
  misc_feature (121)..(121): n is a, c, g, or t
tgggcagttagagacaaaccaatttaattccatgtcttcaattgtcacgcatttcttcttttactctttgaaactattctttgagtcanttttnatggttctcagaagcccaaaatacacnaacttttagcacataaacaccaacgatggcctctttttgaggagttatgcatagacccactctagagtaatgatggtccctgtggtatatactttctcctactctagcaaacatgtagtttaatcttaatgtgttgtttccataagtgacatgaagtggatagattctcaattgttatgtccacttattcactaggtaaattttcagttttaatacttttctccttaccccttcctttgatcatttcatgtgaatattctatttgtatgatacactgtatttcaataaattccttgttgatgtacccttaaattgaagaaatttaagctgcaaaac

SEQ ID NO: 348750 - DNA, 1058 bp, Homo Sapiens
  misc_feature (707)..(707): n is a, c, g, or t
ggggcacagctgtgtttggctgcagggccaagagcgctgtcaagaagacccacacgcccccctccagcagctgaattcctgcagctcagcagccgccgccagagcaggacgaaccgccaatcgcaaggcacctctgagaacttcaggatgcagatgtctccagccctcacctgcctagtcctgggcctggcccttgtctttggtgaagggtctgctgtgcaccatcccccatcctacgtggcccacctggcctcagacttcggggtgagggtgtttcagcaggtggcgcaggcctccaaggaccgcaacgtggttttctcaccctatggggtggcctcggtgttggccatgctccagctgacaacaggaggagaaacccagcagcagattcaagcagctatgggattcaagattgatgacaagggcatggcccccgccctccggcatctgtacaaggagctcatggggccatggaacaaggatgagatcagcaccacagacgcgatcttcgtccagcgggatctgaagctggtccagggcttcatgccccacttcttcaggctgttccggagcacggtcaagcaagtggacttttcagaggtggagagagccagattcatcatcaatgactgggtgaagacacacacaaaaggtatgatcagcaacttgcttgggaaaggagccgtggaccagctgacacggctggntgctggtgaatgccctctacttcaacggccagtggaagactcccttccccgactccagcacccaccgccgcctcttccacaaatcagacggcagcactgtctctgtgcccatgatggctcagaaccaacaagttcaactatactgagttcaccacgcccgatggccattactacgacatcctggaactgccctaacacgggggacaccctcagcatgttcattgctgcccctttatgaaaaaagaagggcctctctctgccctcaccaaaattctgagtgcccagctcatcaaccaactggaaaggcaacattgaccaagctggccccggcctcctgggttcctggccaaa

SEQ ID NO: 348751 - DNA, 581 bp, Homo Sapiens
  misc_feature (539)..(539): n is a, c, g, or t
  misc_feature (550)..(550): n is a, c, g, or t
ggggccagaaatacattctcaaaacatatagaacaacttaaacaggaacatataagaaaaaggagagaagagtatataaatactttaccaagagcttttaacactcttttgccaaatctagaagagattgaacatttgaattggtcagaagctttgaagttaatggaaaagagagcagatttccagttatgttttgtggtgctagaaaaaactccttgggatgaaactgaccatatagacaaaattaatgataggcggattccatttgacctcctgagcactttagaagctgaaaaagtctatcagaaccatgtacagcatctgatatccgagaagaggagggtggaaatgaaggaaaaattcaaaaagactttggagaaaaattcaattcatttcaccagggcagccatgggaggaagttatgtgctttgttatggaggatgaagcctacaaatatatcactgaggctgatagcaaagaggtatatggtaggcatcagcgagaaatagttgaaaaagcccaaagaagagtttcaaganaatgctttttnagcattctgaacttttttatggattttagga

SEQ ID NO: 348752 - DNA, 537 bp, Homo Sapiens
ggaggtgttttctatctactaggagaccgccgttccctggcgccagctgagaccaattattacttcagagagacagttaacaaccacctgaccatcacctgatggtctcccaacactcctggtgtgaggtatgggagccctttcctgccctgctcatacccgactagctaccaagtataacaatagcactcaaagtgatagctaacattttggtcacctttattaaccagattctaccatgacacatgtgttgtataaatgatttcttttcattgccatagcaactccaataggctggtattcattatatctgtttttttaggaaactgaaattgagactcagagaggttaagtaacatccccaaaccagacagctaatacgaaacaaagccatatttgatctctcatcttttaaattaacataaaatatgaaatgaaaaattctgagaaaatataagtgaaaatgggtccagtttagggttaagaaagttatttctaggccaaaatccaagaaggaaactgtaaataaatatttta

SEQ ID NO: 348753 - DNA, 832 bp, Homo Sapiens
ttagcgggatatgtcgacccgcgcgtcggccacgcggtcgctttggcgaaggcccgtggagggccctggccaaagtgaacagcatcagccccggctccccagccagcatcgcgggtctgcaagtggatgatgagattgtggagttcggctctgtgaacacccagaacttccagtcactgcataacattggcagtgtggtgcagcacagtgaggggaagcccctgaatgtgacagtgatccgcaggggggaaaaacaccagcttagacttgttccaacacgctgggcaggaaaaggactgctgggctgcaacattattcctctgcaaagatgattgtccctggggaacagtaacaggaaagcatcttcccttgccctggacttgggtctagggatttccaacttgtcttctctccctgaagcataaggatctggaagaggcttgtaacctgaacttctgtgtggtggcagtactgtggcccaccagtgtaatctccctggattaaggcattcttaaaaacttaggcttggcctctttcacaaattaggccacggccctaaataggaattccctggattgtgggcaagtgggcggaagttattctggcaggtactggtgtgattattattattatttttaataaagagttttacagtgctgatatgaccctgttgtcaacccagcctgaatttcttatgaccctcccaaaccaaagctcagatggggtcagaaagagcttcatagaaagttgggcaaaacaggctagcaattgcaaagtcaaggctttgaccaacatattcttttgcacctgaggccttgctgctgtgggatag

SEQ ID NO: 348754 - DNA, 1104 bp, Homo Sapiens
gcttcccaagaaattaattttcccggcgccctttttggcccaccaaatcccagggggaattttcttattttaggggcccgtggccctaatttggtgaaaagaggcccaagccctaaagttttttaggaatgctttaatcccacgggagattaccactggtggcccacagtactgccaccacaacagaagttcaggttacaagcctcttccagatccttatgcttcagggagagaagacaagtttggaaatcccttagaccccaagtccagggcaagggaagatgctttcgctgttactgttccccagggacaatcatctttgcagaggaataatgttgcagcccagcagtccttttcctgcccagcgtgttggaacaagtctaagctggtgttttccccccctgcggatcactgtcacattcaggggcttcccctcactgtgctgcaccacactgccaatgttatgcagtgactggaagttctgggtgttcacagagccgaactccacaatctcatcatccacttgcagacccgcgatgctggctggggagccggggctgatgctgttcactttggcgaaggcccgtggagggccctggctctcactctgacccagtttgcggctcatggcctctttgtgggcctcagccatgtcccgggcctgcttctccttgtcgcgagcgtgcagctggtgcagggcctcctccacctgcttcatcactgccttgtgatcattctgcaggcatatgatgttgtgcctggcggtgcggacttggtacaggtccacgtctgaccgggggtagccctcacagtccaccagcggctcgttcatcccaatgcctttttggctttccagcacgtcatagttggccttgatctgcgcttctatctcctccttgcgccgcatcagctcctggacgtcgctgacagtcacggcgccggcctgcgaggagcctccgctctgcctcgcttcctcgtcggacatcgtgaaccccgggccgcgactccagagacccggctcccgggctagggacgacgccccagtcgaccgtaactacggctccgcccatgcgccaaaacaccacagccgtccgcgaacgcgat

SEQ ID NO: 348755 - DNA, 783 bp, Homo Sapiens
aaccagacatctacatcatggactctgaagtagtatgtgctgctatgtccagtttgtacaacactcaactgtgttcttcagtatagtcacttgtgcccgtagcagccatgtgataaagaaaaaatgagtatcaaaaccaactccatcgtaacagaaaggcaaattgatttccatttcaaaactgcctgtgtaaagcattacagaatcctggaccactgaataccaccattctctgttatcatgagtatgtcaattaaacagtaatttctaattaagagcggaaaaattttataatacaaagaaacatccatattgcaatttctgtttacaattgcacacagaagtacagtgtacgtaagaaatacatgtctgcatataacaaggtatgtacattggcaagtgatgtctccaatgttgaggtgatcaaacctcctagccttaattggcagttgaaaaaaatatatttatttcaatttgtggtaaaagtttattaagagccaagtttacctgcaagtgaagaaaaatgcagcaacgaagaacagggaacacggggcacataataatattctaagactttgtgccattaagttaaaaatatctgttcataagaaaattgggttccttttccacctcccacccccaaattggaattttcaggctttaaaatttaagtaattccacctggtctaaaaatataatctcttgccattttttcttgcaactgttacttgtgagggtttaatttggagataatgacttaataggtttctctttggagtgaag

SEQ ID NO: 348756 - DNA, 722 bp, Homo Sapiens
gaacagtgtgttggcataatctttagaccgtgccacaaagtcctggggacagtccttgagagccacatacattctaggcactcggtggtctgagggagaaaataacgggatctcttccttgtcaaacttgtacagtatgtggtgactttttccaaatacagccttttgtacatgacttagagacaaattttgtacatgaaaccccagatagactataaataattctaaacaaacaagtaggtagatatgtatgtaattgcttttaaatcatttaaatgcctttgtttttggactgtgcaaaggttggaagtgggtttgcatttctaaaatggtgacttttattctgcaagagttcttagtaacttcttgagtgtggtagactttggaacatgtaaattttttgcttgtaatgttatcctgtggtaggattttggcaggtacacacactgccctattttattttgagtctaagttaaatgttttctgaaaagagatacatgcactgaactctttccactgcgaatcaagatgtggtaatataaaaggatcaagacaaatgagatctaatactactgtcagttttaatgtccactgtgttttatacagtatctttttttgttcactttggaaatttttactaaaaattgcaaaaaataaagtattgtgcaaagatgtaaggttttttgaaacttgaaatgcattaataaatagacgattaaatc

SEQ ID NO: 348757 - DNA, 1314 bp, Homo Sapiens
cggtccggaattcccgggatagcggccccaggcgcaggcgggtcccgcagcggggcccgtgccgcccaggcgatcagccccttcacttaacccgcttccctcctagcaggcccgagtcccctagcctcagcctcacgcagccagagcaaggggaagagggagtccttcgtgagttcgccgctcacattcggcggtgggaaaccgatccgaagatgcttttgtaggcgaaacgctcagctcgcgcggctctgaaccaccggggagcagcggctgctgctagtcggactacgccagcacctccttgtccagcccgggagcagccccgcctcgctcagggccgcgtgcgcgtgcgcggctccaggggcggggcctgctcgcgtcccgggtgcctggataccgagcgcgtccgtagtgggcggctggcgctagggaactgcagggtctagggtgttgttggagtggcagttggtccgaatttctcccgaagcccgcggaggagcggcgcgccgcgattcaccagcctggtcccttctgcggagagcgatgccgcttcccgacaccatgttctgcgctcagcagatccacattcccccggagctgccggacatcctgaagcaattcaccaaggctgccatccgcacccagccggccgacgtgctgcggtggtccgcgggctatttttcagctctgtcgagaggagatccacttcctgtaaaggacagaatggaaatgcccacggcaacccagaaaacagacacaggcctgactcaaggactcctgaaagttttgcacaagcagtgtcaccacaagcggtatgtggaattaacagatcttgagcagaagtggaagaacttgtgcctgccgaaggaaaaattcaaagcgctcttacaactggatccttgtgaaaacaaaatcaagtggataaactttttagcgcttggatgcagcatgcttggtgggtccttgaacactgcgctgaagcacctgtgcgagatcctcacggacgatccggagggcgggcccgctcgcatccccttcaagacgttttcctacgtttaccgctacttggccagattagactcagatgtgtctcccttggagacggaatcctaccttgcctctctaaaggaaaatatagacgccaggaagaacggcatgataggtctttcagatttcttctttccaaagaggaaacttttagaaagcattgaaaactctgaagatgtaggccattaatacagagaagaatacattttaatgtcaaaatagtgctctttaaaattctggcaccaaatacaacttaccctgaatcac

SEQ ID NO: 348758 - DNA, 1172 bp, Homo Sapiens
  misc_feature (12)..(12): n is a, c, g, or t
ctcgcgtcccgnggtgcctggataccgagcgcgtccgtagtggcggctggcgctagggaactgcagggtctagggtgttgttggagtggcagttggtccgaatttctcccgaagcccgcggaggagcgggtaagagccccgcgaatccggccccaacctcgggaacgggatgggaggcggccctggccgcaagccccgcgctgctagcgggtccaccgcgtcgtagccgacagccgcccttcttcctcgcagcgcgccgcgattcaccagcctggtcccttctgcggagagcgatgccgcttcccgacaccatgttctgcgctcagcagatccacattcccccggagctgccggacatcctgaagcaattcaccaaggctgccatccgcacccagccggccgacgtgctgcggtggtccgcgggctatttttcagctctgtcgagaggagatccacttcctgtaaaggacagaatggaaatgcccacggcaacccagaaaacagacacaggcctgactcaaggactcctgaaagttttgcacaagcagtgtcaccacaagcggtatgtggaattaacagatcttgagcagaagtggaagaacttgtgcctgccgaaggaaaaattcaaagcgctcttacaactggatccttgtgaaaacaaaatcaagtggataaactttttagcgcttggatgcagcatgcttggtgggtccttgaacactgcgctgaagcacctgtgcgagatcctcacggacgatccggagggcgggcccgctcgcatccccttcaagacgttttcctacgtttaccgctacttggccagattagactcagatgtgtctcccttggagacggaatcctaccttgcctctctaaaggaaaatatagacgccaggaagaacggcatgataggtctttcagatttcttctttccaaagaggaaacttttagaaagcattgaaaactctgaagatggaggccttaattccgagaagaatactttttaagggccaaaaagggcctcttaaaattcgggccccaaatcaaacttacccgggatcccaaagaagaaaagtgccgagcggctcgcgccgcctgctatgcgtcctctgctcggggggcggggccttcaagaatccccccgaggggggccggagtttacgcggtacaca

SEQ ID NO: 348759 - DNA, 819 bp, Homo Sapiens
  misc_feature (51)..(51): n is a, c, g, or t
cattctttacacaaaagtcaattcctaaaccctcaaatttcagaacataanaataaatttccatttacagatttcccccttccagttccaaaagtagttattctagagtaaggattcaacacataaaatttagctgaatcaaataaaaaacaatcaccaaatgcaaatatcaattccaaagcacagattttatatatactgctttcatatttcccttttgcttcttttctagataaaagcaggaaattgtaaatattcactaaaaagctcgaaccaagcacattggccttttcaagtaattcagaaaaggtagatcatcaagagaaactcctgagacacagcagtcttcagtgcattcacaagagcctctgactataagctttctctagttaaccgccagaagatggattacttgtgctatgcatgcagatgcactcaattccctttaccagataagctacaaacactctactaccaaccaaacttgtcccttccatcaaaacatttttcatactctttagcaaagtagtcacccctcctaggagaagctaattcaaatacactcattagcatctttggttacaagagcaatatagtgtgtagatgcagttaagagttctaccatggctaagtcaacattggataaaatcctataggtagatataaatgtaacctgcattttctaagctccttataagtcatcatattaagtccagatctttttgaaattttatacttattaagggcagtcatctctcactggggccactttctgtaactcaggtcaattgagaaggtcattacgaagggggatgacac

SEQ ID NO: 348760 - DNA, 1820 bp, Homo Sapiens
  misc_feature (25)..(25): n is a, c, g, or t
ttccagcaggcgtacgcccgcttantggatatcgtcgaccgcgcgtcgccacgcgtcggccggcagcccctccctggcaggaagcgagggtgcggcgcaatccggagaggacgccaggacgacgcccgagttccctttcaggctagaactcttcctttttctagcttggggtagaaggcggagccggagccccggaacccccgccctcggggtgcgaggcggcagcagggccgtcccctacatttgcatagcccctgggacgtggcgctgcacccaagcctcttctcagttggagggaactccaagtcccacagtgccacggggtggggtgcgtcactttcgctgcgttggaggctgaggagaattgagcctgggaggcgggtccggagagggctatggaaagccgccggcggggaatcccggccgtagagggacagtggataggtgcccgaggcctacagctggcctggggctcgtgtctgggcttcggacgttggggcccggtggcccaccctttccgtagttgtcccaaatggagctggaattggatgctggtgaccaagacctgctggccttcctgctagaggaaagtggagatttggggacggcacccgatgaggccgtgagggccccactggactgggcgctgccgctttctgaggtaccgagcgactgggaagtagatgatttgctgtgctccctgctgagtcccccagcgtcgttgaacattctcagctcctccaacccctgccttgtccaccatgaccacacctactccctcccacgggaaactgtctctatggatctagagagtgagagctgtagaaaagaggggacccagatgactccacagcatatggaggagctggcagagcaggagattgctaggctagtactgacagatgaggagaagagtctattggagaaggaggggcttattctgcctgagacacttcctctcactaagacagaggaacaaattctgaaacgtgtgcggaggaagattcgaaataaaagatctgctcaagagagccgcaggaaaaagaaggtgtatgttgggggtttagagagcagggtcttgaaatacacagcccagaatatggagcttcagaacaaagtacagcttctggaggaacagaatttgtcccttctagatcaactgaggaaactccaggccatggtgattgagatatcaaacaaaaccagcagcagcagcacctgcatcttggtcctactagtctccttctgcctcctccttgtacctgctatgtactcctctgacacaagggggagcctgccagctgagcatggagtgttgtcccgccagcttcgtgccctccccagtgaggacccttaccagctggagctgcctgccctgcagtcagaagtgccgaaagacagcacacaccagtggttggacggctcagactgtgtactccaggcccctggcaacacttcctgcctgctgcattacatgcctcaggctcccagtgcagagcctcccctggagtggccattccctgacctcttctcagagcctctctgccgaggtcccatcctccccctgcaggcaaatctcacaaggaagggaggatggcttcctactggtagcccctctgtcattttgcaggacagatactcaggctagatatgaggatatgtggggggtctcagcaggagcctggggggctccccatctgtgtccaaataaaaagcggtgggcaagggctggccgcagctcctgtgccctgtcaggacgactgagggctcaaacacacaacactttaagtggctttctgggctctccatggggtacccag

SEQ ID NO: 348761 - DNA, 228 bp, Homo Sapiens
taatatctccttaattctctatacctgtgagataaagtcctgatcccttaacatagttttatgaaatctggccaaaaattaccttccaacttacagtagcatatgaattccttatacattcctgtcacccaactttgcccacaattttttccatcttatatgacctccactctatctaaaattattaagactcgttccagtcttacctcttccataaagtctaaccta

SEQ ID NO: 348762 - DNA, 507 bp, Homo Sapiens
  misc_feature (434)..(434): n is a, c, g, or t
  misc_feature (451)..(451): n is a, c, g, or t
  misc_feature (465)..(465): n is a, c, g, or t
  misc_feature (475)..(475): n is a, c, g, or t
  misc_feature (490)..(490): n is a, c, g, or t
cggaaatttctcaggataccatgtatctccagtattgtaaagtctgccaagcatacaaggcaccacgttcacatcactgcagaaagtgtaacagatgtgtgatgaagatggaccatcactgtccttggatcaacaactgttgtggttaccaaaatcatgcttcgttcacactgtttctccttttagcaccactgggttgtatccatgctgctttcatttttgtgatgactatgtacacacagctttatcatcggatgaaaataattctcagaaacaaaacttctattgagtcatgggattgaagagaaggctaaagatcgaattcagtattatccaactaggatggaagtctttgtttttccatatggatatgggggaagtagatgggagggaacttttaaacagggtattttacgtgggttcagggggtcccnggaagggaggtgggganttggagtgggcccngttagggggnagggttgttcacccnttacagctttaaccatt
